United States Patent Application Publication US 2024/0327476 A1 - sequence listing, part 31

SEQ ID NO: 34963 - DNA, 4130 bp, Homo sapiens
  source 1..4130: mol_type = unassigned DNA
aaggccccacgtgttccgacccgctaggccccgcgcggctcggatccggcggcgctgtttcggtcgggagtgggtgggagagaagccggggcaggggaggagccgccggagctgtcggagccgtgacacccagggcagctacactcagaagccacaaggaatgctagtggagcccctcatccctcccagcttctcttccaagctgccccgtggggcttgatccaggaagctacttcagaaaggttgtgggatagccttgggaggagggcccttggaagaaaatcctcgctgtgtccaggctgaggcggggggctaatgacagtgtgagctctagatggtgtgagaccaccccaaagccaagaaatggctacagccgtggaaccagaggaccaggatctttgggaagaagagggaattctgatggtgaaactggaagatgatttcacctgtcggccagagtctgtcttacagagggatgacccggtgctggaaacctcccaccagaacttccgacgcttccgctaccaggaggcagcaagccctagagaagctctcatcagactccgagaactttgtcaccagtggctgagaccagagaggcggacaaaggagcagatcctagagctgcttgtgctggaacaatttcttaccgtcctacctggagaactacagagctgggtgcggggccaacggccagaaagtggcgaggaggcagtgacgctggtggagggtttgcagaaacaacccaggagaccaaggcggtgggtgactgtccatgttcacggccaggaagtcctgtcagaggagacggtgcatttaggagtggagcctgagtcacctaatgagctgcaggatcctgtgcaaagctcgacccccgagcagtctcctgaggaaaccacacagagcccagatctgggggcaccggcagagcagcgtccacaccaggaagaggagctccagaccctgcaggagagcgaggtcccagtgcccgaggacccagaccttcctgcagagaggagctctggagactcagagatggttgctcttcttactgctctgtcacagggactggtaacgttcaaggatgtggccgtatgcttttcccaggaccagtggagtgatctggacccaacacagaaagagttctatggagaatatgtcttggaagaagactgtggaattgttgtctctctgtcatttccaatccccagacctgatgagatctcccaggttagagaggaagagccttgggtcccagatatccaagagcctcaggagactcaagagccagaaatcctgagttttacctacacaggagataggagtaaagatgaggaagagtgtctggagcaggaagatctgagtttggaggatatacacaggcctgttttgggagaaccagaaattcaccagactccagattgggaaatagtctttgaggacaatccaggtagacttaatgaaagaagatttggtactaatatttctcaagtgaatagttttgtgaaccttcgggaaactacacccgtccaccccctgttagggaggcatcatgactgttctgtgtgtggaaagagcttcacttgtaactcccaccttgttagacacctgaggactcacacaggagagaaaccctataaatgtatggaatgtggaaaaagttacacacgaagctcacatcttgccaggcaccaaaaggttcacaagatgaacgcgccttacaaatatcccctaaaccggaagaatttggaagagacctcccctgtgacacaggctgagagaactccatcagtggagaaaccctatagatgtgatgattgcggaaagcacttccgctggacttcagaccttgtcagacatcagaggacacatactggagaaaaacccttcttttgtactatttgtggcaaaagcttcagccagaaatctgtgttaacaacacaccaaagaatccacctgggaggcaaaccctacttgtgtggagagtgtggtgaggacttcagtgaacacaggcggtacctggcgcaccggaagacgcacgctgctgaggaactctacctctgcagcgagtgcgggcgctgcttcacccacagcgcagcgttcgccaagcacttgagaggacacgcctcagtgaggccctgccgatgcaacgaatgtgggaagagcttcagtcgcagggaccacctcgtcaggcatcagagaacacacactggggagaaaccattcacgtgccctacctgtggaaaaagcttcagcagaggatatcacttaattaggcatcagaggacccactcagaaaagacctcctagctaggtccccatgtgaggagatctgctttcagccctcacctaagggaggtgaggaagaggaaaagccctcttgtcagcctgggaagaccttttcgagggagtctccctgacctgctcagatctgacattacctcttcctgcaactaaacacgagcctgggcagaacctctcagccttcctctacgccttgaggggatgtttcatccaaagtacaacctgaattgaggcttctccttcactggagtgcacctgcctctacctcatgggtataaagtaggagaactaagagacttaagaggtcgtggttcctatatcgtccaaaaaataggctgttacatatcctaaagactgctcaacagcttcaagttgaaagtggccaaggacagccccttaggtttgggaagggacgagcctgaaggattctgtctttactggggtcaaatcttaaagcacacagctctggactcaagacaggaggtttgcgtcctgatggctttgccacacattcacaggataactgcatagatccctcgctgtctgattcacttcttaccatgcactttcctttgatgctgaggagaaatggaagtgggcgaaaaatctcaaggctgcttcatgtggaccttgtcaagctgctccctcccccagcgtcaaattgttatcaggtgccaaacactgctagaaaggagggcctagtcagaagcctctttccatacgagttttggttttgtttttaatatttttttctattaaaatactcatgcatttaaccttcccgttattcaaccagtctcttggttgcatccctagcacttctactacaagtgagatggtagtgtttgagtgcttattgagtaaagcataattcggtcataatgaaatcgttcacattccctcatatgcacaagcccaccaaccccttcacaccccccttcacaggggtcgtatgagtaaggggatttggaaactgtcaacttacaaaggcactataacaattacagaatcatgattgccatgggccactttatttacatgaagacaactggagaacgactaagaccaaattatggaaaataagaaaaagctgttgctggcaagaccatcaagactgttctgacaccctgtccccatcatccctgactgagtactctgacatcacggaaagtgttgaacctgggaccctgaggaattcaccaggagtaaatggctttcatgtatttgtgttgtttgctttttcttacgtgattttatgttcatagagctagaaagtagcatctcatgatggcccaacaatctctgttgccagttaaaggttccttggagatgaggctgaataattatgaacctcaccttctctgattgtgggagtggcaagaactggggagacgtcctccataagtggagcacagggtatggggttaaagcatgacagggagagtcttctgtgcctggtttcttctcctctatctcataatgcattatgggcccgaggaataggggagggttaataagactccaaccctaatggcccaacagggaaattctcattttggtcgatgatattctgatggactggtttggtcttaataccagtcaaccgttgtccttctggaaatatacatatatgaaataaataaaggtaacacttgcagccaagttccctggtttctgggacttcccatcttacccattccttttccagggcttcagtgtcctgatacttctgagggtggttcatactcaaatagatctgggagtacagagtatttttccttgaggaaaggaagggttgggatgattagcagagtccggtgaaacat

SEQ ID NO: 34964 - DNA, 3384 bp, Homo sapiens
  source 1..3384: mol_type = unassigned DNA
aaaggccccacgtgttccgacccgctaggccccgcgcggctcggatccggcggcgctgtttcggtcgggagtgggtgggagagaagccggggcaggggaggagccgccggagctgtcggagccggcccttggaagaaaatcctcgctgtgtccaggctgaggcggggggctaatgacagtgtgagctctagatggtgtgagaccaccccaaagccaagaaatggctacagccgtggaaccagaggaccaggatctttgggaagaagagggaattctgatggtgaaactggaagatgatttcacctgtcggccagagtctgtcttacagagggatgacccggtgctggaaacctcccaccagaacttccgacgcttccgctaccaggaggcagcaagccctagagaagctctcatcagactccgagaactttgtcaccagtggctgagaccagagaggcggacaaaggagcagatcctagagctgcttgtgctggaacaatttcttaccgtcctacctggagaactacagagctgggtgcggggccaacggccagaaagtggcgaggaggcagtgacgctggtggagggtttgcagaaacaacccaggagaccaaggcggtgggtgactgtccatgttcacggccaggaagtcctgtcagaggagacggtgcatttaggagtggagcctgagtcacctaatgagctgcaggatcctgtgcaaagctcgacccccgagcagtctcctgaggaaaccacacagagcccagatctgggggcaccggcagagcagcgtccacaccaggaagaggagctccagaccctgcaggagagcgaggtcccagtgcccgaggacccagaccttcctgcagagaggagctctggagactcagagatggttgctcttcttactgctctgtcacagggactggtaacgttcaaggatgtggccgtatgcttttcccaggaccagtggagtgatctggacccaacacagaaagagttctatggagaatatgtcttggaagaagactgtggaattgttgtctctctgtcatttccaatccccagacctgatgagatctcccaggttagagaggaagagccttgggtcccagatatccaagagcctcaggagactcaagagccagaaatcctgagttttacctacacaggagataggagtaaagatgaggaagagtgtctggagcaggaagatctgagtttggaggatatacacaggcctgttttgggagaaccagaaattcaccagactccagattgggaaatagtctttgaggacaatccaggtagacttaatgaaagaagatttggtactaatatttctcaagtgaatagttttgtgaaccttcgggaaactacacccgtccaccccctgttagggaggcatcatgactgttctgtgtgtggaaagagcttcacttgtaactcccaccttgttagacacctgaggactcacacaggagagaaaccctataaatgtatggaatgtggaaaaagttacacacgaagctcacatcttgccaggcaccaaaaggttcacaagatgaacgcgccttacaaatatcccctaaaccggaagaatttggaagagacctcccctgtgacacaggctgagagaactccatcagtggagaaaccctatagatgtgatgattgcggaaagcacttccgctggacttcagaccttgtcagacatcagaggacacatactggagaaaaacccttcttttgtactatttgtggcaaaagcttcagccagaaatctgtgttaacaacacaccaaagaatccacctgggaggcaaaccctacttgtgtggagagtgtggtgaggacttcagtgaacacaggcggtacctggcgcaccggaagacgcacgctgctgaggaactctacctctgcagcgagtgcgggcgctgcttcacccacagcgcagcgttcgccaagcacttgagaggacacgcctcagtgaggccctgccgatgcaacgaatgtgggaagagcttcagtcgcagggaccacctcgtcaggcatcagagaacacacactggggagaaaccattcacgtgccctacctgtggaaaaagcttcagcagaggatatcacttaattaggcatcagaggacccactcagaaaagacctcctagctaggtccccatgtgaggagatctgctttcagccctcacctaagggaggtgaggaagaggaaaagccctcttgtcagcctgggaagaccttttcgagggagtctccctgacctgctcagatctgacattacctcttcctgcaactaaacacgagcctgggcagaacctctcagccttcctctacgccttgaggggatgtttcatccaaagtacaacctgaattgaggcttctccttcactggagtgcacctgcctctacctcatgggtataaagtaggagaactaagagacttaagaggtcgtggttcctatatcgtccaaaaaataggctgttacatatcctaaagactgctcaacagcttcaagttgaaagtggccaaggacagccccttaggtttgggaagggacgagcctgaaggattctgtctttactggggtcaaatcttaaagcacacagctctggactcaagacaggaggtttgcgtcctgatggctttgccacacattcacaggataactgcatagatccctcgctgtctgattcacttcttaccatgcactttcctttgatgctgaggagaaatggaagtgggcgaaaaatctcaaggctgcttcatgtggaccttgtcaagctgctccctcccccagcgtcaaattgttatcaggtgccaaacactgctagaaaggagggcctagtcagaagcctctttccatacgagttttggttttgtttttaatatttttttctattaaaatactcatgcatttaaccttcccgttattcaaccagtctcttggttgcatccctagcacttctactacaagtgagatggtagtgtttgagtgcttattgagtaaagcataattcggtcataatgaaatcgttcacattccctcatatgcacaagcccaccaaccccttcacaccccccttcacaggggtcgtatgagtaaggggatttggaaactgtcaacttacaaaggcactataacaattacagaatcatgattgccatgggccactttatttacatgaagacaactggagaacgactaagaccaaattatggaaaataagaaaaagctgttgctggcaagaccatcaagactgttctgacaccctgtccccatcatccctgactgagtactctgacatcacggaaagtgttgaacctgggaccctgaggaattcaccaggagtaaatggctttcatgta

SEQ ID NO: 34965 - DNA, 3564 bp, Homo sapiens
  source 1..3564: mol_type = unassigned DNA
ccgacccgctaggccccgcgcggctcggatccggcggcgctgtttcggtcgggagtgggtgggagagaagccggggcaggggaggagccgccggagctgtcggagccgtgacacccagggcagctacactcagaagccacaaggaatgctagtggagcccctcatccctcccagcttctcttccaagctgccccgtggggcttgatccaggaagctacttcagaaagtagacaatcattccaagggtacaacaaggtttaccacaatgtgagggactcagccattgcaaattgtacagatgagggcccttggaagaaaatcctcgctgtgtccaggctgaggcggggggctaatgacagtgtgagctctagatggtgtgagaccaccccaaagccaagaaatggctacagccgtggaaccagaggaccaggatctttgggaagaagagggaattctgatggtgaaactggaagatgatttcacctgtcggccagagtctgtcttacagagggatgacccggtgctggaaacctcccaccagaacttccgacgcttccgctaccaggaggcagcaagccctagagaagctctcatcagactccgagaactttgtcaccagtggctgagaccagagaggcggacaaaggagcagatcctagagctgcttgtgctggaacaatttcttaccgtcctacctggagaactacagagctgggtgcggggccaacggccagaaagtggcgaggaggcagtgacgctggtggagggtttgcagaaacaacccaggagaccaaggcggtgggtgactgtccatgttcacggccaggaagtcctgtcagaggagacggtgcatttaggagtggagcctgagtcacctaatgagctgcaggatcctgtgcaaagctcgacccccgagcagtctcctgaggaaaccacacagagcccagatctgggggcaccggcagagcagcgtccacaccaggaagaggagctccagaccctgcaggagagcgaggtcccagtgcccgaggacccagaccttcctgcagagaggagctctggagactcagagatggttgctcttcttactgctctgtcacagggactggtaacgttcaaggatgtggccgtatgcttttcccaggaccagtggagtgatctggacccaacacagaaagagttctatggagaatatgtcttggaagaagactgtggaattgttgtctctctgtcatttccaatccccagacctgatgagatctcccaggttagagaggaagagccttgggtcccagatatccaagagcctcaggagactcaagagccagaaatcctgagttttacctacacaggagataggagtaaagatgaggaagagtgtctggagcaggaagatctgagtttggaggatatacacaggcctgttttgggagaaccagaaattcaccagactccagattgggaaatagtctttgaggacaatccaggtagacttaatgaaagaagatttggtactaatatttctcaagtgaatagttttgtgaaccttcgggaaactacacccgtccaccccctgttagggaggcatcatgactgttctgtgtgtggaaagagcttcacttgtaactcccaccttgttagacacctgaggactcacacaggagagaaaccctataaatgtatggaatgtggaaaaagttacacacgaagctcacatcttgccaggcaccaaaaggttcacaagatgaacgcgccttacaaatatcccctaaaccggaagaatttggaagagacctcccctgtgacacaggctgagagaactccatcagtggagaaaccctatagatgtgatgattgcggaaagcacttccgctggacttcagaccttgtcagacatcagaggacacatactggagaaaaacccttcttttgtactatttgtggcaaaagcttcagccagaaatctgtgttaacaacacaccaaagaatccacctgggaggcaaaccctacttgtgtggagagtgtggtgaggacttcagtgaacacaggcggtacctggcgcaccggaagacgcacgctgctgaggaactctacctctgcagcgagtgcgggcgctgcttcacccacagcgcagcgttcgccaagcacttgagaggacacgcctcagtgaggccctgccgatgcaacgaatgtgggaagagcttcagtcgcagggaccacctcgtcaggcatcagagaacacacactggggagaaaccattcacgtgccctacctgtggaaaaagcttcagcagaggatatcacttaattaggcatcagaggacccactcagaaaagacctcctagctaggtccccatgtgaggagatctgctttcagccctcacctaagggaggtgaggaagaggaaaagccctcttgtcagcctgggaagaccttttcgagggagtctccctgacctgctcagatctgacattacctcttcctgcaactaaacacgagcctgggcagaacctctcagccttcctctacgccttgaggggatgtttcatccaaagtacaacctgaattgaggcttctccttcactggagtgcacctgcctctacctcatgggtataaagtaggagaactaagagacttaagaggtcgtggttcctatatcgtccaaaaaataggctgttacatatcctaaagactgctcaacagcttcaagttgaaagtggccaaggacagccccttaggtttgggaagggacgagcctgaaggattctgtctttactggggtcaaatcttaaagcacacagctctggactcaagacaggaggtttgcgtcctgatggctttgccacacattcacaggataactgcatagatccctcgctgtctgattcacttcttaccatgcactttcctttgatgctgaggagaaatggaagtgggcgaaaaatctcaaggctgcttcatgtggaccttgtcaagctgctccctcccccagcgtcaaattgttatcaggtgccaaacactgctagaaaggagggcctagtcagaagcctctttccatacgagttttggttttgtttttaatatttttttctattaaaatactcatgcatttaaccttcccgttattcaaccagtctcttggttgcatccctagcacttctactacaagtgagatggtagtgtttgagtgcttattgagtaaagcataattcggtcataatgaaatcgttcacattccctcatatgcacaagcccaccaaccccttcacaccccccttcacaggggtcgtatgagtaaggggatttggaaactgtcaacttacaaaggcactataacaattacagaatcatgattgccatgggccactttatttacatgaagacaactggagaacgactaagaccaaattatggaaaataagaaaaagctgttgctggcaagaccatcaagactgttctgacaccctgtccccatcatccctgactgagtactctgacatcacggaaagtgttgaacctgggaccctgaggaattcaccaggagtaaatggctttcatgta

SEQ ID NO: 34966 - DNA, 1947 bp, Homo sapiens
  source 1..1947: mol_type = unassigned DNA
actcccagtctccacccaactcccccgcccgccccgtgcaggctgtggagactcccttcccgggggagggggcccccactgccgcaggtgccccctctgcctccaccccgctctgaaatagaaaatgtctgcagacggcggaggcatccaggacacccaggacaaggagacacccccggaggttccagatcgtggacatcctcatcaggaaatgccttctaagctgggggaggcggtaccttcaggggacactcaggagtcactgcacattaagatggagcccgaagagccacactccgagggggcatcgcaggaggatggggctcaaggtgcctggggctgggcacccctaagtcacggctctaaggagaaagctctcttcctgcctggcggagccctcccctccccccggatccccgtgctttcccgagaggggaggaccagagaccggcagatggctgcagcgctcctcactgcctggtcccagatgccagtgactttcgaggatgtggccttgtacctctcccgggaggagtggggacggctggaccacacgcagcagaacttctacagggatgtcctgcagaagaaaaatgggctgtcactgggctttcccttcagcaggcctttctgggcccctcaagcgcacggcaagggtgaggcctcgggctccagccggcaggcaggagatgagaaggagtggagaggcgcgtgcacaggagccgtcgaggtggggcagagggtgcagacctcatccgtggcagcccttgggaatgtgaagcccttcagaaccagggcagggagagtccagtggggcgtcccgcagtgcgcgcaggaagcagcctgcggccggagctcagggccggccaaagactccgggcagccggctgagccagatcgcaccccggatgcagctccgccagaccccagtcccacggagccccaggagtaccgcgtcccggagaagcccaacgaggaggagaagggcgccccggagagtggcgaggagggcctggcccctgacagtgaggtgggcaggaagagctaccggtgcgagcagtgcggcaagggcttcagctggcactcgcacctggtgacgcaccggcgcacgcacacgggcgagaagccctacgcctgcactgactgcgggaagcgcttcggccgcagctcgcacctcatccagcaccagatcatccacacgggcgagaagccctacacctgccccgcctgccggaagagcttcagccaccactccacgctgattcagcaccagcgcatccacaccggagagaagccctacgtgtgcgaccgctgcgccaagcgcttcacccgccgctcggacttggtcacccaccagggcacccacacgggcgccaagccgcacaagtgccccatctgcgccaagtgcttcacgcagagctcggcgctagtcacccaccagcgcacccacactggggtcaagccctatccgtgccccgagtgcggcaagtgcttcagccagcgttccaacctcatcgcgcacaaccgcacacacacaggcgagaagccctaccactgcctcgactgcggcaagagcttcagccacagctcgcacctcaccgcgcaccagcgcacccaccgtggcgtgcggccctacgcctgcccgttgtgcggcaagagcttcagccggcgctccaacctgcaccggcacgagaagatccacaccaccgggcccaaggccctggccatgctgatgctgggggcggcggcggcgggggctctggccacacccccacccgctcccacctaggaggccaggaaagggggagcggggcgcccagggccactggaacagccccactggagtcaaggctccgagggaggagagaggggctcgggaagggagctggggcggtgagggcatggggtgaggcatggcgatgggggagggcgagggcgagaaagggc

SEQ ID NO: 34967 - DNA, 2062 bp, Homo sapiens
  source 1..2062: mol_type = unassigned DNA
tcctgtcttccctactcccagtctccacccaactcccccgcccgccccgtgcaggctgtggagactcccttcccgggggagggggcccccactgccgcaggtgccccctctgcctccaccccggctcctggccagaagctggagggggcttggccaaaaagagggagaaacaactcagctgttctttctagctctgaaatagaaaatgtctgcagacggcggaggcatccaggacacccaggacaaggagacacccccggaggttccagatcgtggacatcctcatcaggaaatgccttctaagctgggggaggcggtaccttcaggggacactcaggagtcactgcacattaagatggagcccgaagagccacactccgagggggcatcgcaggaggatggggctcaaggtgcctggggctgggcacccctaagtcacggctctaaggagaaagctctcttcctgcctggcggagccctcccctccccccggatccccgtgctttcccgagaggggaggaccagagaccggcagatggctgcagcgctcctcactgcctggtcccagatgccagtgactttcgaggatgtggccttgtacctctcccgggaggagtggggacggctggaccacacgcagcagaacttctacagggatgtcctgcagaagaaaaatgggctgtcactgggctttcccttcagcaggcctttctgggcccctcaagcgcacggcaagggtgaggcctcgggctccagccggcaggcaggagatgagaaggagtggagaggcgcgtgcacaggagccgtcgaggtggggcagagggtgcagacctcatccgtggcagcccttgggaatgtgaagcccttcagaaccagggcagggagagtccagtggggcgtcccgcagtgcgcgcaggaagcagcctgcggccggagctcagggccggccaaagactccgggcagccggctgagccagatcgcaccccggatgcagctccgccagaccccagtcccacggagccccaggagtaccgcgtcccggagaagcccaacgaggaggagaagggcgccccggagagtggcgaggagggcctggcccctgacagtgaggtgggcaggaagagctaccggtgcgagcagtgcggcaagggcttcagctggcactcgcacctggtgacgcaccggcgcacgcacacgggcgagaagccctacgcctgcactgactgcgggaagcgcttcggccgcagctcgcacctcatccagcaccagatcatccacacgggcgagaagccctacacctgccccgcctgccggaagagcttcagccaccactccacgctgattcagcaccagcgcatccacaccggagagaagccctacgtgtgcgaccgctgcgccaagcgcttcacccgccgctcggacttggtcacccaccagggcacccacacgggcgccaagccgcacaagtgccccatctgcgccaagtgcttcacgcagagctcggcgctagtcacccaccagcgcacccacactggggtcaagccctatccgtgccccgagtgcggcaagtgcttcagccagcgttccaacctcatcgcgcacaaccgcacacacacaggcgagaagccctaccactgcctcgactgcggcaagagcttcagccacagctcgcacctcaccgcgcaccagcgcacccaccgtggcgtgcggccctacgcctgcccgttgtgcggcaagagcttcagccggcgctccaacctgcaccggcacgagaagatccacaccaccgggcccaaggccctggccatgctgatgctgggggcggcggcggcgggggctctggccacacccccacccgctcccacctaggaggccaggaaagggggagcggggcgcccagggccactggaacagccccactggagtcaaggctccgagggaggagagaggggctcgggaagggagctggggcggtgagggcatggggtgaggcatggcgatgggggagggcgagggcgagaaagggcaggcactctgcgaattaaaggccttggacttgaa

SEQ ID NO: 34968 - DNA, 1006 bp, Homo sapiens
  source 1..1006: mol_type = unassigned DNA
ggggccaggaccgggtttgggaaggagaaggacattgtctgccaggaccgagagcaggatgggcatcccaggcctggggcaggtggttgcagctgcaggggggctgctgagagcgggcaggttgatttctgaattcctggtgggcatgggagtcagctctgaaatagaaaatgtctgcagacggcggaggcatccaggacacccaggacaaggagacacccccggaggttccagatcgtggacatcctcatcaggaaatgccttctaagctgggggaggcggtaccttcaggggacactcaggagtcactgcacattaagatggagcccgaagagccacactccgagggggcatcgcaggaggatggggctcaaggtgcctggggctgggcacccctaagtcacggctctaaggagaaagctctcttcctgcctggcggagccctcccctccccccggatccccgtgctttcccgagaggggaggaccagagaccggcagatggctgcagcgctcctcactgcctggtcccagatgccagtgactttcgaggatgtggccttgtacctctcccgggaggagtggggacggctggaccacacgcagcagaacttctacagggatgtcctgcagaagaaaaatgggctgtcactgggctttcccttcagcaggcctttctgggcccctcaagcgcacggcaagggtgaggcctcgggctccagccggcaggcaggagatgagaaggagtggagaggcgcgtgcacaggagccgtcgaggtggggcagagggtgcagacctcatccgtggcagcccttgggaatgtgaagcccttcagaaccagggcagggagagtccagtggggcgtcccgcagtgcgcgcaggaagcagcctgcggccggagctcagggccggccaaagactccgggcagccggctgagccagatcgcaccccggatgcagctccgccagaccccagtcccacggagccccaggagtaccgcgtccc

SEQ ID NO: 34969 - DNA, 659 bp, Homo sapiens
  source 1..659: mol_type = unassigned DNA
gcagatgatcagcttgcaggaggggatggggtcaaaggtggaaggcttcaagctggcaggagagaagggggccaggaccgggtttgggaaggagaaggacattgtctgccaggaccgagagcaggatgggcatcccaggcctggggcaggtggttgcagctgcaggggggctgctgagagcgggcaggttgatttctgaattcctggtgggcatgggagtcaggctcctggccagaagctggagggggcttggccaaaaagagggagaaacaactcagctgttctttctagctctgaaatagaaaatgtctgcagacggcggaggcatccaggacacccaggacaaggagacacccccggaggttccagatcgtggacatcctcatcaggaaatgccttctaagctgggggaggcggtaccttcaggggacactcaggagtcactgcacattaagatggagcccgaagagccacactccgagggggcatcgcaggaggatggggctcaaggtgcctggggctgggcacccctaagtcacggctctaaggagaaagctctcttcctgcctggcggagccctcccctccccccggatccccgtgctttcccgagaggggaggaccagagaccggcagatggctgcagcgctcctcactgcc

SEQ ID NO: 34970 - DNA, 2229 bp, Homo sapiens
  source 1..2229: mol_type = unassigned DNA
cggagcggggaacgaggccgtcggccattttgtgtctgcttcctgtgggacgtggtggtagccgttgggttgggaaagtgagggatttttggcctcgtttctcctgcttcttttctcctcccttttactttgccggtagaacacagttatgggtcgcaagaagaagaagcagctgaagccgtggtgctggtattgtaatagagattttgatgatgagaagatccttattcagcaccaaaaagcaaagcattttaaatgccatatatgtcacaagaaattgtatacaggacctggcttagctattcattgcatgcaggtacataaagaaacaatagatgccgtaccaaatgcaatacctggaagaacagacatagagttggaaatatatggtatggaaggtattccagaaaaagacatggatgaaagacgacgacttcttgaacagaaaacacaagaaagtcaaaaaaagaagcaacaagatgattctgatgaatatgatgatgacgactctgcagcctcaacttcatttcagccacagcctgttcaacctcagcaaggttatattcctccaatggcacagccaggactgccaccagtaccaggagcaccaggaatgcctccaggcatacctccattaatgccaggtgttcctcctctgatgccaggaatgccaccagttatgccaggcatgccacctggattgcatcatcagagaaaatacacccagtcattttgcggtgaaaacataatgatgccaatgggtggaatgatgccacctggaccaggaataccacctctgatgcctggaatgccaccaggtatgcccccacctgttccacgtcctggaattcctccaatgactcaagcacaggctgtttcagcgccaggtattcttaatagaccacctgcaccaacagcaactgtacctgccccacagcctccagttactaagcctcttttccccagtgctggacaggctcaggcagctgtccaaggacctgttggtacagatttcaaacccttaaatagtacccctgcaacaactacagaacccccaaagcctacattccctgcttatacacagtctacagcttcaacaactagtacaacaaatagtactgcagctaaaccagcggcttcaataacaagtaagcctgctacacttacaacaactagtgcaaccagtaagttgatccatccagatgaggatatatccctggaagagagaagggcacagttacctaagtatcaacgtaatcttcctcggccaggacaggcccccatcggtaatccaccagttggaccaattggaggtatgatgccaccacagccaggcatcccacagcaacaaggaatgagacccccaatgccacctcatggtcagtatggtggtcatcatcaaggcatgccaggataccttcctggtgctatgcccccgtatgggcagggaccgccaatggtgcccccttaccagggtgggcctcctcgacctccgatgggaatgagacctcctgtaatgtcgcaaggtggccgttactgatcttacttcatccagtctaataggtttggagattaaaccttttctcaacttgtgctgtttatatagccaagcttccgtcaataaggcttcattgtgactttaacaaacattatcttcccacataccaggaactattggacatttattttacatgggaaaaattatttggaataataaagcaggaacttttcctgaagttgcaatttatactgtatggcttctttttcatgtttcatctaggtttttagaagtgaagtatagtaaatttggttcgttaaattgtgaaggcgctggaattacatgaacataccaccctagtaaaggcaagttctgtaagcttacattgctatttgtaaagtttgccttcacagcatttcagatgctgttggacttcatgtccccaacctagcttggtgagggctgtaactgtttccaagtacttgtacattggaagtctgaatgtgtaacaatatttaatgtatttagagttcctcatgttgcagggtttaagaaatctgacccaccaaggtcatgtgacttttctgtactgttaaacttcattgtaataaaatgagagaaaaatttatgcctttttattcataacccagctgtggaccactgcctgaaaggtttgtacagatgcatgccacagtagatgtccacataataaaattcatagttaccaatgc

SEQ ID NO: 34971 - DNA, 2025 bp, Homo sapiens
  source 1..2025: mol_type = unassigned DNA
cggagcggggaacgaggccgtcggccattttgtgtctgcttcctgtgggacgtggtggtagccgttgggttgggaaagtgagggatttttggcctcgtttctcctgcttcttttctcctcccttttactttgccggtagaacacagttatgggtcgcaagaagaagaagcagctgaagccgtggtgctggtattgtaatagagattttgatgatgagaagatccttattcagcaccaaaaagcaaagcattttaaatgccatatatgtcacaagaaattgtatacaggactgccaccagtaccaggagcaccaggaatgcctccaggcatacctccattaatgccaggtgttcctcctctgatgccaggaatgccaccagttatgccaggcatgccacctggattgcatcatcagagaaaatacacccagtcattttgcggtgaaaacataatgatgccaatgggtggaatgatgccacctggaccaggaataccacctctgatgcctggaatgccaccaggtatgcccccacctgttccacgtcctggaattcctccaatgactcaagcacaggctgtttcagcgccaggtattcttaatagaccacctgcaccaacagcaactgtacctgccccacagcctccagttactaagcctcttttccccagtgctggacagatggggacacctgtcacaagctcaagtacagcttcatccaattcagaaagtctgtctgcatcttctaaagctctgtttcctagcacagcacaagctcaggcagctgtccaaggacctgttggtacagatttcaaacccttaaatagtacccctgcaacaactacagaacccccaaagcctacattccctgcttatacacagtctacagcttcaacaactagtacaacaaatagtactgcagctaaaccagcggcttcaataacaagtaagcctgctacacttacaacaactagtgcaaccagtaagttgatccatccagatgaggatatatccctggaagagagaagggcacagttacctaagtatcaacgtaatcttcctcggccaggacaggcccccatcggtaatccaccagttggaccaattggaggtatgatgccaccacagccaggcatcccacagcaacaaggaatgagacccccaatgccacctcatggtcagtatggtggtcatcatcaaggcatgccaggataccttcctggtgctatgcccccgtatgggcagggaccgccaatggtgcccccttaccagggtgggcctcctcgacctccgatgggaatgagacctcctgtaatgtcgcaaggtggccgttactgatcttacttcatccagtctaataggtttggagattaaaccttttctcaacttgtgctgtttatatagccaagcttccgtcaataaggcttcattgtgactttaacaaacattatcttcccacataccaggaactattggacatttattttacatgggaaaaattatttggaataataaagcaggaacttttcctgaagttgcaatttatactgtatggcttctttttcatgtttcatctaggtttttagaagtgaagtatagtaaatttggttcgttaaattgtgaaggcgctggaattacatgaacataccaccctagtaaaggcaagttctgtaagcttacattgctatttgtaaagtttgccttcacagcatttcagatgctgttggacttcatgtccccaacctagcttggtgagggctgtaactgtttccaagtacttgtacattggaagtctgaatgtgtaacaatatttaatgtatttagagttcctcatgttgcagggtttaagaaatctgacccaccaaggtcatgtgacttttctgtactgttaaacttcattgtaataaaatgagagaaaaatttatgcctttttattcataacccagctgtggaccactgcctgaaaggtttgtacagatgcatgccacagtagatgtccacataataaaattcatagttaccaatgc

SEQ ID NO: 34972 - DNA, 1713 bp, Homo sapiens
  source 1..1713: mol_type = unassigned DNA
cgtggtggtagccgttgggttgggaaagtgagggatttttggcctcgtttctcctgcttcttttctcctcccttttactttgccggtagaacacagttatgggtcgcaagaagaagaagcagctgaagccgtggtgctggtattgtaatagagattttgatgatgagaagatccttattcagcaccaaaaagcaaagcattttaaatgccatatatgtcacaagaaattgtatacaggacctggcttagctattcattgcatgcaggtacataaagaaacaatagatgccgtaccaaatgcaatacctggaagaacagacatagagttggaaatatatggtatggaaggtattccagaaaaagacatggatgaaagacgacgacttcttgaacagaaaacacaagaaagtcaaaaaaagaagcaacaagatgattctgatgaatatgatgatgacgactctgcagcctcaacttcatttcagccacagcctgttcaacctcagcaaggttatattcctccaatggcacagccaggactgccaccagtaccaggagcaccaggaatgcctccaggcatacctccattaatgccaggtgttcctcctctgatgccaggaatgccaccagttatgccaggcatgccacctggaatgatgccaatgggtggaatgatgccacctggaccaggaataccacctctgatgcctggaatgccaccaggtatgcccccacctgttccacgtcctggaattcctccaatgactcaagcacaggctgtttcagcgccaggtattcttaatagaccacctgcaccaacagcaactgtacctgccccacagcctccagttactaagcctcttttccccagtgctggacagatggggacacctgtcacaagctcaagtacagcttcatccaattcagaaagtctgtctgcatcttctaaagctctgtttcctagcacagcacaagctcaggcagctgtccaaggacctgttggtacagatttcaaacccttaaatagtacccctgcaacaactacagaacccccaaagcctacattccctgcttatacacagtctacagcttcaacaactagtacaacaaatagtactgcagctaaaccagcggcttcaataacaagtaagcctgctacacttacaacaactagtgcaaccagtaagttgatccatccagatgaggatatatccctggaagagagaagggcacagttacctaagtatcaacgtaatcttcctcggccaggacaggcccccatcggtaatccaccagttggaccaattggaggtatgatgccaccacagccaggcatcccacagcaacaaggaatgagacccccaatgccacctcatggtcagtatggtggtcatcatcaaggcatgccaggataccttcctggtgctatgcccccgtatgggcagggaccgccaatggtgcccccttaccagggtgggcctcctcgacctccgatgggaatgagacctcctgtaatgtcgcaaggtggccgttactgatcttacttcatccagtctaataggtttggagattaaaccttttctcaacttgtgctgtttatatagccaagcttccgtcaataaggcttcattgtgactttaacaaacattatcttcccacataccaggaactattggacatttattttacatgggaaaaattatttggaataataaa

SEQ ID NO: 34973 - DNA, 13767 bp, Homo sapiens
  source 1..13767: mol_type = unassigned DNA
cgggaggcggagcggggaacgaggccgtcggccattttgtgtctgcttcctgtgggacgtggtggtagccgttgggttgggaaagtgagggatttttggcctcgtttctcctgcttcttttctcctcccttttactttgccggtagaacacagttatgggtcgcaagaagaagaagcagctgaagccgtggtgctggtattgtaatagagattttgatgatgagaagatccttattcagcaccaaaaagcaaagcattttaaatgccatatatgtcacaagaaattgtatacaggacctggcttagctattcattgcatgcaggtacataaagaaacaatagatgccgtaccaaatgcaatacctggaagaacagacatagagttggaaatatatggtatggaaggtattccagaaaaagacatggatgaaagacgacgacttcttgaacagaaaacacaagaaagtcaaaaaaagaagcaacaagatgattctgatgaatatgatgatgacgactctgcagcctcaacttcatttcagccacagcctgttcaacctcagcaaggttatattcctccaatggcacagccaggactgccaccagtaccaggagcaccaggaatgcctccaggcatacctccattaatgccaggtgttcctcctctgatgccaggaatgccaccagttatgccaggcatgccacctggattgcatcatcagagaaaatacacccagtcattttgcggtgaaaacataatgatgccaatgggtggaatgatgccacctggaccaggaataccacctctgatgcctggaatgccaccaggtatgcccccacctgttccacgtcctggaattcctccaatgactcaagcacaggctgtttcagcgccaggtattcttaatagaccacctgcaccaacagcaactgtacctgccccacagcctccagttactaagcctcttttccccagtgctggacagatggggacacctgtcacaagctcaagtacagcttcatccaattcagaaagtctgtctgcatcttctaaagctctgtttcctagcacagcacaagctcaggcagctgtccaaggacctgttggtacagatttcaaacccttaaatagtacccctgcaacaactacagaacccccaaagcctacattccctgcttatacacagtctacagcttcaacaactagtacaacaaatagtactgcagctaaaccagcggcttcaataacaagtaagcctgctacacttacaacaactagtgcaaccagtaagttgatccatccagatgaggatatatccctggaagagagaagggcacagttacctaagtatcaacgtaatcttcctcggccaggacaggcccccatcggtaatccaccagttggaccaattggaggtatgatgccaccacagccaggcatcccacagcaacaaggaatgagacccccaatgccacctcatggtcagtatggtggtcatcatcaaggcatgccaggataccttcctggtgctatgcccccgtatgggcagggaccgccaatggtgcccccttaccagggtgggcctcctcgacctccgatgggaatgagacctcctgtaatgtcgcaaggtggccgttactgatcttacttcatccagtctaataggtttggagattaaaccttttctcaacttgtgctgtttatatagccaagcttccgtcaataaggcttcattgtgactttaacaaacattatcttcccacataccaggaactattggacatttattttacatgggaaaaattatttggaataataaagcaggaacttttcctgaagttgcaatttatactgtatggcttctttttcatgtttcatctaggtttttagaagtgaagtatagtaaatttggttcgttaaattgtgaaggcgctggaattacatgaacataccaccctagtaaaggcaagttctgtaagcttacattgctatttgtaaagtttgccttcacagcatttcagatgctgttggacttcatgtccccaacctagcttggtgagggctgtaactgtttccaagtacttgtacattggaagtctgaatgtgtaacaatatttaatgtatttagagttcctcatgttgcagggtttaagaaatctgacccaccaaggtcatgtgacttttctgtactgttaaacttcattgtaataaaatgagagaaaaatttatgcctttttattcataacccagctgtggaccactgcctgaaaggtttgtacagatgcatgccacagtagatgtccacataataaaattcatagttaccaatgcagttttgatatatcattggattctgtctttgagttgtaggttatttcttagctgcatgttttaaactgaatttgcatagagttgtatgttaatgtttcagttaagagaaaaacttaagatacatgagtcattacataatgggtatgaaatctttataatcacccttccaccctctatggtgtcagtacacatcacgtgtcatagatacttaaaatgtaaatgttaacacttttccttcctgctgagatgtttagagcctagtgccagacccattcatttccttttgattatttttgagactcagtactgcatggacctcagaagcttttcaggtgcaaacttctagaagcttaggtgcatgcagtaatagcttcttgtgctgttaatgggttattatatattattctaagtgtaatgctgagaatctaaatgtgtctctgttgggatggttaacagatgaattggcaatttttattatgttcctggaagattacattattcatttgagtaccttctgttattaagcctaggtagccttactgtgcaactttttatttatccttggaaattttgaatgttgtgttcttacagagagcttttctgtagagatgactgctattcaatattttgtgttgcaacctcttaaaataatagctcttgttgacctttttgggatctgtttttctgatcttttgcagggtagttttatgattttttaggcatcaaataacctatgcaaagtattaatataatgaactcaagttgagtttttctcattataaagttaagacttctaagaaaatggtaacatttctttataactttcctgtgaaggtatagataaaacacatgaagtctgaagttgtatggaaaaaagggctttaactttgaaggaaaatatattgaaaagtgatttagccatcacaaaagagttcgtatttatgtgacagatgaaagtcatacctttaagcaaaacattgcaagtattataaagctgaatgctattttaactcacattggctgggtgcagtggctcacgcctgtaatcccagccctctggaaggctgagatgggaggattgcttgagtccaggagtttgagaccagcctggccaacatggcaaaaccccatctgtacaaaacatttaaaaattagccaggcgcgttagtgtgtgtctgtggtcccagctgctcaagaggctgaggaaggaggttcttcctccttccgaggctgcggtgagctatgttcactccagcctgggcaacagagcgagactctgtcaaaaaataaattaaaatatctgattatctggcttcaatgattttggctcctgtgcttgtggtaccatagtggtacaaaaattttcatagtttgaaaataaaacaggtattttgccagtaatgtatttctttctgccagcagccaagtcccaaaccactttcccctctgaacctctgcttacctaaatggtttcaaaattaatacatgctgctttgatttggcagcacacttaatatactgctgaaggaaaacttgtgttgaaagtctttaagataaaaatggtgtgataggccgggcgcagtggctcacgcctgtaatcccagcactttgggaggcccaggcgggtggatcatgaggtcaggagatggagaccatcctggctaacacggtgaaaccccgtttctactaaaaatacaaaaaattagctgggcgtagttgcggatgcctgtagtcccaactactctggagaccgaggcaggagaatggcgtgaacccgggaggcatagcttgcagtgagcggagatcacaccactgcactctagcctggacgacagattgagactccgtctcaaaaaaaaaaaatgctgtgattaaatttagaataattaagtaaggggtgctctcccaaattctcaggaatttcatgtatacggttattgacaaactgcaatagggttagtagacctgtttcagaaattatgtgaagctttatttgcattttatgcaaagaaggttgatactttgtagcaaggttttttgctctctgtataggtctgatgggcaaaaatggaacttttaaatatgggatagaattctaattaaaaattaattgaaagtgttaggcattggcagataaaacttaagctcatgagttcctgagtttgtagctataggctcagaggtggtgtacccatttaatatatttgaagtgtaatttttgcatgcatccaaacgtaattaagcttctagaaaataccttttttctaaatgcttctggggtccatagtgtggttgaattatgagtggagcaaattatattcatataattaactctgactcaaccttccttaagtagtagatgaagttgagtcaaagtggatgccaactgccctcacagaagacaacttttgggacttgataattcaggcaggcattgtgattgtcataattaaggaagctgtaaggttagtagggctggcaactttggctctaccttacatccaccccttttagaaaaacaagaaaacattttgtctggcactagtttctgttgtataagttttcatactgtttaacaagaccacagcaggtaaggattaatttttgagtggctgctggaattacttgatttgaatacttagtattttagtagtgtctcacacatttgccattaggtatgaataaaatattcctactgtactcctattccactaagttacattttgaacttagactcaccttaattaaacttaattaattggggagggggattccccaacaaaaagaagtacgggctcagagtggaattgtagtggacaatagttaaaaacaaagctgctccttttgcttgcttgatcattgggatttttaaaaaaaaaaattttaatgcatgtcttttaaattaattgggaactgtttttctaaaattaaaattttcttcttcctatagccctgccataggacaggctgaggctgagtctcagtgttgccctgttcagtctgaggcaagtgggatttattttattccttataggggctttcacagctttatggctgttggatatttatgtccccaaacttgcagcaagtttggtgaaggcccctaaatttaattaaacttaggatttttatactcttttggcagagaaggctctatattaatattcacgtttgactgtggtgttaataaacataagtatttcatatgcaattttatgtaatttgctgtgtgttacataattaacagcttcagtaaagcttgtgttcctatattgaacttcaataaattgacaaaatttgatatttttgattggaggcaagaaatgtttcattcaagttttttactttcacttctaggaaaatcttactggttttattttctccataaactattaaatttaacctcaaggataagtttaatcattggaaatgccactggatactgaaatgtgccttctcttttttgagacggagtttcactcttatcacccaggatggagtgcagtggtgcgatctcggttcactgcaacctctgcctcccggattcaagtgattctcctgcctcagcctcccgagtagctgggattataggctcccgccaccacatctggctattttttcaatatttttcagtagggatggggttttgccgtgttggccaggctggtctcaaactcctgacctcaggtgatccacccatctcagcctcccagagtgctggagtagcaggtgtgagccaccgcgcctggccaaaatctgcattctttttttttttttttttttttttttgagactgtctcgctgtgtcacccaggccagagtgcagtagcacgatctcagctcactacaacctccacctcctggattcaagcgattctcctgtctcagcctcccgagtagctgggactacaggtgcttgccaccacacccggctaattttttgtatttttagtagagacggggtttcaccgtgttagccaggatggtctcgatctcctgactttgcgatccccctgcctcggcctcccaaagtgctgggattacaggcgtgggccaccgcgcttggccaaaatctgcattcttaatcacaaacttacgcattgaatgttaaggctaaaaggtcatctggaaatgcttaattttaaaatattttcaagcctcaccacattagagcaaatgttaatgtagagccctgtaaaggtgggaaggtggtgtctatgtgtgtgcttgtgtatgtgggggtatagaccatatagttgatataacaacagaatttgggtgttacagacctttcagcatggatggattactaattttcaggtatcgaaactgaaatttgatacctgatcctgtggtaaagtatgttaaactatggttttggagtgattattttgaggttcattttcagcctcactgaacagtgttttacgcacatgtgaaaagtatccacatttgtttccaactaaaatttgcttttatttggtgagaaaagttgtgtgcgtgtgtttgttgtagggaataattagggaattggaagagaggccaaaaacaaacctgaattacttttgtttcttgtgtttgagccacgattctatccagatagcagtttactctgagcagtaacaatgaacaagcagtatagcatttagcaaacctggaattgtttgtatatggttttcattcttggaagcataaagaaaaaatatgcattaaatgaattgtaaattttgacttgttaaataacatgtttttcactataactaataggattttaatatttaaagaattttgttgcttccatgacaaaatatcccattggactattttataacctcagtaatcaacatttaagagtccttaattggagatctgttttctctattacctaccatcctgcaatatgctgaaatctttctaagttgcttatcttaattctaatggtgataattgaaaaaagtgtgctggaaatacaggctcttatctggttgagtactgggggtgggaaggatttagtaatgtcataatctgttgaaggtaatatctatagataactaagatagttcctttttttttgtagttctgtgactcagacaaataagattttgagaattatgtagtttttaggtgtctgtaacatccactagtaaaacttggcaaatgaaagaaaattgtgaagtcaccactttaactgagtcaaaattttgtttgaataagctgatgaaaatagacatgtaccctagaagtagatactctaaaattatacagacatgaatgtcttttttaaaaggttgtcattattgacctaatattgagtaatctttctgcgttattccaaattgaaatttgtttgctcttcattgtaacttttatgtaaaagtcctttaaaaggggattcaattataaggctatttgactatagggcagatttttataagtaaacattcccccaattccacttatgctaactgtctcatgacagtaaagtttactcctttttagaaaccctttctcagtattttaatttctgtcattgaatcatttaaataataaccttttgtttttatagcaaagaaatcatctgacttttctgtgtgatgtttcttggcaaaataagcacttgatgtatggtcatgtacataatggatattcattaattttgtgattagtgctgagttttctaaactactatcttaagctcttaggcaccctattatggatctaattcaaaccaatatgtaggaaatggagaaagtaggacttcagtttgcgcttcccaataactttaaatatatccaccttttccaagtgtttaagccctaaaacatctatctttatttttttacctggcatttttgttagaaaatagattacgttttaaagtaacattaaaaaaattcttcagtaagataattgcttttaataagtatatttttcttgctcttggctctatacatttttgcataatattttagtcttgaaaagcttttcattttcttaactctggaaaataatagtttggaactaaattagtttgagaaatctgaatcatctctctttaaatctgttcagttagtctcatgtattctcaggggaaaatgtctttattttactaagcggaagtagtagtcatattgaggcagaaatttgtagcccaaacaaggtaggtcttcgctgaaactaatttgaactattcctatttgaagcaaattgaacactattataaatctagactggctaattagatggaaactttgatggttaggttctttaagaggcatacaatccgttatgagaatgtttatgtttatgttttaatttttatcaaaataacctcagaggaggtacatgtgagtaaactgtcttaatggttgattacttggaacccacccattaattctaaatgatgtaatggtctataaggtagtaatctggcacagcttcagtaatgtgtgctgtgtttgtaaaaaggtgaagtactttattggcattttctaagccctctgacattgttagtgtctgggttggttggtttgcattttactattatggtggaatctgtgttccttcaccattggttaagtctgaggaactaacagtgaaattcattgatggccaacttggataaaaatgaagaatgatattttcccagtttactacacatggaccaatagtgattatttgggagagaacactgggtagtattgtttgacttaagaaccttaaatatattgaaaagtaatggcattcttgctcatgatttgcatttgttagtgaggtctcaccatagtattttaatgtagcttcttattaaaattttattcataaatagtttagcagtcacagaggtgaaaaaaaaaagatttgcaccatcatatccgagtctttactaataaaatgaggctgcttaagtacccaagtggagcaagggaagagttactacagttactgtaagtctgagttagaaaaaatacagagcatctagttattgagcaaagcccccttttacctgttcgcttattcaaagagaaacaatagaatttgcttctcagtacatgtttttaaaattgagaatctctgatgtgacaaaatcaatttttacaaaagttgaattaaaaacttttaaaaattgcttgtctttgggggtatgtctacatattcgtttaaatttagaaattcccacatgtttaagatatatgcccatcccctttttagagtaatcaaaatttctatcacagttcacatactggaatacatagtaaaattgagatgtgtccaagagattttcaatgttaattagctcattctaaatagccaatataaggtaacttctgtttaaaaaaaaaaaaaactagggaaaagttttaaatgtattagtatcaggctctgaggaaatttaatgcacattgactttttaaactatggattgaactcctcagtttaatacaatttgtgtttttgttaactagcagcagaatttcagcatttgctacttactggtagagaagaaaaatcccacagccctgccagtacaggttagtttaatctgtaagtacctgatgttcctatttttttcaaacatatccatataactcacacaaggaagaaagctgtgcggttacttaaatgttagtataactaataatagatccattggacactttaaacactcagtacttgggccaaagtagatctaggtttgctaaccccagttgtaataaaggtgtaatactgctcctttgttatctccttgtggttcaacctaagtagatacattgtacataaaaggaaaagacagtttcagttggctatgcccttgttgatagatgatatggagtccagggctttgggtccagggtcttttacttaagctatttcatggtggttctctcattcaccttttaactttttacattatgaatcaacctaagaaaaaaggcaagtttcctcacatctagaaatgataaatggtgtacagtcataagctagaatatgtttttataatgcttttttgttcttttagcaacacttgtaaatacaagtactcctctatttttgttctttttttgtaaactataacgtatcccgttggtgtaccagtgagttcattttactgtaaactaagaataacatacctttttaatactgaaagttgactactcatcaagaaatgtagctagattctttatgtaacacttttgaggggcagtggggacataatgggttgtggaaaatgtgttttaacatttttattttttttttattctacccgagttcattgttgtttgaaccatcctctaaagatttcctttaacctctaaatgttgtgcttttaggttgataacaaatgtaaagcactgaggagggaggaataaagcatacaagttaatttctaattttcgcaagcctgaaccatcctaatctgatagtaggatgtatggcttcttccttttcaccttgtgtgatgtttaatttgagacgatctagccataaaactagtaatcttgaattcctcttgagctggatggtgattagccattgtgaaaacagattatatggaaattgtgcatattgctaaattttaaaacatggatttatcaactgataataaaatatatcttacaagataaccacttgttttttaatgtaaaattgcacaagggcttaagtttcattgcctttcacagtttaatctgtatatgaaatggtgtagatacagtggaaatggttttccttaaaaccatctctttaaagctgcctttctggtgagtactgttttatacttttatatattataattttatcttctaaaattaactgaaataggacactttgattaaagaggtgagcactctgaatttctacatctttggatattacttgaatcaagaatattagaaaattattttaccacctggcatttcccttttaatttgctagttcacttttttctgaccttcacttaacagactataaatacaaaaactttgaacacataaattatttcattttggtgagatggaataaatgtttaaaattagtatttaagaaagttcttaaacattttttttagttggcagccaaaagatttttcttagtgctttggagacattgcataggtgtaaaattaagataccagaacttcattctgttcttgttgaagctgttgttgtggtgattcatgagcagtaagctggagttagagtggaagaagggtttaccaaaattcttcctgcagactagttgcttacagggtttctttgagaggcttaaaaatttcaaaagtattatttaagccactctaaccctgcatgaaaaattggagttagaaatactgatttctgagaccacgtataccagtgaaaattagcttctgagtaaatttctaatttatgccctgctttatttagcctcgctatatgtaacacatggattattttttccctctagtttttaactatatcctagattaaaaccagcatatgctaagaatgtttttacattctgtttcctcctgtgatctttctgaaccaataataaacagtcaactgtgatgctttttagtatgaacaatgatagttttctaaaatctgaaaatcaatacctgagtatgtgatgtggcaatgcattcttctagataagcactaaacaaagtatggaccctcaatttatgtctttaagatttaaagtgaagtaaatttctaaggaactgtgtcctttcctagcaggaataaacagtgaaaatttggtaagtatttaacttgaagtgcatgtaatagtgatgagagtaagtagccaaatttccgtaatataaggtaatgtttaaaagtgagcaataattattgcatctcttttgcgacttcatgtagatgtgattaacattttttacaaatttgcctgcataaagattaaattggaacataccttactcctttgtctggtttttttattttgtatggtgctttaaatactaattttatatttcaagctttttgcagggtagaaataagtggctgttaaagaaaatatcttcaagaaggattatttcagtgtccctttttaaaactcgatgatggctttcagtttatttaagtcttctgtttttcagctccagttaaaactgacaataggcagctatcaaaaatggaaaaaatcttgtgctctttctggaatattagaggaatcagttaataatagtaaagtggtattaacccaatacttgatttgcagtttttaaagcagtttttaaattgagagaaaaggggctgggcccagctgaggcgggtggatctcctgaggtcaggagtttgagaccagcctggccaacatagtgaaaccccgtctctactaaaaatacaaaaatcagccgggtgtggtgggacgtgcctgtaaccccagctactctggaggctgaggcaggaaaatcgcttgaacccagggggaggaggttgcagtgagccgagatggcgccgttgcactccagcttgggtgacagagcgagactccgtctcaaaaaaaaaaagaaaaaaagaaaaagtgataagatttgggagtctattccctgggatgttctattaataataaagtgataataaatgaaggttaaagtcaagtgttcaattactacaccaggaaagattgattatttctgaggaaaaggtccatttatttccaaactagtctgtagtggtttagagtaagcattattttatgaagtggtacaagattgcaaaggttagtaaagggacctgtctgtcaggtcaatcttcggtcttcacttttactggcaagggattatgtgaagagtaagtcatacaagggatatgattgtaaggaggtcctgaacaaagcatgataaatgttagtccatgtgtattattaaatggtctaaagaaaaatcatgactgatcgcataatttttaatgtaagtaaatgagctcactaagggtaattaaatactagcttttaaaatttaaagttctcacgaatattagtgcatcttgtcactttgatttgtcacctggttaaatagctggaagcttgtgcaaatgaaaaatgaaatggaagactacatttgtatatatatctgtataatttttgtttactagtaggttcagagagagatctgagatgttccttaacatgtagccatgtaattagaactcacaaggggcattgaaatgtttttctttttcagatagtctggggctatttacttattttaagtaagccaagtctaccatttgaaaaatggtgctttatttccatatctgaagcctgaagttattttttagtttgttttcatctaaaagtggaaagatttttgcttctgcgttattaagagcctctttgtttggaggagatggttatctccttcactcattaacctttgagtgcttgttatctacaaagatgaataaaatctttcatttattatttat

SEQ ID NO: 34974 - DNA, 2083 bp, Homo sapiens
  source 1..2083: mol_type = unassigned DNA
cgggaggcggagcggggaacgaggccgtcggccattttgtgtctgcttcctgtgggacgtggtggtagccgttgggttgggaaagtgagggatttttggcctcgtttctcctgcttcttttctcctcccttttactttgccggtagaacacagttatgggtcgcaagaagaagaagcagctgaagccgtggtgctggtattgtaatagagattttgatgatgagaagatccttattcagcaccaaaaagcaaagcattttaaatgccatatatgtcacaagaaattgtatacaggacctggcttagctattcattgcatgcaggtacataaagaaacaatagatgccgtaccaaatgcaatacctggaagaacagacatagagttggaaatatatggtatggaaggtattccagaaaaagacatggatgaaagacgacgacttcttgaacagaaaacacaagaaagtcaaaaaaagaagcaacaagatgattctgatgaatatgatgatgacgactctgcagcctcaacttcatttcagccacagcctgttcaacctcagcaaggttatattcctccaatggcacagccaggactgccaccagtaccaggagcaccaggaatgcctccaggcatacctccattaatgccaggtgttcctcctctgatgccaggaatgccaccagttatgccaggcatgccacctggaatgatgccaatgggtggaatgatgccacctggaccaggaataccacctctgatgcctggaatgccaccaggtatgcccccacctgttccacgtcctggaattcctccaatgactcaagcacaggctgtttcagcgccaggtattcttaatagaccacctgcaccaacagcaactgtacctgccccacagcctccagttactaagcctcttttccccagtgctggacaggctcaggcagctgtccaaggacctgttggtacagatttcaaacccttaaatagtacccctgcaacaactacagaacccccaaagcctacattccctgcttatacacagtctacagcttcaacaactagtacaacaaatagtactgcagctaaaccagcggcttcaataacaagtaagcctgctacacttacaacaactagtgcaaccagtaagttgatccatccagatgaggatatatccctggaagagagaagggcacagttacctaagtatcaacgtaatcttcctcggccaggacaggcccccatcggtaatccaccagttggaccaattggaggtatgatgccaccacagccaggcatcccacagcaacaaggaatgagacccccaatgccacctcatggtcagtatggtggtcatcatcaaggcatgccaggataccttcctggtgctatgcccccgtatgggcagggaccgccaatggtgcccccttaccagggtgggcctcctcgacctccgatgggaatgagacctcctgtaatgtcgcaaggtggccgttactgatcttacttcatccagtctaataggtttggagattaaaccttttctcaacttgtgctgtttatatagccaagcttccgtcaataaggcttcattgtgactttaacaaacattatcttcccacataccaggaactattggacatttattttacatgggaaaaattatttggaataataaagcaggaacttttcctgaagttgcaatttatactgtatggcttctttttcatgtttcatctaggtttttagaagtgaagtatagtaaatttggttcgttaaattgtgaaggcgctggaattacatgaacataccaccctagtaaaggcaagttctgtaagcttacattgctatttgtaaagtttgccttcacagcatttcagatgctgttggacttcatgtccccaacctagcttggtgagggctgtaactgtttccaagtacttgtacattggaagtctgaatgtgtaacaatatttaatgtatttagagttcctcatgttgcagggtttaagaaatctgacccaccaaggtcatgtgacttttctgtactgttaaacttcattgtaataaaatgagagaaaaatt

SEQ ID NO: 34975 - DNA, 1627 bp, Homo sapiens
  source 1..1627: mol_type = unassigned DNA
cggagcggggaacgaggccgtcggccattttgtgtctgcttcctgtgggacgtggtggtagccgttgggttgggaaagtgagggatttttggcctcgtttctcctgcttcttttctcctcccttttactttgccggtagaacacagttatgggtcgcaagaagaagaagcagctgaagccgtggtgctggtattgtaatagagattttgatgatgagaagatccttattcagcaccaaaaagcaaagcattttaaatgccatatatgtcacaagaaattgtatacaggacctggcttagctattcattgcatgcaggtacataaagaaacaatagatgccgtaccaaatgcaatacctggaagaacagacatagagttggaaatatatggtatggaaggtattccagaaaaagacatggatgaaagacgacgacttcttgaacagaaaacacaagaaagtcaaaaaaagaagcaacaagatgattctgatgaatatgatgatgacgactctgcagcctcaacttcatttcagccacagcctgttcaacctcagcaaggttatattcctccaatggcacagccaggactgccaccagtaccaggagcaccaggaatgcctccaggcatacctccattaatgccaggtgttcctcctctgatgccaggaatgccaccagttatgccaggcatgccacctggattgcatcatcagagaaaatacacccagtcattttgcggtgaaaacataatgatgccaatgggtggaatgatgccacctggaccaggaataccacctctgatgcctggaatgccaccaggtatgcccccacctgttccacgtcctggaattcctccaatgactcaagcacaggctgtttcagcgccaggtattcttaatagaccacctgcaccaacagcaactgtacctgccccacagcctccagttactaagcctcttttccccagtgctggacagatggggacacctgtcacaagctcaagtacagcttcatccaattcagaaagtctgtctgcatcttctaaagctctgtttcctagcacagcacaagctcaggcagctgtccaaggacctgttggtacagatttcaaacccttaaatagtacccctgcaacaactacagaacccccaaagcctacattccctgcttatacacagtctacagcttcaacaactagtacaacaaatagtactgcagctaaaccagcggcttcaataacaagtaagcctgctacacttacaacaactagtgcaaccagtaagttgatccatccagatgaggatatatccctggaagagagaagggcacagttacctaagtatcaacgtaatcttcctcggccaggacaggcccccatcggtaatccaccagttggaccaattggaggtatgatgccaccacagccaggcatcccacagcaacaaggaatgagacccccaatgccacctcatggtcagtatggtggtcatcatcaaggcatgccaggataccttcctggtgctatgcccccgtatgggcagggaccgccaatggtgcccccttaccagggtgggcctcctcgacctccgatgggaatgagacctcctgtaatgtcgcaaggacttccc

SEQ ID NO: 34976 - DNA, 9088 bp, Homo sapiens
  source 1..9088: mol_type = unassigned DNA
cctttgtctctcgctgcagccggaggtcaaggtctcgtccttactgctgtgtgtcctctgctcctagagtcccagcctctgtggccctatgacctgcaggtattgggagatccacaactaagtcgccaggaccccctggaagcctagaaatgggatcattgacatttagggatgtggccatagaattctctctggaggagtggcaatgcctggacactgcacagcagaatttatatagaaatgtgatgttagagaactacagaaacctggtcttcctgggtattgctgcctttaagccagacctgatcatttttctggaggaaggaaaagagtcctggaatatgaagagacatgagatggtggaagaatccccagttatatgttctcattttgctcaagatctttggccagagcagggcatagaagattctttccaaaaagtgatattgagaaggtatgaaaaatgtggacatgagaatttacacttaaaaattggttataccaatgtggatgagtgtaaggtgcacaaagaaggttataataaacttaaccagagtttgacaactacacagagcaaagtatttcaacgtggcaaatatgcaaatgtctttcataaatgttcaaattcaaacagacataagataaggcatactggaaagaaacatttgcaatgtaaagaatacgtcagatcattttgcatgctttcacacctatctcaacataaaagaatttatactagagagaattcctacaaatgtgaagaaggtggcaaagcttttaactggtcctcaacccttacttattataagagtgctcatactggagagaaaccctacagatgtaaagaatgtggcaaagcctttagtaagttctcaatccttactaaacataaggtaattcatactggagagaaatcctacaaatgtgaagaatgtggcaaggcttttaaccaatctgcaatccttactaaacataagataattcatactggagagaaacccaacaaatgtgaagaatgtggcaaagcctttagtaaggtctcgactcttactacacataaggcaattcatgctggagagaagccctacaaatgtaaagaatgtggcaaagccttcagtaaggtctcaacccttattacacataaggcaattcatgctggagagaagccctacaaatgtaaagaatgtggcaaagcctttagtaagttctcaatccttactaaacataaggtaattcatactggagagaaaccctacaaatgtgaagaatgcggcaaagcctataagtggccctcaacccttagttatcataagaaaattcatactggagagaaaccctacaaatgtgaagaatgtggcaaaggttttagtatgttctcaatccttactaaacatgaggtcattcatactggagagaaaccctacaaatgtgaagaatgtggcaaagctttcaactggtcctcaaaccttatggaacataagaaaattcacactggagagacaccctacaaatgtgaagaatgtggcaaaggctttagtatgttctcaatccttactaaacataaggtaattcataatggagagaaaccctacaaatgtgaagaatgtgataaggcaactcatgctggagagaaaccctacaaatgtgaagaatgtggcaaagctttcaactggtcctcaaaccttatggaacataagagaattcatactggagagaaaccctacaaatgtgaagaatgtggcaaaagcttcagtacattctcaatccttactaaacataaggtaattcatactggagagaaaccctacaaatgtgaagaatgtggcaaagcctataagtggtcctcaacccttagttatcataagaaaattcatactgtagagaaaccctacaaatgtgaagaatgtggcaaagcttttaaccaatctgcaattcttattaaacataagagaattcatactggtgagaaaccctacaaatgtgaagaatgtggcaaaacctttagtaaggtctcaacccttactacacataaggcaattcatgctggagagaagccctacaaatgtaaagaatgtggcaaaacctttattaaggtctcaacccttactacacataaggcaattcatgctggagagaagccctacaaatgtaaagaatgtggcaaagcctttagtaagttctcaatccttactaaacataaggtaattcatactggagagaaaccctacaaatgtgaagaatgtggcaaagctttcaactggtcctcaaaccttatggaacataagagaattcatactggagagaaaccctacaaatgtgaagaatgtggcaaaagctttagtacattctcagtccttactaaacataaggtaattcatactggagagaaaccctacaaatgtgaagaatgtggcaaagcctataagtggtcctcaacccttagttatcataagaaaattcatactgtagagaaaccctacaaatgtgaagaatgtggcaaagcttttaaccgatctgcaatccttattaaacataagagaattcatactgatgagaaaccctacaaatgtgaagaatgtggcaaaacctttagtaaggtctcaacccttactacacataaggcaattcatgctggagaaaagccctacaaatgtaaagaatgtggcaaagcctttagtaagttctcaatccttactaaacataaggtaattcatactggagagaaaccctacaaatgtgaagaatgtggcaaagcctataaatggccctcaacccttagttatcataagaaaattcatactggagagaaaccctacaaatgtgaagaatgtggcaaaggttttagtatgttctccatccttactaaacatgaggtaattcatactggagagaaaccctacaaatgtgaagaatgtggcaaagccttcagctggttgtcagtctttagtaaacataagaaaactcatgctggagagaaattctacaaatgtgaagcatgtggcaaagcctataagtcatcctcaacccttagttatcataagaaaattcatactgaagagaaaccttacaaatatgaagaatgtggcaaaggctttagtacattctcaatccttactaaacataaggtaattcatactggagagaaaccctacaaatgtgaagaatgtggcaaagctttcaactggtcatcaaaccttatggaacataagaaaattcacactggagagacaccctacaaatgtgaagaatgtgacaaagccttcagctggccctcaagccttactgaacataaggcaactcatgctggagaaaaaccctacaaatgtgaagaatgtggcaaagccttcagctggccctcaagacttactgaacataaggcaactcatgctggagaggaaccctacaaatgtgaagaatgtggcaaagctttcaactggtcctcaaaccttatggaacataagagaattcatactggagagaaaccctacaaatgtgaagaatgtggcaaaagctttagtacgttctcaatccttactaaacataaggtaattcatactggagagaaaccctacaaatgtgaagaatgtggcaaagcctataagtggtcctcaacccttagttatcataagaaaattcatactgtagagaaaccctacaaatgtgaagaatgtggcaaaggctttgttatgttctcaatccttgcaaaacataaggtaattcatactggagagaaactctacaaatgtgaagaatgtggcaaagcctataagtggccctcaacccttagatatcacaagaaaattcatactggagagaaaccctacaaatgtgaagaatgtggcaaagcctttagtacgttctcaatcctcactaaacataaggtaattcatactggagagaaaccctacaaatgtgaagaatgtggcaaagccttcagctggttatcagtcttcagtaaacataagaaaattcatactggagagaaactctagaaatgtgaagaatgtggcaaagcctataagtggccctcaacccttagttatcataagaaaattcatactggagagaaaccctacaaatgtgaagaatgtggtgaggctttcaactggtcctcaaaccttatggaacataagagaattcatactggagagacaccctacaaatgtgaagaatgtggtaaaggctttagtatgttctcaatccttactaaacataaggtaattcatactggagagaaaccatacaaatgcaaagaatgtggcaaagcctataagtggtcctcaaccctcagttatcatagaaaattcatactggagagaaaccctacaaatgtgaagaaagtggcaaagccttcagctggttctcagtctttagtaaacataagaaaattcatgctggagagaaattctaaaaatgtgaagaatttggcaaagcttttaaacagttcccaaccctcctacacataagaaaattcatgctggagagaaactctacaaatgagaagaatgtggcaaaggcttcaaccagtcctcaaaccttatggaacataagagaattcatactggtgagaagccctacaaatgtgaagaatgtgataaagacttcaactggtcctcacaccttactactcataaaagaattcatactggaggaaaaaccctacaaatatgaaaaatgtggcaaaactattaattaattctcaacgcttactgaacataagggaatttgtacaggagggaaaccctacaaatctgaagaatgtggcaagccttttagctattcctcaatccttactaaacattcatgtaattcatactggagggaattcctacaattgtgtggaatgttgcaatgcccttaaccagtccttaaggcttactacatataagacaactcatactggagagaaaccatgcatgtgtgaagaatgtgggaaagcctctaatagatcctcaattcttaagagacataagctaattcatacacaagagagactctacaaacctgaaagatgtgacaatgcttttggcaacacctcagacttttctgaatataaaagaaatcgtacagatgagaaatcctagaaaagtgaagaatatgacaaagcctttaagtggctgtcacacttgattgtaggtaagataactcatactggagaaaactactgtaataaacaatgtgacaaacatttaaccagtgctcatgccttattgcaaaggaaagcatttacactagcctgggcaacagagagagactgtctggaaaaaaaaatttttgttaatgccagtaatatcttctcacagcttattaaacatcagagagttcatactaaataaaagtattaaaagtgcaatcactgtcactagatctttcagaaaataaaagctgttaaagtacagaagaatatttattttgaggaaacacattataaatattaagagggttgtagtacatgtacttgtatcacagattttattgtacacattttgtactacaggaaaacctgaggtagttgttccaactttgctcaacatcagggaatttatattgaagaataaccctgcaaatttaataaatttggaaaaacattttttcaaaaactacagattataaaacacaaatgcgtttatactaaaatatgtttttgcagatacagtaaatataaaaaatatttaatccaaaattaagtttatgtaaatatcagctaattcacagtagaaatacctgtcactcaaacttcagatattacactaaatcagactgctgagtataggaaaaaatccaaaactaaagttggcaaaaagaagaattatttgtatataactttaaaagaagtagatctttgaagagttataattaaatttaaagtatacttttttcttcaaaacacagattttttttttttccagacacattggcttactgtggccaatactttgtgatgccaaggtgggcagatcacctgaggtcaggagttcaagaccagccttgccaacatagtggaactaaaaagaaatgtttactaaacatgtttactaaaaagaaataaagaaattagccaaggtctagcttccaggttcatgccattctcccacctcagcctcccaattagctgggactacaggcgcccgccgccactcccagctaattttttgtatttttagtacagatggggtttcaccatattagccaggacggtctctatctcctgacctcatgatatgcccaccttggccacccaaagtcctgggattgcaggcatgagccacagtgcctggcctaataacagaagtctttagcagagcaaaaatgtataaaatgtataatgacattgtataagtaataataaacctactaaccataaaaagccctggatcatatgaaatcacagcgaagttttaccacattgcaaagagttttacctaagcctactgaatgcattcgaaaaaatcaaggtgggatttcaccctaacttgttatattaaatcagtgaaatatatgaaactaaaatctagtgaaggcaccacaaaaaaaggaaagtacaggtcaatattctgggtgaatattggaataataatcctccatgaaatactagcaaactgaattcaaaagcaaatcagaaagttattttgctacattaatgtgagcttttccatatatatgaaggtgtttcatgatatggaagtcaataagtgtgattcaccatgtaaagataattaaaagaaaaaaaaataacagtaggggcagaaaaagcattcaagaaaacccaatattaactcaaaaatgttgtcaacacactggacattgatgaaaatatcttaataagagtcatctatgacaaatccttagccaacatcatactaaaagagcaaaaactggaagcattctccatgagaataaaaataagaatatccattctaaacagtcctattgaagttatgaaatcctagccagagaataaaaggaatccaaacagaaaacaaagaaagtcaaattatctttactgatgaaagaattgtccacctagaatactttaaaggtttcaccaaaagagttctaagcctggaaaaagacttcaaaaaaaatcttagaatacaaaatcagcacaaatgcatagcatttctgtacaccaataatattcaaactgagaacaaaataaaaaacacagctctatttacaatagcaacaaacacacaaaaaaatacctagaaatacattaaatcaagggggtaaaatatctctacaaagaacaacaaaacattgctgaaagaaacgagagacaatgcaaataaatggaaaaatattgctcatggattcaaataatataattaaaatggtcattctgcctaaagcaacctacagattaagtgctatttttatcagactatccatgacgatttttattgaattagaaaaagaaaactattctaaaatacattcaaaagaattaaagagctcaaatagccaagaaaacttcagactaaaagaataaatctgggccaagcatggtggctcatgcctgtcatctcagccctttgggaggctgagatggatggatcacctgaggtcagaagtttgagaccagcctggccaacatggtgaaacctgcatctctactaaatgtaaaaaattagccaggtgtggtggtgcatgcctgtaatcccagctacttgggaggctgaggaaagagaaccatttgagcctgggaggtggaggttgcagtgagccaagattgcatcagaataaccagtataacatggttctggtacaaaaataaacatctagaccaatgaaatggaagagagagtactgaattaagctatactttgcaatcaggttatttttacaaagccaacagaaataaacaaaaggggaattaactccctatttagtaagtaatactgggaaaactggttagtcatatgtggaagaaaactgtactacctttttctataaaaaaaaaacaactcaatatagattaaagacttgatctgtgagtctccaagctacaaaaatcttagaataacacttagataatactggcctctgtaaagaatttatgactaacatctaacatgagtgcaacaaaaataaaaataaaaaatggcatctaagccaaagagcttctgcacagtaaaagaaactatcagcaaagtaaacagatgacctacagtatgaaataaaatatttgcaaactgcagacaatgaaggattaatgtacagaatctataatacatttaataaaaaagcaaacatgatatgaatagccagcttcttctcaaaggaagacataagagctgccaataaacatgtaaaaattgctcaacgttcctaattatcagaaagatgtaaatcaaagtgacagtgtgatactatttcataccagtaagaatgacttattaaaagtaagataaataagatgttgaagttgtagagataaggaaatctttctacactgttggtgggaatgcaaattaattcagaacctgtgcaaagcagtttggggacttctcaaagaactagaaatagaattgccatttgaccaatcaagccgattactggatatctgcccccaaaaagaataaataattttgccaaagagacaccagcactcacatgttcattgcagcactattcacaatagcaaaaacagaatttaaccagttacccatgaatcttttattggataagaaaaatgatgtacttatacaacctccaatactatgcagcaacagaagagaatgaagtaacgtcttttgcagcaacatgaatgcagctctgcttcaggccattctaagcaaattattgcatcagaaaaacaaatgccacatgttctcactcatacatggatgctaaaaattgggcgcacatggaaacaaagatgaaaacaataaacactgagaattctaaaaagaaggaggaaggatgggagacaagcatagaaaatctgcttaggtatgatgtacactacttgggcaatggaattattaagtatccaaacctcaacatcatgtagtctacctgttttacaaatctgcacatgtaccttaaatataaaataaaaataataaaatgttttttggtataa

SEQ ID NO: 34977 - DNA, 120 bp, Homo sapiens
  source 1..120: mol_type = unassigned DNA
ggcaaaggctttagtatgttctcaatccttactaaacataaggcaactcatgctggagagaaaccctacaaatgtgaagaatgtggcaaagctttcaactggtcctcaaaccttatggaa

SEQ ID NO: 34978 - DNA, 3653 bp, Homo sapiens
  source 1..3653: mol_type = unassigned DNA
cctttgtctctcgctgcagccggaggtcaaggtctcgtccttactgctgtgtgtcctctgctcctagagtcccagcctctgtggccctatgacctgcaggtattgggagatccacaactaagtcgccaggaccccctggaagcctagaaatgggatcattgacatttagggatgtggccatagaattctctctggaggagtggcaatgcctggacactgcacagcagaatttatatagaaatgtgatgttagagaactacagaaacctggtcttcctgggtattgctgcctttaagccagacctgatcatttttctggaggaaggaaaagagtcctggaatatgaagagacatgagatggtggaagaatccccagttatatgttctcattttgctcaagatctttggccagagcagggcatagaagattctttccaaaaagtgatattgagaaggtatgaaaaatgtggacatgagaatttacacttaaaaattggttataccaatgtggatgagtgtaaggtgcacaaagaaggttataataaacttaaccagagtttgacaactacacagagcaaagtatttcaacgtggcaaatatgcaaatgtctttcataaatgttcaaattcaaacagacataagataaggcatactggaaagaaacatttgcaatgtaaagaatacgtcagatcattttgcatgctttcacacctatctcaacataaaagaatttatactagagagaattcctacaaatgtgaagaaggtggcaaagcttttaactggtcctcaacccttacttattataagagtgctcatactggagagaaaccctacagatgtaaagaatgtggcaaagcctttagtaagttctcaatccttactaaacataaggtaattcatactggagagaaatcctacaaatgtgaagaatgtggcaaggcttttaaccaatctgcaatccttactaaacataagataattcatactggagagaaacccaacaaatgtgaagaatgtggcaaagcctttagtaaggtctcgactcttactacacataaggcaattcatgctggagagaagccctacaaatgtaaagaatgtggcaaagccttcagtaaggtctcaacccttattacacataaggcaattcatgctggagagaagccctacaaatgtaaagaatgtggcaaagcctttagtaagttctcaatccttactaaacataaggtaattcatactggagagaaaccctacaaatgtgaagaatgcggcaaagcctataagtggccctcaacccttagttatcataagaaaattcatactggagagaaaccctacaaatgtgaagaatgtggcaaaggttttagtatgttctcaatccttactaaacatgaggtcattcatactggagagaaaccctacaaatgtgaagaatgtggcaaagctttcaactggtcctcaaaccttatggaacataagaaaattcacactggagagacaccctacaaatgtgaagaatgtggcaaaggctttaagtggtcctcaacccttagttatcataagaaaattcatactgtagagaaaccctacaaatgtgaagaatgtggcaaagcttttaaccaatctgcaattcttattaaacataagagaattcatactggtgagaaaccctacaaatgtgaagaatgtggcaaaacctttagtaaggtctcaacccttactacacataaggcaattcatgctggagagaagccctacaaatgtaaagaatgtggcaaaacctttattaaggtctcaacccttactacacataaggcaattcatgctggagagaagccctacaaatgtaaagaatgtggcaaagcctttagtaagttctcaatccttactaaacataaggtaattcatactggagagaaaccctacaaatgtgaagaatgtggcaaagctttcaactggtcctcaaaccttatggaacataagagaattcatactggagagaaaccctacaaatgtgaagaatgtggcaaaagctttagtacattctcagtccttactaaacataaggtaattcatactggagagaaaccctacaaatgtgaagaatgtggcaaagcctataagtggtcctcaacccttagttatcataagaaaattcatactgtagagaaaccctacaaatgtgaagaatgtggcaaagcttttaaccgatctgcaatccttattaaacataagagaattcatactgatgagaaaccctacaaatgtgaagaatgtggcaaaacctttagtaaggtctcaacccttactacacataaggcaattcatgctggagaaaagccctacaaatgtaaagaatgtggcaaagcctttagtaagttctcaatccttactaaacataaggtaattcatactggagagaaaccctacaaatgtgaagaatgtggcaaagcctataaatggccctcaacccttagttatcataagaaaattcatactggagagaaaccctacaaatgtgaagaatgtggcaaaggttttagtatgttctccatccttactaaacatgaggtaattcatactggagagaaaccctacaaatgtgaagaatgtggcaaagccttcagctggttgtcagtctttagtaaacataagaaaactcatgctggagagaaattctacaaatgtgaagcatgtggcaaagcctataatacattctcaatccttactaaacataaggtaattcatactggagagaaaccctacaaatgtgaagaatgtggcaaagctttcaactggtcatcaaaccttatggaacataagaaaattcacactggagagacaccctacaaatgtgaagaatgtgacaaagccttcagctggccctcaagccttactgaacataaggcaactcatgctggagaaaaaccctacaaatgtgaagaatgtggcaaagccttcagctggccctcaagacttactgaacataaggcaactcatgctggagaggaaccctacaaatgtgaagaatgtggcaaagctttcaactggtcctcaaaccttatggaacataagagaattcatactggagagaaaccctacaaatgtgaagaatgtggcaaaagctttagtacgttctcaatccttactaaacataaggtaattcatactggagagaaaccctacaaatgtgaagaatgtggcaaagcctataagtggtcctcaacccttagttatcataagaaaattcatactgtagagaaaccctacaaatgtgaagaatgtggcaaaggctttgttatgttctcaatccttgcaaaacataaggtaattcatactggagagaaactctacaaatgtgaagaatgtggcaaagcctataagtggccctcaacccttagatatcacaagaaaattcatactggagagaaaccctacaaatgtgaagaatgtggcaaagcctttagtacgttctcaatcctcactaaacataaggtaattcatactggagagaaaccctacaaatgtgaagaatgtggcaaagccttcagctggttatcagtcttcagtaaacataagaaaattcatactggagttcccaaccctcctacacataagaaaattcatgctggagagaaactctacaaatga

SEQ ID NO: 34979 - DNA, 2810 bp, Homo sapiens
  source 1..2810: mol_type = unassigned DNA
agaatgcacctggcatcaacacggcggcggcggcggcggcttccaacaggctctggggcgccgagcggacaggaacgcagcacgggggctccgaggcggggtctgggtgttgaggggcgactggagccatggcggagtcggcgcctgctcggcacaggagaaaacgacgctccacacctttaacttcttccacacttccttcacaagcaacagagaaaagctcctattttcagaccaccgagatttcactctggacggtggtggccgctattcaggctgtggagaagaagatggagtcccaggctgcccggctacagagcctggaggggcgcacggggacagccgagaagaagctggctgactgcgagaagatggccgtggagttcgggaaccagctggagggcaagtgggccgtgctggggaccctgctgcaggagtatgggctactgcagaggcggctggagaacgtggagaacctgctgcgcaacaggaacttctggatcctgcggctgcccccgggcagcaagggggaggcccccaaggtgtccaggtcactggagaatgatggcgtctgtttcaccgagcaggaatgggagaatctggaggattggcagaaggagctctacagaaacgtgatggagagtaactatgagacactggtctctctgaaggtccttggccagacagagggagaagcggagttgggtacagagatgctgggtgacttggaagaggaaggtcctggtggtgcccacccagcaggtggggtcatgatcaaacaggagctacagtatacacaggaaggccctgcggatcttcctggagagttctcatgcattgctgaagagcaggctttcctgagcccagagcagaccgaactctggggtggtcagggcagttctgtcctcttggaaacaggtcctggggactctactctagaggagcctgttggtagtagagttcctagcagcagcagaactgtgggctgcccgaagcagaaatctcataggcaggtacagctggaccaggaatgtgggcagggcctgaagctgaaaaaggacacttcccgcccctacgaatgttctgagtgtgagatcaccttccgctataagcagcagctggccacacatctgcgcagccactctgggtgggggtcttgtacacctgaggagccagaggagagccttaggcccaggccacggctgaaaccacagaccaaaaaggccaagctgcatcagtgtgatgtgtgcctgaggagcttcagctgcaaggtgagcctggtgacccatcagcgttgccacctgcaggaggggcccagtgccggccagcatgtccaagagaggttctcacccaacagcctggttgccctgcctggccacatcccttggaggaaaagccggagttccctcatctgtggttactgtggcaagagcttcagtcacccatctgacttggtgcggcaccagcgcatccacacgggtgagcggccctacagctgcactgagtgtgagaagagctttgtccagaagcagcacctcctgcagcaccagaagatccaccagcgggagcggggtgggctggccctggagcccggaaggcccaatggcctgctttaagggtgcagcccctcgcccgtctgggggatggaggggggtggcattggttcccccgaagagacactgcagtcagggactgagttcttcctgagggcagttgtttgtgattgccttcccttgtcccagtaccaagccaagcccaaaggctgtcctgaaaaccctgtggaagaagagtccaggccaggtcttcatcctgctgccaagtttgctgtttcttggcaccttcaggtctctggttttctcattcatgccaatgcttgtgggctggggttggcgttctgaccccacagggactggtggctggttccagggctcgtcccggcatttcatgtcttcccacggggttgagtcgggccataggggtgagcagctgcctggaagagttctgggaagtataaccctccattttttcttgttttataatctctttgtttaataataagtagaagaaataatttaaatgaactgcttagccctgctctgaagaaccttttttggaattagattttagttgattttttaaagaatacagcccaacacttgttttttacattttaagagttgtagaagttgttcctaacttggggactggacctaccctctaggagggagttgttaatggggctcttttagcccactgatgcttacttaggccggagagcaggggacacggtgctaggttccctcgtgcagtgcctggtgctctcaaattgtctcaaaaggaccaagaggaaaagagtcggaggggtagaccctgcagccctgttgagaagaaagattccagtgaagttgctgatggtatggctgtggtctgggacttgcggtgtctcggcatacccctctcctcttcccacctcctcctggctatgttctgcagcctcccagagtagaaaactactttgttacttaaggttgttcaccttgtaccagtggttatttgagtttgttcctattacaccaatccttacttgaggtggttcggattacagtttccaaatgcattctgggattgcctattccagagagggtacagaaaaagcacacagatggcttgtctcaggagtgttgaatgtgtgccccgctgctgtctggggggatgggagtgggctctggggtcatatgtgaacatccccttggatgatttgcggttgcttagaataaaacttgctactagcaaaagaaaaaaaaaaagtt

SEQ ID NO: 34980 - DNA, 3283 bp, Homo sapiens
  source 1..3283: mol_type = unassigned DNA
gcggaagtgggatctcctgggccgtagtgggcgttgtgtgtttcgggggcgggggcgggggcgggggccggggcggggacggggcctctggccgcctggctccaacatcaagcaccgggctccgagtggccgggatcagcgccccgaggcagaggccggagggcgcgcgcactgctaggaagtgctggtcccccgcgccgctctgccagcttggtcccccggcagacgcccctgtacgatcgccgctcgccccgcgggcgaggctgcggtggacagcgcggggctccggctggctcgccttcccgcctgccgtgtcctgctgagcgaccctggagtacacatccagatgccagcccagctaccacaggggatccctctgggagactgaaagtacaggttctggggcccaggttgaagccgaccaaccctgagcctcaggccaggggaatggcagcccccttggaggcccaggaccaggcccctggggagggagaagggcttctgattgtgaaagtggaagattcctcctgggaacaggaatctgcccagcatgaggatggcagggattccgaagcctgccgccagcgcttccggcaattctgctacggggatgtgcatgggcctcatgaggccttcagccagctctgggagctctgctgccgctggctgcggcccgagctgcgtaccaaggagcagatcctggagctgctggtgctggagcagttcctgacagtgctgccaggggagatccagggctgggtgcgtgagcagcacccgggaagcggtgaggaggctgtcgccttggtggaggacctacagaagcagccagtgaaagcctggcgacaggatgtgccctcggaggaggcggaacccgaggctgcaggccggggatcccaggccacggggcctcccccgacggtgggggcacggaggcggccgtctgttccccaggagcagcacagccatagcgcccagcctcctgctcttcttaaagagggtcgtcccggagagacgacggacacctgctttgtctctggggtccatggacctgtggcattgggagacatcccattctatttctcccgggaagaatggggcaccctggaccctgctcagcgggatctcttctgggacataaagcgggagaactcccggaacaccaccctgggttttgggctcaaaggccaaagtgagaagtccctgctgcaggagatggtgccggtggtgccaggccagacaggcagcgacgtgactgtgtcctggagccccgaggaggctgaggcctgggagagcgagaaccggccgagggcggccctgggcccagtggtgggcgcgcgacgggggcggccacccactcgccggcgccagttccgggacctggcagccgagaagccgcacagctgcgggcagtgtggaaagcgcttccgctggggctcggacctggcgcggcaccagcgcacgcacacgggcgagaagccacacaagtgccctgagtgcgacaagagcttccgcagctcctcggacctggtgcgccaccaaggcgtgcacacgggcgagaagcccttctcctgttccgagtgcggcaagagcttcagccgcagcgcctacctggccgaccaccagcgcatacacacgggcgagaagcctttcggctgcagcgactgcggcaagagcttctcgctgcgctcctacctgctggaccatcggcgtgtgcacaccggtgagcggcccttcggctgcggagagtgcgacaagagcttcaagcagcgcgcgcacctcatcgcgcatcagagcctgcacgccaagatggcccagcccgtggggtgagcagctggcttggccggaaacccgggggaggcccagccacggcacatcctgctttgttcaccactgggactctccttccatctgtggccacctcccgggctgtccgagggaccccagggtacctcacactcggagctcgcctgccctgcttggctctgaggacctgcccagcgctcaaagggaacggaagccttcccctcccgcccccgatcttgtcctctttcccccttctgcgcctagcgttcctcttcccctctagtttcctggagccccaacacattcctggcagggacagcagggtggcaaggactcaggtctaggtcccttcccagaagcccccgagcctcatttgactgtgtggctctttggcccccaccctgtggggtgggtccatgggtcaggcctctgccctaccaacctgtgcctttcagtgggcgtggaggactggccttggccccccagggggctgctggactttgggagagacagcccacacctgtgggaccgcgggtcttagtcacggcggcaggggctttctggccccctcccactcccgtttccaggccatgaccactctgccctgtcctggccatacggactcggcctgcctttgccctcggcctacttgccctagcatgaggctctgagagccacctgcccaccaatctggtgaggataatggtggctccagcgacaggaggccaaccctggagaccaagaacagggcgcctggctgccatcttttcctccagaggtggggctgcaccagactcagcactagcactccatcagcactagcacctcactccatcagcactagcacctcactccatcggccccggcaccctgctccatcggcactggcgccctgctccatcggcactaatgctccactcggcgccccactccatcggccccgctccatcggcactaatgccccactcggcgccccactccatcagcactaatgctccactccattggcactaacgccccaactccagcggcactaatgacccgctcctttgacattggtgccccactccatcagcactaacgccctgctccatcggcactggtgtcccactccattgtcactaacgtccggctccatcggcactaccaccccgctccatcatcactatgtccagctccgtcggcactaccaccctgctccatcatcactacgtccagctccaacggcactggtgccccattccatcggcactaacgccccgctccaccggcaccagtgcctcgctccattggcaccaacgcccagctccaccggtactggctccctgctccatcggcactaacgccctgcttcattggcactttgctgctgcctcctgagcactgccttccatgaacagggacagaccagaggccctgcaaggactccccctcagacctccaaagggcaacagaagagtattaataaacgtgaaaactt

SEQ ID NO: 34981 - DNA, 1313 bp, Homo sapiens
  source 1..1313: mol_type = unassigned DNA
atgaggccttcagccagctctgggagctctgctgccgctggctgcggcccgagctgcgtaccaaggagcagatcctggagctgctggtgctggagcagttcctgacagtgctgccaggggagatccagggctgggtgcgtgagcagcacccgggaagcggtgaggaggctgtcgccttggtggaggacctacagaagcagccagtgaaagcctggcgacaggatgtgccctcggaggaggcggaacccgaggctgcaggccggggatcccaggccacggggcctcccccgacggtgggggcacggaggcggccgtctgttccccaggagcagcacagccatagcgggacctgtggcattgggagacatcccattctatttctcccgggaagaatggggcaccctggaccctgctcagcgggatctcttctgggacataaagcgggagaactcccggaacaccaccctgggttttgggctcaaaggccaaagtgagaagtccctgctgcaggagatggtgccggtggtgccaggccagacaggcagcgacgtgactgtgtcctggagccccgaggaggctgaggcctgggagagcgagaaccggccgagggcggccctgggcccagtggtgggcgcgcgacgggggcggccacccactcgccggcgccagttccgggacctggcagccgagaagccgcacagctgcgggcagtgtggaaagcgcttccgctggggctcggacctggcgcggcaccagcgcacgcacacgggcgagaagccacacaagtgccctgagtgcgacaagagcttccgcagctcctcggacctggtgcgccaccaaggcgtgcacacgggcgagaagcccttctcctgttccgagtgcggcaagagcttcagccgcagcgcctacctggccgaccaccagcgcatacacacgggcgagaagcctttcggctgcagcgactgcggcaagagcttctcgctgcgctcctacctgctggaccatcggcgtgtgcacaccggtgagcggcccttcggctgcggagagtgcgacaagagcttcaagcagcgcgcgcacctcatcgcgcatcagagcctgcacgccaagatggcccagcccgtggggtgagcagctggcttggccggaaacccgggggaggcccagccacggcacatcctgctttgttcaccactgggactctccttccatctgtggccacctcccgggctgtccgagggaccccagggtacctcacactcggagctcgcctgccctgcttggctctgaggacctgcccagcgctcaaagggaac

SEQ ID NO: 34982 - DNA, 2681 bp, Homo sapiens
  source 1..2681: mol_type = unassigned DNA
gagtgtctactccaagacctgggacttccgtttcggtccagccgggctgcggccattgtttgtgtggactgagtgttttggccatcccggtccactctcacaggctccgttaagtgacatgaactctcaggaggactgagccagaagcggacagggcaagacgagctgtgcttgaaggaagaggggcagaaaatcgagggtcagggactgagaagctactccggtttagaaaccccagagacacccgtgtagatgggtacatcacggcttctctcccacgttaagacttaataaagaaagcctgatctttgaccagatggcagtaacatttgaagatgtgactattatttttacatgggaggagtggaaattcctggattcttctcaaaaaagactctacagggaggtcatgtgggagaactacacaaatgtcatgtcagtagaaaactggaatgagagctacaaatcccaagaagaaaaattcagatacttagaatatgaaaatttttcctactggcaaggctggtggaatgctggcgcccagatgtatgagaatcagaactatggggaaactgttcaagggacagattccaaagacctcacacagcaagatcgttcccagtgtcaggaatggttaatactctccacacaagtaccagggtatgggaactatgaactgacttttgaaagcaaaagtctcaggaacttaaaatataaaaattttatgccttggcagtccttagaaacaaaaaccactcaagactatggtagagaaatctacatgagtggttcacatggttttcaagggggcagataccgtcttggcatatccaggaaaaacctctccatggaaaaagaacagaagctcatagttcagcattcttatatcccagtggaggaagcccttccacagtatgttggggtgatatgtcaagaagacctactgagagattcaatggaagaaaagtactgtggatgtaataaatgtaaaggaatttattattggaactcacggtgtgttttccacaagagaaatcaacctggagaaaacctctgtcaatgctccatctgtaaagcatgcttctctcagagatcagacttgtatagacatccaagaaaccacataggtaagaagctgtacggatgtgatgaagttgacggtaactttcatcagagctccggagttcactttcatcagagagttcacataggggaggtaccttatagctgtaatgcatgtggtaagagcttcagccagatctctagtcttcacaatcatcaaagagtccacacagaagagaaattctataaaattgagtgtgataaagacctcagtagaaattcattacttcacattcaccagagacttcacataggagagaagccttttaaatgtaatcagtgtggtaagagttttaatcggagttcagtacttcatgttcatcagagagtccacacaggagaaaaaccatataagtgtgatgagtgtggtaagggtttcagccagagctcaaatcttcgaattcatcagttagtacacacaggagagaagtcttataaatgtgaagactgtggtaaaggctttacccagcgctcaaatcttcaaattcatcagagagtgcatacaggagagaaaccttataaatgtgatgactgtggaaaggactttagtcacagctcagatcttcgcattcatcagagagtccatacaggggagaaaccctatacttgtcctgaatgtgggaagggcttcagtaagagttcaaagcttcacactcatcaaagagtacatactggagagaaaccctacaaatgtgaagagtgtggcaagggattcagtcagcgttcacatcttctcattcatcagagagtccatacaggagaaaagccctataaatgtcatgattgtggaaagggttttagtcacagttctaatcttcacattcatcagagggtccatacaggagagaagccttatcaatgtgctaagtgtggtaaaggtttcagtcatagctcagctcttcgaattcatcaaagagtccatgcaggagagaaaccttacaaatgccgtgaatattataagggatttgatcataattcacatcttcacaataatcatagaagaggaaacttataaatattgttcatttagttaacagctttaatcaaagtttacctaacctttaaaccctataaatcctgctgttaaggaaatcttataaataacacaagtaatcccaagcaacatttatagtttcccctatctcccactaagaattatttgcttcaaaaggagatctttagaaaaaaccctatatatttaaaattatagtgtatttttctttacctactataaatataatacagtcataaatatattaaacatttaaggagaaaactcttcattctatttcattctagtctttttttctgtgcattttaatgtgcatgaaattgtgtgttcaattttgtattttcactgtcttcaaaatatttacttaaattttggtttgaattgaaactggttggccaactgttaaacgacatctcttaactcccctaaaaactccctaggaagtaacagaaaagatggaaacacatagaacttaaaactcagttttggccggtagaattcaattgtttatggacaaaagccacctaataaaagataggaaagcatt

SEQ ID NO: 34983 - DNA, 2562 bp, Homo sapiens
  source 1..2562: mol_type = unassigned DNA
gactgagccagaagcggacagggcaagacgagctgtgcttgaaggaagaggggcagaaaatcgagggtcagggactgagaagctactccggtttagaaaccccagagacacccgtgtagatgggtacatcacggcttctctcccacgttaagacttaataaaggaacctacctttgatcagcaaggaaggactggggtggcaaaggctcatgcccccattttacagcctgatctttgaccagatggcagtaacatttgaagatgtgactattatttttacatgggaggagtggaaattcctggattcttctcaaaaaagactctacagggaggtcatgtgggagaactacacaaatgtcatgtcagtagaaaactggaatgagagctacaaatcccaagaagaaaaattcagatacttagaatatgaaaatttttcctactggcaaggctggtggaatgctggcgcccagatgtatgagaatcagaactatggggaaactgttcaagggacagattccaaagacctcacacagcaagatcgttcccagtgtcaggaatggttaatactctccacacaagtaccagggtatgggaactatgaactgacttttgaaagcaaaagtctcaggaacttaaaatataaaaattttatgccttggcagtccttagaaacaaaaaccactcaagactatggtagagaaatctacatgagtggttcacatggttttcaagggggcagataccgtcttggcatatccaggaaaaacctctccatggaaaaagaacagaagctcatagttcagcattcttatatcccagtggaggaagcccttccacagtatgttggggtgatatgtcaagaagacctactgagagattcaatggaagaaaagtactgtggatgtaataaatgtaaaggaatttattattggaactcacggtgtgttttccacaagagaaatcaacctggagaaaacctctgtcaatgctccatctgtaaagcatgcttctctcagagatcagacttgtatagacatccaagaaaccacataggtaagaagctgtacggatgtgatgaagttgacggtaactttcatcagagctccggagttcactttcatcagagagttcacataggggaggtaccttatagctgtaatgcatgtggtaagagcttcagccagatctctagtcttcacaatcatcaaagagtccacacagaagagaaattctataaaattgagtgtgataaagacctcagtagaaattcattacttcacattcaccagagacttcacataggagagaagccttttaaatgtaatcagtgtggtaagagttttaatcggagttcagtacttcatgttcatcagagagtccacacaggagaaaaaccatataagtgtgatgagtgtggtaagggtttcagccagagctcaaatcttcgaattcatcagttagtacacacaggagagaagtcttataaatgtgaagactgtggtaaaggctttacccagcgctcaaatcttcaaattcatcagagagtgcatacaggagagaaaccttataaatgtgatgactgtggaaaggactttagtcacagctcagatcttcgcattcatcagagagtccatacaggggagaaaccctatacttgtcctgaatgtgggaagggcttcagtaagagttcaaagcttcacactcatcaaagagtacatactggagagaaaccctacaaatgtgaagagtgtggcaagggattcagtcagcgttcacatcttctcattcatcagagagtccatacaggagaaaagccctataaatgtcatgattgtggaaagggttttagtcacagttctaatcttcacattcatcagagggtccatacaggagagaagccttatcaatgtgctaagtgtggtaaaggtttcagtcatagctcagctcttcgaattcatcaaagagtccatgcaggagagaaaccttacaaatgccgtgaatattataagggatttgatcataattcacatcttcacaataatcatagaagaggaaacttataaatattgttcatttagttaacagctttaatcaaagtttacctaacctttaaaccctataaatcctgctgttaaggaaatcttataaataacacaagtaatcccaagcaacatttatagtttcccctatctcccactaagaattatttgcttcaaaaggagatctttagaaaaaaccctatatatttaaaattatagtgtatttttctttacctactataaatataatacagtcataaatatattaaacatttaaggagaaaactcttcattctatttcattctagtctttttttctgtgcattttaatgtgcatgaaattgtgtgttcaattttgtattttcactgtcttcaaaatatttacttaaattttggtttgaattgaaactggttggccaactgttaaacgacatctcttaactcccctaaaaactccctaggaagtaacagaaaagatggaaacacatagaacttaaaactcagttttggccggtagaattca

SEQ ID NO: 34984 - DNA, 3448 bp, Homo sapiens
  source 1..3448: mol_type = unassigned DNA
tgcagaaagggacggggctggcaaaggcctggtctacctcaccgatccgggtcgcgggggctcctagggggttccttccacagctggtgcgcgtgcgcaagagtgcgtcgaggttgttccgcggcaatttatgaaactcggagccggcagtgagttgagggttcggcgaggtcagggattcctagttgcagcgtgattaccaacgccagctcccttcactgtccaagacagcgattccgcggctcctctgagaactggcgctttgttcatcatttgccacttaagctacttgcagtcacgtcacaccttggatctctatcatcaaaactattccacctcggaaatcttacctaaatgcagcatgccatcctgaacgtctctccctgtcctagctctgtaactgtttacattgctcaggtacctgaatattggctttgtgtctaaagtttctggaactttcctccttaccgtgaaataacttggcttaaatcacactgcatatagtacacaggtgcttagctcaagcctgagaattactgcaatctagtaaggcggatttgaactactgtgggagttctatttaggaagatgcagcctctgagcaagttgatggctatctcaaaacctcgaaacctgtctctacgtgaacaaagagaggttctgagagcagatatgtcttggcagcaggaaaccaaccccgtcgtggagacacatgactctgaggcatctcgtcaaaagttcagacatttccagtatttgaaagtgtctgggccccatgaagccctgagccaactctgggagctctgtcttcaatggctgagaccagagattcatacaaagaagcagattatagaactgttggtgctggaacaattcctggcaatcctgcctgaagaagtcaggacttgggtgaatttacaacatccaaacaacagtaaagatatggtgaccctcatagaagatgtgattgaaatgcttgaagatgaagatatgccctgcaaggactctgccctgcagatggggagcatcaaggagaaaatgaaagctggctcacgaacaggcaaaccacaggaaccagtgacattcaaagatgtggttgtggaattcagcaaggaagagtgggggcaactggactctgctgtaaagaacctgtacaggaatgtgatgctggaaaactttaggaacctgaattcattgcgtaaagcacatctactttccaaaccatttgagagccttaagttggagagtaagaaaaaaagatggataatggagaaagaaataccaaggaagactatttttgacatgaagagtatttctggagaagaatcatcccatggagtgattatgacaaggcttaccgaaagtggacacccttcttcagatgcctggaaaggtgagaattggttatataggaaccagaaaaaatgggacataaatttgccacaagaggctttcattcctgagacaatttacactgaggaggaagattttgaatgtagtgaaaataagaaaagctttgatattaattcagttagctcaatttgtgctatacaagtgggaattccttcaagaaaggggtctccaaaatgtgataagtttaaaacttacttcaaatttaatttagactcagtaggtaagcaacattcagaatatgaatatgggaatgacttgagtttgagtacagatattcgacaccaaaaaagtcatactacaatgaattcctatgaatgttatcaatgtgggaaagccttctgccgaagttcatcccttattcgacatcagatcattcacacaggagagaaaccctataaatgcagtgaatgtgggagattcttcaaccgacgtacaaaccttactaagcatcaaaaacttcatgctgaagcaaaggcctgcacaagcaataaatgtggaaaggccttcagtaaaagtgaagacagtaataatccaacactccattttggaaacaatttctatcaatgtgttaactgtggaaaatccttcaaccggagctcctctcttattcgacaccaaatgattcacacgggagagaaaccattcaaatgtaaggaatgtagtaaagccttcaacaggagttcaaaccttgttaaacatcaaaaactgcatactcgagataagtcctgaaaaaagaaaaaatgaaagattaccttcagtcagaatgcagaactcatttaacatcatgaatttatgctggataaaatctcatgaatataatgtaagaaaacatttgtcagatttttctttaaatgatatcacagaattaatgttggatagaaatatcattggatagaaatctgtttgaaggaattttcctggttttcagatgaagccataaggctttggagttaaaccacagtatcaccatacaagtatttgtttatcattattttgatatccattaccctcacctctccctagttcataaataggtctatagcatactaatatccacctgatttattgacgaagtagacattaggcaaagccaaacaatactcttggagttgatatttaataaaactcagcccttttaagaaggtcacaagaaatcattagctcatgcgaatataagagaatacttctaaggacagaaatctctgaatcaatggctaagacaacagtaacagccatttactccactcctgacaataccctttgttgtcttgctgttgaatggagactagagttgggaaagggttatcaactgcaatgggagaagtatgtattgctgttaatctatatgtattcttaaaatctgcatttgtttatagcaggtccttgaaaaatgtttttgttttgttataatgttataattgttatgatgttgatgagaaaaatatcgattcccagccagggacactgtgtggagttcgcacactctccctatgtctccgggtgctccagtttcaaaccccaaagatgtatacattaggttaattgacatatctaaattatctcagtctgagtttgtgaggaagtgtgccctgcagtggaatggctcctaatcagggtttgttcccaccattgccctgagctgctaggatgcgctctgtccacccatggccctgtactggaataacagggtaaataattatcttatctgtttttattaatccgtcttaaatgtgtatatagctcagatttattttaatgtctgatattggaagcgtttggggtctttagaagtttgatgatgttgtgaccagacatttgccttaggaacttaactcttgtttgtatccattagtctatggtaaaattggttttgttatacatcatttcacttaaagttgcagttcctaagaacctattgatgatgttcagtgcagacttactgtacctttgggaatttaggctggagagacgtccatagccttaggtatatcatttataccagacattatgaagttattaaagtctcctatactct

SEQ ID NO: 34985 - DNA, 3257 bp, Homo sapiens
  source 1..3257: mol_type = unassigned DNA
agagtgcgtcgaggttgttccgcggcaatttatgaaactcggagccggcagtgagttgagggttcggcgaggtcagggattcctagttgcagcgtgattaccaacgccagctcccttcactgtccaagacagcgattccgcggctcctctgagaactggcgcttgtgagtgactgaacgggccactggagaggagcggtgctcacggttgctcaggtacctgaatattggctttgtgtctaaagtttctggaactttcctccttaccgtgaaataacttggcttaaatcacactgcatatagtacacaggtgcttagctcaagcctgagaattactgcaatctagtaaggcggatttgaactactgtgggagttctatttaggaagatgcagcctctgagcaagttgatggctatctcaaaacctcgaaacctgtctctacgtgaacaaagagaggttctgagagcagatatgtcttggcagcaggaaaccaaccccgtcgtggagacacatgactctgaggcatctcgtcaaaagttcagacatttccagtatttgaaagtgtctgggccccatgaagccctgagccaactctgggagctctgtcttcaatggctgagaccagagattcatacaaagaagcagattatagaactgttggtgctggaacaattcctggcaatcctgcctgaagaagtcaggacttgggtgaatttacaacatccaaacaacagtaaagatatggtgaccctcatagaagatgtgattgaaatgcttgaagatgaagatatgccctgcaaggactctgccctgcagatggggagcatcaaggagaaaatgaaagctggctcacgaacaggcaaaccacaggaaccagtgacattcaaagatgtggttgtggaattcagcaaggaagagtgggggcaactggactctgctgtaaagaacctgtacaggaatgtgatgctggaaaactttaggaacctgaattcattgcgtaaagcacatctactttccaaaccatttgagagccttaagttggagagtaagaaaaaaagatggataatggagaaagaaataccaaggaagactatttttgacatgaagagtatttctggagaagaatcatcccatggagtgattatgacaaggcttaccgaaagtggacacccttcttcagatgcctggaaaggtgagaattggttatataggaaccagaaaaaatgggacataaatttgccacaagaggctttcattcctgagacaatttacactgaggaggaagattttgaatgtagtgaaaataagaaaagctttgatattaattcagttagctcaatttgtgctatacaagtgggaattccttcaagaaaggggtctccaaaatgtgataagtttaaaacttacttcaaatttaatttagactcagtaggtaagcaacattcagaatatgaatatgggaatgacttgagtttgagtacagatattcgacaccaaaaaagtcatactacaatgaattcctatgaatgttatcaatgtgggaaagccttctgccgaagttcatcccttattcgacatcagatcattcacacaggagagaaaccctataaatgcagtgaatgtgggagattcttcaaccgacgtacaaaccttactaagcatcaaaaacttcatgctgaagcaaaggcctgcacaagcaataaatgtggaaaggccttcagtaaaagtgaagacagtaataatccaacactccattttggaaacaatttctatcaatgtgttaactgtggaaaatccttcaaccggagctcctctcttattcgacaccaaatgattcacacgggagagaaaccattcaaatgtaaggaatgtagtaaagccttcaacaggagttcaaaccttgttaaacatcaaaaactgcatactcgagataagtcctgaaaaaagaaaaaatgaaagattaccttcagtcagaatgcagaactcatttaacatcatgaatttatgctggataaaatctcatgaatataatgtaagaaaacatttgtcagatttttctttaaatgatatcacagaattaatgttggatagaaatatcattggatagaaatctgtttgaaggaattttcctggttttcagatgaagccataaggctttggagttaaaccacagtatcaccatacaagtatttgtttatcattattttgatatccattaccctcacctctccctagttcataaataggtctatagcatactaatatccacctgatttattgacgaagtagacattaggcaaagccaaacaatactcttggagttgatatttaataaaactcagcccttttaagaaggtcacaagaaatcattagctcatgcgaatataagagaatacttctaaggacagaaatctctgaatcaatggctaagacaacagtaacagccatttactccactcctgacaataccctttgttgtcttgctgttgaatggagactagagttgggaaagggttatcaactgcaatgggagaagtatgtattgctgttaatctatatgtattcttaaaatctgcatttgtttatagcaggtccttgaaaaatgtttttgttttgttataatgttataattgttatgatgttgatgagaaaaatatcgattcccagccagggacactgtgtggagttcgcacactctccctatgtctccgggtgctccagtttcaaaccccaaagatgtatacattaggttaattgacatatctaaattatctcagtctgagtttgtgaggaagtgtgccctgcagtggaatggctcctaatcagggtttgttcccaccattgccctgagctgctaggatgcgctctgtccacccatggccctgtactggaataacagggtaaataattatcttatctgtttttattaatccgtcttaaatgtgtatatagctcagatttattttaatgtctgatattggaagcgtttggggtctttagaagtttgatgatgttgtgaccagacatttgccttaggaacttaactcttgtttgtatccattagtctatggtaaaattggttttgttatacatcatttcacttaaagttgcagttcctaagaacctattgatgatgttcagtgcagacttactgtacctttgggaatttaggctggagagacgtccatagccttaggtatatcatttataccagacattatgaagttattaaagtctcctatactctgtacaccagaa

SEQ ID NO: 34986 - DNA, 1396 bp, Homo sapiens
  source 1..1396: mol_type = unassigned DNA
tagtacacaggtgcttagctcaagcctgagaattactgcaatctagtaaggcggatttgaactactgtgggagttctatttaggaagatgcagcctctgagcaagttgatggctatctcaaaacctcgaaacctgtctctacgtgaacaaagagaggttctgagagcagatatgtcttggcagcaggaaaccaaccccgtcgtggagacacatgactctgaggcatctcgtcaaaagttcagacatttccagtatttgaaagtgtctgggccccatgaagccctgagccaactctgggagctctgtcttcaatggctgagaccagagattcatacaaagaagcagattatagaactgttggtgctggaacaattcctggcaatcctgcctgaagaagtcaggacttgggtgaatttacaacatccaaacaacagtaaagatatggtgaccctcatagaagatgtgattgaaatgcttgaagatgaagatatgccctgcaaggactctgccctgcagatggggagcatcaaggagaaaatgaaagctggctcacgaacaggcaaaccacaggaaccagtgacattcaaagatgtggttgtggaattcagcaaggaagagtgggggcaactggactctgctgtaaagaacctgtacaggaatgtgatgctggaaaactttaggaacctgaattcattgcgtaaagcacatctactttccaaaccatttgagagccttaagttggagagtaagaaaaaaagatggataatggagaaagaaataccaaggaagactatttttgacatgaagagtatttctggagaagaatcatcccatggagtgattatgacaaggcttaccgaaagtggacacccttcttcagatgcctggaaagatggagtttccctcttgttgcccaggctggagtataatgatgcagtctcggctcactgcaacctccacctctgggttcaagtgattctcctgcctcagcctcctgagtagctgggattagaggcacccaccaccatgcctagctaattttttgtgtttctagtagaaatggggtttcaccatgttggccaggctggtcttgaactcctgacctcaagtgatccgcccacctcagcctcctaaagtgctgggatgacaggcgtgagccaccacgcccagctgtcccttaacatttgaaatgtgtatatcacctcatttagctattctgtttctagaaacttatttttacaaagaaaattcacaaatgcacacgaaaatgtatgcatgaagatacttgtcacagcgttggttgtaataatatggaattaggtcaaatatttatcagtaaaagactaagtcatattgtgcatatactgaaatatgtgataaacctaaatttactgac

SEQ ID NO: 34987 - DNA, 5633 bp, Homo sapiens
  source 1..5633: mol_type = unassigned DNA
gacaaagagaactaatgctttgtgctgattcatatttgaatcgaggcattgggaaccctgtatgccttgtttgtggaaagaaccagtgacaccatcactgagcttcctaaaagttcgaagaagttagaggactatacactttcttttgaacttttataataaatatttgctctggtttttggaacccagggctgttagaggggtgagtgacaagtcttacaagtggccttattccaactccagaaattgcccaacggaactttgagattatatgcaatcgaaagtgacaggaaacatgccaactcaatccctcttaatgtacatggatgggccagaagtgattggcagctctcttggcagtccgatggagatggaggatgccttgtcaatgaaagggaccgctgttgttccattccgagctacacaagaaaaaaatgtcatccaaatcgaggggtatatgcccttggattgcatgttctgcagccagaccttcacacattcagaagaccttaataaacatgtcttaatgcaacaccggcctaccctctgtgaaccagcagttcttcgggttgaagcagagtatctcagtccgcttgataaaagtcaagtgcgaacagaacctcccaaggaaaagaattgcaaggaaaatgaatttagctgtgaggtatgtgggcagacatttagagtcgcttttgatgttgagatccacatgagaacacacaaagattctttcacttacgggtgtaacatgtgcggaagaagattcaaggagccttggtttcttaaaaatcacatgcggacacataatggcaaatcgggggccagaagcaaactgcagcaaggcttggagagtagtccagcaacgatcaacgaggtcgtccaggtgcacgcggccgagagcatctcctctccttacaaaatctgcatggtttgtggcttcctatttccaaataaagaaagtctaattgagcaccgcaaggtgcacaccaaaaaaactgctttcggtaccagcagcgcgcagacagactctccacaaggaggaatgccgtcctcgagggaggacttcctgcagttgttcaacttgagaccaaaatctcaccctgaaacggggaagaagcctgtcagatgcatccctcagctcgatccgttcaccaccttccaggcttggcagctggctaccaaaggaaaagttgccatttgccaagaagtgaaggaatcggggcaagaagggagcaccgacaacgacgattcgagttccgagaaggagcttggagaaacaaataagggcagttgtgcaggcctctcgcaagagaaagagaagtgcaaacactcccacggcgaagcgccctccgtggacgcggatcccaagttacccagtagcaaggagaagcccactcactgctccgagtgcggcaaagctttcagaacctaccaccagctggtcttgcactccagggtccacaagaaggaccggagggccggcgcggagtcgcccaccatgtctgtggacgggaggcagccggggacgtgttctcctgacctcgccgcccctctggatgaaaatggagccgtggatcgaggggaaggtggttctgaagacggatctgaggatgggcttcccgaaggaatccatctggataaaaatgatgatggaggaaaaataaaacatcttacatcttcaagagagtgtagttattgtggaaagtttttccgttcaaattattacctcaatattcatctcagaacgcatacaggtgaaaaaccatacaaatgtgaattttgtgaatatgctgcagcccagaagacatctctgaggtatcacttggagagacatcacaaggaaaaacaaaccgatgttgctgctgaagtcaagaacgatggtaaaaatcaggacactgaagatgcactattaaccgctgacagtgcgcaaaccaaaaatttgaaaagattttttgatggtgccaaagatgttacaggcagtccacctgcaaagcagcttaaggagatgccttctgtttttcagaatgttctgggcagcgctgtcctctcaccagcacacaaagatactcaggatttccataaaaatgcagctgatgacagtgctgataaagtgaataaaaaccctacccctgcttacctggacctgttaaaaaagagatcagcagttgaaactcaggcaaataacctcatctgtagaaccaaggcggatgttactcctcctccggatggcagtaccacccataaccttgaagttagccccaaagagaagcaaacggagaccgcagctgactgcagatacaggccaagtgtggattgtcacgaaaaacctttaaatttatccgtgggggctcttcacaattgcccggcaatttctttgagtaaaagtttgattccaagtatcacctgtccattttgtaccttcaagacattttatccagaagttttaatgatgcaccagagactggagcataaatacaatcctgacgttcataaaaactgtcgaaacaagtccttgcttagaagtcgacgtaccggatgcccgccagcgttgctgggaaaagatgtgcctcccctctctagtttctgtaaacccaagcccaagtctgctttcccggcgcagtccaaatccctgccatctgcgaaggggaagcagagccctcctgggccaggcaaggcccctctgacttcagggatagactctagcactttagccccaagtaacctgaagtcccacagaccacagcagaatgtgggggtccaaggggccgccaccaggcaacagcaatctgagatgtttcctaaaaccagtgtttcccctgcaccggataagacaaaaagacccgagacaaaattgaaacctcttccagtagctccttctcagcccaccctcggcagcagtaacatcaatggttccatcgactaccccgccaagaacgacagcccgtgggcacctccgggaagagactatttctgtaatcggagtgccagcaatactgcagcagaatttggtgagccccttccaaaaagactgaagtccagcgtggttgcccttgacgttgaccagcccggggccaattacagaagaggctatgaccttcccaagtaccatatggtcagaggcatcacatcactgttaccgcaggactgtgtgtatccgtcgcaggcgctgcctcccaaaccaaggttcctgagctccagcgaggtcgattctccaaatgtgctgactgttcagaagccctatggtggctccgggccactttacacttgtgtgcctgctggtagtccagcatccagctcgacgttagaaggaaaaaggcctgtgtcatatcaacacttatctaacagcatggcacaaaagagaaactatgagaattttattgggaatgcacattatcgaccaaatgacaaaaaaacttgattcactaattagggggaaaaaaggtcttggtggatgtcagtgcttactccccatgaaattaaattttacttcatcctttgagaagcgaatggtgaaagctactgaaataagctgtgattgtactgtacataaaacatatgaggaatctgcaaggaacactacagttgtgtaaagttgttctgttaacttttgtaccaaatagcaatacaaactagttggaacagttggaacttacatacatggggactggaaatctctattttgtccctgaataatatttttcttagaattgaccaaataagaagtggaatttttgcatacttgagcgctgctgaaaagaaatcatttgggttgggtggggcgggatgggggaaaagtatataatgcttgcacctcaggtaaaaatctgtaaatatctaagttgtaaacctgcttgttcaaatactgtgtgtattccttttctctaatgcagctcatcacttggagcagtttctgctattgtgctctttcatttaaaatgtatgtttttttttttttaaactgtcaatgattttgtattatgttgaatccacccaaatctattgttgtcttaaaattgttaatggaagtattgaccctctatgatatgtgctgcagatatcgaggtcagccattcggaagctggcagcattttatcgcaactttgagcatctcagatggggaaggcaccttcttcctcgcctctccagattgtcctggaacctccaggatccttgactgagggcgttgggatggcttgtaggatttttaagagagtgtgtctacagacaagcattttctctgtagagcagccacacgttgtataaacataaactgtatgtgcagttatttaaatttgtttctgtcaaattaatcatttttgttggacgattcagtggcgggggggttttgcctaaattagtatataaaaacaaaaatgctaaattatatctgtgaattgcaggtattggggaacagttttaagggaaattttggggggaacattttaggtttgtatttggtagtcttaatgtatctggcatttgggtgaactgtggacatactagagttgattatagacacattgattttgaataaggaactgctggccgagcccgctgggagtctagaaagagaaaatctgtttctagacctcagttattttcccatttttggttgttttgaagcagtaacatttttctcagtgcacatgcaatttgggttttagagaagatggccaccagctggcttcctagatattttaaacttttgttctttaatatgctgtccatggctgagtttattagtacatgggcttagtgaccacaaaatattttattaagaaactgtttcaaaaataaatttgcactgttcatttttctggcctcgctgttctccatagagcaagggtaatcctagaaaaaattttttttttttaaattatgcaacgtaagatgtcctccttgatagaagtcttagctcctgtgttacaagggagaactcatttgagatcagtctgttggcattgcaatgaagtgctttgtatcaggaaagtgtacactattgaccttttttcctgttcacaagctgagccatatgtacataatctagattttgttttcatagttttgcacttttatagcctatttttgaagattaacacatttgcaagatgattgactcaatctttgcctaatccaatgagtgttacagagagcttgctgtgactagaaccataaatcttaaagggggtatgtgataatagagggctggaatttaaacctgtatttaaaaaaaagaatcaccaaatctatttgaaaacaagtcgatttgtattatgctggaattttttgggctttcagatttctctttttaaccacatttctgaatgtataaaaataccaattattttcctacagccctttgtacttcaaaatatgtttttgtgtccatcagtattaactattggtatactactggttttatatttttttttctttgagacaacagtacatataatagaggtacaattcgttggatttttgtttatgtatttatttcattccagtttgatttattttaattgttgatacttaagttgtcgaacagtagacattacttgttttatttatgatatatttcagcttaaagttatgttattatatgtggaagtgtaaatatagatttggtgttttgc

SEQ ID NO: 34988 - DNA, 5796 bp, Homo sapiens
  source 1..5796: mol_type = unassigned DNA
attcaaacccggccggcccgagtggtgtcagctcagtcccggccgccgccgcgcgaggaaatggccgaggagccggagccgcagggtttggaaatcccttgtctccaggttgctgggattgacttcttgctcaattgaaacactcattcaatggagacaaagagaactaatgctttgtgctgattcatatttgaatcgaggcattgggaaccctgtatgccttgtttgtggaaagaaccagtgacaccatcactgagcttcctaaaagttcgaagaagttagaggactatacactttcttttgaacttttataataaatatttgctctggtttttggaacccagggctgttagaggggtgagtgacaagtcttacaagtggccttattccaactccagaaattgcccaacggaactttgagattatatgcaatcgaaagtgacaggaaacatgccaactcaatccctcttaatgtacatggatgggccagaagtgattggcagctctcttggcagtccgatggagatggaggatgccttgtcaatgaaagggaccgctgttgttccattccgagctacacaagaaaaaaatgtcatccaaatcgaggggtatatgcccttggattgcatgttctgcagccagaccttcacacattcagaagaccttaataaacatgtcttaatgcaacaccggcctaccctctgtgaaccagcagttcttcgggttgaagcagagtatctcagtccgcttgataaaagtcaagtgcgaacagaacctcccaaggaaaagaattgcaaggaaaatgaatttagctgtgaggtatgtgggcagacatttagagtcgcttttgatgttgagatccacatgagaacacacaaagattctttcacttacgggtgtaacatgtgcggaagaagattcaaggagccttggtttcttaaaaatcacatgcggacacataatggcaaatcgggggccagaagcaaactgcagcaaggcttggagagtagtccagcaacgatcaacgaggtcgtccaggtgcacgcggccgagagcatctcctctccttacaaaatctgcatggtttgtggcttcctatttccaaataaagaaagtctaattgagcaccgcaaggtgcacaccaaaaaaactgctttcggtaccagcagcgcgcagacagactctccacaaggaggaatgccgtcctcgagggaggacttcctgcagttgttcaacttgagaccaaaatctcaccctgaaacggggaagaagcctgtcagatgcatccctcagctcgatccgttcaccaccttccaggcttggcagctggctaccaaaggaaaagttgccatttgccaagaagtgaaggaatcggggcaagaagggagcaccgacaacgacgattcgagttccgagaaggagcttggagaaacaaataagggcagttgtgcaggcctctcgcaagagaaagagaagtgcaaacactcccacggcgaagcgccctccgtggacgcggatcccaagttacccagtagcaaggagaagcccactcactgctccgagtgcggcaaagctttcagaacctaccaccagctggtcttgcactccagggtccacaagaaggaccggagggccggcgcggagtcgcccaccatgtctgtggacgggaggcagccggggacgtgttctcctgacctcgccgcccctctggatgaaaatggagccgtggatcgaggggaaggtggttctgaagacggatctgaggatgggcttcccgaaggaatccatctggataaaaatgatgatggaggaaaaataaaacatcttacatcttcaagagagtgtagttattgtggaaagtttttccgttcaaattattacctcaatattcatctcagaacgcatacaggtgaaaaaccatacaaatgtgaattttgtgaatatgctgcagcccagaagacatctctgaggtatcacttggagagacatcacaaggaaaaacaaaccgatgttgctgctgaagtcaagaacgatggtaaaaatcaggacactgaagatgcactattaaccgctgacagtgcgcaaaccaaaaatttgaaaagattttttgatggtgccaaagatgttacaggcagtccacctgcaaagcagcttaaggagatgccttctgtttttcagaatgttctgggcagcgctgtcctctcaccagcacacaaagatactcaggatttccataaaaatgcagctgatgacagtgctgataaagtgaataaaaaccctacccctgcttacctggacctgttaaaaaagagatcagcagttgaaactcaggcaaataacctcatctgtagaaccaaggcggatgttactcctcctccggatggcagtaccacccataaccttgaagttagccccaaagagaagcaaacggagaccgcagctgactgcagatacaggccaagtgtggattgtcacgaaaaacctttaaatttatccgtgggggctcttcacaattgcccggcaatttctttgagtaaaagtttgattccaagtatcacctgtccattttgtaccttcaagacattttatccagaagttttaatgatgcaccagagactggagcataaatacaatcctgacgttcataaaaactgtcgaaacaagtccttgcttagaagtcgacgtaccggatgcccgccagcgttgctgggaaaagatgtgcctcccctctctagtttctgtaaacccaagcccaagtctgctttcccggcgcagtccaaatccctgccatctgcgaaggggaagcagagccctcctgggccaggcaaggcccctctgacttcagggatagactctagcactttagccccaagtaacctgaagtcccacagaccacagcagaatgtgggggtccaaggggccgccaccaggcaacagcaatctgagatgtttcctaaaaccagtgtttcccctgcaccggataagacaaaaagacccgagacaaaattgaaacctcttccagtagctccttctcagcccaccctcggcagcagtaacatcaatggttccatcgactaccccgccaagaacgacagcccgtgggcacctccgggaagagactatttctgtaatcggagtgccagcaatactgcagcagaatttggtgagccccttccaaaaagactgaagtccagcgtggttgcccttgacgttgaccagcccggggccaattacagaagaggctatgaccttcccaagtaccatatggtcagaggcatcacatcactgttaccgcaggactgtgtgtatccgtcgcaggcgctgcctcccaaaccaaggttcctgagctccagcgaggtcgattctccaaatgtgctgactgttcagaagccctatggtggctccgggccactttacacttgtgtgcctgctggtagtccagcatccagctcgacgttagaaggaaaaaggcctgtgtcatatcaacacttatctaacagcatggcacaaaagagaaactatgagaattttattgggaatgcacattatcgaccaaatgacaaaaaaacttgattcactaattagggggaaaaaaggtcttggtggatgtcagtgcttactccccatgaaattaaattttacttcatcctttgagaagcgaatggtgaaagctactgaaataagctgtgattgtactgtacataaaacatatgaggaatctgcaaggaacactacagttgtgtaaagttgttctgttaacttttgtaccaaatagcaatacaaactagttggaacagttggaacttacatacatggggactggaaatctctattttgtccctgaataatatttttcttagaattgaccaaataagaagtggaatttttgcatacttgagcgctgctgaaaagaaatcatttgggttgggtggggcgggatgggggaaaagtatataatgcttgcacctcaggtaaaaatctgtaaatatctaagttgtaaacctgcttgttcaaatactgtgtgtattccttttctctaatgcagctcatcacttggagcagtttctgctattgtgctctttcatttaaaatgtatgtttttttttttttaaactgtcaatgattttgtattatgttgaatccacccaaatctattgttgtcttaaaattgttaatggaagtattgaccctctatgatatgtgctgcagatatcgaggtcagccattcggaagctggcagcattttatcgcaactttgagcatctcagatggggaaggcaccttcttcctcgcctctccagattgtcctggaacctccaggatccttgactgagggcgttgggatggcttgtaggatttttaagagagtgtgtctacagacaagcattttctctgtagagcagccacacgttgtataaacataaactgtatgtgcagttatttaaatttgtttctgtcaaattaatcatttttgttggacgattcagtggcgggggggttttgcctaaattagtatataaaaacaaaaatgctaaattatatctgtgaattgcaggtattggggaacagttttaagggaaattttggggggaacattttaggtttgtatttggtagtcttaatgtatctggcatttgggtgaactgtggacatactagagttgattatagacacattgattttgaataaggaactgctggccgagcccgctgggagtctagaaagagaaaatctgtttctagacctcagttattttcccatttttggttgttttgaagcagtaacatttttctcagtgcacatgcaatttgggttttagagaagatggccaccagctggcttcctagatattttaaacttttgttctttaatatgctgtccatggctgagtttattagtacatgggcttagtgaccacaaaatattttattaagaaactgtttcaaaaataaatttgcactgttcatttttctggcctcgctgttctccatagagcaagggtaatcctagaaaaaattttttttttttaaattatgcaacgtaagatgtcctccttgatagaagtcttagctcctgtgttacaagggagaactcatttgagatcagtctgttggcattgcaatgaagtgctttgtatcaggaaagtgtacactattgaccttttttcctgttcacaagctgagccatatgtacataatctagattttgttttcatagttttgcacttttatagcctatttttgaagattaacacatttgcaagatgattgactcaatctttgcctaatccaatgagtgttacagagagcttgctgtgactagaaccataaatcttaaagggggtatgtgataatagagggctggaatttaaacctgtatttaaaaaaaagaatcaccaaatctatttgaaaacaagtcgatttgtattatgctggaattttttgggctttcagatttctctttttaaccacatttctgaatgtataaaaataccaattattttcctacagccctttgtacttcaaaatatgtttttgtgtccatcagtattaactattggtatactactggttttatatttttttttctttgagacaacagtacatataatagaggtacaattcgttggatttttgtttatgtatttatttcattccagtttgatttattttaattgttgatacttaagttgtcgaacagtagacattacttgttttatttatgatatatttcagcttaaagttatgttattatatgtggaagtgtaaatatagatttggtgttttgcaatcttga

SEQ ID NO: 34989 - DNA, 3684 bp, Homo sapiens
  source 1..3684: mol_type = unassigned DNA
tctgacccaacagtcccccagcgccggacgcgccgcgccccggcggctctagggaccccccgcgcctgcactgtccccgcgcggacgagtagggggcgcccgcgcctttgcccccgtgcgcacccccgccccgctcaccttagccccgcgcccgagggtttggaaatcccttgtctccaggttgctgggattgacttcttgctcaattgaaacactcattcaatggagacaaagagaactaatgctttgtgctgattcatatttgaatcgaggcattgggaaccctgtatgccttgtttgtggaaagaaccagtgacaccatcactgagcttcctaaaagttcgaagaagttagaggactatacactttcttttgaacttttataataaatatttgctctggtttttggaacccagggctgttagaggggtgagtgacaagtcttacaagtggccttattccaactccagaaattgcccaacggaactttgagattatatgcaatcgaaagtgacaggaaacatgccaactcaatccctcttaatgtacatggatgggccagaagtgattggcagctctcttggcagtccgatggagatggaggatgccttgtcaatgaaagggaccgctgttgttccattccgagctacacaagaaaaaaatgtcatccaaatcgaggggtatatgcccttggattgcatgttctgcagccagaccttcacacattcagaagaccttaataaacatgtcttaatgcaacaccggcctaccctctgtgaaccagcagttcttcgggttgaagcagagtatctcagtccgcttgataaaagtcaagtgcgaacagaacctcccaaggaaaagaattgcaaggaaaatgaatttagctgtgaggtatgtgggcagacatttagagtcgcttttgatgttgagatccacatgagaacacacaaagattctttcacttacgggtgtaacatgtgcggaagaagattcaaggagccttggtttcttaaaaatcacatgcggacacataatggcaaatcgggggccagaagcaaactgcagcaaggcttggagagtagtccagcaacgatcaacgaggtcgtccaggtgcacgcggccgagagcatctcctctccttacaaaatctgcatggtttgtggcttcctatttccaaataaagaaagtctaattgagcaccgcaaggtgcacaccaaaaaaactgctttcggtaccagcagcgcgcagacagactctccacaaggaggaatgccgtcctcgagggaggacttcctgcagttgttcaacttgagaccaaaatctcaccctgaaacggggaagaagcctgtcagatgcatccctcagctcgatccgttcaccaccttccaggcttggcagctggctaccaaaggaaaagttgccatttgccaagaagtgaaggaatcggggcaagaagggagcaccgacaacgacgattcgagttccgagaaggagcttggagaaacaaataagggcagttgtgcaggcctctcgcaagagaaagagaagtgcaaacactcccacggcgaagcgccctccgtggacgcggatcccaagttacccagtagcaaggagaagcccactcactgctccgagtgcggcaaagctttcagaacctaccaccagctggtcttgcactccagggtccacaagaaggaccggagggccggcgcggagtcgcccaccatgtctgtggacgggaggcagccggggacgtgttctcctgacctcgccgcccctctggatgaaaatggagccgtggatcgaggggaaggtggttctgaagacggatctgaggatgggcttcccgaaggaatccatctggataaaaatgatgatggaggaaaaataaaacatcttacatcttcaagagagtgtagttattgtggaaagtttttccgttcaaattattacctcaatattcatctcagaacgcatacaggtgaaaaaccatacaaatgtgaattttgtgaatatgctgcagcccagaagacatctctgaggtatcacttggagagacatcacaaggaaaaacaaaccgatgttgctgctgaagtcaagaacgatggtaaaaatcaggacactgaagatgcactattaaccgctgacagtgcgcaaaccaaaaatttgaaaagattttttgatggtgccaaagatgttacaggcagtccacctgcaaagcagcttaaggagatgccttctgtttttcagaatgttctgggcagcgctgtcctctcaccagcacacaaagatactcaggatttccataaaaatgcagctgatgacagtgctgataaagtgaataaaaaccctacccctgcttacctggacctgttaaaaaagagatcagcagttgaaactcaggcaaataacctcatctgtagaaccaaggcggatgttactcctcctccggatggcagtaccacccataaccttgaagttagccccaaagagaagcaaacggagaccgcagctgactgcagatacaggccaagtgtggattgtcacgaaaaacctttaaatttatccgtgggggctcttcacaattgcccggcaatttctttgagtaaaagtttgattccaagtatcacctgtccattttgtaccttcaagacattttatccagaagttttaatgatgcaccagagactggagcataaatacaatcctgacgttcataaaaactgtcgaaacaagtccttgcttagaagtcgacgtaccggatgcccgccagcgttgctgggaaaagatgtgcctcccctctctagtttctgtaaacccaagcccaagtctgctttcccggcgcagtccaaatccctgccatctgcgaaggggaagcagagccctcctgggccaggcaaggcccctctgacttcagggatagactctagcactttagccccaagtaacctgaagtcccacagaccacagcagaatgtgggggtccaaggggccgccaccaggcaacagcaatctgagatgtttcctaaaaccagtgtttcccctgcaccggataagacaaaaagacccgagacaaaattgaaacctcttccagtagctccttctcagcccaccctcggcagcagtaacatcaatggttccatcgactaccccgccaagaacgacagcccgtgggcacctccgggaagagactatttctgtaatcggagtgccagcaatactgcagcagaatttggtgagccccttccaaaaagactgaagtccagcgtggttgcccttgacgttgaccagcccggggccaattacagaagaggctatgaccttcccaagtaccatatggtcagaggcatcacatcactgttaccgcaggactgtgtgtatccgtcgcaggcgctgcctcccaaaccaaggttcctgagctccagcgaggtcgattctccaaatgtgctgactgttcagaagccctatggtggctccgggccactttacacttgtgtgcctgctggtagtccagcatccagctcgacgttagaaggtcttggtggatgtcagtgcttactccccatgaaattaaattttacttcatcctttgagaagcgaatggtgaaagctactgaaataagctgtgattgtactgtacataaaacatatgaggaatctgcaaggaacactacagttgtgtaa

SEQ ID NO: 34990 - DNA, 779 bp, Homo sapiens
  source 1..779: mol_type = unassigned DNA
accgttttaaggcttcatggtgatgagggcatttaaccctcgggacacgcccattctgcaggcctggctcgacctccactttggagaagatgctccaggaacactgaagggcaggtcgtccccgaccttctatgaggattgcccagctcaagggtttggaaatcccttgtctccaggttgctgggattgacttcttgctcaattgaaacactcattcaatggagacaaagagaactaatgctttgtgctgattcatatttgaatcgaggcattgggaaccctgtatgccttgtttgtggaaagaaccagtgacaccatcactgagcttcctaaaagttcgaagaagttagaggactatacactttcttttgaacttttataataaatatttgctctggtttttggaacccagggctgttagaggggtgagtgacaagtcttacaagtggccttattccaactccagaaattgcccaacggaactttgagattatatgcaatcgaaagtgacaggaaacatgccaactcaatccctcttaatgtacatggatgggccagaagtgattggcagctctcttggcagtccgatggagatggaggatgccttgtcaatgaaagggaccgctgttgttccattccgagctacacaagaaaaaaatgtcatccaaatcgaggggtatatgcccttggattgcatgttctgcagccagaccttcacacattcagaagaccttaataaacatgtcttaatgcaacaccggcctaccctctgtgaacca

SEQ ID NO: 34991 - DNA, 3071 bp, Homo sapiens
  source 1..3071: mol_type = unassigned DNA
gcaccccgcccctggcggccgcctctcgcggctcccggggtccccagctccctgtccccggagccagagcccggctcccgcgcggctcccagccccgccgcgccgccccccgcatgctaatggccgggccgcctcccgccgcacacaatgcgggccagggccgggggcgggggaccggggagggggcgggggccgggccgggggcgggggggccggggcccggcgcatctcccccggccccacgtaacgctgacgcccgcgccgccggcccgccgcccgccgccgccgccgccgccgccgcccgctccgccgccgcccgcccggggctcctccacagcacctgttgccttcattagcagcttttcctcctcttccctgcacttcccagaaccaaagaatgtgaagggggtccatggagggctcacgtccccgcgccccgagcggccacttagcgccgtcgccgccggctttcgacggcgagctggatctgcagcgatactccaacgggccagccgtgagcgcagggtcgctcgggatgggagcggtgagctggtctgagagtcgtgcaggcgaacggcgcttcccctgccctgtatgcgggaagcgcttccgcttcaactctatccttgctttgcacctgcgggcgcacccaggagcccaggccttccagtgccctcactgcggccaccgcgcggcgcagcgggctctgctgcgctcgcacctgcgcacacaccagcccgagcgcccacgtagtcctgctgcacgcctgttgctggagttggaagagcgcgcgctactacgcgaggcccgactggggagagcccgaagctcagggggcatgcaggccacccctgccactgagggtctggcgcggccccaggctccttcatcgtccgccttccgttgcccctactgcaaaggcaagtttcgcacctcggcggagcgcgaacgccacctgcacatcctgcataggccctggaagtgcggcctgtgcagtttcggctccagccaggaggaggagctgctgcaccacagcctgacggcccacggggctcccgagcgtcccctggcggccacctccgctgcgcctccgcctcagcctcagcctcagcctccaccccagcccgaacccagatcagtcccccagccggagccggagccggagcccgaacgtgaggcaaccccgaccccagctcctgccgctcccgaggagcccccagcgcctccggagttccgctgccaagtgtgcggccagagctttacacagtcttggtttctcaagggccacatgcgtaagcacaaggcctccttcgatcatgcgtgtccggtgtgcggccgctgcttcaaggagccctggttccttaagaaccacatgaaggtgcacgccagcaagctgggcccactgcgtgccccggggcctgcctccgggcctgcccgcgccccccagcctcctgacctcggcctgctggcctatgagccgttgggcccagcgctcctcttggccccggctcccaccccggccgagcgccgtgagcccccgagcctcttgggctacctgagcctgcgagctggcgagggccggcccaacggcgagggtgctgagcccggtcccggccgcagcttcggaggcttccgcccgctgtcctctgctctcccggcccgggctcgccggcaccgtgcggaggagcctgaggaagaagaggaggtggtggaggccgaggaggaaacctgggcccggggcaggtcgctgggctctctggcttccctgcacccgcgcccgggtgagggaccggggcactctgcctctgctgctggggcccaggcaagatcgaccgccacgcaggaagagaatgggctgttggttggagggacccggcctgaagggggccggggcgccaccggcaaggattgtcctttctgcggaaaatctttccgctcagcacatcacctcaaagtgcatctgcgagtgcacacaggcgagcggccctacaagtgtccgcactgcgactacgcgggcacccagtccggctcgctcaagtatcacctacagcgccaccaccgggagcagaggagcggggccggccccgggccacccccggagccaccgcctccttcccagcggggttcggccccgcaatctggagccaagccgtctccgcagcctgcgacctgggtggagggcgcctcaagtccccggcctccttctagcggtgctgggccggggtcccgtcggaagcccgccagccctgggaggaccctgcgcaacgggcgaggcggtgaggccgaacccctggacctgtccttgcgggcagggccgggaggcgaggccgggcctgggggtgccctccaccgctgcctcttctgcccgttcgccactggagccccagagctcatggccttgcaccttcaagtgcaccacagccgccgggctaggggccgccggccaccccaggctgacgcgtccccgccctatgcccgagtaccatcaggagagacccctcccagtccttcgcaggaaggggaggagggctccgggctgtccagacccggagaggcagggctgggggggcaagaacggtagtgggccctcaggggcgattagcttagtgagcttaccccgccggagcgggggagcgctagaggtagttgggtagagaagccagcagggggcagcgtgggacccatatcccagccccaggcggaccagaggtggaaggcgcggcgggcgtaggagggtgggctggcggtacccacccagcccaagggagtcacagtgccttagaagtggcagaggtgagggtcaaagaacggggtccctgggctggcagagaaggtttgtgtccctgttgaggagccactctgccagtctttgctggtccataggcgtgagagtttatttttgtacaaggggtgagggtggggggcactgtacccttctagccccatcaggggccctgtagacgtcgctatttttggtacgattcctgtcatccctattgcagagtcgtgtccccaataaacaggtgtcttgaggcacagggccctgtgtctgtctgcctacctatgtcctg

SEQ ID NO: 34992 - DNA, 2908 bp, Homo sapiens
  source 1..2908: mol_type = unassigned DNA
atcaagaacggaaaggaccgaagagtaactttaataatgtttcttatacggccgacattaactatctctataatcgcccctcctcctcccccaaaagagagacagaaattgtaagggagaggctttgagataaaaccccaggaagaacttcccgagtctgtgcatgttggggcagaaagagcggcagagccaactccttccctgctccacagcacctgttgccttcattagcagcttttcctcctcttccctgcacttcccagaaccaaagaatgtgaagggggtccatggagggctcacgtccccgcgccccgagcggccacttagcgccgtcgccgccggctttcgacggcgagctggatctgcagcgatactccaacgggccagccgtgagcgcagggtcgctcgggatgggagcggtgagctggtctgagagtcgtgcaggcgaacggcgcttcccctgccctgtatgcgggaagcgcttccgcttcaactctatccttgctttgcacctgcgggcgcacccaggagcccaggccttccagtgccctcactgcggccaccgcgcggcgcagcgggctctgctgcgctcgcacctgcgcacacaccagcccgagcgcccacgtagtcctgctgcacgcctgttgctggagttggaagagcgcgcgctactacgcgaggcccgactggggagagcccgaagctcagggggcatgcaggccacccctgccactgagggtctggcgcggccccaggctccttcatcgtccgccttccgttgcccctactgcaaaggcaagtttcgcacctcggcggagcgcgaacgccacctgcacatcctgcataggccctggaagtgcggcctgtgcagtttcggctccagccaggaggaggagctgctgcaccacagcctgacggcccacggggctcccgagcgtcccctggcggccacctccgctgcgcctccgcctcagcctcagcctcagcctccaccccagcccgaacccagatcagtcccccagccggagccggagccggagcccgaacgtgaggcaaccccgaccccagctcctgccgctcccgaggagcccccagcgcctccggagttccgctgccaagtgtgcggccagagctttacacagtcttggtttctcaagggccacatgcgtaagcacaaggcctccttcgatcatgcgtgtccggtgtgcggccgctgcttcaaggagccctggttccttaagaaccacatgaaggtgcacgccagcaagctgggcccactgcgtgccccggggcctgcctccgggcctgcccgcgccccccagcctcctgacctcggcctgctggcctatgagccgttgggcccagcgctcctcttggccccggctcccaccccggccgagcgccgtgagcccccgagcctcttgggctacctgagcctgcgagctggcgagggccggcccaacggcgagggtgctgagcccggtcccggccgcagcttcggaggcttccgcccgctgtcctctgctctcccggcccgggctcgccggcaccgtgcggaggagcctgaggaagaagaggaggtggtggaggccgaggaggaaacctgggcccggggcaggtcgctgggctctctggcttccctgcacccgcgcccgggtgagggaccggggcactctgcctctgctgctggggcccaggcaagatcgaccgccacgcaggaagagaatgggctgttggttggagggacccggcctgaagggggccggggcgccaccggcaaggattgtcctttctgcggaaaatctttccgctcagcacatcacctcaaagtgcatctgcgagtgcacacaggcgagcggccctacaagtgtccgcactgcgactacgcgggcacccagtccggctcgctcaagtatcacctacagcgccaccaccgggagcagaggagcggggccggccccgggccacccccggagccaccgcctccttcccagcggggttcggccccgcaatctggagccaagccgtctccgcagcctgcgacctgggtggagggcgcctcaagtccccggcctccttctagcggtgctgggccggggtcccgtcggaagcccgccagccctgggaggaccctgcgcaacgggcgaggcggtgaggccgaacccctggacctgtccttgcgggcagggccgggaggcgaggccgggcctgggggtgccctccaccgctgcctcttctgcccgttcgccactggagccccagagctcatggccttgcaccttcaagtgcaccacagccgccgggctaggggccgccggccaccccaggctgacgcgtccccgccctatgcccgagtaccatcaggagagacccctcccagtccttcgcaggaaggggaggagggctccgggctgtccagacccggagaggcagggctgggggggcaagaacggtagtgggccctcaggggcgattagcttagtgagcttaccccgccggagcgggggagcgctagaggtagttgggtagagaagccagcagggggcagcgtgggacccatatcccagccccaggcggaccagaggtggaaggcgcggcgggcgtaggagggtgggctggcggtacccacccagcccaagggagtcacagtgccttagaagtggcagaggtgagggtcaaagaacggggtccctgggctggcagagaaggtttgtgtccctgttgaggagccactctgccagtctttgctggtccataggcgtgagagtttatttttgtacaaggggtgagggtggggggcactgtacccttctagccccatcaggggccctgtagacgtcgctatttttggtacgattcctgtcatccctattgcagagtcgtgtccccaataaacaggtgtcttgag

SEQ ID NO: 34993 - DNA, 2918 bp, Homo sapiens
  source 1..2918: mol_type = unassigned DNA
ccactcttccaaggtgtcacaaacagaaaagagctgcagcggacgccactgcaatgtcaaggcaaggcagccaggctgcgctctatcctcactggtgcctggccctggctaggccgggagaagcagcattctctagggaaagaagccttctcaagtgggaacaaaaatgagtgtgaggcgaacagccatcccgggcactatgtgaatttgggctccacagcacctgttgccttcattagcagcttttcctcctcttccctgcacttcccagaaccaaagaatgtgaagggggtccatggagggctcacgtccccgcgccccgagcggccacttagcgccgtcgccgccggctttcgacggcgagctggatctgcagcgatactccaacgggccagccgtgagcgcagggtcgctcgggatgggagcggtgagctggtctgagagtcgtgcaggcgaacggcgcttcccctgccctgtatgcgggaagcgcttccgcttcaactctatccttgctttgcacctgcgggcgcacccaggagcccaggccttccagtgccctcactgcggccaccgcgcggcgcagcgggctctgctgcgctcgcacctgcgcacacaccagcccgagcgcccacgtagtcctgctgcacgcctgttgctggagttggaagagcgcgcgctactacgcgaggcccgactggggagagcccgaagctcagggggcatgcaggccacccctgccactgagggtctggcgcggccccaggctccttcatcgtccgccttccgttgcccctactgcaaaggcaagtttcgcacctcggcggagcgcgaacgccacctgcacatcctgcataggccctggaagtgcggcctgtgcagtttcggctccagccaggaggaggagctgctgcaccacagcctgacggcccacggggctcccgagcgtcccctggcggccacctccgctgcgcctccgcctcagcctcagcctcagcctccaccccagcccgaacccagatcagtcccccagccggagccggagccggagcccgaacgtgaggcaaccccgaccccagctcctgccgctcccgaggagcccccagcgcctccggagttccgctgccaagtgtgcggccagagctttacacagtcttggtttctcaagggccacatgcgtaagcacaaggcctccttcgatcatgcgtgtccggtgtgcggccgctgcttcaaggagccctggttccttaagaaccacatgaaggtgcacgccagcaagctgggcccactgcgtgccccggggcctgcctccgggcctgcccgcgccccccagcctcctgacctcggcctgctggcctatgagccgttgggcccagcgctcctcttggccccggctcccaccccggccgagcgccgtgagcccccgagcctcttgggctacctgagcctgcgagctggcgagggccggcccaacggcgagggtgctgagcccggtcccggccgcagcttcggaggcttccgcccgctgtcctctgctctcccggcccgggctcgccggcaccgtgcggaggagcctgaggaagaagaggaggtggtggaggccgaggaggaaacctgggcccggggcaggtcgctgggctctctggcttccctgcacccgcgcccgggtgagggaccggggcactctgcctctgctgctggggcccaggcaagatcgaccgccacgcaggaagagaatgggctgttggttggagggacccggcctgaagggggccggggcgccaccggcaaggattgtcctttctgcggaaaatctttccgctcagcacatcacctcaaagtgcatctgcgagtgcacacaggcgagcggccctacaagtgtccgcactgcgactacgcgggcacccagtccggctcgctcaagtatcacctacagcgccaccaccgggagcagaggagcggggccggccccgggccacccccggagccaccgcctccttcccagcggggttcggccccgcaatctggagccaagccgtctccgcagcctgcgacctgggtggagggcgcctcaagtccccggcctccttctagcggtgctgggccggggtcccgtcggaagcccgccagccctgggaggaccctgcgcaacgggcgaggcggtgaggccgaacccctggacctgtccttgcgggcagggccgggaggcgaggccgggcctgggggtgccctccaccgctgcctcttctgcccgttcgccactggagccccagagctcatggccttgcaccttcaagtgcaccacagccgccgggctaggggccgccggccaccccaggctgacgcgtccccgccctatgcccgagtaccatcaggagagacccctcccagtccttcgcaggaaggggaggagggctccgggctgtccagacccggagaggcagggctgggggggcaagaacggtagtgggccctcaggggcgattagcttagtgagcttaccccgccggagcgggggagcgctagaggtagttgggtagagaagccagcagggggcagcgtgggacccatatcccagccccaggcggaccagaggtggaaggcgcggcgggcgtaggagggtgggctggcggtacccacccagcccaagggagtcacagtgccttagaagtggcagaggtgagggtcaaagaacggggtccctgggctggcagagaaggtttgtgtccctgttgaggagccactctgccagtctttgctggtccataggcgtgagagtttatttttgtacaaggggtgagggtggggggcactgtacccttctagccccatcaggggccctgtagacgtcgctatttttggtacgattcctgtcatccctattgcagagtcgtgtccccaataaacaggtgtcttgaggc

SEQ ID NO: 34994 - DNA, 560 bp, Homo sapiens
  source 1..560: mol_type = unassigned DNA
tttgagtatagcagccccttcgtgcctcaagaagcaagtagggagaatggattggttttgggaatacagaatgctgagagtctgggggtagggagtgactttactgctgaaaactagggctcatcttttcctccaaatctgtctcttgctttagctccacagcacctgttgccttcattagcagcttttcctcctcttccctgcacttcccagaaccaaagaatgtgaagggggtccatggagggctcacgtccccgcgccccgagcggccacttagcgccgtcgccgccggctttcgacggcgagctggatctgcagcgatactccaacgggccagccgtgagcgcagggtcgctcgggatgggagcggtgagctggtctgagagtcgtgcaggcgaacggcgcttcccctgccctgtatgcgggaagcgcttccgcttcaactctatccttgctttgcacctgcgggcgcacccaggagcccaggccttccagtgccctcactgcggccaccgcgcggcgcagcgggctctgctgcgctcgcacctgcgcacacacca

SEQ ID NO: 34995 - DNA, 798 bp, Homo sapiens
  source 1..798: mol_type = unassigned DNA
cctgcagagaggaggaaagcctgcctcggaacagccctggacaaaggggctcagatgccccatcatactgcaggctccaagctccacagcacctgttgccttcattagcagcttttcctcctcttccctgcacttcccagaaccaaagaatgtgaagggggtccatggagggctcacgtccccgcgccccgagcggccacttagcgccgtcgccgccggctttcgacggcgagctggatctgcagcgatactccaacgggccagccgtgagcgcagggtcgctcgggatgggagcggtgagctggtctgagagtcgtgcaggcgaacggcgcttcccctgccctgtatgcgggaagcgcttccgcttcaactctatccttgctttgcacctgcgggcgcacccaggagcccaggccttccagtgccctcactgcggccaccgcgcggcgcagcgggctctgctgcgctcgcacctgcgcacacaccagcccgagcgcccacgtagtcctgctgcacgcctgttgctggagttggaagagcgcgcgctactacgcgaggcccgactggggagagcccgaagctcagggggcatgcaggccacccctgccactgagggtctggcgcggccccaggctccttcatcgtccgccttccgttgcccctactgcaaaggcaagtttcgcacctcggcggagcgcgaacgccacctgcacatcctgcataggccctggaagtgcggcctgtgcagtttcggctccagccaggaggaggagctgctgcaccacagcctgacggccc

SEQ ID NO: 34996 - DNA, 654 bp, Homo sapiens
  source 1..654: mol_type = unassigned DNA
tgcagggtccgggatttggagtggatgggattatgaaaggtggacagaaaagaaaagtgcgatgaggcaaatgtgaagctgtatggggaggtgacaggaagagaggatatggatgcaagggagaaagcagcttttcagggtggtgaggtgaggatatattctcgtccaggtgtatcttcccctaacagggaaggaacgaaaaaagggcctgctttgagtgaaaactgaaggcactcccggacttcctattggactcgaaggatcccagcaagcttctgagtttggtggggtgggatgcaggaatgtctggagagcattctctcagggtggaaggagagcagcacgtgtctgttcccgctgtcccaccctctcatttgctcctgtgctggccaccgtgggaccattctccaaaccaggaacctcttccaactcagagaagccctgaaaaccagagacaggtgtgagcaaattgtagagctccacagcacctgttgccttcattagcagcttttcctcctcttccctgcacttcccagaaccaaagaatgtgaagggggtccatggagggctcacgtccccgcgccccgagcggccacttagcgccgtcgccgccggctttcgacggcgagctggatctgcagcgatactccaacg

SEQ ID NO: 34997 - DNA, 546 bp, Homo sapiens
  source 1..546: mol_type = unassigned DNA
gtgcatgttggggcagaaagagcggcagagccaactccttccctggtcttccagaactttcaaaatcaaaatcggggttgcgttaggacatgcctctgggataagattccccatggtgggatggcagcagctccacagcacctgttgccttcattagcagcttttcctcctcttccctgcacttcccagaaccaaagaatgtgaagggggtccatggagggctcacgtccccgcgccccgagcggccacttagcgccgtcgccgccggctttcgacggcgagctggatctgcagcgatactccaacgggccagccgtgagcgcagggtcgctcgggatgggagcggtgagctggtctgagagtcgtgcaggcgaacggcgcttcccctgccctgtatgcgggaagcgcttccgcttcaactctatccttgctttgcacctgcgggcgcacccaggagcccaggccttccagtgccctcactgcggccaccgcgcggcgcagcgggctctgctgcgctcgcacctgcgcacacaccagcccgagcgc

SEQ ID NO: 34998 - DNA, 2551 bp, Homo sapiens
  source 1..2551: mol_type = unassigned DNA
gaaatcagactttggagccacaaagaaccattccaattctgggtcgtccgcttacacacggtgaacggagcacatttcttctctgagccttggttcctttcctgtaaatggagtataaccactcccatcttgcaggagctttttggtgataattaaggtgacttcgtgaaaagtaccagggtctcaaaaatctcaaaatttgtggaaagtatgcagtttctaggttggagaggctagagtttggtttcaaaagcctcgaccacacacaggggcggttacagctcttgaggtcccgggggtcacaggacgccttccgagttggggggaggagaaaacaaaaccacaggaagaaacgaacaacgctttcgggtgggcccgggaccatagagggtcgctccgccactttcctagagcgaccgcggcggcgccagagcgcggcgaggccctcacttccggcggcgcgggaggcgcccagcgagccagagtggtggctggtcccgcgcgaaaattctgagctgtacacctctaggaaatgaaacactagttcagaagaagcctgtaaactctcttacaaatacatttggttattcaccatgaggttagcaaagcctaaagcgggtatttctcggagctcaagccaaggaaaggcctatgagaacaagcgcaaaacaggccggcagcggcagaagtggggcatgactattcgatttgactcaagcttcagtagactcagaagaagcttggatgacaaaccctataaatgtactgaatgtgaaaagagtttcagtcagagttcaactctttttcaacaccagaagatccatactggaaagaaatcccataaatgtgctgattgtgggaaaagtttctttcagagttctaatctcattcagcatcgacggatccatacgggggaaaagccctacaaatgtgatgagtgtggagaaagcttcaaacagagctcaaatctcattcagcaccagagaattcatactggagaaaaaccctatcagtgtgatgagtgtggccggtgtttcagccagagctcccaccttattcaacatcagagaacccacactggggagaaaccctaccagtgcagtgaatgtggcaaatgtttcagtcagagctctcatctgaggcagcacatgaaggtgcataaagaagagaagcctcgtaaaacccggggcaaaaatatcagggtgaagactcacttaccctcttggaaagctggtacaggaaggaagtctgtggctggtctccgttaagtatagggctttttgacagctttttgagacctcttaagaaaaaataaaaagtaaaaaatgaaaggaatcttttttagaaatagagatgctttatagtagatcacttaaatactggatcttttgctagtgtgaaaacattgggaatttaatgacattattgagctgaaagaaattacatgagtccagctaccctcatttcttttttatgtgacatggagcacaaagaactgaaaatatgttttgagggagcatgacatccttgacctcatttgaaattacttccattttcaaaaaccatcatgttttgtagatacattttgagaaaaaccatcatgttttgaggatacatttgtgaaagtgcaggcatgccaatgactactcagttttaggactttctgtggaagaaaaaagggagaagaaatcaattccactacttttgaagttctgcaacagatgagattttgtttgtaaagttttgtagtatattaaccattggtttatcactctagattcaacatattaaaatgtattcaagctcacagatttttaatcagtaaggcctatctatattagttgtcttttatttcttctccttgtggacagttgttaatgaaaggagtaaggatttccctttttttgttttgtttgttttgttttttttaaccaaattcttagagatactatagaatccaaatgagaactgaattggacctcaagtcttctattcctactaatagagttctttgtgatggtaactgctgtgtcgtttgttttccacaagttgggatggattcatgtcgatacatccccatgcccttgacctcttctggcattctcctgtgctctgacaaactgagccagccttttagatctacatgaataaacaaactattttaccaagaaaaatctcagcttgcttactgcttaattaaaaacctacaatttacacacctccctgccttcaagactgtgagctttggatagccctgcttaaatgtttgtcaacaacaagagtcgtaatgtgtcagtacattgtagctcctttgaaatttaactctttctgtgttacatgaattgttttaaggagtccggcaaacatgtttcttcacttccatgagaatggtgccaagtgtcagactctaatgagccctcagctcaggttttaatttctattgaatgctaacattcttctgattttttggtatcttttataatcatatcggtttctgctgtattaatgacaattattcatgaaaataaaaaatgaaatattttgtatacta

SEQ ID NO: 34999 - DNA, 496 bp, Homo sapiens
  source 1..496: mol_type = unassigned DNA
aaaaggggcctcgtcggagagtagagctgaataccactagaaacatacctgtaaccagagacagctgattatagctttctgcagcaaggaagcccacgtaccaggggctgtcttggcacaattctgctttcccaggaactgcatcactcaggactctgcaagtttccagaagtaagagggaaaatgaccacgttcaaggaggcaatgaccttcaaggacgtggctgtggtcttcactgaggaagagctggggctgctggaccttgctcagaggaagctgtatcgagatgtgatgctggagaacttcaggaacctgctctcagtgggacatcaagcattccacagggatactttccacttcctaagggaagaaaagatttggatgatgaagacagcaatccaaagggaagggaattcaggagacaagatccaaactgagatggagactgtttcagaagcaggaacacatcaagagtggtccttccagcaaatctggg

SEQ ID NO: 35000 - DNA, 2902 bp, Homo sapiens
  source 1..2902: mol_type = unassigned DNA
aaacattcggtggagtcgcggacacttccgctcggggactgaggttgctgcagtttttccgcgatagtttggggcagttccgcgcgttgcaggcccttctgaatttcctggacctacgcattggatcctcaaagaactgctgaataccactagaaacatacctgtaaccagagacagctgattatagctttctgcagcaaggaagcccacgtaccaggggctgtcttggcacaattctgctttcccaggaactgcatcactcaggactctgcaagtttccagaagtaagagggaaaatgaccacgttcaaggaggcaatgaccttcaaggacgtggctgtggtcttcactgaggaagagctggggctgctggaccttgctcagaggaagctgtatcgagatgtgatgctggagaacttcaggaacctgctctcagtgggacatcaagcattccacagggatactttccacttcctaagggaagaaaagatttggatgatgaagacagcaatccaaagggaagggaattcaggagacaagatccaaactgagatggagactgtttcagaagcaggaacacatcaagagtggtccttccagcaaatctgggaaaaaattgcaagtgatttaaccaggtctcaagacttgatgataaatagctctcagttctccaaagaaggtgatttcccctgccagactgaggcaggactatctgtaattcacacaagacagaaatcttcccagggcaatggatataaaccatccttcagtgatgtctcccactttgattttcatcaacaattacactcaggagagaaatctcatacgtgtgatgagtgtggaaagaacttttgttacatctcagcccttcgtattcatcagagagtccacatgggagagaaatgctataagtgtgacgtgtgtggtaaggaattcagtcagagttcacatctgcaaactcatcagagagtccacactggagagaaaccgttcaaatgtgtggaatgtgggaaaggcttcagtcgtagatcagcacttaatgttcatcataaattacacacaggagagaaaccttataattgtgaggaatgcgggaaggccttcattcacgattcccagcttcaagaacatcagagaatccatacgggggagaagccattcaaatgtgatatatgtggtaagagcttctgtggtagatcaagacttaataggcattccatggttcacacggcagagaaaccattccgatgtgatacgtgtgataagagctttcgtcagagatcagcacttaatagtcatcgcatgatccacacaggagagaaaccatacaaatgtgaggagtgtggaaaaggctttatttgtaggcgagatctttatacgcatcatatggtccacacgggagaaaagccatataattgtaaagagtgtgggaagagcttcagatgggcctcgtgtcttttgaaacatcagcgagtccacagtggagaaaaaccattcaaatgtgaagaatgtgggaaaggattttacacaaattcacaatgctattcccaccagagatcccatagtggagaaaaaccatacaaatgtgtggagtgtgggaagggctacaaaaggaggttggatcttgactttcaccagcgcgtccatacaggagagaaactgtataattgtaaggaatgtgggaagagctttagtcgggccccatgtcttttgaaacatgagagactccacagtggagaaaaaccattccaatgtgaagagtgtgggaagagatttactcaaaattcacatcttcattcccatcagagagttcacactggagaaaagccatacaaatgtgagaagtgtggaaagggctacaatagtaagtttaatcttgatatgcaccagaaggtccacacaggagagagaccatacaattgtaaggaatgtgggaagagttttggctgggcctcgtgtcttttgaaacatcagagactgcacagtggagaaaaaccattcaaatgtgaagagtgtgggaaaagatttactcagaattcacagcttcattctcatcaaagagtgcacactggagaaaagccatacaaatgtgatgagtgtgggaagggcttcagctggtcctcaactcgtctgacccatcagagacgccacagcagagaaacacctctcaaatgtgagcagcatgggaagaacattgtacagaattcattctctaaagtgcaagaaaaagttcacagtgtagaaaagccatacaaatgtgaggactgtgggaagggctacaacaggcgcttgaatcttgatatgcatcagagggtccacatgggagagaaaacatggaagtgtagggagtgtgatatgtgctttagtcaggcctcaagccttcgacttcatcagaatgttcatgttggagaaaaaccttagtgatgtgatggtgcaataaagtcttcactcagtcttcatgaatgcagtctcatctgaaagttcacaaaggagagacacattaaaatatgaggcacatagtaagcacttccctttgagtattttatctctgaatccatgctggtgataaatttcacccattcttggaagagggaaaacatttgtttaagataacatcagtgcttcagccatagctcagcatgccccagtagtctcaggaccaccataatggagaatccttgtaaatggtgcaataaagcttcattcagaagtttgataattacagctatcattcaggagacaggccttagaaagagtaagagttcatgaatttaccagactaatggtggacatgtccaaattgatgtccactagaatgtaaactacatgtgtctttgctgctaagtcgtcacagccttaacattgattagcactttgtatgtgttcagtacttgtttgttaaa

SEQ ID NO: 35001 - DNA, 2674 bp, Homo sapiens
  source 1..2674: mol_type = unassigned DNA
gcacttccggcagcgccggggagcagtccgctacggagctccagcccttctctgagacggggaccaggggatggcagccatgcacctgacagcctggccccagggcctgagctatggaattggccctagggcagcaggaacctattgtttcagaagtcggtgacctttgaggacgtggctgtgtacttcacccaggcggaatgggatggcctgtcccctgcacagaggaccctgtacagggatgtgatgctggagaattatgggaatgtggcctccctgggatttccacttctcaaacctgctgtgatctcacaactggagggaggaagtgagctggggggctcatctccactggctgcaggaacaggcctccagggcctccagactgatattcagactgacaatgatttgacaaaggaaatgtatgaaggaaaagagaatgtatcatttgaacttcaaagagacttttcccaggaaacagacttttcagaagcctctcttctagagaaacaacaggaagtccactcagcaggaaatataaagaaggagaagagcaacaccattgatggaacagtgaaagatgagacaagccccgtggaggagtgtttttttagtcaaagttcaaactcatatcagtgtcataccatcactggagagcagccctctgggtgtacaggattggggaaatccatcagctttgatacaaaactcgtgaagcatgaaataattaattctgaggaaagacctttcaaatgtgaagaattagtagagccctttaggtgtgactctcaacttattcaacatcaagagaacaacactgaggaaaagccttatcagtgttcggagtgtggcaaagctttcagcattaatgagaaattaatttggcatcagagacttcacagtggggagaaacccttcaaatgtgtggagtgtgggaaaagcttcagctacagttcccattatatcacacatcagacaatccacagtggggagaagccctatcagtgtaagatgtgtgggaaggccttcagtgttaatggaagcctaagtaggcatcagagaatccatacgggagagaagccctatcagtgcaaggaatgtggaaatggcttcagctgtagttctgcatatattacacatcagagagtccacactggagagaaaccttacgagtgtaatgactgtgggaaagcgttcaatgttaatgcaaaattaattcaacatcagagaatccatactggagagaaaccttatgaatgtaatgaatgtggaaaaggcttcaggtgcagctcccagcttaggcagcatcagagcatccacacaggagaaaagccctatcagtgtaaagagtgtggaaaaggcttcaataataatacaaaactcattcagcatcagagaatccacacaggtgagaaaccctatgaatgcactgaatgtggaaaagccttcagtgtcaaagggaagttaatccaacaccagagaattcacacaggcgagaaaccctatgagtgtaatgaatgcgggaaagccttcagatgtaactcccaatttcggcagcatctgagaattcacactggggagaagccctatgagtgtaatgagtgtggaaaggccttcagcgttaatgggaaactaatgcggcatcagagaattcacactggggagaaaccttttgaatgtaatgagtgtgggagatgctttacttctaaaagaaacctacttgatcatcaccgaatccatactggagaaaagccctatcaatgtaaggaatgtgggaaagccttcagtatcaatgccaaactaactaggcatcagaggatacatactggggagaaacctttcaaatgtatggaatgtgagaaagcattcagctgtagttctaactatattgtgcaccagagaatccatacaggagagaaaccctttcagtgtaaggagtgtggaaaagccttccatgttaatgcccatttaattcggcatcagagaagccacactggggagaaacccttcagatgtgtggaatgtggcaaaggcttcagctttagttctgactacattatacatcagacagtccacacttggaagaaaccctatatgtgtagtgtgtgtgggaaagcattcaggtttagcttccagctcagtcagcatcagagtgtccatagtgaaggaaaatcctaataatgagaaagatatagaaaactcttaaggttaatgccaaaatggatcaagtatcatcagattcatccattgaaaaacctccaagagggcatgaatatggcagagtcttcatatggaaacagtttttattctattcagtttaaatcaggaaaggatgaccagttaaagagaaacatccaaaaatagctttgttttgtaccaacaggaattagaaaatataatgaaaagatttcgttcccagcagcatcaagaaaagtagattttctagaaataaacagttatggaggacttgtatggagaaatttaagtcttcactgagggccactttacaaaggaaatttgaataaatggagagagagagaagccttgttgttggataggaaaacccgtactaaagatactctacctacattaatttatttgtttaatttttgacaacaagcatgtattacttttgaaaagatgaaaaataaagatttatttaaaaaaggaaaaa

SEQ ID NO: 35002 - DNA, 1248 bp, Homo sapiens
  source 1..1248: mol_type = unassigned DNA
tgtggcaaagctttcagcattaatgagaaattaatttggcatcagagacttcacagtggggagaaacccttcaaatgtgtggagtgtgggaaaagcttcagctacagttcccattatatcacacatcagacaatccacagtggggagaagccctatcagtgtaagatgtgtgggaaggccttcagtgttaatggaagcctaagtaggcatcagagaatccatacgggagagaagccctatcagtgcaaggaatgtggaaatggcttcagctgtagttctgcatatattacacatcagagagtccacactggagagaaaccttacgagtgtaatgactgtgggaaagcgttcaatgttaatgcaaaattaattcaacatcagagaatccatactggagagaaaccttatgaatgtaatgaatgtggaaaaggcttcaggtgcagctcccagcttaggcagcatcagagcatccacacaggagaaaagccctatcagtgtaaagagtgtggaaaaggcttcaataataatacaaaactcattcagcatcagagaatccacacaggcgagaaaccctatgagtgtaatgaatgcgggaaagccttcagatgtaactcccaatttcggcagcatctgagaattcacactggggagaagccctatgagtgtaatgagtgtggaaaggccttcagcgttaatgggaaactaatgcggcatcagagaattcacactggggagaaaccttttgaatgtaatgagtgtgggagatgctttacttctaaaagaaacctacttgatcatcaccgaatccatactggagaaaagccctatcaatgtaaggaatgtgggaaagccttcagtatcaatgccaaactaactaggcatcagaggatacatactggggagaaacctttcaaatgtatggaatgtgagaaagcattcagctgtagttctaactatattgtgcaccagagaatccatacaggagagaaaccctttcagtgtaaggagtgtggaaaagccttccatgttaatgcccatttaattcggcatcagagaagccacactggggagaaacccttcagatgtgtggaatgtggcaaaggcttcagctttagttctgactacattatacatcagacagtccacacttggaagaaaccctatatgtgtagtgtgtgtgggaaagcattcaggtttagcttccagctcagtcagcatcagagtgtccatagtgaaggaaaatcctaa

SEQ ID NO: 35003 - DNA, 3242 bp, Homo sapiens
  source 1..3242: mol_type = unassigned DNA
cggaggtgagtgcagggctccgggcgctgtgtgccgtgccctgtcccccaggctctgggtccggttgagacgcactcccaccctgggtgctgcagggtctcccgtggcctacgctgccaggaggcccaggctgggagagggagcagggcggcggcccggggtgctcttccgcgctcctcgactccagctttggtctttgtggctcaatagcttgcgcccattggaaggggaaacgcacgttgctgtcccagccacgaggccctgagcatttagcacttggtcgacgggggaagatgtgtcggtgcagctaaaagatggaatatttgcgggcgtgaagcggcccgaggtgataccacaagtcttttgacatgctgaggtctggcaggaacattaacctatgtgcatcccgagtatggaccgtgtgctcccaggctcctgacatagggtcatgaattagggccgagtgggagcgcagagcccctcccagtcacccggcagcagaagcagcccggcttttggaggacattgtctcctggagcagtgtcagtcccaaaagctccagcccttctctgagacggggaccaggggatggcagccatgcacctgacagcctggccccagggacttcacggatcccctgaagctcatccatggacttccatggactacagggcctgagctatggaattggccctagggcagcaggaacctattgtttcagaagtcggtgacctttgaggacgtggctgtgtacttcacccaggcggaatgggatggcctgtcccctgcacagaggaccctgtacagggatgtgatgctggagaattatgggaatgtggcctccctgggatttccacttctcaaacctgctgtgatctcacaactggagggaggaagtgagctggggggctcatctccactggctgcaggaacaggcctccagggcctccagactgatattcagactgacaatgatttgacaaaggaaatgtatgaaggaaaagagaatgtatcatttgaacttcaaagagacttttcccaggaaacagacttttcagaagcctctcttctagagaaacaacaggaagtccactcagcaggaaatataaagaaggagaagagcaacaccattgatggaacagtgaaagatgagacaagccccgtggaggagtgtttttttagtcaaagttcaaactcatatcagtgtcataccatcactggagagcagccctctgggtgtacaggattggggaaatccatcagctttgatacaaaactcgtgaagcatgaaataattaattctgaggaaagacctttcaaatgtgaagaattagtagagccctttaggtgtgactctcaacttattcaacatcaagagaacaacactgaggaaaagccttatcagtgttcggagtgtggcaaagctttcagcattaatgagaaattaatttggcatcagagacttcacagtggggagaaacccttcaaatgtgtggagtgtgggaaaagcttcagctacagttcccattatatcacacatcagacaatccacagtggggagaagccctatcagtgtaagatgtgtgggaaggccttcagtgttaatggaagcctaagtaggcatcagagaatccatacgggagagaagccctatcagtgcaaggaatgtggaaatggcttcagctgtagttctgcatatattacacatcagagagtccacactggagagaaaccttacgagtgtaatgactgtgggaaagcgttcaatgttaatgcaaaattaattcaacatcagagaatccatactggagagaaaccttatgaatgtaatgaatgtggaaaaggcttcaggtgcagctcccagcttaggcagcatcagagcatccacacaggagaaaagccctatcagtgtaaagagtgtggaaaaggcttcaataataatacaaaactcattcagcatcagagaatccacacaggtgagaaaccctatgaatgcactgaatgtggaaaagccttcagtgtcaaagggaagttaatccaacaccagagaattcacacaggcgagaaaccctatgagtgtaatgaatgcgggaaagccttcagatgtaactcccaatttcggcagcatctgagaattcacactggggagaagccctatgagtgtaatgagtgtggaaaggccttcagcgttaatgggaaactaatgcggcatcagagaattcacactggggagaaaccttttgaatgtaatgagtgtgggagatgctttacttctaaaagaaacctacttgatcatcaccgaatccatactggagaaaagccctatcaatgtaaggaatgtgggaaagccttcagtatcaatgccaaactaactaggcatcagaggatacatactggggagaaacctttcaaatgtatggaatgtgagaaagcattcagctgtagttctaactatattgtgcaccagagaatccatacaggagagaaaccctttcagtgtaaggagtgtggaaaagccttccatgttaatgcccatttaattcggcatcagagaagccacactggggagaaacccttcagatgtgtggaatgtggcaaaggcttcagctttagttctgactacattatacatcagacagtccacacttggaagaaaccctatatgtgtagtgtgtgtgggaaagcattcaggtttagcttccagctcagtcagcatcagagtgtccatagtgaaggaaaatcctaataatgagaaagatatagaaaactcttaaggttaatgccaaaatggatcaagtatcatcagattcatccattgaaaaacctccaagagggcatgaatatggcagagtcttcatatggaaacagtttttattctattcagtttaaatcaggaaaggatgaccagttaaagagaaacatccaaaaatagctttgttttgtaccaacaggaattagaaaatataatgaaaagatttcgttcccagcagcatcaagaaaagtagattttctagaaataaacagttatggaggacttgtatggagaaatttaagtcttcactgagggccactttacaaaggaaatttgaataaatggagagagagagaagccttgttgttggataggaaaacccgtactaaagatactctacctacattaatttatttgtttaatttttgacaacaagcatgtattacttttgaaaagatgaaaaataaagatttatttaaaaaaggaaaaa

SEQ ID NO: 35004 - DNA, 3234 bp, Homo sapiens
  source 1..3234: mol_type = unassigned DNA
cggaggtgagtgcagggctccgggcgctgtgtgccgtgccctgtcccccaggctctgggtccggttgagacgcactcccaccctgggtgctgcagggtctcccgtggcctacgctgccaggaggcccaggctgggagagggagcagggcggcggcccggggtgctcttccgcgctcctcgactccagctttggtctttgtggctcaatagcttgcgcccattggaaggggaaacgcacgttgctgtcccagccacgaggccctgagcatttagcacttggtcgacgggggaagatgtgtcggtgcagctaaaagatggaatatttgcgggcgtgaagcggcccgaggtgataccacaagtcttttgacatgctgaggtctggcaggaacattaacctatgtgcatcccgagtatggaccgtgtgctcccaggctcctgacatagggtcatgaattagggccgagtgggagcgcagagcccctcccagtcacccggcagcagaagcagcccggcttttggaggacattgtctcctggagcagtgtcagtcccaaaagctccagcccttctctgagacggggaccaggggatggcagccatgcacctgacagcctggccccaggtgagctgtggggtccttcagctcttcctctgggcagtttcagattgaaaaacagggcctgagctatggaattggccctagggcagcaggaacctattgtttcagaagtcggtgacctttgaggacgtggctgtgtacttcacccaggcggaatgggatggcctgtcccctgcacagaggaccctgtacagggatgtgatgctggagaattatgggaatgtggcctccctgggatttccacttctcaaacctgctgtgatctcacaactggagggaggaagtgagctggggggctcatctccactggctgcaggaacaggcctccagggcctccagactgatattcagactgacaatgatttgacaaaggaaatgtatgaaggaaaagagaatgtatcatttgaacttcaaagagacttttcccaggaaacagacttttcagaagcctctcttctagagaaacaacaggaagtccactcagcaggaaatataaagaaggagaagagcaacaccattgatggaacagtgaaagatgagacaagccccgtggaggagtgtttttttagtcaaagttcaaactcatatcagtgtcataccatcactggagagcagccctctgggtgtacaggattggggaaatccatcagctttgatacaaaactcgtgaagcatgaaataattaattctgaggaaagacctttcaaatgtgaagaattagtagagccctttaggtgtgactctcaacttattcaacatcaagagaacaacactgaggaaaagccttatcagtgttcggagtgtggcaaagctttcagcattaatgagaaattaatttggcatcagagacttcacagtggggagaaacccttcaaatgtgtggagtgtgggaaaagcttcagctacagttcccattatatcacacatcagacaatccacagtggggagaagccctatcagtgtaagatgtgtgggaaggccttcagtgttaatggaagcctaagtaggcatcagagaatccatacgggagagaagccctatcagtgcaaggaatgtggaaatggcttcagctgtagttctgcatatattacacatcagagagtccacactggagagaaaccttacgagtgtaatgactgtgggaaagcgttcaatgttaatgcaaaattaattcaacatcagagaatccatactggagagaaaccttatgaatgtaatgaatgtggaaaaggcttcaggtgcagctcccagcttaggcagcatcagagcatccacacaggagaaaagccctatcagtgtaaagagtgtggaaaaggcttcaataataatacaaaactcattcagcatcagagaatccacacaggtgagaaaccctatgaatgcactgaatgtggaaaagccttcagtgtcaaagggaagttaatccaacaccagagaattcacacaggcgagaaaccctatgagtgtaatgaatgcgggaaagccttcagatgtaactcccaatttcggcagcatctgagaattcacactggggagaagccctatgagtgtaatgagtgtggaaaggccttcagcgttaatgggaaactaatgcggcatcagagaattcacactggggagaaaccttttgaatgtaatgagtgtgggagatgctttacttctaaaagaaacctacttgatcatcaccgaatccatactggagaaaagccctatcaatgtaaggaatgtgggaaagccttcagtatcaatgccaaactaactaggcatcagaggatacatactggggagaaacctttcaaatgtatggaatgtgagaaagcattcagctgtagttctaactatattgtgcaccagagaatccatacaggagagaaaccctttcagtgtaaggagtgtggaaaagccttccatgttaatgcccatttaattcggcatcagagaagccacactggggagaaacccttcagatgtgtggaatgtggcaaaggcttcagctttagttctgactacattatacatcagacagtccacacttggaagaaaccctatatgtgtagtgtgtgtgggaaagcattcaggtttagcttccagctcagtcagcatcagagtgtccatagtgaaggaaaatcctaataatgagaaagatatagaaaactcttaaggttaatgccaaaatggatcaagtatcatcagattcatccattgaaaaacctccaagagggcatgaatatggcagagtcttcatatggaaacagtttttattctattcagtttaaatcaggaaaggatgaccagttaaagagaaacatccaaaaatagctttgttttgtaccaacaggaattagaaaatataatgaaaagatttcgttcccagcagcatcaagaaaagtagattttctagaaataaacagttatggaggacttgtatggagaaatttaagtcttcactgagggccactttacaaaggaaatttgaataaatggagagagagagaagccttgttgttggataggaaaacccgtactaaagatactctacctacattaatttatttgtttaatttttgacaacaagcatgtattacttttgaaaagatgaaaaataaagatttattt

SEQ ID NO: 35005 - DNA, 2785 bp, Homo sapiens
  source 1..2785: mol_type = unassigned DNA
cacttccggcagcgccggggagcagtccgctacggagctccagcccttctctgagacggggaccaggggatggcagccatgcacctgacagcctggccccagggacttcacggatcccctgaagctcatccatggacttccatggactacagaagtcggtgacctttgaggacgtggctgtgtacttcacccaggcggaatgggatggcctgtcccctgcacagaggaccctgtacagggatgtgatgctggagaattatgggaatgtggcctccctgggatttccacttctcaaacctgctgtgatctcacaactggagggaggaagtgagctggggggctcatctccactggctgcaggaacaggcctccagggcctccagactgatggagtctcgctctgtcgcccaaactggagtgcagtggcaagaacttggctcaccgcaacttccgtttcccgggttcgagcaattctcctgcctcatcctcccgagtagctggaactacagtagatattcagactgacaatgatttgacaaaggaaatgtatgaaggaaaagagaatgtatcatttgaacttcaaagagacttttcccaggaaacagacttttcagaagcctctcttctagagaaacaacaggaagtccactcagcaggaaatataaagaaggagaagagcaacaccattgatggaacagtgaaagatgagacaagccccgtggaggagtgtttttttagtcaaagttcaaactcatatcagtgtcataccatcactggagagcagccctctgggtgtacaggattggggaaatccatcagctttgatacaaaactcgtgaagcatgaaataattaattctgaggaaagacctttcaaatgtgaagaattagtagagccctttaggtgtgactctcaacttattcaacatcaagagaacaacactgaggaaaagccttatcagtgttcggagtgtggcaaagctttcagcattaatgagaaattaatttggcatcagagacttcacagtggggagaaacccttcaaatgtgtggagtgtgggaaaagcttcagctacagttcccattatatcacacatcagacaatccacagtggggagaagccctatcagtgtaagatgtgtgggaaggccttcagtgttaatggaagcctaagtaggcatcagagaatccatacgggagagaagccctatcagtgcaaggaatgtggaaatggcttcagctgtagttctgcatatattacacatcagagagtccacactggagagaaaccttacgagtgtaatgactgtgggaaagcgttcaatgttaatgcaaaattaattcaacatcagagaatccatactggagagaaaccttatgaatgtaatgaatgtggaaaaggcttcaggtgcagctcccagcttaggcagcatcagagcatccacacaggagaaaagccctatcagtgtaaagagtgtggaaaaggcttcaataataatacaaaactcattcagcatcagagaatccacacaggtgagaaaccctatgaatgcactgaatgtggaaaagccttcagtgtcaaagggaagttaatccaacaccagagaattcacacaggcgagaaaccctatgagtgtaatgaatgcgggaaagccttcagatgtaactcccaatttcggcagcatctgagaattcacactggggagaagccctatgagtgtaatgagtgtggaaaggccttcagcgttaatgggaaactaatgcggcatcagagaattcacactggggagaaaccttttgaatgtaatgagtgtgggagatgctttacttctaaaagaaacctacttgatcatcaccgaatccatactggagaaaagccctatcaatgtaaggaatgtgggaaagccttcagtatcaatgccaaactaactaggcatcagaggatacatactggggagaaacctttcaaatgtatggaatgtgagaaagcattcagctgtagttctaactatattgtgcaccagagaatccatacaggagagaaaccctttcagtgtaaggagtgtggaaaagccttccatgttaatgcccatttaattcggcatcagagaagccacactggggagaaacccttcagatgtgtggaatgtggcaaaggcttcagctttagttctgactacattatacatcagacagtccacacttggaagaaaccctatatgtgtagtgtgtgtgggaaagcattcaggtttagcttccagctcagtcagcatcagagtgtccatagtgaaggaaaatcctaataatgagaaagatatagaaaactcttaaggttaatgccaaaatggatcaagtatcatcagattcatccattgaaaaacctccaagagggcatgaatatggcagagtcttcatatggaaacagtttttattctattcagtttaaatcaggaaaggatgaccagttaaagagaaacatccaaaaatagctttgttttgtaccaacaggaattagaaaatataatgaaaagatttcgttcccagcagcatcaagaaaagtagattttctagaaataaacagttatggaggacttgtatggagaaatttaagtcttcactgagggccactttacaaaggaaatttgaataaatggagagagagagaagccttgttgttggataggaaaacccgtactaaagatactctacctacattaatttatttgtttaatttttgacaacaagcatgtattacttttgaaaagatgaaaaataaagatttattt

SEQ ID NO: 35006 - DNA, 2358 bp, Homo sapiens
  source 1..2358: mol_type = unassigned DNA
gtgacgcacttccggcagcgccggggagcagtccgctacggagctccagcccttctctgagacggggaccaggggatggcagccatgcacctgacagcctggccccagtagatattcagactgacaatgatttgacaaaggaaatgtatgaaggaaaagagaatgtatcatttgaacttcaaagagacttttcccaggaaacagacttttcagaagcctctcttctagagaaacaacaggaagtccactcagcaggaaatataaagaaggagaagagcaacaccattgatggaacagtgaaagatgagacaagccccgtggaggagtgtttttttagtcaaagttcaaactcatatcagtgtcataccatcactggagagcagccctctgggtgtacaggattggggaaatccatcagctttgatacaaaactcgtgaagcatgaaataattaattctgaggaaagacctttcaaatgtgaagaattagtagagccctttaggtgtgactctcaacttattcaacatcaagagaacaacactgaggaaaagccttatcagtgttcggagtgtggcaaagctttcagcattaatgagaaattaatttggcatcagagacttcacagtggggagaaacccttcaaatgtgtggagtgtgggaaaagcttcagctacagttcccattatatcacacatcagacaatccacagtggggagaagccctatcagtgtaagatgtgtgggaaggccttcagtgttaatggaagcctaagtaggcatcagagaatccatacgggagagaagccctatcagtgcaaggaatgtggaaatggcttcagctgtagttctgcatatattacacatcagagagtccacactggagagaaaccttacgagtgtaatgactgtgggaaagcgttcaatgttaatgcaaaattaattcaacatcagagaatccatactggagagaaaccttatgaatgtaatgaatgtggaaaaggcttcaggtgcagctcccagcttaggcagcatcagagcatccacacaggagaaaagccctatcagtgtaaagagtgtggaaaaggcttcaataataatacaaaactcattcagcatcagagaatccacacaggtgagaaaccctatgaatgcactgaatgtggaaaagccttcagtgtcaaagggaagttaatccaacaccagagaattcacacaggcgagaaaccctatgagtgtaatgaatgcgggaaagccttcagatgtaactcccaatttcggcagcatctgagaattcacactggggagaagccctatgagtgtaatgagtgtggaaaggccttcagcgttaatgggaaactaatgcggcatcagagaattcacactggggagaaaccttttgaatgtaatgagtgtgggagatgctttacttctaaaagaaacctacttgatcatcaccgaatccatactggagaaaagccctatcaatgtaaggaatgtgggaaagccttcagtatcaatgccaaactaactaggcatcagaggatacatactggggagaaacctttcaaatgtatggaatgtgagaaagcattcagctgtagttctaactatattgtgcaccagagaatccatacaggagagaaaccctttcagtgtaaggagtgtggaaaagccttccatgttaatgcccatttaattcggcatcagagaagccacactggggagaaacccttcagatgtgtggaatgtggcaaaggcttcagctttagttctgactacattatacatcagacagtccacacttggaagaaaccctatatgtgtagtgtgtgtgggaaagcattcaggtttagcttccagctcagtcagcatcagagtgtccatagtgaaggaaaatcctaataatgagaaagatatagaaaactcttaaggttaatgccaaaatggatcaagtatcatcagattcatccattgaaaaacctccaagagggcatgaatatggcagagtcttcatatggaaacagtttttattctattcagtttaaatcaggaaaggatgaccagttaaagagaaacatccaaaaatagctttgttttgtaccaacaggaattagaaaatataatgaaaagatttcgttcccagcagcatcaagaaaagtagattttctagaaataaacagttatggaggacttgtatggagaaatttaagtcttcactgagggccactttacaaaggaaatttgaataaatggagagagagagaagccttgttgttggataggaaaacccgtactaaagatactctacctacattaatttatttgtttaatttttgacaacaagcatgtattacttttg

SEQ ID NO: 35007 - DNA, 8121 bp, Homo sapiens
  source 1..8121: mol_type = unassigned DNA
gcctggaaactacaaaggattgtgttaattttgtgtttaggaagaaagaggtaatgggtaggaatcaatgtaaacttattcataggccacaccaaaccaggaattcttgtcgtgattgcacttggtagagttaacacacgtgcacattacggaaacgttggtgaccaacaggcgtttcagcgagctttcgcacacctcatgggcctttgtgggctgctggagagatgttggctgcaccatgacccagatggagttttaacattgaatgcggagaacactaattatgcctatcaagttccaaacttccataaatgtgaaatctgtctactatcttttccaaaagaatcccagtttcaacgccacatgagggatcacgagcgaaatgacaagccacatcgatgtgaccagtgcccccaaacatttaatgttgaattcaacctgacacttcataaatgcacccacagcggggaagatcctacctgccctgtgtgtaacaagaaattctccagagtggctagtctcaaagcgcatattatgctacatgaaaaggaagagaatctcatctgttctgagtgtggggatgagtttactctgcagagtcagctggccgtgcacatggaggagcaccgccaggagctggctggaacccggcagcatgcctgcaaggcctgcaagaaagagttcgagacctcctcggagctgaaggaacacatgaagactcattacaaaattagggtatcaagtacaaggtcttataaccggaatatcgacagaagtggattcacgtattcgtgtccgcactgtggaaagacgtttcaaaagccaagccagttaacgcgacacattaggatacacacaggtgaaaggccgttcaaatgtagtgaatgtggaaaggcttttaaccagaagggggcactgcagacccacatgatcaagcacacaggtgaaaaaccccatgcctgtgccttctgtcctgccgccttctctcagaaagggaatcttcagtcgcacgtgcagcgagtccactcagaggtcaagaatggtcctacctataactgtacagaatgtagttgtgtatttaaaagtttaggcagcttaaacacgcatatcagcaagatgcatatgggtgggccacagaattcaacaagttctacagagactgctcatgttttaacggccacactttttcagacgttacctcttcaacagacggaagcccaagccacgtcggcctcaagccagccgagctcccaggcggtgagcgacgtcatccagcagctcctggagctctcagagccggcgccggtggagtcggggcagtccccgcagcctgggcagcagctgagcatcacagtgggcatcaaccaggacattttacagcaagccttagaaaacagtgggctgtcttcaattccagctgcagcacatcctaatgactcctgccatgccaagacctctgcaccacacgctcaaaacccagatgtttccagcgtttcaaatgagcagacggaccccacagacgcagagcaagaaaaagaacaggaaagcccggagaaactggataaaaaagaaaaaaaaatgataaagaagaagtcaccgtttctacctggctccatccgcgaggagaacggcgtgcgctggcatgtgtgtccctactgcgccaaggagttccgcaagcccagcgacctggtccgccacatccgcatccacacccacgagaagcccttcaagtgcccgcagtgcttccgcgccttcgccgtgaagagcacgctgacagcgcacatcaagacgcacaccggcatcaaggcgttcaagtgccagtactgcatgaagagcttctccacctctggcagcctcaaggtgcacattcgcctgcacacaggagttagaccttttgcttgtcctcactgtgacaaaaaatttcgaacctcaggccataggaagactcacattgcttcccactttaaacatacggaattaaggaaaatgaggcaccagcgtaaacctgcaaaggtccgtgttggcaagacgaatattccagtccctgatattcctttgcaggaaccaatcctcataactgacttaggtctcatccagcccattccaaaaaaccagtttttccaaagctatttcaataataattttgtcaatgaagcagatagaccatacaagtgtttttactgtcatcgtgcatataaaaaatcttgccaccttaaacaacacatcagatcccatacaggtgaaaaaccttttaaatgttctcagtgtggaagaggctttgtttctgcaggcgtgctcaaagcacacatcagaacacacacaggactgaaatctttcaagtgtctgatatgtaatggggctttcactactggtggcagcttacggcgacacatgggtatccacaacgaccttcgtccctatatgtgtccctattgccaaaaaacatttaagacttcactaaattgcaaaaagcacatgaaaacccacagatatgagcttgcccagcagctccaacagcatcagcaggcagcctcgatagatgacagcactgtagaccagcagagcatgcaggcctccactcaaatgcaggtggagatcgagagcgacgagctgccgcagacggcagaggtggtcgcagcgaaccccgaggccatgctggacctggagcctcagcatgtggtgggcacggaggaagcagggctgggccagcagttggcagatcagcccctggaagcagatgaagatgggtttgtggctccacaggaccctctgcgagggcacgtagaccagtttgaagagcagagccctgcgcaacagtccttcgaaccagcagggctaccccaaggttttacagtgactgatacgtaccatcagcagcctcagtttccacctgtccaacagctacaggattccagcacacttgagtctcaggccctctccacaagcttccaccagcagagcttgctgcaggctcccagctctgatgggatgaatgtaacaactcgcttgattcaggagtcatcccaagaggaactggacctgcaggcacaaggttcccagtttctggaggacaacgaggaccagagcaggcgctcttacaggtgtgactattgcaacaaaggctttaagaagtccagccacctgaagcagcatgtgcggtcgcacaccggggaaaagccctacaagtgcaagctctgtggacgcggctttgtttcctctggggtcctcaagtcccacgagaagacacacacaggagtgaaggcgttcagctgcagtgtgtgcaatgcttccttcaccaccaatggcagcctcacccggcacatggccacacatatgagcatgaagccttataagtgtccgttttgtgaggagggtttccgaactacagtgcattgtaaaaagcacatgaagagacaccaaacagtcccctctgctgtgtcagccactggagagacagaaggaggagacatttgtatggaggaagaggaagaacattctgacagaaatgcatcacggaagtctcgtcctgaggtcatcactttcacggaggaggagacagcccagttagccaagatccggccgcaggagagcgccacggtgtcagagaaggtcctggtgcagtccgcggcagaaaaggaccgcatcagtgagctgagggacaagcaggcggagctgcaggacgagcccaagcacgccaactgctgcacatactgccccaagagcttcaagaaacctagcgacctggtgaggcatgttcgaatccatactggagaaaagccatacaaatgtgatgaatgtggaaagagttttactgtgaaatccactctcgattgtcatgtgaagactcacacaggtcagaagctcttcagctgtcacgtctgcagcaacgccttctccacgaagggaagtctgaaggtccacatgcgcctgcacacgggagccaagcccttcaaatgcccgcattgcgagctgcgtttccgtacctcgggtagaagaaagacacacatgcagtttcattataaaccagacccaaagaaggccagaaagcctatgactcgaagctcatcggaaggactgcagcctgtaaacctcctcaactcctcctctactgacccaaacgtgtttatcatgaacaactctgttctaacaggacagtttgatcagaatctgctgcaaccaggactggtgggccaagctattctccctgcctctgtgtcagctgggggtgacctgaccgtgtctctgacagatgggagcctggctaccctagaaggcatccagttacagttggctgctaacttggttggaccaaatgtacagatttctggaatcgatgctgccagcattaataacattacgttgcagattgatccaagcattctgcagcagacgctacagcagggcaacctattggctcagcagctcacgggggagcctggcctggccccacagaacagctctctccagacatcggacagcacggtccctgccagtgttgtcatccagcccatctcaggcctgtccttacagcccacagtgacctctgcgaacctgaccataggcccgctgtctgagcaggattcagtgctgaccactaacagcagtgggacccaagacctcactcaagtgatgacttcgcaaggtctagtgtccccctccggcggtccccacgagatcaccctgaccattaacaactccagcctgagccaggtcctggcacaggccgctgggcccactgccacgtcttcctcggggtctccacaggaaattaccctgactatctccgaacttaacactacaagcggaagccttccttcaacaacaccgatgtctccatcggccatctcgactcagaacctggtcatgtcctcgtcgggcgtgggaggtgacgctagtgtcacgctgacgctggccgatactcagggtatgctatctggaggcctggacactgtcacactcaacatcacctctcagggtcagcagttcccagcgctcctcacggatccctctctctcgggccagggtggagcaggctcgccgcaagtcatactagtgagccacacgccacagtcagcgtctgctgcttgtgaagaaatagcctaccaggtagctggcgtctctgggaacctggccccgggcaaccagccagagaaggagggccgggcgcaccagtgcctggagtgtgaccgcgccttctcatcggcggcggtgctcatgcaccacagcaaggaggtgcatggccgggagcgcatccacggctgccccgtgtgcaggaaggccttcaagcgcgccacgcacctcaaggagcacatgcagacacaccaggccggcccctctttgagctcccagaagccaagagtgtttaaatgtgacacttgtgagaaggcatttgccaaaccaagccagctggagcgccacagccgcatacatacaggggagcggccgttccattgcacgctttgtgagaaagccttcaaccagaagagtgcgctgcaggtgcacatgaagaagcacacgggggagcggccctacaagtgtgcctactgcgtcatgggcttcacgcagaagagcaacatgaagctgcacatgaagcgggcgcacagctatgctggagctctgcaggagtctgcaggtcacccggagcaggacggggaggagctgagccggaccctccacctggaggaggtggtgcaggaggccgccggcgagtggcaggccctcacccacgtcttctgatgcgagttggaagtacacctttaagaatgtttctgaagttacgttttgtgaagagcaaagcacttggaatctccgttttaaagcttcaagtgttaaaaatgctacaatagttttttatctataaaattatctaaagaatcattgtctttcagagactcataggaaaaaaaaactaggaaaagtgtcaccgcattgttctcttttgtctacaaatcactgaactcaggtactactgtaggcagtttcctcctcagtctcctccgtggctagtgtgtctagttcacgaagcaattaactgggtcttactatcattgtagtgtgatttctttgtattagcaaagacaaaaacgctaacattgaaaaagtatgtcagattttccttcatgtttctggttataagaagcatagcttacaaagcaagcgtaagattgaggcatgaagttcagaaaaaaaagtgttacaacacacagggaagttttttccactcttttctctgtgcattttgaaaattagtcaaaatggactcttttcagtctaccataagttaatataactgataccttgagagatggctggaccaattctctccatgacaaatgtttaatcattagttacaagaatgcagtatctggggcgtcaacatggggactcgagtaaacctgacccaccaataaggattcagctgtccacacgggctggcgacacacttaccgcatcaatctgtgttcaggtccagggttacataattgcagaagcacaagccatacatcgcaggtaggaaaccacagaaccgtctgcaaggagcaagcaacggtggccctgtccaccccagcaaataagaagcatatctgtagcttaaggccacgaatccgtaaaaaccccatgactttctcttcgtgcataaacagatgtatttttgatttcagggaattctttagtatcgtcaatggtgccacataaaacatgtcccaaaccaaatcccacccgtgctgggcagagtgcgtgcacgccattcctacagcattccaaagatggaaggttctttacttcatgttaatttttcctttgaaattatttatatgttctatatataaatacatatgtacatagatatatgggcctctgtgtggctgaacagtatattttgtaaatataagtactagtcctaattgcagaaagagcgtcagtttcacctccccacgagcacttcagatcagtattgtattcattttattcataaatggatatctttttcattgtcatataaagctgggttttatttttttttcctgaaaaataattgcctttattttctctcgttgcctccttggtttcagaagagagtagttttattataaatattgtatggactttgtatattaagagaggagctcatttcagattcctaaagaaatagacattttactgttattttgaaagggcatcttttgatttttttgttgttgttgttcacttttggcatatgtatataagtaatattgacggtgatatgaaaacttttgttatgtgaagatatttaagtcagaaaattgttaaataatattacttcttttccaaactgctttgtgtattgtatatttttttaagaaaaagaaaagccttatttgacttatgcttgtgatactggacttcttaccaatccggaggtttccttccttgaatgtcagtgtgtaaacctggctgtagccgcatatgcagaataactgtaattgtgctagagttttaaaggttctgcttttaatgcactttttattttataattttgtattgaaatattttagaaatgttgattaattttggtgaaaaaatatccccaaagtggaaattattggaattttaaacttttgttcttgctgggttatttattttgattttagcattaaatgtcatctcaggacatctctaaaaggggttgtttaattcctaattgtatagaaagctagtttggtgaattgtattggttaattgactgtttaaggccttaacaggtgaatctagagcctacttttattttggttaaagaaaaagaaaatatcaataattcaattttgtgtcttttctcaatttattagcaaacacaagacattttatgtattatttcgatttacttcctaattataaaagctgcttttttgcagaacattccttgaaaatataaggttttgaaaagacataattttacttgaatctttgtggggtacaggttgatctttatattttactggttgttttaaaaattctagaaaagagatttctaggcctcatgtataaccagggttttgaggataaagaactgtatttttagaactatctcatcatagcatatctgctttggaataactataaataaaagatgaagttagg

SEQ ID NO: 35008 - DNA, 4872 bp, Homo sapiens
  source 1..4872: mol_type = unassigned DNA
gcctggaaactacaaaggattgtgttaattttgtgtttaggaagaaagaggtaatgggtaggaatcaatgtaaacttattcataggccacaccaaaccaggaattcttgtcgtgattgcacttggtagagttaacacacgtgcacattacggaaacgttggtgaccaacaggcgtttcagcgagctttcgcacacctcatgggcctttgtgggctgctggagagatgttggctgcaccatgacccagatggagttttaacattgaatgcggagaacactaattatgcctatcaagttccaaacttccataaatgtgaaatctgtctactatcttttccaaaagaatcccagtttcaacgccacatgagggatcacgagcgaaatgacaagccacatcgatgtgaccagtgcccccaaacatttaatgttgaattcaacctgacacttcataaatgcacccacagcggggaagatcctacctgccctgtgtgtaacaagaaattctccagagtggctagtctcaaagcgcatattatgctacatgaaaaggaagagaatctcatctgttctgagtgtggggatgagtttactctgcagagtcagctggccgtgcacatggaggagcaccgccaggagctggctggaacccggcagcatgcctgcaaggcctgcaagaaagagttcgagacctcctcggagctgaaggaacacatgaagactcattacaaaattagggtatcaagtacaaggtcttataaccggaatatcgacagaagtggattcacgtattcgtgtccgcactgtggaaagacgtttcaaaagccaagccagttaacgcgacacattaggatacacacaggtgaaaggccgttcaaatgtagtgaatgtggaaaggcttttaaccagaagggggcactgcagacccacatgatcaagcacacaggtgaaaaaccccatgcctgtgccttctgtcctgccgccttctctcagaaagggaatcttcagtcgcacgtgcagcgagtccactcagaggtcaagaatggtcctacctataactgtacagaatgtagttgtgtatttaaaagtttaggcagcttaaacacgcatatcagcaagatgcatatgggtgggccacagaattcaacaagttctacagagactgctcatgttttaacggccacactttttcagacgttacctcttcaacagacggaagcccaagccacgtcggcctcaagccagccgagctcccaggcggtgagcgacgtcatccagcagctcctggagctctcagagccggcgccggtggagtcggggcagtccccgcagcctgggcagcagctgagcatcacagtgggcatcaaccaggacattttacagcaagccttagaaaacagtgggctgtcttcaattccagctgcagcacatcctaatgactcctgccatgccaagacctctgcaccacacgctcaaaacccagatgtttccagcgtttcaaatgagcagacggaccccacagacgcagagcaagaaaaagaacaggaaagcccggagaaactggataaaaaagaaaaaaaaatgataaagaagaagtcaccgtttctacctggctccatccgcgaggagaacggcgtgcgctggcatgtgtgtccctactgcgccaaggagttccgcaagcccagcgacctggtccgccacatccgcatccacacccacgagaagcccttcaagtgcccgcagtgcttccgcgccttcgccgtgaagagcacgctgacagcgcacatcaagacgcacaccggcatcaaggcgttcaagtgccagtactgcatgaagagcttctccacctctggcagcctcaaggtgcacattcgcctgcacacaggagttagaccttttgcttgtcctcactgtgacaaaaaatttcgaacctcaggccataggaagactcacattgcttcccactttaaacatacggaattaaggaaaatgaggcaccagcgtaaacctgcaaaggtccgtgttggcaagacgaatattccagtccctgatattcctttgcaggaaccaatcctcataactgacttaggtctcatccagcccattccaaaaaaccagtttttccaaagctatttcaataataattttgtcaatgaagcagatagaccatacaagtgtttttactgtcatcgtgcatataaaaaatcttgccaccttaaacaacacatcagatcccatacaggtgaaaaaccttttaaatgttctcagtgtggaagaggctttgtttctgcaggcgtgctcaaagcacacatcagaacacacacaggactgaaatctttcaagtgtctgatatgtaatggggctttcactactggtggcagcttacggcgacacatgggtatccacaacgaccttcgtccctatatgtgtccctattgccaaaaaacatttaagacttcactaaattgcaaaaagcacatgaaaacccacagatatgagcttgcccagcagctccaacagcatcagcaggcagcctcgatagatgacagcactgtagaccagcagagcatgcaggcctccactcaaatgcaggtggagatcgagagcgacgagctgccgcagacggcagaggtggtcgcagcgaaccccgaggccatgctggacctggagcctcagcatgtggtgggcacggaggaagcagggctgggccagcagttggcagatcagcccctggaagcagatgaagatgggtttgtggctccacaggaccctctgcgagggcacgtagaccagtttgaagagcagagccctgcgcaacagtccttcgaaccagcagggctaccccaaggttttacagtgactgatacgtaccatcagcagcctcagtttccacctgtccaacagctacaggattccagcacacttgagtctcaggccctctccacaagcttccaccagcagagcttgctgcaggctcccagctctgatgggatgaatgtaacaactcgcttgattcaggagtcatcccaagaggaactggacctgcaggcacaaggttcccagtttctggaggacaacgaggaccagagcaggcgctcttacaggtgtgactattgcaacaaaggctttaagaagtccagccacctgaagcagcatgtgcggtcgcacaccggggaaaagccctacaagtgcaagctctgtggacgcggctttgtttcctctggggtcctcaagtcccacgagaagacacacacaggagtgaaggcgttcagctgcagtgtgtgcaatgcttccttcaccaccaatggcagcctcacccggcacatggccacacatatgagcatgaagccttataagtgtccgttttgtgaggagggtttccgaactacagtgcattgtaaaaagcacatgaagagacaccaaacagtcccctctgctgtgtcagccactggagagacagaaggaggagacatttgtatggaggaagaggaagaacattctgacagaaatgcatcacggaagtctcgtcctgaggtcatcactttcacggaggaggagacagcccagttagccaagatccggccgcaggagagcgccacggtgtcagagaaggtcctggtgcagtccgcggcagaaaaggaccgcatcagtgagctgagggacaagcaggcggagctgcaggacgagcccaagcacgccaactgctgcacatactgccccaagagcttcaagaaacctagcgacctggtgaggcatgttcgaatccatactggagaaaagccatacaaatgtgatgaatgtggaaagagttttactgtgaaatccactctcgattgtcatgtgaagactcacacaggtcagaagctcttcagctgtcacgtctgcagcaacgccttctccacgaagggaagtctgaaggtccacatgcgcctgcacacgggagccaagcccttcaaatgcccgcattgcgagctgcgtttccgtacctcgggtagaagaaagacacacatgcagtttcattataaaccagacccaaagaaggccagaaagcctatgactcgaagctcatcggaaggactgcagcctgtaaacctcctcaactcctcctctactgacccaaacgtgtttatcatgaacaactctgttctaacaggacagtttgatcagaatctgctgcaaccaggactggtgggccaagctattctccctgcctctgtgtcagctgggggtgacctgaccgtgtctctgacagatgggagcctggctaccctagaaggcatccagttacagttggctgctaacttggttggaccaaatgtacagatttctggaatcgatgctgccagcattaataacattacgttgcagattgatccaagcattctgcagcagacgctacagcagggcaacctattggctcagcagctcacgggggagcctggcctggccccacagaacagctctctccagacatcggacagcacggtccctgccagtgttgtcatccagcccatctcaggcctgtccttacagcccacagtgacctctgcgaacctgaccataggcccgctgtctgagcaggattcagtgctgaccactaacagcagtgggacccaagacctcactcaagtgatgacttcgcaaggtctagtgtccccctccggcggtccccacgagatcaccctgaccattaacaactccagcctgagccaggtcctggcacaggccgctgggcccactgccacgtcttcctcggggtctccacaggaaattaccctgactatctccggttccaggtctgtgcagcacagtgtgggaccccaggagtgtggatctgtggaggcattgtatttggagaactccagcgacaagact

SEQ ID NO: 35009 - DNA, 8203 bp, Homo sapiens
  source 1..8203: mol_type = unassigned DNA
gcctggaaactacaaaggattgtgttaattttgtgtttaggaagaaagaggtaatgggtaggaatcaatgtaaacttattcataggccacaccaaaccaggaattcttgtcgtgattgcacttggtagagttaacacacgtgcacattacggaaacgttggtgaccaacaggcgtttcagcgagctttcgcacacctcatgggcctttgtgggctgctggagagatgttggctgcaccatgacccagatggagttttaacattgaatgcggagaacactaattatgcctatcaagttccaaacttccataaatgtgaaatctgtctactatcttttccaaaagaatcccagtttcaacgccacatgagggatcacgagcgaaatgacaagccacatcgatgtgaccagtgcccccaaacatttaatgttgaattcaacctgacacttcataaatgcacccacagcggggaagatcctacctgccctgtgtgtaacaagaaattctccagagtggctagtctcaaagcgcatattatgctacatgaaaaggaagagaatctcatctgttctgagtgtggggatgagtttactctgcagagtcagctggccgtgcacatggaggagcaccgccaggagctggctggaacccggcagcatgcctgcaaggcctgcaagaaagagttcgagacctcctcggagctgaaggaacacatgaagactcattacaaaattagggtatcaagtacaaggtcttataaccggaatatcgacagaagtggattcacgtattcgtgtccgcactgtggaaagacgtttcaaaagccaagccagttaacgcgacacattaggatacacacaggtgaaaggccgttcaaatgtagtgaatgtggaaaggcttttaaccagaagggggcactgcagacccacatgatcaagcacacaggtgaaaaaccccatgcctgtgccttctgtcctgccgccttctctcagaaagggaatcttcagtcgcacgtgcagcgagtccactcagaggtcaagaatggtcctacctataactgtacagaatgtagttgtgtatttaaaagtttaggcagcttaaacacgcatatcagcaagatgcatatgggtgggccacagaattcaacaagttctacagagactgctcatgttttaacggccacactttttcagacgttacctcttcaacagacggaagcccaagccacgtcggcctcaagccagccgagctcccaggcggtgagcgacgtcatccagcagctcctggagctctcagagccggcgccggtggagtcggggcagtccccgcagcctgggcagcagctgagcatcacagtgggcatcaaccaggacattttacagcaagccttagaaaacagtgggctgtcttcaattccagctgcagcacatcctaatgactcctgccatgccaagacctctgcaccacacgctcaaaacccagatgtttccagcgtttcaaatgagcagacggaccccacagacgcagagcaagaaaaagaacaggaaagcccggagaaactggataaaaaagaaaaaaaaatgataaagaagaagtcaccgtttctacctggctccatccgcgaggagaacggcgtgcgctggcatgtgtgtccctactgcgccaaggagttccgcaagcccagcgacctggtccgccacatccgcatccacacccacgagaagcccttcaagtgcccgcagtgcttccgcgccttcgccgtgaagagcacgctgacagcgcacatcaagacgcacaccggcatcaaggcgttcaagtgccagtactgcatgaagagcttctccacctctggcagcctcaaggtgcacattcgcctgcacacaggagttagaccttttgcttgtcctcactgtgacaaaaaatttcgaacctcaggccataggaagactcacattgcttcccactttaaacatacggaattaaggaaaatgaggcaccagcgtaaacctgcaaaggtccgtgttggcaagacgaatattccagtccctgatattcctttgcaggaaccaatcctcataactgacttaggtctcatccagcccattccaaaaaaccagtttttccaaagctatttcaataataattttgtcaatgaagcagatagaccatacaagtgtttttactgtcatcgtgcatataaaaaatcttgccaccttaaacaacacatcagatcccatacaggtgaaaaaccttttaaatgttctcagtgtggaagaggctttgtttctgcaggcgtgctcaaagcacacatcagaacacacacaggactgaaatctttcaagtgtctgatatgtaatggggctttcactactggtggcagcttacggcgacacatgggtatccacaacgaccttcgtccctatatgtgtccctattgccaaaaaacatttaagacttcactaaattgcaaaaagcacatgaaaacccacagatatgagcttgcccagcagctccaacagcatcagcaggcagcctcgatagatgacagcactgtagaccagcagagcatgcaggcctccactcaaatgcaggtggagatcgagagcgacgagctgccgcagacggcagaggtggtcgcagcgaaccccgaggccatgctggacctggagcctcagcatgtggtgggcacggaggaagcagggctgggccagcagttggcagatcagcccctggaagcagatgaagatgggtttgtggctccacaggaccctctgcgagggcacgtagaccagtttgaagagcagagccctgcgcaacagtccttcgaaccagcagggctaccccaaggttttacagtgactgatacgtaccatcagcagcctcagtttccacctgtccaacagctacaggattccagcacacttgagtctcaggccctctccacaagcttccaccagcagagcttgctgcaggctcccagctctgatgggatgaatgtaacaactcgcttgattcaggagtcatcccaagaggaactggacctgcaggcacaaggttcccagtttctggaggacaacgaggaccagagcaggcgctcttacaggtgtgactattgcaacaaaggctttaagaagtccagccacctgaagcagcatgtgcggtcgcacaccggggaaaagccctacaagtgcaagctctgtggacgcggctttgtttcctctggggtcctcaagtcccacgagaagacacacacaggagtgaaggcgttcagctgcagtgtgtgcaatgcttccttcaccaccaatggcagcctcacccggcacatggccacacatatgagcatgaagccttataagtgtccgttttgtgaggagggtttccgaactacagtgcattgtaaaaagcacatgaagagacaccaaacagtcccctctgctgtgtcagccactggagagacagaaggaggagacatttgtatggaggaagaggaagaacattctgacagaaatgcatcacggaagtctcgtcctgaggtcatcactttcacggaggaggagacagcccagttagccaagatccggccgcaggagagcgccacggtgtcagagaaggtcctggtgcagtccgcggcagaaaaggaccgcatcagtgagctgagggacaagcaggcggagctgcaggacgagcccaagcacgccaactgctgcacatactgccccaagagcttcaagaaacctagcgacctggtgaggcatgttcgaatccatactggagaaaagccatacaaatgtgatgaatgtggaaagagttttactgtgaaatccactctcgattgtcatgtgaagactcacacaggtcagaagctcttcagctgtcacgtctgcagcaacgccttctccacgaagggaagtctgaaggtccacatgcgcctgcacacgggagccaagcccttcaaatgcccgcattgcgagctgcgtttccgtacctcgggtagaagaaagacacacatgcagtttcattataaaccagacccaaagaaggccagaaagcctatgactcgaagctcatcggaaggactgcagcctgtaaacctcctcaactcctcctctactgacccaaacgtgtttatcatgaacaactctgttctaacaggacagtttgatcagaatctgctgcaaccaggactggtgggccaagctattctccctgcctctgtgtcagctgggggtgacctgaccgtgtctctgacagatgggagcctggctaccctagaaggcatccagttacagttggctgctaacttggttggaccaaatgtacagatttctggaatcgatgctgccagcattaataacattacgttgcagattgatccaagcattctgcagcagacgctacagcagggcaacctattggctcagcagctcacgggggagcctggcctggccccacagaacagctctctccagacatcggacagcacggtccctgccagtgttgtcatccagcccatctcaggcctgtccttacagcccacagtgacctctgcgaacctgaccataggcccgctgtctgagcaggattcagtgctgaccactaacagcagtgggacccaagacctcactcaagtgatgacttcgcaaggtctagtgtccccctccggcggtccccacgagatcaccctgaccattaacaactccagcctgagccaggtcctggcacaggccgctgggcccactgccacgtcttcctcggggtctccacaggaaattaccctgactatctccggttccaggtctgtgcagcacagtgtgggaccccaggagtgtggatctgtggaggcattgtatttggagaactccagcgacaaaacttaacactacaagcggaagccttccttcaacaacaccgatgtctccatcggccatctcgactcagaacctggtcatgtcctcgtcgggcgtgggaggtgacgctagtgtcacgctgacgctggccgatactcagggtatgctatctggaggcctggacactgtcacactcaacatcacctctcagggtcagcagttcccagcgctcctcacggatccctctctctcgggccagggtggagcaggctcgccgcaagtcatactagtgagccacacgccacagtcagcgtctgctgcttgtgaagaaatagcctaccaggtagctggcgtctctgggaacctggccccgggcaaccagccagagaaggagggccgggcgcaccagtgcctggagtgtgaccgcgccttctcatcggcggcggtgctcatgcaccacagcaaggaggtgcatggccgggagcgcatccacggctgccccgtgtgcaggaaggccttcaagcgcgccacgcacctcaaggagcacatgcagacacaccaggccggcccctctttgagctcccagaagccaagagtgtttaaatgtgacacttgtgagaaggcatttgccaaaccaagccagctggagcgccacagccgcatacatacaggggagcggccgttccattgcacgctttgtgagaaagccttcaaccagaagagtgcgctgcaggtgcacatgaagaagcacacgggggagcggccctacaagtgtgcctactgcgtcatgggcttcacgcagaagagcaacatgaagctgcacatgaagcgggcgcacagctatgctggagctctgcaggagtctgcaggtcacccggagcaggacggggaggagctgagccggaccctccacctggaggaggtggtgcaggaggccgccggcgagtggcaggccctcacccacgtcttctgatgcgagttggaagtacacctttaagaatgtttctgaagttacgttttgtgaagagcaaagcacttggaatctccgttttaaagcttcaagtgttaaaaatgctacaatagttttttatctataaaattatctaaagaatcattgtctttcagagactcataggaaaaaaaaactaggaaaagtgtcaccgcattgttctcttttgtctacaaatcactgaactcaggtactactgtaggcagtttcctcctcagtctcctccgtggctagtgtgtctagttcacgaagcaattaactgggtcttactatcattgtagtgtgatttctttgtattagcaaagacaaaaacgctaacattgaaaaagtatgtcagattttccttcatgtttctggttataagaagcatagcttacaaagcaagcgtaagattgaggcatgaagttcagaaaaaaaagtgttacaacacacagggaagttttttccactcttttctctgtgcattttgaaaattagtcaaaatggactcttttcagtctaccataagttaatataactgataccttgagagatggctggaccaattctctccatgacaaatgtttaatcattagttacaagaatgcagtatctggggcgtcaacatggggactcgagtaaacctgacccaccaataaggattcagctgtccacacgggctggcgacacacttaccgcatcaatctgtgttcaggtccagggttacataattgcagaagcacaagccatacatcgcaggtaggaaaccacagaaccgtctgcaaggagcaagcaacggtggccctgtccaccccagcaaataagaagcatatctgtagcttaaggccacgaatccgtaaaaaccccatgactttctcttcgtgcataaacagatgtatttttgatttcagggaattctttagtatcgtcaatggtgccacataaaacatgtcccaaaccaaatcccacccgtgctgggcagagtgcgtgcacgccattcctacagcattccaaagatggaaggttctttacttcatgttaatttttcctttgaaattatttatatgttctatatataaatacatatgtacatagatatatgggcctctgtgtggctgaacagtatattttgtaaatataagtactagtcctaattgcagaaagagcgtcagtttcacctccccacgagcacttcagatcagtattgtattcattttattcataaatggatatctttttcattgtcatataaagctgggttttatttttttttcctgaaaaataattgcctttattttctctcgttgcctccttggtttcagaagagagtagttttattataaatattgtatggactttgtatattaagagaggagctcatttcagattcctaaagaaatagacattttactgttattttgaaagggcatcttttgatttttttgttgttgttgttcacttttggcatatgtatataagtaatattgacggtgatatgaaaacttttgttatgtgaagatatttaagtcagaaaattgttaaataatattacttcttttccaaactgctttgtgtattgtatatttttttaagaaaaagaaaagccttatttgacttatgcttgtgatactggacttcttaccaatccggaggtttccttccttgaatgtcagtgtgtaaacctggctgtagccgcatatgcagaataactgtaattgtgctagagttttaaaggttctgcttttaatgcactttttattttataattttgtattgaaatattttagaaatgttgattaattttggtgaaaaaatatccccaaagtggaaattattggaattttaaacttttgttcttgctgggttatttattttgattttagcattaaatgtcatctcaggacatctctaaaaggggttgtttaattcctaattgtatagaaagctagtttggtgaattgtattggttaattgactgtttaaggccttaacaggtgaatctagagcctacttttattttggttaaagaaaaagaaaatatcaataattcaattttgtgtcttttctcaatttattagcaaacacaagacattttatgtattatttcgatttacttcctaattataaaagctgcttttttgcagaacattccttgaaaatataaggttttgaaaagacataattttacttgaatctttgtggggtacaggttgatctttatattttactggttgttttaaaaattctagaaaagagatttctaggcctcatgtataaccagggttttgaggataaagaactgtatttttagaactatctcatcatagcatatctgctttggaataactataaataaaagatgaagttagg

SEQ ID NO: 35010 - DNA, 3851 bp, Homo sapiens
  source 1..3851: mol_type = unassigned DNA
agtgtgtgcggatctgtggtggagaaggtatctcattcctctctaacatcatctccactttgcatctgtctctcttagtctgctttttttccaccgatgtaacagacctggagccagcaggactcagaggaaaggacttaatcaggtttatgtgtcctaaaggttatgaagacagtatggagtttccagaccatagtagacatttgctacagtgtctgagcgagcagagacaccagggttttctttgtgactgcactgttctggtgggagatgcccagttccgagcgcaccgagctgtactggcttcatgcagcatgtatttccacctcttttacaaggaccagctggacaaaagagacattgttcatctgaacagcgacattgttacagcccccgctttcgctctcctgcttgaattcatgtatgaagggaaactccagttcaaagacttgcccattgaagacgtgctagcagctgccagttatctccacatgtatgacattgtcaaagtctgcaaaaagaagctgaaagagaaagccaccacggaggcagacagcaccaaaaaggaagaagatgcttcaagttgttcggacaaagtcgagagtctctccgatggcagcagccacatagcaggcgatttgcccagtgatgaagatgaaggagaagatgaaaaattgaacatcctgcccagcaaaagggacttggcggccgagcctgggaacatgtggatgcgattgccctcagactcagcaggcatcccccaggctggcggagaggcagagccacacgccacagcagctggaaaaacagtagccagcccctgcagctcaacagagtctttgtcccagaggtctgtcacctccgtgagggattcggcagatgttgactgtgtgctggacctgtctgtcaagtccagcctttcaggagttgaaaatctgaacagctcttatttctcttcacaggacgtgctgagaagcaacctggtgcaggtgaaggtggagaaagaggcttcctgtgatgagagtgatgttggcactaatgactatgacatggaacatagcactgtgaaagaaagtgtgagcactaataacagggtacagtatgagccggcccatctggctcccctgagggaggactcggtcttgagggagctggaccgggaggacaaagccagtgatgatgagatgatgaccccagagagcgagcgtgtccaggtggagggaggcatggagagcagtctgctcccctacgtctccaacatcctgagccccgcgggccagatcttcatgtgccccctgtgcaacaaggtcttccccagcccccacatcctgcagatccacctgagcacgcacttccgcgagcaggacggcatccgcagcaagcccgccgccgatgtcaacgtgcccacgtgctcgctgtgtgggaagactttctcttgcatgtacaccctcaagcgccacgagaggactcactcgggggagaagccctacacatgcacccagtgcggcaagagcttccagtactcgcacaacctgagccgccatgccgtggtgcacacccgcgagaagccgcacgcctgcaagtggtgcgagcgcaggttcacgcagtccggggacctgtacagacacattcgcaagttccactgtgagttggtgaactccttgtcggtcaaaagcgaagcactgagcttgcctactgtcagagactggaccttagaagatagctctcaagaactttggaaataattttatatatatataaataatatatatatatatacatatatataaatagatctctatatagttgtggtacggtctaaaagcagtcttgtttcctggaaataaaaagttgggatattaacttgtttttgcactttagaatagcatgagaatctcactaatttagcattctgataaaagaaactttagagcaagtcagaatagagaggtgtttttcctttgaggggataggggaagtaagccaataagaaccttttaaacaaatcgtcctgtcacaaaatgctttcatatggcttaattttgtcaacactgcattgtcttttgagctcttttttcccccccaacaaagtttttttgttttttgtttttttttttaagtagaaattccctccagttttattagcctctttatatgtctcaaattgcatgaattttttctggctgttggaaacctgaatgcttttagacccaaatggaaaatttctgaaatgctggattatctatttttaaacaagcagttgacttaaaactttctgtggcaacttctggttttctgacagttcccagtgagagaaatgctgaaagtacactgggatcactgggacactgtcttatgaaggtttgcttgggatgaaaaaggatattgcagcttcagcagtgttgaactgtgtgtttaaaaatgtgaattactgttattgtatactgtaattgattacatgggctgggggggtgtcaaagaacttgacaggttgtgttgatgctcttagttgagtcttgaaaagtaaatattaacgctacagaaatgcatgagtttcaatatattttttgtctttgtttgcattgtataactttaacgagtgagtttaaaattatttaatttccttagaaaaataacaccatttggaaaaaaaaactggtgttatgaagaacgtaaatgcactgtttttatttttattttatataatttaaattgactttcccactgtctttaagttgaaactgttaagctgaataaaaacttaagctgcaaattgataacttcgctacataacaaggaaaatataaatgtttacaaacagcttaaagatttgcatgtgcagtgtgcatttataacaaacttctaattgcacaaaacccatgccagctcagagtttaggtgtacacatttacccagttgagcgttcttagaataactactgcacaagttgacaataggtcgttctctctttttttttgtttgctccctttttctttttctccccttcctccttaccctccctcccttactctccccccccaccaccaccctccacccccaactcatgaaaagattctatggactgaaaaagccccaggctgaaaggactggactgccttgattgacatggggaagggggttagtagactatgtggattgcggcagcagaggctgcagcctaacgtgtggttttaatgaccagcacgcaaggcaaaagcattttgcacagtgtttgttttcctgtcttgcacttacaaataaggtctatgggagtagcatggaaaacgtttgctgtttttcccttttttttttaattgcttttgtttaaaatttgatcgccttaactactgtaaacatagcctatttttgtgcttaagatactgaatggaaaactccattgtgtgttgctggactgttttggaaatatttggttaaatgtgtgttaatttggctgtaatggcatttaaagcaaacaaacaaacaaaaaaagctgtgaaaatggccttggagcattatctttagttacttgaagagtttctagtttttttaaaatacagtttatgttaaaataatttttattaatttagagaagacaatcaatgtctgtgagaaaacggactttcttttggattttctttttgtggtcattgtgagtgattgctttttccttttcttagtttcacattcttcctttgttctaaaacttagactgacatctagctttgacaatcatagtatgttttattttcctgagggggaataacttataatgctgtttagttttgtactattggtgtgttggtgaatttttaaactgtgtgctaactgcaataaattatatgaactgagaa

SEQ ID NO: 35011 - DNA, 2283 bp, Homo sapiens
  source 1..2283: mol_type = unassigned DNA
ttagtgtgtgcggatctgtggtggagaaggtatctcattcctctctaacatcatctccactttgcatctgtctctcttagtctgctttttttccaccgatgtaacagacctggagccagcaggactcagaggaaaggacttaatcaggtttatgtgtcctaaaggttatgaagacagtatggagtttccagaccatagtagacatttgctacagtgtctgagcgagcagagacaccagggttttctttgtgactgcactgttctggtgggagatgcccagttccgagcgcaccgagctgtactggcttcatgcagcatgtatttccacctcttttacaaggaccagctggacaaaagagacattgttcatctgaacagcgacattgttacagcccccgctttcgctctcctgcttgaattcatgtatgaagggaaactccagttcaaagacttgcccattgaagacgtgctagcagctgccagttatctccacatgtatgacattgtcaaagtctgcaaaaagaagctgaaagagaaagccaccacggaggcagacagcaccaaaaaggaagaagatgcttcaagttgttcggacaaagtcgagagtctctccgatggcagcagccacatagcaggcgatttgcccagtgatgaagatgaaggagaagatgaaaaattgaacatcctgcccagcaaaagggacttggcggccgagcctgggaacatgtggatgcgattgccctcagactcagcaggcatcccccaggctggcggagaggcagagccacacgccacagcagctggaaaaacagtagccagcccctgcagctcaacagagtctttgtcccagaggtctgtcacctccgtgagggattcggcagatgttgactgtgtgctggacctgtctgtcaagtccagcctttcaggagttgaaaatctgaacagctcttatttctcttcacaggacgtgctgagaagcaacctggtgcaggtgaaggtggagaaagaggcttcctgtgatgagagtgatgttggcactaatgactatgacatggaacatagcactgtgaaagaaagtgtgagcactaataacagggtacagtatgagccggcccatctggctcccctgagggaggactcggtcttgagggagctggaccgggaggacaaagccagtgatgatgagatgatgaccccagagagcgagcgtgtccaggtggagggaggcatggagagcagtctgctcccctacgtctccaacatcctgagccccgcgggccagatcttcatgtgccccctgtgcaacaaggtcttccccagcccccacatcctgcagatccacctgagcacgcacttccgcgagcaggacggcatccgcagcaagcccgccgccgatgtcaacgtgcccacgtgctcgctgtgtgggaagactttctcttgcatgtacaccctcaagcgccacgagaggactcactcgggggagaagccctacacatgcacccagtgcggcaagagcttccagtactcgcacaacctgagccgcctgcaagtggtgcgagcgcaggttcacgcagtccggggacctgtacagacacattcgcaagttccactgtgagttggtgaactccttgtcggtcaaaagcgaagcactgagcttgcctactgtcagagactggaccttagaagatagctctcaagaactttggaaataattttatatatatataaataatatatatatatatacatatatataaatagatctctatatagttgtggtacggtctaaaagcagtcttgtttcctggaaataaaaagttgggatattaacttgtttttgcactttagaatagcatgagaatctcactaatttagcattctgataaaagaaactttagagcaagtcagaatagagaggtgtttttcctttgaggggataggggaagtaagccaataagaaccttttaaacaaatcgtcctgtcacaaaatgctttcatatggcttaattttgtcaacactgcattgtcttttgagctcttttttcccccccaacaaagtttttttgttttttgtttttttttttaagtagaaattccctccagttttattagcctctttatatgtctcaaattgcatgaattttttctggctgttggaaacctgaatgcttttagacccaaatggaaaatttctgaaatgctggattatctatttttaaacaagcagttgacttaaaactttctgtggcaacttctggttttctgacagttcccagtgagaga

SEQ ID NO: 35012 - DNA, 2389 bp, Homo sapiens
  source 1..2389: mol_type = unassigned DNA
ctagtcccgattatggttattacagtttgatgaaatgtggctgagatcattggcactgtggagattaagaaatgtgaggtcagagtgttgggtaaattgttcctgcgagtgttaaggttgtcaggataatggtgggaatggggtgaagatgacaactcagcaatgacacaagaagagagtgacacagaaagattcagtagctgagaacttgagcgtagatatgttgtgggcaggagggaaatgatttggatggaagtagccaagtaagtgagaaaggaaagactttccaacaaaacttggcttagctcactcagatccctgagctgcaaacttcttctatacctttcttaccttttccagtgctgctgacttcaccccacttgcagggcatttgtgcagatggttgtttgttgaggaggaatgtgcttaatgttttaggaaccagttacattcaaggatgcctctgtggccttcaccgaggaggagtgaggtcacctggactctgctcccaggaagctgtgcggagctgtgatgctgggcaactacagaaacttggtcttggagacttgaatgaaaattctgtggagaatcttcagcagaaaacacttcaggatctgttacatgagctttcctcctggctagttttggaaggcatggccagtacaattactggaagtcaggattgtattgtgaatcatcgaggggaagtggatggggagcctgaactagatatttccccttgtcaacagtggggagaagcatcttctcctatttccagaaacagggacagtgtgatgactcttcaaagtggttgtttcgaaaacattgaaagtgaaacatatttgcctttgaaagtctcaagccaaatagacacacaagactcttcagtgaagttctgtaagaatgagcctcaggatcatcaggaaagcagacgtctctttgtaatggaagaaagcactgagagaaaagtgataaagggggaaagttgttcagagaaccttcaagttaaactggtgtctgatggacaagaactggcctcgccattgttaaatggtgaggcaacttgccagaatggccagttaaaagaatctttggatcccattgactgtaactgcaaagacattcatggatggaaatcacaggtggtcagttgtagtcagcagagagctcatacagaggagaaaccctgtgaccataataactgtgggaaaatacttaacaccagcccagatggtcatccatatgagaaaatccacactgcagagaaacaatacgaatgtagtcagtgtggtaagaacttcagtcaaagctcagagctactacttcatcagagagaccacacagaagaaaaaccctacaaatgtgagcaatgtgggaagggcttcacaaggagctcgagtctgcttatccatcaggcagtccacacagatgagaagccttataagtgtgacaagtgtgggaagggcttcaccaggagctcaagtctgctcatccatcatgccgtccatacaggcgaaaaaccttataaatgtgacaagtgtgggaagggctttagtcagagctccaaactgcacatccaccagcgagtccacactggagagaagccctatgagtgtgaggagtgtggtatgagcttcagtcagcgctcaaacctgcacatccaccagcgagtacacacaggagagaggccctacaagtgtggtgagtgtgggaagggcttcagtcagagctcgaaccttcacattcaccggtgcatccacacaggagagaagccttaccaatgctatgagtgtgggaagggtttcagccagagctcggatcttcgcatccatctcagagtccacactggagagaagccctatcactgtggcaagtgtgggaagggatttagccagagttccaaactcctcatccaccagagagtacatactggagagaagccctatgagtgcagcaagtgtgggaagggcttcagccagagctccaaccttcacatccaccagcgggttcacaagaaagatcctcgctaactgacattagcccattcaggtcttcacagcgctcatactgtaaaaactgttaaatatttagtatcactcttactttatattctacaaaggagagagatgtaagggttatttagatatgttccctcactgaaaaatcactcattcaaaatatttaagtatcaagcactttgttatgctgtacaatgaatggattgttcttgtttctcagatgggtagagtaaaagtgtctgtactttacaattcaactacatgttctacccagcattttaacggcaagaactttatatttattctcaagcagggcatgtttccctttgttcacattctctgagaaattgaaactctggtttctcttcaaa

SEQ ID NO: 35013 - DNA, 2067 bp, Homo sapiens
  source 1..2067: mol_type = unassigned DNA
tgtatttcggggccctaggcgcgcgagcggtcagcatccggaatctggcccctgcaggcgtggggttccacgtgggaggaatccatcccctctgggagtaagaaatgaccagggtccgggaaccagttacattcaaggatgcctctgtggccttcaccgaggaggagtgaggtcacctggactctgctcccaggaagctgtgcggagctgtgatgctgggcaactacagaaacttggtcttggagacttgaatgaaaattctgtggagaatcttcagcagaaaacacttcaggatctgttacatgagctttcctcctggctagttttggaaggcatggccagtacaattactggaagtcaggattgtattgtgaatcatcgaggggaagtggatggggagcctgaactagatatttccccttgtcaacagtggggagaagcatcttctcctatttccagaaacagggacagtgtgatgactcttcaaagtggttgtttcgaaaacattgaaagtgaaacatatttgcctttgaaagtctcaagccaaatagacacacaagactcttcagtgaagttctgtaagaatgagcctcaggatcatcaggaaagcagacgtctctttgtaatggaagaaagcactgagagaaaagtgataaagggggaaagttgttcagagaaccttcaagttaaactggtgtctgatggacaagaactggcctcgccattgttaaatggtgaggcaacttgccagaatggccagttaaaagaatctttggatcccattgactgtaactgcaaagacattcatggatggaaatcacaggtggtcagttgtagtcagcagagagctcatacagaggagaaaccctgtgaccataataactgtgggaaaatacttaacaccagcccagatggtcatccatatgagaaaatccacactgcagagaaacaatacgaatgtagtcagtgtggtaagaacttcagtcaaagctcagagctactacttcatcagagagaccacacagaagaaaaaccctacaaatgtgagcaatgtgggaagggcttcacaaggagctcgagtctgcttatccatcaggcagtccacacagatgagaagccttataagtgtgacaagtgtgggaagggcttcaccaggagctcaagtctgctcatccatcatgccgtccatacaggcgaaaaaccttataaatgtgacaagtgtgggaagggctttagtcagagctccaaactgcacatccaccagcgagtccacactggagagaagccctatgagtgtgaggagtgtggtatgagcttcagtcagcgctcaaacctgcacatccaccagcgagtacacacaggagagaggccctacaagtgtggtgagtgtgggaagggcttcagtcagagctcgaaccttcacattcaccggtgcatccacacaggagagaagccttaccaatgctatgagtgtgggaagggtttcagccagagctcggatcttcgcatccatctcagagtccacactggagagaagccctatcactgtggcaagtgtgggaagggatttagccagagttccaaactcctcatccaccagagagtacatactggagagaagccctatgagtgcagcaagtgtgggaagggcttcagccagagctccaaccttcacatccaccagcgggttcacaagaaagatcctcgctaactgacattagcccattcaggtcttcacagcgctcatactgtaaaaactgttaaatatttagtatcactcttactttatattctacaaaggagagagatgtaagggttatttagatatgttccctcactgaaaaatcactcattcaaaatatttaagtatcaagcactttgttatgctgtacaatgaatggattgttcttgtttctcagatgggtagagtaaaagtgtctgtactttacaattcaactacatgttctacccagcattttaacggcaagaactttatatttattctcaagcagggcatgtttccctttgttcacattctctgagaaattgaaactctggtttctcttc

SEQ ID NO: 35014 - DNA, 2039 bp, Homo sapiens
  source 1..2039: mol_type = unassigned DNA
gcatccggaatctggcccctgcaggcgtggggttccacgtgggagaggaatccatcccctctgggagtaagaaatgaccagggtccgggaaccagttacattcaaggatgcctctgtggccttcaccgaggaggagtgaggtcacctggactctgctcccaggaagctgtgcggagctgtgatgctgggcaactacagaaacttggtcttggagacttgaatgaaaattctgtggagaatcttcagcagaaaacacttcaggatctgttacatgagctttcctcctggctagttttggaaggcatggccagtacaattactggaagtcaggattgtattgtgaatcatcgaggggaagtggatggggagcctgaactagatatttccccttgtcaacagtggggagaagcatcttctcctatttccagaaacagggacagtgtgatgactcttcaaagtggttgtttcgaaaacattgaaagtgaaacatatttgcctttgaaagtctcaagccaaatagacacacaagactcttcagtgaagttctgtaagaatgagcctcaggatcatcaggaaagcagacgtctctttgtaatggaagaaagcactgagagaaaagtgataaagggggaaagttgttcagagaaccttcaagttaaactggtgtctgatggacaagaactggcctcgccattgttaaatggtgaggcaacttgccagaatggccagttaaaagaatctttggatcccattgactgtaactgcaaagacattcatggatggaaatcacaggtggtcagttgtagtcagcagagagctcatacagaggagaaaccctgtgaccataataactgtgggaaaatacttaacaccagcccagatggtcatccatatgagaaaatccacactgcagagaaacaatacgaatgtagtcagtgtggtaagaacttcagtcaaagctcagagctactacttcatcagagagaccacacagaagaaaaaccctacaaatgtgagcaatgtgggaagggcttcacaaggagctcgagtctgcttatccatcaggcagtccacacagatgagaagccttataagtgtgacaagtgtgggaagggcttcaccaggagctcaagtctgctcatccatcatgccgtccatacaggcgaaaaaccttataaatgtgacaagtgtgggaagggctttagtcagagctccaaactgcacatccaccagcgagtccacactggagagaagccctatgagtgtgaggagtgtggtatgagcttcagtcagcgctcaaacctgcacatccaccagcgagtacacacaggagagaggccctacaagtgtggtgagtgtgggaagggcttcagtcagagctcgaaccttcacattcaccggtgcatccacacaggagagaagccttaccaatgctatgagtgtgggaagggtttcagccagagctcggatcttcgcatccatctcagagtccacactggagagaagccctatcactgtggcaagtgtgggaagggatttagccagagttccaaactcctcatccaccagagagtacatactggagagaagccctatgagtgcagcaagtgtgggaagggcttcagccagagctccaaccttcacatccaccagcgggttcacaagaaagatcctcgctaactgacattagcccattcaggtcttcacagcgctcatactgtaaaaactgttaaatatttagtatcactcttactttatattctacaaaggagagagatgtaagggttatttagatatgttccctcactgaaaaatcactcattcaaaatatttaagtatcaagcactttgttatgctgtacaatgaatggattgttcttgtttctcagatgggtagagtaaaagtgtctgtactttacaattcaactacatgttctacccagcattttaacggcaagaactttatatttattctcaagcagggcatgtttccctttgttcacattctctgagaaattgaaactctggtttctcttcaaa

SEQ ID NO: 35015 - DNA, 2027 bp, Homo sapiens
  source 1..2027: mol_type = unassigned DNA
ttgtatttcggggccctaggcgcgcgagcggtcagcatccggaatctggcccctgcaggcgtggggttccacgtgggaggaaccagttacattcaaggatgcctctgtggccttcaccgaggaggagtgaggtcacctggactctgctcccaggaagctgtgcggagctgtgatgctgggcaactacagaaacttggtcttggagacttgaatgaaaattctgtggagaatcttcagcagaaaacacttcaggatctgttacatgagctttcctcctggctagttttggaaggcatggccagtacaattactggaagtcaggattgtattgtgaatcatcgaggggaagtggatggggagcctgaactagatatttccccttgtcaacagtggggagaagcatcttctcctatttccagaaacagggacagtgtgatgactcttcaaagtggttgtttcgaaaacattgaaagtgaaacatatttgcctttgaaagtctcaagccaaatagacacacaagactcttcagtgaagttctgtaagaatgagcctcaggatcatcaggaaagcagacgtctctttgtaatggaagaaagcactgagagaaaagtgataaagggggaaagttgttcagagaaccttcaagttaaactggtgtctgatggacaagaactggcctcgccattgttaaatggtgaggcaacttgccagaatggccagttaaaagaatctttggatcccattgactgtaactgcaaagacattcatggatggaaatcacaggtggtcagttgtagtcagcagagagctcatacagaggagaaaccctgtgaccataataactgtgggaaaatacttaacaccagcccagatggtcatccatatgagaaaatccacactgcagagaaacaatacgaatgtagtcagtgtggtaagaacttcagtcaaagctcagagctactacttcatcagagagaccacacagaagaaaaaccctacaaatgtgagcaatgtgggaagggcttcacaaggagctcgagtctgcttatccatcaggcagtccacacagatgagaagccttataagtgtgacaagtgtgggaagggcttcaccaggagctcaagtctgctcatccatcatgccgtccatacaggcgaaaaaccttataaatgtgacaagtgtgggaagggctttagtcagagctccaaactgcacatccaccagcgagtccacactggagagaagccctatgagtgtgaggagtgtggtatgagcttcagtcagcgctcaaacctgcacatccaccagcgagtacacacaggagagaggccctacaagtgtggtgagtgtgggaagggcttcagtcagagctcgaaccttcacattcaccggtgcatccacacaggagagaagccttaccaatgctatgagtgtgggaagggtttcagccagagctcggatcttcgcatccatctcagagtccacactggagagaagccctatcactgtggcaagtgtgggaagggatttagccagagttccaaactcctcatccaccagagagtacatactggagagaagccctatgagtgcagcaagtgtgggaagggcttcagccagagctccaaccttcacatccaccagcgggttcacaagaaagatcctcgctaactgacattagcccattcaggtcttcacagcgctcatactgtaaaaactgttaaatatttagtatcactcttactttatattctacaaaggagagagatgtaagggttatttagatatgttccctcactgaaaaatcactcattcaaaatatttaagtatcaagcactttgttatgctgtacaatgaatggattgttcttgtttctcagatgggtagagtaaaagtgtctgtactttacaattcaactacatgttctacccagcattttaacggcaagaactttatatttattctcaagcagggcatgtttccctttgttcacattctctgagaaattgaaactctggtttctcttc

SEQ ID NO: 35016 - DNA, 1904 bp, Homo sapiens
  source 1..1904: mol_type = unassigned DNA
ttgtatttcggggccctaggcgcgcgagcggtcagcatccggaatctggcccctgcaggcgtggggttccacgtgggaggagacttgaatgaaaattctgtggagaatcttcagcagaaaacacttcaggatctgttacatgagctttcctcctggctagttttggaaggcatggccagtacaattactggaagtcaggattgtattgtgaatcatcgaggggaagtggatggggagcctgaactagatatttccccttgtcaacagtggggagaagcatcttctcctatttccagaaacagggacagtgtgatgactcttcaaagtggttgtttcgaaaacattgaaagtgaaacatatttgcctttgaaagtctcaagccaaatagacacacaagactcttcagtgaagttctgtaagaatgagcctcaggatcatcaggaaagcagacgtctctttgtaatggaagaaagcactgagagaaaagtgataaagggggaaagttgttcagagaaccttcaagttaaactggtgtctgatggacaagaactggcctcgccattgttaaatggtgaggcaacttgccagaatggccagttaaaagaatctttggatcccattgactgtaactgcaaagacattcatggatggaaatcacaggtggtcagttgtagtcagcagagagctcatacagaggagaaaccctgtgaccataataactgtgggaaaatacttaacaccagcccagatggtcatccatatgagaaaatccacactgcagagaaacaatacgaatgtagtcagtgtggtaagaacttcagtcaaagctcagagctactacttcatcagagagaccacacagaagaaaaaccctacaaatgtgagcaatgtgggaagggcttcacaaggagctcgagtctgcttatccatcaggcagtccacacagatgagaagccttataagtgtgacaagtgtgggaagggcttcaccaggagctcaagtctgctcatccatcatgccgtccatacaggcgaaaaaccttataaatgtgacaagtgtgggaagggctttagtcagagctccaaactgcacatccaccagcgagtccacactggagagaagccctatgagtgtgaggagtgtggtatgagcttcagtcagcgctcaaacctgcacatccaccagcgagtacacacaggagagaggccctacaagtgtggtgagtgtgggaagggcttcagtcagagctcgaaccttcacattcaccggtgcatccacacaggagagaagccttaccaatgctatgagtgtgggaagggtttcagccagagctcggatcttcgcatccatctcagagtccacactggagagaagccctatcactgtggcaagtgtgggaagggatttagccagagttccaaactcctcatccaccagagagtacatactggagagaagccctatgagtgcagcaagtgtgggaagggcttcagccagagctccaaccttcacatccaccagcgggttcacaagaaagatcctcgctaactgacattagcccattcaggtcttcacagcgctcatactgtaaaaactgttaaatatttagtatcactcttactttatattctacaaaggagagagatgtaagggttatttagatatgttccctcactgaaaaatcactcattcaaaatatttaagtatcaagcactttgttatgctgtacaatgaatggattgttcttgtttctcagatgggtagagtaaaagtgtctgtactttacaattcaactacatgttctacccagcattttaacggcaagaactttatatttattctcaagcagggcatgtttccctttgttcacattctctgagaaattgaaactctggtttctcttc

SEQ ID NO: 35017 - DNA, 6307 bp, Homo sapiens
  source 1..6307: mol_type = unassigned DNA
gcgccgggggcttctgggaaaaggcttgtgaacggcgtttctgcgtctgccgtggacagcgaagctgctgcggttcctgagccggaggtttgcgccggagtgcctgtgaagaaaacggggtattgccctgaggcttatattctgcctcagttgtcttttcttgaaatattataaatcagaatgtctgcacagtcagtggaagaagattcaatacttatcatcccaactccagatgaagaggaaaaaattctgagagtgaagttggaggaggatcctgatggcgaagagggatcaagtatcccctggaaccatctcccagacccagagattttccgacagcgattcaggcagtttggataccaggattcacctgggccccgtgaggctgtgagccagctccgagaactttgccgtctgtggctcaggccagagacgcacacaaaagaacaaatcttggagctggtagtgctggagcagtttgttgccatcctacccaaagagctacagacttgggttcgagatcatcatccagagaatggagaggaggcagtgacagtgctggaggatttggagagtgaacttgatgaccctggacaaccggtttctctccgtcgacgaaaacgggaagtactagtagaagacatggtatctcaagaagaagctcagggattaccaagttctgagcttgatgctgtggagaaccagctcaagtgggcatcctgggagctccattccctaaggcactgtgatgatgatggtaggactgaaaatggagcactagctccaaagcaggagcttccttcagcattagaatcccatgaagttcctggcactctcaatatgggtgttcctcaaatttttaaatatggagaaacctgtttccccaagggcaggtttgaaagaaagagaaatccctctcgaaagaaacaacatatatgtgatgaatgtggaaaacacttcagtcagggctcagcccttattcttcatcaaagaattcacagtggggagaaaccttatggatgtgttgagtgtgggaaagcattcagccgaagttccattcttgtgcaacaccagagagtccacactggagaaaaaccttacaaatgtcttgaatgtgggaaagcctttagccagaattcggggcttattaatcatcagagaatccatactggggagaaaccttatgaatgcgttcagtgtgggaaatcgtatagtcaaagctcaaatctttttagacatcagagaagacacaatgcagaaaaacttctgaatgttgtgaaagtttaagaaattgaaaaaaaaaaaagaatcagcactcaggtctttttcttcagaaatgaagacaaaatttaaaatatgaaatgatgcagaatagttttttccctattgactgtcagaaaatccactgggaaatgtaaaaatcttcactcaccattatgatatttatcttgaaagaaatggtgtcatacctgcctagaaactgaaattttaaacttaattcaggtcttaatgcctaaattttccatgtgatgtttatagtctgtattacttctccaaataatgaactacctgattcattgtccctttcttgaaagtttcttttttaagacaaatacattatttctgcattgatcattgaaatgttctttatatggatacattcccttatatattaaaaggcaacaggaattacaaagtctgaaaaccattttaaaccatcttttaaaaatttacccttatttccttttacctaatttgaatatgcatttgagaaaataagaggataaaggatggctaagagcctcaaaatgaaccataagatctcagataagaagtgatggtgataaaacatcaaaaagtgaatggaacaccttgattggggaagatatgcaaatactttgatctaagaattgaaatgtatcaagaatttatattttgcctgcaggaaaattcaaaagctactcatcctctctataatttggagtcatcttactaatgaaaataatgttttcccatatattattaaaaagcatacagtctaaataataaacagttgtaaaataatgaaggtagaaattataacactagggaaaaatttgtagcggatggcagtgttgaaggcaaatgtaaacataagggtaatggtctgtcatggcttttagaaaaagatgatagagttcatcattattttgccttcatctttgttaaggacagaaaattccctgacaggtgggcaagtatcaggttacctattttttattcctttggtacaaaagggttgaacgtcaggctaaaaaagcagccatgcatttattattaaacattttctaccgacaaggcactgtgctaggtactgtaatcctaccataagtaggtaggtatttcttccactgtaaatcataggggtttgctgttttatgtgagttagcctcttccccttgtctgagcattcctcaggggaggtcacctgtgaggttcccagaactgtagttttttttaccagggtgttgtatttggagggggaggaggactcggctcaaaagagctagctggctctccagtgttcagaggtgagtccacgatactcttaccacaatttggaagtttgtgaatctttttaaagaactaatcaatctctaatagcattgaggttgtacctacatattaagttgaatggactgttctatttaaaaaataaacaactagacaattaactagtttattaacctatcacaattgaatttttttttaattttcagtcttaacacattttttaaaatgtattaaagtaatacattgtagtagtaggattatatactccttggctgagaattccaagtactgtggttctactgtttagtggaaaactctggaagttaaaatatagaatatgagaggaggcttttttataatgggcatcattgtgtggaaaatgacccatgtgaatacaaatatttcctagttcagagattttggttatatctggtgcttggatcaagtttaaaaatggaaggtgagattttgcatgagcctattaaaaagcatagtaataaatgcaaggccagctggtggaaaagtgaggcagaatggagcttgtttataggttttctgataacaattataaaaaatgtgctttatagattaagatttattgaagtataaatatgtagtaatgatataatgtattttaagttatacaagaaaatgtagggacttttgtttgggtctttttctctttgtggctgaggggaaacaagtcagtgtccaataaagctgtaaactcctctgctctaagataaatgatgtgatttatttatttataactggcttctttccaagtaggttttcaggtggcatatttggaagacggctggaatgacagaattcttgtatcagagtaggtaagaagggagcaacctctcaatggctattatgtcatgctttttaagatcgtatgcggttcctatatacaaggaagcttccctgtggtagatttgtcataaatgccaaagatatttggtaatgtgagtgtagaaaaagtagtatgagggttggcaaatactgtttttgtcttggcagctctaatatctgcattgttcagaaaggattctgaggctaaggcaaagctctgtgggaaaaagggactggaccaaaaaaaactggatggtggcacacaagaagaggaaatgatgagatgtgtactttctatctctggttaggcttagtccccactagacaaattgattttaaatactatgtagtgatttttaaattccatccacacattcattacccacacagataatcatagaaatttgggggagtgcctagcttctgatgaagtggtgatatggcagtgccaagcagtggcatcgccagagtatctgtttggttagcaaatgagcagtcattttaggtcatgcagattgctgatatctgcccagtagccactgagcatttgctggttttttcttctggctttcttggaggttaagctctctgtagtcatacccagttggtacttgatctttagcaatatgtctcatattcatgtaaattgaagggagggttacatgtactgaaataatctgcatgctaggcattggcttagacaccgtacctatctcacttagatttgtggactaggaaagcaagattcagagatcatgtgacttgcatgtggcctagagataaaattcaaatctggttctgtagactccagggacatattcaccatgccatgggtggtggctattaaaccttgataaatttgtgtttatggttaacaaatgtgaaagctattaaacattgctggtttgaattttttacagtgcagaaatgtaaaatgaaaaaggatatttcctttcacagtgttaccgagaagtcatgataatttcgtttgttcttccagatttaggcatatacttatttaatcaataatgtgttaacagctgacacctgtggttgctgtgacaggcactatttgaagtgctttatcatggattaactcttaatcctcagctaccgtataaagtaggacataaccccatttcacatgcactacactgagacttgcctcctctccccccacattgaagatgttcttttttcataactatatactattccattgcatgaatattctgtaatttatttaatcccctatggattgataattaggttcattatagatagaagtgtaattaacattcctgtacatgtattttgctacttgtgtgggtatttctgtaggatgaataactagaaatttattggatcaggtttcacatttgcagttttgaaaactactaccaaaaagatttcaccaatttacaactccatcattagtaagaatgcctgtttgcctatagtctgccaaccctgaatccttaaaaatttttgccaatctggtaggcaaaatttctttcttttctttgaatattaatgaggaggaacatcttttcatgtttcttggccatttgcatttcctattatgaattgcttttgcccattttcctttttttaattatgaaagtctaatgactaccttctcattgtataaaaaacacagttctttgaatagagagacccttttctccaatgctaccaatcacattccacttaccacagtttaacatacatcctctagtcacctttccgtacgaatatacatacacataaaaacactttttacataaataggatctcatattctgtagctttttaaaattttggtctcaaaaaaagataacaggtctttaaatttctttaatggttgaatatgattaaatactatgaaaatgccattatttattcccttaatttttttcctctcgctattacattgccaaagtaaacatcctattcagatgtctttgtgcatgtgtgtgaatatttctttagtctggagtccagtaaggtggatttttggatcaaagggtttgttctctgtccaccttcagtcttcccaaaggccttcataactgtattttcaccaagtgtatggagaatgttcatttccccatataaccatacctacacttgatagtttttatctgttgggcgaaaaagaaccttttcttattttgcatttccctgattataaaaaaaaatggtgagattggggttattttcatgtttattggccatttatagtttactgtggattgtttgtatcccttacctgctttctattgggttatgtgtggatatattgtttttatttgttcagcatctccttccccatcttctggtaacacaacctttatttatttgtggggaacctattccctgtggcttaggtgagcatgtgaccaggcctggcctcctgagtcccacagcttcctagccacagtgataaaagaatgggtatataacttaagccaggctaaggaaagcccttaacagaacttctgctggaactactggaaagaaggctttatggagatcccaggaaccaaggaccatgtaagcctgaatttgtgccatgtggagagagtctgtctgaggagaaactcggatgctagcagaaatggaaagagaactaagttctgatgtcatttttctggaggccctagatccagctgtgcctaaagcctgccctacctccggactttaaagttttgtgagccaataaagtccctttcttgtttaagataattgaattgagtttctgttctgattaatataggttatttgtattttcttattgatttgtagaaaacctttgtaattttaaattctagactttatgcactatataagttaataaaattagcatggccttccatgatttggcctgtgtcaa

SEQ ID NO: 35018 - DNA, 1255 bp, Homo sapiens
  source 1..1255: mol_type = unassigned DNA
gaacggcgtttctgcgtctgccgtggacagcgaagctgctgcggttcctgagccggaggagtgcctgtgaagaaaacggggtattgccctgaggcttatattctgcctcagttgtcttttcttgaaatattataaatcagaatgtctgcacagtcagtggaagaagattcaatacttatcatcccaactccagatgaagaggaaaaaattctgagagtgaagttggaggaggatcctgatggcgaagagggatcaagtatcccctggaaccatctcccagacccagagattttccgacagcgattcaggcagtttggataccaggattcacctgggccccgtgaggctgtgagccagctccgagaactttgccgtctgtggctcaggccagagacgcacacaaaagaacaaatcttggagctggtagtgctggagcagtttgttgccatcctacccaaagagctacagacttgggttcgagatcatcatccagagaatggagaggaggcagtgacagtgctggaggatttggagagtgaacttgatgaccctggacaaccggtttctctccgtcgacgaaaacgggaagtactagtagaagacatggtatctcaagaagaagctcagggattaccaagttctgagcttgatgctgtggagaaccagctcaagtgggcatcctgggagctccattccctaaggcactgtgatgatgatggtaggactgaaaatggagcactagctccaaagcaggagcttccttcagcattagaatcccatgaagttcctggcactctcaatatgggtgttcctcaaatttttaaatatggagaaacctgtttccccaagggcaggtttgaaagaaagagaaatccctctcgaaagaaacaacatatatgtgatgaatgtggaaaacacttcagtcagggctcagcccttattcttcatcaaagaattcacagtggggagaaaccttatggatgtgttgagtgtgggaaagcattcagccgaagttccattcttgtgcaacaccagagagtccacactggagaaaaaccttacaaatgtcttgaatgtgggaaagcctttagccagaattcggggcttattaatcatcagagaatccatactggggagaaaccttatgaatgcgttcagtgtgggaaatcgtatagtcaaagctcaaatctttttagacatcagagaagacacaatgcagaaaaacttctgaatgttgtgaaagtttaagaaattg

SEQ ID NO: 35019 - DNA, 4139 bp, Homo sapiens
  source 1..4139: mol_type = unassigned DNA
attggcgtttttttggtcttacgccctagggtggggagaggactccggtgcctccgggtctgggctgggccgcaaagggcggggcctgggcccggcgcgggccgggagcagaggccgagaccctgcaggtgattcctggggctgccagctaaggtcccttatgatttctgctctggctttgcagttttcagcctttcccaagagcagcagaaaatgaacaagttccagggacccgtgacattaaaggatgttattgtggaattcaccaaggaagaatggaagttactgacccctgctcagaggactctgtataaggatgtgatgctggaaaactatagtcaccttgtctcagtgggttaccatgtgaataagccaaatgcagtcttcaagttgaagcaaggaaaagagccatggatattagaagtagaatttccacatcggggcttccctgaagacctatggagcattcatgatctagaagcaagataccaggaaagccaagctggaaattcaaggaatggagaactcacaaaacatcagaaaactcataccacagagaaagcctgtgaatgtaaggaatgtgggaagttcttctgccagaagtctgccctcatagtacatcagcatactcactcaaagggcaaatcctatgactgtgataaatgtgggaaatctttctctaaaaatgaagacctcataagacatcagaaaattcacacgagagataaaacctatgagtgtaaagaatgtaagaaaatattttaccacctatcatctctcagtagacatctgagaacccatgcaggagagaaaccctatgaatgtaatcagtgtgaaaaatccttctaccagaaaccacatctcacagaacatcagaaaacacacacaggggagaaaccttttgaatgtactgaatgtgggaagttcttctatgtgaaggcatacctcatggtacatcagaaaacacacacaggggagaaaccctatgagtgtaaggagtgtgggaaagccttttcccagaagtcacacctcacagtacatcagagaatgcacacaggggagaaaccctataaatgtaaggaatgtgggaaattcttctctaggaattcacacctcaaaactcatcagagaagtcacacaggagagaaaccctatgaatgtaaggaatgtaggaaatgcttctaccagaagtcagccctcacagtacatcagcgaactcacacaggggagaaaccctttgaatgtaataaatgtgggaaaacattttactataaatcagacctcactaaacatcagagaaaacacacaggggagaagccctatgaatgcacagaatgtggcaaatcttttgctgtgaattcagtcctcagattacatcaaaggactcacacaggagagaagccctatgcatgcaaggaatgtgggaagtccttttctcagaagtcacattttattatacatcagagaaaacacacaggggagaagccctatgagtgtcaggagtgtggggaaacctttatccagaagtcacaactcactgcacatcagaagacacacacaaagaagaggaatgctgagaagtaagatgagttgggaaattctcttgactgaattaatccttcaaaacaatcagataattcacacaagaggtacaccttatgaatcgcatcaatagagggaaattttcagctacaatctttgctctctctgtgtatcagcaaatacatagagagattctgtacatttatttgggagaaaattttatcatattttaggcttttctaaatattagataatatagatggcagaagtcatgcaaattgtaaaacaggaaggaaacctttcagaagtcatacttttgttttgcaacatagaagtcacacaggagaaaaatcctgtaagtaaaacgaatgtcaagacattttctgtcagggcagccagctgtagacatccaaaagctcacaaatgagaagctccttgagtatctagaaatctctttacacaattggagctcatgtactagagaattcaaagggataactgcaaagacactggtagatatagaagcctttattaagaattgatgtttcattcaatttcagatcactggtacttggatagatattttaaatatttggaaggtgttcaataaaaattcaaataatttgtactgagggaaacagttatactacaaatcatgttgcagatctgatgccgagattgctctattttaaaaggaaacctgcaaatgtctacatatatgaagcttttaaaaagcacaagttatcaggcaacatcattaaacatacattaaatgtctgttagcatataggattttgtgcgtatgtgagtgtgctataacatgtaacttgcggatgttcagcgtgcatgtggaatccatccataatggtacatagcgaaataatataatcttagttcagtaactattatgtgtatgaagatgttgcacattaagtctcagtagtgactctggttgttaatatttgtattgtaagtgtaatattccttttaaattataaggcatctttttatccttttttgtgtttgtaaatggatatagacagtggtaataactaatccttcaaaaataagttaaaatgtttttgtaaaattttcaaatgtcagtcaagttttgcattagggacacatttatatatagcaaaagcctgagctgtttttaaacagctaaaaacagtagtatttattacaatctccacaatgaaaacaaatagtgcaatgtaagaaatattatgtatcttactgttgatgtgtgagcagggagcagagctatctgcatttgtatttagtgtgagagtcctaaatgttcttcaccaactttttcttcctcatagaagcaacatggcatagttaagggtgtggactctgggctcctgctgcctgggccccgattccagcatggggcatgctacttaatatctctgtgcctcagttcccatcccataaaagagtagtgatagtgacaacatcttaggattgctttgaggtctaaatgagttaacattttcaaagcacttagaatagtgtctgagacacaagagctatatgttagaggttatcatcattatttgtattttgtgaattacgctgcaaaaaaaaaaaaaatgttggctacccaacattcattccccaccttcttgctgccagtgccttgatttggttgtttgttgtttgtttgttttcctacaagtgatttaggggcagatcctgactacactaagtcagggtttgacaaatgacagtccatcagacagatctggcccactacccatttttgtatcctgcaagctaagaatggttttatatttctaaatggttgaaagaatcaaagaatattgtgacacatgaaaattatatgatattcaaatttcagtgtccataaataaagttttgaaaacatgaatacaaacaaaaaacacctatttatgtttgacctgtggctgtctttgcactaccccagcagagttgagtagttgtagcagacaccacatgcccttgagcctaagatctagcactttacaaagtaagtttttctgttacttagagctgaaaataaaagcaatgtagagttacgcttttataagtatttcatgtttcagaaatgatgcatacagcaatttgtaggtgggtggttttttgcagtatatttattttgtgcattatatttatatgttaagagcctgagcttagaagtatttttttcaaagaaatgtgttttttacttgctaaattgtcataacatcaaaacaagaaatttcttgatggaatgtagcagtaaacatatgaaataaacattgtctaaattaagtcgaattgttcattgatactgccccacagtattcctttgttttctcccaaatcaatggccagttttccctgtatcattttataattttctttctatcccataagataccattggtaagtcatacttagctaacgtaacccaataacaaaaaacttacaatacccaattccatcagctacattactagtaatctataaaattattgcctgcacttcatgtaattgtcatatgctgctacaatctaaacctgccagcgtcttacttccccttcctaataaagactttcattgat

SEQ ID NO: 35020 - DNA, 3161 bp, Homo sapiens
  source 1..3161: mol_type = unassigned DNA
gtttttttggtcttacgccctagggtggggagaggactccggtgcctccgggtctgggctgggccgcaaagggcggggcctgggcccggcgcgggccgggagcagaggccgagaccctgcaggtgattcctggggctgccagctaaggtcccttatgatttctgctctggctttgcagttttcagcctttcccaagagcagcagaaaatgaacaagttccagaagaatccattgccaaattcaagggacccgtgacattaaaggatgttattgtggaattcaccaaggaagaatggaagttactgacccctgctcagaggactctgtataaggatgtgatgctggaaaactatagtcaccttgtctcagtgggttaccatgtgaataagccaaatgcagtcttcaagttgaagcaaggaaaagagccatggatattagaagtagaatttccacatcggggcttccctgaagacctatggagcattcatgatctagaagcaagataccaggaaagccaagctggaaattcaaggaatggagaactcacaaaacatcagaaaactcataccacagagaaagcctgtgaatgtaaggaatgtgggaagttcttctgccagaagtctgccctcatagtacatcagcatactcactcaaagggcaaatcctatgactgtgataaatgtgggaaatctttctctaaaaatgaagacctcataagacatcagaaaattcacacgagagataaaacctatgagtgtaaagaatgtaagaaaatattttaccacctatcatctctcagtagacatctgagaacccatgcaggagagaaaccctatgaatgtaatcagtgtgaaaaatccttctaccagaaaccacatctcacagaacatcagaaaacacacacaggggagaaaccttttgaatgtactgaatgtgggaagttcttctatgtgaaggcatacctcatggtacatcagaaaacacacacaggggagaaaccctatgagtgtaaggagtgtgggaaagccttttcccagaagtcacacctcacagtacatcagagaatgcacacaggggagaaaccctataaatgtaaggaatgtgggaaattcttctctaggaattcacacctcaaaactcatcagagaagtcacacaggagagaaaccctatgaatgtaaggaatgtaggaaatgcttctaccagaagtcagccctcacagtacatcagcgaactcacacaggggagaaaccctttgaatgtaataaatgtgggaaaacattttactataaatcagacctcactaaacatcagagaaaacacacaggggagaagccctatgaatgcacagaatgtggcaaatcttttgctgtgaattcagtcctcagattacatcaaaggactcacacaggagagaagccctatgcatgcaaggaatgtgggaagtccttttctcagaagtcacattttattatacatcagagaaaacacacaggggagaagccctatgagtgtcaggagtgtggggaaacctttatccagaagtcacaactcactgcacatcagaagacacacacaaagaagaggaatgctgagaagtaagatgagttgggaaattctcttgactgaattaatccttcaaaacaatcagataattcacacaagaggtacaccttatgaatcgcatcaatagagggaaattttcagctacaatctttgctctctctgtgtatcagcaaatacatagagagattctgtacatttatttgggagaaaattttatcatattttaggcttttctaaatattagataatatagatggcagaagtcatgcaaattgtaaaacaggaaggaaacctttcagaagtcatacttttgttttgcaacatagaagtcacacaggagaaaaatcctgtaagtaaaacgaatgtcaagacattttctgtcagggcagccagctgtagacatccaaaagctcacaaatgagaagctccttgagtatctagaaatctctttacacaattggagctcatgtactagagaattcaaagggataactgcaaagacactggtagatatagaagcctttattaagaattgatgtttcattcaatttcagatcactggtacttggatagatattttaaatatttggaaggtgttcaataaaaattcaaataatttgtactgagggaaacagttatactacaaatcatgttgcagatctgatgccgagattgctctattttaaaaggaaacctgcaaatgtctacatatatgaagcttttaaaaagcacaagttatcaggcaacatcattaaacatacattaaatgtctgttagcatataggattttgtgcgtatgtgagtgtgctataacatgtaacttgcggatgttcagcgtgcatgtggaatccatccataatggtacatagcgaaataatataatcttagttcagtaactattatgtgtatgaagatgttgcacattaagtctcagtagtgactctggttgttaatatttgtattgtaagtgtaatattccttttaaattataaggcatctttttatccttttttgtgtttgtaaatggatatagacagtggtaataactaatccttcaaaaataagttaaaatgtttttgtaaaattttcaaatgtcagtcaagttttgcattagggacacatttatatatagcaaaagcctgagctgtttttaaacagctaaaaacagtagtatttattacaatctccacaatgaaaacaaatagtgcaatgtaagaaatattatgtatcttactgttgatgtgtgagcagggagcagagctatctgcatttgtatttagtgtgagagtcctaaatgttcttcaccaactttttcttcctcatagaagcaacatggcatagttaagggtgtggactctgggctcctgctgcctgggccccgattccagcatggggcatgctacttaatatctctgtgcctcagttcccatcccataaaagagtagtgatagtgacaacatcttaggattgctttgaggtctaaatgagttaacattttcaaagcacttagaatagtgtctgagacacaagagctatatgttagaggttatcatcattatttgtattttgtgaattacgctgcaaaaaaaaaaaaaa

SEQ ID NO: 35021 - DNA, 2328 bp, Homo sapiens
  source 1..2328: mol_type = unassigned DNA
ctgtgcttatagaggcccgtcctctgtggccgtgtgacctgcaagtattgggagagccacagctaaaccccgggacccctggaagcctagaaatgggaccattgcaatttagagatgtggccatagaattctctctggaggagtggcattgcctggacactgcacagcggaatttatatagggatgtgatgttagagaactacagaaacttggtcttccttggtattgttgtctctaagccagacctggttacctgtctggagcaaggaaaaaaacctttaactatggaaagacatgagatgattgccaaacccccagttatgagttctcattttgcccaagacctttggccagagaacatacaaaattctttccaaatagggatgctgagaagatatgaagaatgcagacatgacaatttacagttaaaaaaaggctgtaaaagcgtgggtgagcataaggtgcacaaaggaggttataatggacttaaccaatgtttgacaactacccagaaagaaatatttcaatgtgataaatatggaaaagtctttcataagttttcaaattcaaacacatataagacaagacatactggaataaatcttttcaaatgtataatatgtggcaaagcttttaaacggtcctcaacccttactacacataagaaaattcatactggagagaaaccttacagatgtgaagaatgtggcaaagcttttaaccaatctgcaaaccttactacacataagagaattcataccggagagaaaccctacagatgtgaagaatgtggcaaagcctttaagcagtcctcaaaccttactacacataagaaaattcatactggagagaaaccctacaaatgtgaagaatgtggcaaagccttcaaccgatccacagaccttactacacataagatagttcatactggagagaaaccctacaaatgtgaagaatgtggcaaagcctttaagcacccctcacacgttaccacacataagaaaattcatactagagggaaaccctacaactgtgaagaatgtggcaaatcctttaagcactgctctaaccttactatacataagagaattcatacaggagagaaaccctacaaatgtgaagaatgtggcaaagcctttcacctatcctcacaccttactacacataagatacttcatactggagagaaaccctacagatgtagagaatgtggcaaagcttttaaccattccacaacccttttttcacatgagaaaattcatactggagagaaaccctacaaatgtgatgaatgtggcaaaacctttacctggccctcaatcctctccaaacataaaagaactcatactggagagaaaccctacaaatgtgaagaatgtggcaaatcctttactgcatcctcaactctaactacacataagagaattcatactggagagaaaccttacaaatgtgaagaatgtggcaaagcttttaactggtcctcagaccttaataaacataagaaaattcatattgaacgaaaaccctacatagtgaagaatgtgacagatcttttaaatgttcctccacttttaattagcataagataattcatactggagagaaaccctatgaatgtgatgaatgtgggaaagcctttaaccagccctcgactcttagtaaatttgagagtttatatggaacacaaaccctacaaatataaagaatgtgacaaagctttttaaggaagttctcaacccttattacacataattcataccaaacagaagccctacaagtgtgaagaatgtggcaaaacctataaacctataacaagttctcaattcctttttttttgagatggagtttcactcttgtcaccgaggctggagtgcaatgacatgatctccgttcactgcaatctctgcctcctgggtttaagccattcttctgcctcagcctcccaagtagctgggattacaggtgcccaacaccacgcctggctaatttttggatttttagtagagatggggtttcacaatgttggccaggctggtctcgaactcctgacctcaggtgatccacctgccttggccttccaaagtgctggggttacaggcgtgagccaccatgcctggctacaagttcttaattcttaagagacaccatgcctggctacaagttcttaattcttaagagacatggcgataattcatgctgaagaggaaatctggaaacctgaaagatgcgacattgcttttaccaacacctccacatttcctatacataaaaataaattatactagtgtaataccctagaaatgtataaaatgtgacaaagccttt

SEQ ID NO: 35022 - DNA, 3519 bp, Homo sapiens
  source 1..3519: mol_type = unassigned DNA
ctgtgcttatagaggcccgtcctctgtggccgtgtgacctgcaagtattgggagagccacagctaaaccccgggacccctggaagcctagaaatgggaccattgcaatttagagatgtggccatagaattctctctggaggagtggcattgcctggacactgcacagcggaatttatatagggatgtgatgttagagaactacagaaacttggtcttccttggtattgttgtctctaagccagacctggttacctgtctggagcaaggaaaaaaacctttaactatggaaagacatgagatgattgccaaacccccagttatgagttctcattttgcccaagacctttggccagagaacatacaaaattctttccaaatagggatgctgagaagatatgaagaatgcagacatgacaatttacagttaaaaaaaggctgtaaaagcgtgggtgagcataaggtgcacaaaggaggttataatggacttaaccaatgtttgacaactacccagaaagaaatatttcaatgtgataaatatggaaaagtctttcataagttttcaaattcaaacacatataagacaagacatactggaataaatcttttcaaatgtataatatgtggcaaagcttttaaacggtcctcaacccttactacacataagaaaattcatactggagagaaaccttacagatgtgaagaatgtggcaaagcttttaaccaatctgcaaaccttactacacataagagaattcataccggagagaaaccctacagatgtgaagaatgtggcaaagcctttaagcagtcctcaaaccttactacacataagaaaattcatactggagagaaaccctacaaatgtgaagaatgtggcaaagccttcaaccgatccacagaccttactacacataagatagttcatactggagagaaaccctacaaatgtgaagaatgtggcaaagcctttaagcacccctcacacgttaccacacataagaaaattcatactagagggaaaccctacaactgtgaagaatgtggcaaatcctttaagcactgctctaaccttactatacataagagaattcatacaggagagaaaccctacaaatgtgaagaatgtggcaaagcctttcacctatcctcacaccttactacacataagatacttcatactggagagaaaccctacagatgtagagaatgtggcaaagcttttaaccattccacaacccttttttcacatgagaaaattcatactggagagaaaccctacaaatgtgatgaatgtggcaaaacctttacctggccctcaatcctctccaaacataaaagaactcatactggagagaaaccctacaaatgtgaagaatgtggcaaatcctttactgcatcctcaactctaactacacataagagaattcatactggagagaaaccttacaaatgtgaagaatgtggcaaagcttttaactggtcctcagaccttaataaacataagaaaattcatattgaacgaaaaccctacatagtgaagaatgtgacagatcttttaaatgttcctccacttttaattagcataagataattcatactggagagaaaccctatgaatgtgatgaatgtgggaaagcctttaaccagccctcgactcttagtaaatttgagagtttatatggaacacaaaccctacaaatataaagaatgtgacaaagctttttaaggaagttctcaacccttattacacataattcataccaaacagaagccctacaagtgtgaagaatgtggcaaaacctataaacctataacaagttctcaattcctttttttttgagatggagtttcactcttgtcaccgaggctggagtgcaatgacatgatctccgttcactgcaatctctgcctcctgggtttaagccattcttctgcctcagcctcccaagtagctgggattacaggtgcccaacaccacgcctggctaatttttggatttttagtagagatggggtttcacaatgttggccaggctggtctcgaactcctgacctcaggtgatccacctgccttggccttccaaagtgctggggttacaggcgtgagccaccatgcctggctacaagttcttaattcttaagagacaccatgcctggctacaagttcttaattcttaagagacatggcgataattcatgctgaagaggaaatctggaaacctgaaagatgcgacattgcttttaccaacacctccacatttcctatacataaaaataaattatactagtgtaataccctagaaatgtataaaatgtgacaaagcctttatatgattgtcatacatgattgtaggtgatagaagtcatactgccaaaactcctgtaagtgtgaagaatgtggcaaaatattttattagtgcttataccttatttcacaggaaagctcttatccttgagaaaaattgtgcaaatacaaagaatatggaaaaaccattaatgcctactcacatcttactgaacagaagaaggttcatagttaataaagcattaaaagtgcaattactgtcaaaaaatctttcagaaaatagaagtctttaaagtgaagaatatttattctgaagacagccattacaaatataaagggggttgtagtgcctttacttgtgtcacagatcttagtgcacacatgtagtactagaggaaaaccctgaagcagttgctcaagctttgtttcagggaatcaagggaatttatattgagaatagtactgcaaatgtaatgaatggaaagacttttcttttccaaaaatgacagcttagaaaacaccagagggtttataccaaaatatatttttgcagatgcagtaaatatcaaaaaatatttaattcaaaattgattctatgtaaatatcagagaattttccatagaataattaaggcactgacacttcagacattacactaaatcagaatgttcagtataaaaactaatccacagctacagctgttagataaattatttctatataattttttaaaaagtggatttttgaagcactgtaattacattgaaagtatacttgttttcttgaaaaaatttttttgaaaagtgaataatgatataatacagctttcacattgctttatgctattttattcctattatattcacatgtgaaagcatgtgatcaattgttgctgcattagagatattagagattgttttttattagttgggcattatgtatgaccttttctataaaagagtaaggacattaaaatgtaagatgcatgatgaaaatataagtggagaggctctttgtagttaactgatattaagtaatgtgtaaggtgggggttcatgttctcatttctataatcctagccaatgacttaatgttgatgctttgaatgtcttttggatggtctaacctacattaacatgtatgcggaacatcttaaaactttttttcaaaaatcataatgaattattttattaataagcaaagataaaaaataa

SEQ ID NO: 35023 - DNA, 511 bp, Homo sapiens
  source 1..511: mol_type = unassigned DNA
ggggcctttgtctctcgctgtcgccggagtcccaggtctgtcttcactgctctgtgtcctctgctcctagaggcccagcctctgtggcgctgttaccagcaggtattggagatccacagctaagatgccaggaccccctagaagcctagaaatgggactgttgacatttagggatgtggccatagaattctctctggaggagtggcaacacctggacattgcacagcagaatttatatagaaatgtgatgttagagaactacagaaacctggccttcctgggtattgctgtctctaagccagacctgatcacctgtctggaacaagggaaagagccctggaatatgaagcgacatgagatggtggatgaacccccaggattggatttttcattactgtgaagaaaaacactggaattttgataaggagttctttaaatctacaggtcactttggataatatggcagtttcataatacttattctttcaatagaaataaaacattttaaaat

SEQ ID NO: 35024 - DNA, 3832 bp, Homo sapiens
  source 1..3832: mol_type = unassigned DNA
accagagcttggaatccgtctctgctcttctgcattctccacctcgggagcccctggggactctgtgacggcctctgttgccctgtgatctgcaggtccggagagacgcacagctaagatgtcaggacatcctggaagctgggaaagggtcttgccatctctaagctggacctggtgacctttttggagggaaagaaagagccctggactgtgaagagtgaggagaccatagctgcacagccaggtatgtgtcctcattttgctcaagacctttggccagagcagggcatggaagattcttttcaaaaagcaatactgagaagatatggaaaatatggacatgagaatttacagttaagaaaaggctgtaaaagtgtggatgagtataaggtgaacaaagaaggttataatggacttaaccagtgtttcacaactgcccagagcaaagtatttcaatgtgataaatatttgaaagtcttctataaatttttaaattcaaacagacctaagataagacatactgaaaagaaatctttcaaatgtaaaaaacgtgtcaaattattttgcatgctttcacataaaacccaacacaaaagcatttatcatagagagaagtcctacaaatgtaaagaatgtggaaaaacctttaattggtcctcaacccttactaatcataggaaaatttatactgaagagaaaccttacaaatgtgaagaatataacaaatctcctaagcaactctcaacccttactacacatgaaataattcatgctggagagaaactctacaaatgtgaagaatgtggtgaagcttttaatcgatcctcaaatcttactacacataagataattcatactggagagaaaccttacaagtgtgaagaatgtggcaaagcatttatctggtcctcaacccttactgagcataagaaaattcatactagaaagaaaccctacaagtgtgaagaatgtggcaaagcatttatatggtcctcaacactaactagacataagaggatgcacactggagagaaaccctacaaatgtgaagaatgtggcaaagcttttagccagtcctcaacccttactacacataagataattcatactggagagaaacgctacaaatgcttagaatgtggcaaagcttttaagcaactctcaactcttactacacataaaataattcatgttggagagaaactctacaaatgtgaagaatgcggcaaaggttttaatcgatcttcaaatcttactacacataagataattcatactggagagaaaccttacaagtgtgaagaatgtggcaaagcatttatctggtcctcaacccttactaaacataagagaattcatactagagagaaaccctacaaatgtgaagaatgtggcaaggcatttatatggtcctcaaccctaactagacataagaggatgcacactggagagaaaccctacaaatgtgaagaatgtggcaaatcttttagccaatcctcaacccttactacacataagataattcatactggagagaaaccctacaaatgtgaagaatgtggcaaagcctttaactggtcctcaactcttactaaacataagataattcatactgaagagaaaccctacaaatgtgaaaaatgtggcaaagcctttaagcagtcttcaatccttactaaccataagagaattcatactggagagaaaccctataaatgtgaagaatgtggcaaatcttttaaccggtcttcaacttttactaaacataaggtaattcatactggagtaaaaccctacaaatgtgaagaatgtggcaaagcatttttctggtcctcaaccctaactaaacataagagaattcatactggagagcaaccctacaaatgggaaaaatttggcaaagcctttaatcggtcctcgcacctcaccacagataagataactcattggagagaaatcttacaagtatgaataatgtgccaaagcctaagaaaaccctcaattcttaatagatataagattattcctactggagagaaactacaaacctgagagaggcgctaatgcttttgacagtacctaaaactttaaagaaaatcattctgctgaaaaatcctagaaatgtgaagaatgtgaaaaagcctttaaatgattgtcacacttgattgtaggtaagataattcatactggagaaaactaccagtgtgaacaacgtggccaagcttcgacaatgctcacaccctattgcacaggaaagcatttatacttgagaagaaatgtacaaatattggcaaagtaaaaaatccattaacacctgctcacatcttactcaaaattgtagagttcatagtaaataaaagcattaaaattctaattactctcagaagatctgtcagaaagtatgtctttaaagtatagaagagcatttattttgaaaaaaacattacacatatgaagaggattgtaatatctttacttgtaccacagatcttattgtacacattttatactagagaaaaaccctcaggcagttgttaaaattttgttgaacatcagggagtttaagaaaaccctgcaagtataatgaatttggaaaaacattttttcaaaaactacaaattataaaacaccaaagtgttcatactaaaatatatttttgcagatacattaaatatgaaagatattcaatccaaaattaagtctatgtaaatatcagggaataattcacagtagaaatatctagggcattcaagctttagacattacactaaatcagagtgctgagtatagaaaataatacaaacagatttgtctaaacatttgtatataactttaaaaatagaatattttttggagggttataattacattcaaagtacttttttttgaaaatacagattttttttaaaagtgaataatgtgttcaactcttaaattcatgctgtttcatcattgctggtgtattcatatgtgaaagcatgtgactaattgttgctgcataaaagatatgagattcttttttattaggcattatttatgaccttttctatgaaaagataaggacattaaaatgtaagatgcgtgaggaaaatttaggtagagaggctctttgtggttaacttataatattgagtgatgcatgaggtaggtgttcagaataatattcctctgcattattatgaatgaaaagcattcttaattttagttaaaattaagttagtcatatgttattttattaattgtacttctatgaaataatatgcagtctatttttaaattataaattatgtgtgaacttagcttttcaattcaacatttttaacatattaaatactattgtgaattcaatgaagtgttcttatgccactaactttaacctattcccttactcaaggatgtaggtaaaagatggtaacaatacactatttggtaagataatgtactgacatctctagcaatcttttttgccagtggctttaaattgccaataagttaaagaatattgttcctatgggttaaatttttattcttattttcacatttaaatttatttttcttaatttttgtggatacataatatgtgtatatatgtatgccatatatggtatattttgatgcaggcatactctatataataatcacattagaggaaatgagatatccattacctctagcatttattctttttattacaagcaattcaattgtacacttttagttatttttaaatttacaatgttattgattacagggtcatttttatggtcataataaaaaattttatacaaacgtgtaaaatctatacatttctgagttctgaataaatattttt

SEQ ID NO: 35025 - DNA, 3975 bp, Homo sapiens
  source 1..3975: mol_type = unassigned DNA
gggatatggcggggcctttgtctctcgctgtcgccggagtcccaggtctgtcttcactgctctgtgtcctctgctcctagaggcccagcctctgtggcgctgttaccagcaggtattggagatccacagctaagatgccaggaccccctagaagcctagaaatgggactgttgacatttagggatgtggccatagaattctctctggaggagtggcaacacctggacattgcacagcagaatttatatagaaatgtgatgttagagaactacagaaacctggccttcctgggtattgctgtctctaagccagacctgatcacctgtctggaacaagggaaagagccctggaatatgaagcgacatgagatggtggatgaacccccaggtatgtgtcctcattttgctcaagacctttggccagagcagggcatggaagattcttttcaaaaagcaatactgagaagatatggaaaatatggacatgagaatttacagttaagaaaaggctgtaaaagtgtggatgagtataaggtgaacaaagaaggttataatggacttaaccagtgtttcacaactgcccagagcaaagtatttcaatgtgataaatatttgaaagtcttctataaatttttaaattcaaacagacctaagataagacatactgaaaagaaatctttcaaatgtaaaaaacgtgtcaaattattttgcatgctttcacataaaacccaacacaaaagcatttatcatagagagaagtcctacaaatgtaaagaatgtggaaaaacctttaattggtcctcaacccttactaatcataggaaaatttatactgaagagaaaccttacaaatgtgaagaatataacaaatctcctaagcaactctcaacccttactacacatgaaataattcatgctggagagaaactctacaaatgtgaagaatgtggtgaagcttttaatcgatcctcaaatcttactacacataagataattcatactggagagaaaccttacaagtgtgaagaatgtggcaaagcatttatctggtcctcaacccttactgagcataagaaaattcatactagaaagaaaccctacaagtgtgaagaatgtggcaaagcatttatatggtcctcaacactaactagacataagaggatgcacactggagagaaaccctacaaatgtgaagaatgtggcaaagcttttagccagtcctcaacccttactacacataagataattcatactggagagaaacgctacaaatgcttagaatgtggcaaagcttttaagcaactctcaactcttactacacataaaataattcatgttggagagaaactctacaaatgtgaagaatgcggcaaaggttttaatcgatcttcaaatcttactacacataagataattcatactggagagaaaccttacaagtgtgaagaatgtggcaaagcatttatctggtcctcaacccttactaaacataagagaattcatactagagagaaaccctacaaatgtgaagaatgtggcaaggcatttatatggtcctcaaccctaactagacataagaggatgcacactggagagaaaccctacaaatgtgaagaatgtggcaaatcttttagccaatcctcaacccttactacacataagataattcatactggagagaaaccctacaaatgtgaagaatgtggcaaagcctttaactggtcctcaactcttactaaacataagataattcatactgaagagaaaccctacaaatgtgaaaaatgtggcaaagcctttaagcagtcttcaatccttactaaccataagagaattcatactggagagaaaccctataaatgtgaagaatgtggcaaatcttttaaccggtcttcaacttttactaaacataaggtaattcatactggagtaaaaccctacaaatgtgaagaatgtggcaaagcatttttctggtcctcaaccctaactaaacataagagaattcatactggagagcaaccctacaaatgggaaaaatttggcaaagcctttaatcggtcctcgcacctcaccacagataagataactcattggagagaaatcttacaagtatgaataatgtgccaaagcctaagaaaaccctcaattcttaatagatataagattattcctactggagagaaactacaaacctgagagaggcgctaatgcttttgacagtacctaaaactttaaagaaaatcattctgctgaaaaatcctagaaatgtgaagaatgtgaaaaagcctttaaatgattgtcacacttgattgtaggtaagataattcatactggagaaaactaccagtgtgaacaacgtggccaagcttcgacaatgctcacaccctattgcacaggaaagcatttatacttgagaagaaatgtacaaatattggcaaagtaaaaaatccattaacacctgctcacatcttactcaaaattgtagagttcatagtaaataaaagcattaaaattctaattactctcagaagatctgtcagaaagtatgtctttaaagtatagaagagcatttattttgaaaaaaacattacacatatgaagaggattgtaatatctttacttgtaccacagatcttattgtacacattttatactagagaaaaaccctcaggcagttgttaaaattttgttgaacatcagggagtttaagaaaaccctgcaagtataatgaatttggaaaaacattttttcaaaaactacaaattataaaacaccaaagtgttcatactaaaatatatttttgcagatacattaaatatgaaagatattcaatccaaaattaagtctatgtaaatatcagggaataattcacagtagaaatatctagggcattcaagctttagacattacactaaatcagagtgctgagtatagaaaataatacaaacagatttgtctaaacatttgtatataactttaaaaatagaatattttttggagggttataattacattcaaagtacttttttttgaaaatacagattttttttaaaagtgaataatgtgttcaactcttaaattcatgctgtttcatcattgctggtgtattcatatgtgaaagcatgtgactaattgttgctgcataaaagatatgagattcttttttattaggcattatttatgaccttttctatgaaaagataaggacattaaaatgtaagatgcgtgaggaaaatttaggtagagaggctctttgtggttaacttataatattgagtgatgcatgaggtaggtgttcagaataatattcctctgcattattatgaatgaaaagcattcttaattttagttaaaattaagttagtcatatgttattttattaattgtacttctatgaaataatatgcagtctatttttaaattataaattatgtgtgaacttagcttttcaattcaacatttttaacatattaaatactattgtgaattcaatgaagtgttcttatgccactaactttaacctattcccttactcaaggatgtaggtaaaagatggtaacaatacactatttggtaagataatgtactgacatctctagcaatcttttttgccagtggctttaaattgccaataagttaaagaatattgttcctatgggttaaatttttattcttattttcacatttaaatttatttttcttaatttttgtggatacataatatgtgtatatatgtatgccatatatggtatattttgatgcaggcatactctatataataatcacattagaggaaatgagatatccattacctctagcatttattctttttattacaagcaattcaattgtacacttttagttatttttaaatttacaatgttattgattacagggtcatttttatggtcataataaaaaattttatacaaacgtgtaaaatctatacatttctgagttctgaataaatattttt

SEQ ID NO: 35026 - DNA, 1190 bp, Homo sapiens
  source 1..1190: mol_type = unassigned DNA
gggatatggcggggcctttgtctctcgctgtcgccggagtcccaggtctgtcttcactgctctgtgtcctctgctcctagaggcccagcctctgtggcgctgttaccagcaggtattggagatccacagctaagatgccaggaccccctagaagcctagaaatgggactgttgacatttagggatgtggccatagaattctctctggaggagtggcaacacctggacattgcacagcagaatttatatagaaatgtgatgttagagaactacagaaacctggccttcctgggtattgctgtctctaagccagacctgatcacctgtctggaacaagggaaagagccctggaatatgaagcgacatgagatggtggatgaacccccaggtatgtgtcctcattttgctcaagacctttggccagagcagggcatggaagattcttttcaaaaagcaatactgagaagatatggaaaatatggacatgagaatttacagttaagaaaaggctgtaaaagtgtggatgagtataaggtgaacaaagaaggttataatggacttaaccagtgtttcacaactgcccagagcaaagtatttcaatgtgataaatatttgaaagtcttctataaatttttaaattcaaacagacctaagataagacatactgaaaagaaatctttcaaatgtaaaaaacgtgtcaaattattttgcatgctttcacataaaacccaacacaaaagcatttatcatagagagaagtcctacaaatgtaaagaatgtggaaaaacctttaattggtcctcaacccttactaatcataggaaaatttatactgaagagaaaccttacaaatgtgaagaatataacaaatctcctaagcaactctcaacccttactacacatgaaataattcatgctggagagaaactctacaaatgtgaagaatgtggtgaagcttttaatcgatcttcaacttttactaaacataaggtaattcatactggagtaaaaccctacaaatgtgaagaatgtggcaaagcatttttctggtcctcaaccctaactaaacataagagaattcatactggagagcaaccctacaaatgggaaaaatttggcaaagcctttaatcggtcctcgcacctcaccacagataagataactcattggagagaaatcttacaagtatga

SEQ ID NO: 35027 - DNA, 2205 bp, Homo sapiens
  source 1..2205: mol_type = unassigned DNA
ggcgggacttccgttgtcctccttgtggcggtcgttttggcatttgtctggactgattacttggtagaaagccccggagcgctgggtcagcatcatccgtgactgactgagaaggcgcgagaggagtcttccccgctgcacagaggcgtggctgaggctcggcggcgcccagggtacccaggcccggcccggaataaggacatcctctctggccccgctccgctcacagagtcagatggcggcggccgagctgacggccccggcccagggcattgtgacctttgaggacgtggctgtttacttctcctggaaggagtggggtcttcttgatgaggctcagaaatgcctgtaccacgatgtgatgctggagaacttgacacttacaacctccctgggtggttctggagcaggggatgaggaggcaccttatcagcagagcacttctccacagcgggtgtcacaggttaggattcctaaggcccttccttctccccagaagaccaacccctgtgagatatgtggcccagtcttgagacagattttgcacttggttgaacaccaaggaacacaccatggtcagaaactgtatacagacggggcatgtaggaaacaattacaatttactgcataccttcatcagcaccagaagcagcatgttggacagaaacacttcagaagcaatgggggcagagacatgtttttgagcagctgcacatttgaagtatctgggaagcccttcacttgcaaggaggttgggaaggatttcctggtgagatcaagatttcttcagcaacaggctgctcacaccagaaagaagtcaaacagaaccaagagtgcagtggcctttcacagtgtaaaaaatcattacaactggggagaatgtgtgaaagctttcagctacaaacatgtacgtgttcagcaccagggagacctcattagggaaagatcttacatgtgcagtgaatgtgggaaatcttttagcacaagctgtagcctcagtgatcatttgagagttcacacttcagaaaagccttatacatgtggagaatgtgggaaatcctataggcaaagctctagccttattacgcaccgaagaattcacactggagtaagacctcatcaatgtgatgaatgtggaaaattatttaacaggaagtatgaccttcttatacatcagagagttcatactggagaaaggccttacaagtgcagtgaatgtgggaaatcctttagccatagctctagcctcattacacaccagagaattcatactggaatgaggccttatgagtgcagtgaatgtgggaaatcttttatccatagttctagccttattacacaccagagagttcacactggtacaaggccttatatgtgcagtgaatgtgggaaatcctttagccagagctgtcacctcattaaacaccggagacttcacattggagaagggccttatgagtgtagtgaatgtgggaaattgtttacttatagatctcgtttcttccaacaccagagagttcatactggagtaagatctcatgaatgtcatgaatgtggaaaattatttagcaggaaatttgacctcattgtacatgagagagttcacacaggagaaaggccatatgagtgcagtgaatgtggaaaatcctttacctgtaaatcctacctcatctcacactggaaagttcatactggagcaaggccttatgaatgtggggagtgtgggaaatcatttactcatagctctacgctccttcaacaccagagagttcacactggagaaaggccttatgagtgcaatgaatgtgggaagttttttagccagagctccagcctcattagacataggagaagtcacaccggagaaaggccttatgagtgcagtgagtgttggaaatcctttagtaaccactctagcctcgttaaacaccgaagagttcataccggagaaaggccttatgaatgcagtgaatgtggaaaatcctttagccagagctctaacctcactaatcaccagcgaattcacagtggggaaaggccttatgagtgtagtgactgtggaaaattttttaccttcaactccaacctcctaaaacatcagaacgttcacaagggataaaggttaggtaacacacatagggctgttacggactgagaagtgtccctgcaaaattcacagacataaataaataaatacgtattttc

SEQ ID NO: 35028 - DNA, 2169 bp, Homo sapiens
  source 1..2169: mol_type = unassigned DNA
ctaggggcccagcctctgtggccctgtgacctgcaggtattgggagatccccagctaagacgccaggtcctcctggaagcctagaaatgggaccactgacaattagggatgtgactgtagaattctctctggaggagtggcattgcctggacactgcacagcagaatttatatagggatgtgatgttagagaactacagaaacctggtcttcctgggtattgctgtctctaagccagacctgatcacctgtctggagcaaggaaaagagccctgtaatatgaagagacatgagatggtagccaaacccccagttatgtgttctcatattgctgaagacctttgcccagagcgagacataaaatattttttccaaaaagtcatactgaggagatatgataaatgtgaacatgagaatttacaattaagaaagggctgtaaaagtgtggatgagtgtaaggtgtgcaaaggaggttataatggacttaaccaatgtctgataactacccagagcaaaatgtatcaatgtgataaatatgtaaaagtcttctataagttttcaaattcagatagacataagataagacatactgaaaagaaaacttgcaaatgtaaagaatgtggcaaagcctttaaccagtcctcagctcttactcgacataagatgactcatactggagagaaaccctacaaatgtgaagagtgtggaaaagcttttaaccggtcttcacaccttactcaacataaggtaattcatactagagagaaaccctacaaatgtgaagagtgtggcaaagcctttaaccggtcttcacacattactcaacataagagaattcataatagagagaagcccttcaaatatgatgaatgttgcaaagcctttaagtggtcctcagctcttactacccttactcaacataagagaattcatactggagagaaaccctacaaatgtgaagagtgtggcaaagcctttaaccagtcctcagcccttactcgacataagatgattcatactggagagaaacccttccaatgtgaagagtgtggcaaagcttttaaccggtcttcacaccttactcaacataagataattcatactaaagagaaaccctacaaatgtgaagagtgtggaaaagcctttaaccggtcttcacaccttactaaacataagagaattcatactagagagaaggcctacaaatgtgatgaatattgcaaagcttttaactggtcctcagctcttactacccttactcagcataagataattcatactggagagaaaccctacaaatgtgaagagtgtggcaaagcctttaaccggtcttcataccttattcgacataagataattcatactggagagaaaccctacaaatgtgaagagtgtggcaaagcctttaaccagtcttcacaccttactcaacataaaataattcatactggggagaagccctacaaatgtgaagaatgtggcaaagcctttaaccggtcttcacacctttctcaacataagataattcatactggagagaaaccctacaaatgtgaagaatgtggcaagccttttaatcgtttctcataccttaccgtacataagagaattcatgctggagagaaccccaacaaatatgaagaatgtggcaaagcttgtaaccattcctcaaaccttactaaacataattcataatggagaaaaaccctacaaatgtgaagaatgtgtcaaagcttttaactgttcctcaatccttactaaacataagggaattcataatagagaaaccctacaaatgtgaagaacgtggcctggcttttaacaaatcctcaacatttactaagcataaaataattcatgctggagagaaactcttgaaatgtgatgaatgtggcatagcctcttcccagttctcaactcttactaaacatgagaacacatgtggaagataaagcctacaaatatgaagaatgtgacaaggcctttaaaagttctcaacccttattacacataatttatactggacagaaatcctaaagtgtgaagaatgtcacaaagcccttaataagtcctcaattcttaacagatataagatgtttcatactggagcgaaactacaatcctgaatgatgtcacagtgcttttaacaatacctcaaacttttctaaac

SEQ ID NO: 35029 - DNA, 3518 bp, Homo sapiens
  source 1..3518: mol_type = unassigned DNA
ggcttccgggtttggcgggtactttgtctctcgctctagcccgagctgcaggtctcgtcttccctggtctgtgtcctcttctcctaggggcccagcctctgtggccctgtgacctgcaggtattgggagatccccagctaagacgccaggtcctcctggaagcctagaaatgggaccactgacaattagggatgtgactgtagaattctctctggaggagtggcattgcctggacactgcacagcagaatttatatagggatgtgatgttagagaactacagaaacctggtcttcctgggtattgctgtctctaagccagacctgatcacctgtctggagcaaggaaaagagccctgtaatatgaagagacatgagatggtagccaaacccccagttatgtgttctcatattgctgaagacctttgcccagagcgagacataaaatattttttccaaaaagtcatactgaggagatatgataaatgtgaacatgagaatttacaattaagaaagggctgtaaaagtgtggatgagtgtaaggtgtgcaaaggaggttataatggacttaaccaatgtctgataactacccagagcaaaatgtatcaatgtgataaatatgtaaaagtcttctataagttttcaaattcagatagacataagataagacatactgaaaagaaaacttgcaaatgtaaagaatgtggcaaatcattttgcatgctttcacaactaactcgacataagagaattcatattagagagaattcccacaaatgtgaagaatgtggcaaagcctttaaccagtcctcagctcttactcgacataagatgactcatactggagagaaaccctacaaatgtgaagagtgtggaaaagcttttaaccggtcttcacaccttactcaacataaggtaattcatactagagagaaaccctacaaatgtgaagagtgtggcaaagcctttaaccggtcttcacacattactcaacataagagaattcataatagagagaagcccttcaaatatgatgaatgttgcaaagcctttaagtggtcctcagctcttactacccttactcaacataagagaattcatactggagagaaaccctacaaatgtgaagagtgtggcaaagcctttaaccagtcctcagcccttactcgacataagatgattcatactggagagaaacccttccaatgtgaagagtgtggcaaagcttttaaccggtcttcacaccttactcaacataagataattcatactaaagagaaaccctacaaatgtgaagagtgtggaaaagcctttaaccggtcttcacaccttactaaacataagagaattcatactagagagaaggcctacaaatgtgatgaatattgcaaagcttttaactggtcctcagctcttactacccttactcagcataagataattcatactggagagaaaccctacaaatgtgaagagtgtggcaaagcctttaaccggtcttcataccttattcgacataagataattcatactggagagaaaccctacaaatgtgaagagtgtggcaaagcctttaaccagtcttcacaccttactcaacataaaataattcatactggggagaagccctacaaatgtgaagaatgtggcaaagcctttaaccggtcttcacacctttctcaacataagataattcatactggagagaaaccctacaaatgtgaagaatgtggcaagccttttaatcgtttctcataccttaccgtacataagagaattcatgctggagagaaccccaacaaatatgaagaatgtggcaaagcttgtaaccattcctcaaaccttactaaacataattcataatggagaaaaaccctacaaatgtgaagaatgtgtcaaagcttttaactgttcctcaatccttactaaacataagggaattcataatagagaaaccctacaaatgtgaagaacgtggcctggcttttaacaaatcctcaacatttactaagcataaaataattcatgctggagagaaactcttgaaatgtgatgaatgtggcatagcctcttcccagttctcaactcttactaaacatgagaacacatgtggaagataaagcctacaaatatgaagaatgtgacaaggcctttaaaagttctcaacccttattacacataatttatactggacagaaatcctaaagtgtgaagaatgtcacaaagcccttaataagtcctcaattcttaacagatataagatgtttcatactggagcgaaactacaatcctgaatgatgtcacagtgcttttaacaatacctcaaacttttctaaacataaaaaaaaattatactagtgcgaaactctagaaatataaagaacatgaaaaacttttaaatggttttcacacttgattgcaggtaaaataatttataccggagaaaactccaagtgtgaagaatataacttttaaccagtgttcacaacttattgtacaggaaagcatttatagttgagaaatggtgtacaaatataaagaatgtggaaaagtcattaatatttgctcacatattacacatcagagagttcatacttaataaaagtattataaatacaattactgtcaaatgatctttcagaaatataaacctttaaagtgaagaagagttcattctaaagacaaacattacaaatataaaggggtttgtagtgcttttacttgtatcacagattttattgtacacattttgtactagagaataaccctgaagcagttgctaaaattttgttcagcattaggaaatttatgttggagaagaattcagcaagtgtgattaatttggaaaaacattttttccataactatagcttagaaaatgccagagagctcatactaaaatatacttttgcagatgcaataaatacaaagaaatatttaattcaaattgagtttatataattatcagagaattaacagtagaaatagctaaggcactgacacttcagacattacactaaatcagattgctgagtatagaaaatccaaaactacagttggtaagtaaattaattttatgtaactttaaaatgagtagacatttctttgagaagtcataattaaattcaagtatacttttttgataaaattataaagctttttaaaagtaaataatgatgtaagtcaactctcaaattacttcatgctgtttcttcatttctattgtattcacctgtgaaagcatgtgatcaactattgctgcatcagagatatgagagatactttattaggtgggaattatatacgacctcttctataaaatagtaaggacactgaaatataagatgcataagagtctaagtgaagaggttctttgtggttaacttagtgatgtatgaagtagttgctcatgttatgagagaaaaacatttttaattttagttaaatgtaagttaaaattaaaatagtaccatataatgttagtgattgtacttttatttaataaaatgcagtacatttt

SEQ ID NO: 35030 - DNA, 3874 bp, Homo sapiens
  source 1..3874: mol_type = unassigned DNA
gtctctcgctctagcccgagctgcaggtctcgtcttccctggtctgtgtcctcttctcctaggggcccagcctctgtggccctgtgacctgcaggtattgggagatccccagctaagacgccaggtcctcctggaagcctagaaatgggaccactgacaattagggatgtgactgtagaattctctctggaggagtggcattgcctggacactgcacagcagaatttatatagggatgtgatgttagagaactacagaaacctggtcttcctgggtattgctgtctctaagccagacctgatcacctgtctggagcaaggaaaagagccctgtaatatgaagagacatgagatggtagccaaacccccagttatgtgttctcatattgctgaagacctttgcccagagcgagacataaaatattttttccaaaaagtcatactgaggagatatgataaatgtgaacatgagaatttacaattaagaaagggctgtaaaagtgtggatgagtgtaaggtgtgcaaaggaggttataatggacttaaccaatgtctgataactacccagagcaaaatgtatcaatgtgataaatatgtaaaagtcttctataagttttcaaattcagatagacataagataagacatactgaaaagaaaacttgcaaatgtaaagaatgtggcaaatcattttgcatgctttcacaactaactcgacataagagaattcatattagagagaattcccacaaatgtgaagaatgtggcaaagcctttaaccagtcctcagctcttactcgacataagatgactcatactggagagaaaccctacaaatgtgaagagtgtggaaaagcttttaaccggtcttcacaccttactcaacataaggtaattcatactagagagaaaccctacaaatgtgaagagtgtggcaaagcctttaaccggtcttcacacattactcaacataagagaattcataatagagagaagcccttcaaatatgatgaatgttgcaaagcctttaagtggtcctcagctcttactacccttactcaacataagagaattcatactggagagaaaccctacaaatgtgaagagtgtggcaaagcctttaaccagtcctcagcccttactcgacataagatgattcatactggagagaaacccttccaatgtgaagagtgtggcaaagcttttaaccggtcttcacaccttactcaacataagataattcatactaaagagaaaccctacaaatgtgaagagtgtggaaaagcctttaaccggtcttcacaccttactaaacataagagaattcatactagagagaaggcctacaaatgtgatgaatattgcaaagcttttaactggtcctcagctcttactacccttactcagcataagataattcatactggagagaaaccctacaaatgtgaagagtgtggcaaagcctttaaccggtcttcataccttattcgacataagataattcatactggagagaaaccctacaaatgtgaagagtgtggcaaagcctttaaccagtcttcacaccttactcaacataaaataattcatactggggagaagccctacaaatgtgaagaatgtggcaaagcctttaaccggtcttcacacctttctcaacataagataattcatactggagagaaaccctacaaatgtgaagaatgtggcaagccttttaatcgtttctcataccttaccgtacataagagaattcatgctggagagaaccccaacaaatatgaagaatgtggcaaagcttgtaaccattcctcaaaccttactaaacataattcataatggagaaaaaccctacaaatgtgaagaatgtgtcaaagcttttaactgttcctcaatccttactaaacataagggaattcataatagagaaaccctacaaatgtgaagaacgtggcctggcttttaacaaatcctcaacatttactaagcataaaataattcatgctggagagaaactcttgaaatgtgatgaatgtggcatagcctcttcccagttctcaactcttactaaacatgagaacacatgtggaagataaagcctacaaatatgaagaatgtgacaaggcctttaaaagttctcaacccttattacacataatttatactggacagaaatcctaaagtgtgaagaatgtcacaaagcccttaataagtcctcaattcttaacagatataagatgtttcatactggagcgaaactacaatcctgaatgatgtcacagtgcttttaacaatacctcaaacttttctaaacataaaaaaaaattatactagtgcgaaactctagaaatataaagaacatgaaaaacttttaaatggttttcacacttgattgcaggtaaaataatttataccggagaaaactccaagtgtgaagaatataacttttaaccagtgttcacaacttattgtacaggaaagcatttatagttgagaaatggtgtacaaatataaagaatgtggaaaagtcattaatatttgctcacatattacacatcagagagttcatacttaataaaagtattataaatacaattactgtcaaatgatctttcagaaatataaacctttaaagtgaagaagagttcattctaaagacaaacattacaaatataaaggggtttgtagtgcttttacttgtatcacagattttattgtacacattttgtactagagaataaccctgaagcagttgctaaaattttgttcagcattaggaaatttatgttggagaagaattcagcaagtgtgattaatttggaaaaacattttttccataactatagcttagaaaatgccagagagctcatactaaaatatacttttgcagatgcaataaatacaaagaaatatttaattcaaattgagtttatataattatcagagaattaacagtagaaatagctaaggcactgacacttcagacattacactaaatcagattgctgagtatagaaaatccaaaactacagttggtaagtaaattaattttatgtaactttaaaatgagtagacatttctttgagaagtcataattaaattcaagtatacttttttgataaaattataaagctttttaaaagtaaataatgatgtaagtcaactctcaaattacttcatgctgtttcttcatttctattgtattcacctgtgaaagcatgtgatcaactattgctgcatcagagatatgagagatactttattaggtgggaattatatacgacctcttctataaaatagtaaggacactgaaatataagatgcataagagtctaagtgaagaggttctttgtggttaacttagtgatgtatgaagtagttgctcatgttatgagagaaaaacatttttaattttagttaaatgtaagttaaaattaaaatagtaccatataatgttagtgattgtacttttatttaataaaatgcagtacattttaaaatttttagattatttgtggacttaatttataattaaatattttcttttaccacgttaagactattgtacgttcaggccgggcacagtagctcacgcctgtaatcccaacactttgggaggctgaggcgggcggatcaattgaggccaggagtttgaaaccagcctggccaacatggtgaaaccctgtctctactgaaaatacaaaaaattagccaggcatggtggtgggtgcctgaaatcccagctatttgggagattgaggcaagagaatcacgtgtacccaggaggcagaggttgcagtgagccaagatcacgacattgcactccagcctaggcaacaagagcaagacttcgtctcaaaaaaaaaaaaaaaaaaaa

SEQ ID NO: 35031 - DNA, 3066 bp, Homo sapiens
  source 1..3066: mol_type = unassigned DNA
gtggccgcggaggcgcggagctaagcggctcggattatcctgggcagaccagagacttgaccagctaaacacttccgtcggtccggggcgtggacggggccagatcagcctcctgctctcccgagtcagggccacggaaaggcacaaatccatccgtgcgactcctggtacccagaccgggaggttgtctagtcacgcgcggtctgtgttgggcgagagctgaggagccggcgtccctgccaacgactcggccccgggacggtcaggagcctggggccctggtcccgcacctgtcttcgggcggacgcatccctcacggtctctccgcagcccgcgggtcctgcccccgcaggcagcgcgcgaacgtgggcgtggggatggccaccagtttccggacagcttcgtgctggggattattgtcattcaaggatatatctatggagttcacctgggatgaatggcagctactggattctacacagaagtacctgtacagagatgtgatattggaaaactatcataacctgatatcagtggggtatcatggtaccaagcctgacttaatcttcaagttggaacaaggagaagatccatggataataaatgccaaaatttccaggcagagctgtccagatggctgggaagaatggtaccagaacaatcaagatgagcttgagagtattgaaagaagctatgcttgtagtgtgttgggaagacttaatctgagcaaaacccatgattcttcaagacagagactctataacacacgtggaaaaagtttgacacaaaactcagctccaagcagaagttatttaagaaagaatcctgataagtttcatggttatgaagaaccatattttcttaagcatcaaagagctcatagcatagaaaaaaactgtgtgtgtagtgaatgtgggaaagcttttcgttgtaagtcacagctcattgtacatctcagaattcatacaggagagagaccttatgaatgcagtaaatgtgaaagagccttcagtgccaagtcaaaccttaatgctcatcagagagttcatacaggagaaaaaccctactcatgtagtgagtgcgagaaggtcttctctttcaggtcacagctcattgtccatcaggaaattcacacaggagggaaaccctatggctgcagtgaatgtgggaaagcctacagttggaaatcacagcttcttttacaccagagaagtcacacaggagtgaaaccgtatgaatgcagcgaatgtgggaaagcctttagtttgaagtctccattcgttgtacaccagagaactcatacaggagtgaaaccccataaatgcagtgaatgtgggaaagcctttaggagtaagtcctatctccttgttcacatccgaatgcatacaggagaaaaaccctatcaatgcagtgattgtgggaaagccttcaatatgaagacacaactcattgtacatcagggagttcacacaggaaataatccttatcaatgcggtgaatgtgggaaagcctttggtaggaaggaacagctcactgcacatctgagagctcatgcaggagagaagccctatggatgcagtgaatgtgggaaggctttcagcagcaagtcataccttgttatacataggagaacacacaccggagagagaccctatgaatgtagtttgtgtgagagagccttttgtggaaaatcacagctgattatacatcagagaactcattcaactgagaagccctatgaatgcaatgaatgtgaaaaagcctaccctaggaaggcatcacttcagatacaccagaaaactcattcgggagagaaaccttttaaatgcagtgaatgtggaaaagccttcactcagaagtcatctctcagtgaacatcagagagttcacaccggagagaaaccatggaaatgctctgaatgtgggaaatccttctgttggaattcagggcttcgtatacatcggaagactcataaatgagaaatcagaatgatgcaatgtgagaaactgatgttcaggagacttcggataatatagacaggatttacaagcaggaggccctaaaattacactcatgtcaaaaatcagagaggagagagaccaaccatatttgggatgagtgtaaaagctttcagaaataagttacaaatctttgtagatgaaaataatggaaggaatgtggagcaataaatgtatcaaatgttgtagtatcatcatgaagattcagagaatttacactaggaacaccttataagttgaataaattaaggaagcattttcccattgaaagtgtgttccatggaaagtcacattccagatttgaagctgtgtttttgtaaaataaaatcttggtatgaacagttgacttcatggtggagtataaagttgtttttttaaaaatatgtaaataatgttcaggaaaaacgcagggaacagagtcttaaagttaatggatatttaatgtgactttcctgagttaacactgaatagtatttctaaaattttttgtactttattttttaatgtaacttgttctatctatctatatatatatttgatagtttgtggaataatatcccccagtattttccatattaaatgctaattatcttttgatttctttttcataagcagatctggcatttattacagggctgccgcttaagagaactcattataatgaacgtttattatattttgcagttccatgcctgttgtccattgattgacatgagcacccctgttttctctggagaaatacctcccctctctggggtgcttcctgtggtagtgtctttcaggtatccgttccactagctacaggtgagcattttacccattgttggataatggtaatctctttttcagaattttgagtctgtaattcatttgtacatgaaccagaaaatgtgggaactcattcattcttgtcccagaattctgttgagaacatccattcattctggctaattgattacaagaataactgtggatacgatccctttagaacctgcttctctgatctgtgtgtttcctcacttctcaataaaaatgtcttttgcttttt

SEQ ID NO: 35032 - DNA, 4853 bp, Homo sapiens
  source 1..4853: mol_type = unassigned DNA
tatgttctgctgatttcagtgctcaccgttgtatccagcttcccaccaattctttctgtgtcttaatgttgtctctatagggtgtaattttttttttttagagacagagtctggttctgttgcccagtgtaaagtgcagtggcatagtcatggccaactacagcctcaaactcctgtgctcaaaccatccttccacctcagcctcctgagtaactgggactacaggcgtgcaccactatgcccacacatttttttgttatttgtagagatgaggtctaactatgtgacccaggatagtctgaaactcttggcctcaagtgatcctcccgcctcagcctcccaaatgctgggattataggcatgaggtaccacatttgatggatataaattttccaggtgctagtatatttgaaaatgtcttttattttcccttatttttgctttttagtttggctggtataagatttcagaatcagcattattttttctcagtactttatttctctcccactttcaagaagcattgttctttccttttagttggttatcaggtgttctctttatactttattttcagacatttcattaccatctgcttaaatttggaccttttttttgtttgttaacttatcttgtatttcaattggtaggtttttctcatgtgaactcctgtatttgtcttcactccaagagaattttcaggccgcatttctttgaacattgccctattatttctcttatttatataaacctacattggtaattcttctataaaccaggaaaatcattccaggtttatttatttatttatttttttgagacggagtcttgctctgtcgctcaggctggagtgcagtgatgcgatcttggctcactgcaacttctgcctctctggttccagcgattctcctgcctcagccttctgagtagctaggattgcaggtgcccacccccacgcctggctaatttttgtatttttagtagagacggggtttcaccgtgttggtcaggctggtcttgaactcctgaccttgtgatccgcttccctcggcctcccagagtgctgggattacaggcatgagccaccacacccggccaggtttattttgtagtctagctcttacctgttcacctgttgtagccatcgctgtggtttgagtgtatcttccaaatttcatgtgttggaaatttaattcctaaatttatttgttgatggtatttggaggtgggacctttgggaggtatttaggatttgataaagtcatcagggcagggcccctatgatgggattagtagccttaaaaggataggaagagagacctgagctggcatgctgtctgtctctcatcatgtattgccttccaccaagttatgacatagcaagaaggccctcaccagatgccagcaccatgcttatggacttcctggcctccagaaccttgagctaaatgaacatttttctttataaattacccagtttctggtattctgttataaaaatagaaaacaaagacagcagtcttttcggtgtctgaaatatttgttgttccttgaattgaccaggctctaccatgtgttctgtgtgatgcttgcttctggtacagggactgcaaattatgttccatctatttttttttctttctttcataatagatttgccagtttttcagttgggcatatacagaaactccatttctgaatttccctgctgttccctcccagcccccactctttgctgttgcttagaatgcagatgtgatgactagagccatcttagactgggttgccctggaagtggaagccatgtaaggtggagcaagagatggaagccccagaccaattgccttcagactcctgcaagtagaaggataaactctcttgtttatccccctgttctcagctgaacctcgtccaaacacctcctgaattgccctttctaccccaacttcttgaacacatcatgaatcttctaagactacttgagtggctctcttcatttctgtacaaaatgtaccctggatgtttttaccaaggactcagaacaccttattttgtttgcatgtataaatgttcattcccatctacaagatagaaagtttcttgaagacagaactggattttattcatcctgaaatcttcaggacccaagagagtaccggcaaatagaagctccttgattgattttttctttctttcttttttttttttttagatggagtctcactctgtcgccgaggctggagtgcagtggcacgattttggcttgctgcaacctctgctgcctgggttcaagtgattctcctgcctcagccacctgagtagctaggattacaagtgcctgccactgcgcccagctaatttttgtatttttagtagagacagggtttcaccatcttggtcaggctggtcttgaactcctgcccttgtgatccacccgccttggcctccgaaagtgctggcgtgagccaccgtgcctggcactccttgattgatttttaattctctcacaaagtaaatgctgaaccagccacaggaaatagttggtagaggaacatttatcccttcccagttcctctgcatcttttccatgtcacctaatgtaattgcatccaattgaacagggtgtgtgttatttcagggattattgtcattcaaggatatatctatggagttcacctgggatgaatggcagctactggattctacacagaagtacctgtacagagatgtgatattggaaaactatcataacctgatatcagtggggtatcatggtaccaagcctgacttaatcttcaagttggaacaaggagaagatccatggataataaatgccaaaatttccaggcagagctgtccagatggctgggaagaatggtaccagaacaatcaagatgagcttgagagtattgaaagaagctatgcttgtagtgtgttgggaagacttaatctgagcaaaacccatgattcttcaagacagagactctataacacacgtggaaaaagtttgacacaaaactcagctccaagcagaagttatttaagaaagaatcctgataagtttcatggttatgaagaaccatattttcttaagcatcaaagagctcatagcatagaaaaaaactgtgtgtgtagtgaatgtgggaaagcttttcgttgtaagtcacagctcattgtacatctcagaattcatacaggagagagaccttatgaatgcagtaaatgtgaaagagccttcagtgccaagtcaaaccttaatgctcatcagagagttcatacaggagaaaaaccctactcatgtagtgagtgcgagaaggtcttctctttcaggtcacagctcattgtccatcaggaaattcacacaggagggaaaccctatggctgcagtgaatgtgggaaagcctacagttggaaatcacagcttcttttacaccagagaagtcacacaggagtgaaaccgtatgaatgcagcgaatgtgggaaagcctttagtttgaagtctccattcgttgtacaccagagaactcatacaggagtgaaaccccataaatgcagtgaatgtgggaaagcctttaggagtaagtcctatctccttgttcacatccgaatgcatacaggagaaaaaccctatcaatgcagtgattgtgggaaagccttcaatatgaagacacaactcattgtacatcagggagttcacacaggaaataatccttatcaatgcggtgaatgtgggaaagcctttggtaggaaggaacagctcactgcacatctgagagctcatgcaggagagaagccctatggatgcagtgaatgtgggaaggctttcagcagcaagtcataccttgttatacataggagaacacacaccggagagagaccctatgaatgtagtttgtgtgagagagccttttgtggaaaatcacagctgattatacatcagagaactcattcaactgagaagccctatgaatgcaatgaatgtgaaaaagcctaccctaggaaggcatcacttcagatacaccagaaaactcattcgggagagaaaccttttaaatgcagtgaatgtggaaaagccttcactcagaagtcatctctcagtgaacatcagagagttcacaccggagagaaaccatggaaatgctctgaatgtgggaaatccttctgttggaattcagggcttcgtatacatcggaagactcataaatgagaaatcagaatgatgcaatgtgagaaactgatgttcaggagacttcggataatatagacaggatttacaagcaggaggccctaaaattacactcatgtcaaaaatcagagaggagagagaccaaccatatttgggatgagtgtaaaagctttcagaaataagttacaaatctttgtagatgaaaataatggaaggaatgtggagcaataaatgtatcaaatgttgtagtatcatcatgaagattcagagaatttacactaggaacaccttataagttgaataaattaaggaagcattttcccattgaaagtgtgttccatggaaagtcacattccagatttgaagctgtgtttttgtaaaataaaatcttggtatgaacagttgacttcatggtggagtataaagttgtttttttaaaaatatgtaaataatgttcaggaaaaacgcagggaacagagtcttaaagttaatggatatttaatgtgactttcctgagttaacactgaatagtatttctaaaattttttgtactttattttttaatgtaacttgttctatctatctatatatatatttgatagtttgtggaataatatcccccagtattttccatattaaatgctaattatcttttgatttctttttc

SEQ ID NO: 35033 - DNA, 5666 bp, Homo sapiens
  source 1..5666: mol_type = unassigned DNA
ccggcttgagcccagccaaagggattaccctcattcccgaaccgtgtctgagagtctcctggggttcctggcttagtatcgcaccgtggctgttacataaagtcagcacagcgtgtttaagctgatgttacaccactacccaatcccagggatagagtaaactaagactaaggccttacacccctgccccggccagggagacagtcccacaagctctggcggaggaaaagttcgcgcgaaaagctgactcaaaccgctgaaccttctgggaaatgtagtctaccctcaaaagagtggcacggaggacgggccaagatctctcgattccgtccggttctgagtcggggcctggcccagcccaggagacctctgggagcgctgcccgcggaaggagtgcgcaggcgcggaatctccgacttgccatggtcgtctttgtctgccggcctgcttccttgtatatccacaggagctgcaaaacctcttagagttctaagggcgctccctgaattttgggatgctgctttgttccccaaccataacatccaagtccagtgtcatttttctgctcacaagtttaaagtcagcacttaaaagaacagcaacagatgattgagaaagaaatgtaaagaaggttctctttgtgtgagtaagcaagaacctgaagaagcctgggaagtttataaacagataaagacgcaacatgaaagacttgtaagttaagtctcatctttctctgtgaaaagacagactgagggaaaatttaggaaacaaagtatttcctctgaacagtcattgattcttcaagactacccttctgtgtatggaactcagtttaaaagaatttgaaacctaatttatatacaatctatacctaaatatgggagaagctatataagaaccattaagaatataaagagaatgttacattttatccctttttgtaatcatctcatctcagggtaatcaatgtgagaaaagtcttccatcataaatttaacttcattagatacctgagaattaatattgaaaatacaccatatgaatttagtgaatgtgggaaagctttcatccttattacatcttatttgatactagggaaatctcctgattaaattcacatgcatgataggcatgttggaaagtcttcagcatgaatcagatctccttcagcatgatcaaattcatactggagagaaaccttatgaatgtaatgaatgtagaaaaacttttagcctgaagcaaaaccttgtagagcataagaaaatgcatactggagagaaatctcatgaatgcactgaatgtggtaaagtgtgctctcgagtctcatctcttactctacaccttagaagtcacacaggaaagaaggcatataaatgtaataaatgtggaaaagccttcagccagaaggaaaacttcctttctcatcagaaacatcacactggagagaaaccttatgaatgtgaaaaagtttctattcagatgccaaccatcatcagacaccagaaaaatcatacaggaaccaaaccctatgcatgtaaggaatgtggcaaagcctttaacggcaaagcatatctcactgagcatgagaaaattcatactggagaaaaaccatttgaatgtaatcagtgtggaagagccttcagccagaagcaatacctcattaaacatcagaacatccatactggaaagaagccctttaaatgtagtgagtgtggaaaagcttttagccagaaggaaaacctcattatacatcagagaatccatactggagagaaaccttatgaatgtaaagggtgtgggaaagctttcattcagaagtcaagcctcattagacaccagagaagtcacacaggagagaaaccttatacgtgtaaggaatgtgggaaagccttcagtggcaagtcaaatctcacagagcatgagaaaattcatattggagagaaaccctacaaatgtaatgaatgtggaacaatcttcaggcagaagcaatacctcattaaacatcacaatattcatacaggagagaaaccctatgaatgtaataaatgtggaaaagccttctctcgaatcacatcacttattgtacatgtgagaattcatacaggtgataagccttatgagtgtaaggtctgtgggaaagccttctgtcaaagctcatctcttactgtgcatatgagaagccatacaggtgagaaaccctatggttgtaatgaatgtgggaaagccttttctcagttctcaacccttgctctgcacatgagaatccatactggtgaaaaaccttatcagtgtagtgaatgtgggaaagctttcagccaaaagtcacatcacattagacaccagagaattcatactcattaaagttctctatgaatgccttggatttagcaaaacgttcagcagattttacacttaatagtgtattggaaaattcattttacattaaagtgacatgaatgtgggaagtccttcagcagcaattcaaaacttaaatactatgatgtttaataagtattatagtgtaaagaaaacccgtacccccaaaactcccacaacaagcattatcaatgctgtacttctaggagtatactcattaaagttaggatctagtcatggacactacttaatgtgttcctggaaggcctacagatgcattaagaaatagatatgagatgtatgaggatttgaaattaagagacaaaattatcatttttgtgatgttttgctacatatatgaattgtaaaactagaatcatcaaaattatttgttgttgaagcagtcataaaactgagactgagacagaatattgaattcagaaatgtgtgcatgaatatatggggaattggtaattgatagaggcggtatcccagattggtggggaaatcatggattacttaaaaattaattgactcttcatatggaaaaataatatctcccatcataatataaaatatttttcttatgaattcttaaagtactaaagactaaaatgcaaaaagcaatacttaataatataacagttttataagaagatgtttttaaaaccttagggcaggaaagaacttctaaaacattccagaatacccggtagttccactcttgagtatggtagtcccctattttctgcaagagatggactctaagacccccagtggatacctaaaacccagataggaccaaactctatgtctatgtttttttcttatatatacatacctatgataaaatttagtttacagattagacacagcaagagatttaaaacaataataaacataatatggaacaattataacaatatactgtaatcataaaagttatgtgaatatgatctttctctcagaataccttattgtactgttctcaactatttatgaactgtggtgactacaggtaactgaaaccatggaaagcaaagctgtggataagggggaactactatatatatgcatctacccaagaaacatgaacacagggagtcatgtactggtctatagctgtatagttcattgcaccatgagttatagtagccagaagttgggaaacaaatgctgtctcttgtgaaatagatgaataaaatgtgatagtaacatagtagagtactctctagcagttaagtgacaaattaagtctatatattaacagaaatatttttaaaaaattagagtgaagaaaaatgatgaacatattgtaatgatgcttctgtgaatttgaataaaatcaacactaaccagccctagtactaagaattggttatggataaattatgtaaaactaaagaatggattgaaaggatatgtatatactcagttcccaaaagtggagtggttacctctaggaagaaaggaggtggaagggaaatgttaccaagcatggtagttaaaggatacttcaattttgtatctatttcttattaaaaagaaacattctaagtaaacataacgaaatattaattctgggtggtggtaatatttgtgttcattctatcattcgtgctatttatttccttaaacttctgaaagttaaaaagtccagataggagtgaggaagctgtacatgaaacataatggacttacattcctagtcagatactaatattctgtagaagatatttctaaaatcttatctttaaaatatgaaataatttttaattggggtggcaacttaaattcaattaaaataactcatgtgtcacaagagtaaattttacataatctgtacgtagttctaatctgtatatagtcttggaggttatgatttgccacagattggttggatcacatacatttaaggatcatattattaaataatatatgcacagacatggagagaattagtttttactaaaacatttatcagaaattttaatactctgcataaccagtattagcattagaaattagccacttttaaaatgagaaaactgtgtcactcttcaatttttttataagccattgaggaaaacattaactcctggatttcagcttcacttttaacctgcagactaaatttctttctcaattatgtcagacacacccaagtcaatcccaacccccttgttaccttgggaagaccgtgctgaaaaaggagatcttccacctaaacagtgttctcttatttgaagcaaatctttttgagaatttgtttacttgatttctttccacaataaactgacagagaacgctactaatgatttttttttttttttgagacggagttttgttcttgttgcccaggctgcagtgcaatggcacaatcttggctcactgcaacctctgcctcacaggttcaagtggttctcctgcctcagcctcttgagtagctgggattacaggcatgcgccaccatgcccggctaattttgtatttttagtagagacggagttgcaccatgttggccaggctggtcttgaattcctgacctcaggtgatccacctgcttcggcctcccaaagtgctaggattacaggtgtgagccaccacgcctggctaattttgtatttttagtagagatggggtttctccaaaggctggtcttgaactcccgacctcaggtgatccgcccaccttggcctcccgaagtgctgggattacaggcgtgagccaccgtgcccggcctgatgtttttgaatgattatgaaaatgggtatacagcattaaaaccttagactgattttaaatatattaatttcttttaaactcaatataatgttaatattactgtagcacttactagcatttctgaaggttggtcttgagataagattgaaaatgacagttgttgattttctgaggtaatatacccaaataaaatatatgtatgtgtacatgaatctaaactgtcttcttctgttcctcattttgctttacttaaataatctttcatattttttaagtgttttgcccatgtgcttgggtagccttgaagtcaccagaataactaggactcaaattcagaccaaaccaggactagctttttgtgccatgagttagccatggtcctggacccagcaaaaagaatgattatgatggtcagagtaagatgagcaattgcaacataatattctctaatattgtatactgtaaatttattcagctgccctcgtttactcacagtttgcttatttgccaccataagaaatggtacaataaaaattcatgtaatc

SEQ ID NO: 35034 - DNA, 5055 bp, Homo sapiens
  source 1..5055: mol_type = unassigned DNA
agtgcgcaggcgcggaatctccgacttgccatggtcgtctttgtctgccggcctgcttccttgtatatccacaggagctgcaaaacctcttagagttctaagggcgctccctgaattttgggatgctgctttgttccccaaccataacatccaagtccagtgtcatttttctgctcacaagtttaaagtcagcacttaaaagaacagcaacagatgattgagaaagaaatgtaaagaaggttctctttgtgtgagtaagcaagaacctgaaaataattcttccgggccgggtgcggtggctcatggctgtattcccagcactttgggaggccaaggcgggtggatcatgaggtcaggagttcaagaccagcctggccaacatgaagaagcctgggaagtttataaacagataaagacgcaacatgaaagacttgtaagttaagtctcatctttctctgtgaaaagacagactgagggaaaatttaggaaacaaagtatttcctctgaacagtcattgattcttcaagactacccttctgtgtatggaactcagtttaaaagaatttgaaacctaatttatatacaatctatacctaaatatgggagaagctatataagaaccattaagaatataaagagaatgttacattttatccctttttgtaatcatctcatctcagggtaatcaatgtgagaaaagtcttccatcataaatttaacttcattagatacctgagaattaatattgaaaatacaccatatgaatttagtgaatgtgggaaagctttcatccttattacatcttatttgatactagggaaatctcctgattaaattcacatgcatgataggcatgttggaaagtcttcagcatgaatcagatctccttcagcatgatcaaattcatactggagagaaaccttatgaatgtaatgaatgtagaaaaacttttagcctgaagcaaaaccttgtagagcataagaaaatgcatactggagagaaatctcatgaatgcactgaatgtggtaaagtgtgctctcgagtctcatctcttactctacaccttagaagtcacacaggaaagaaggcatataaatgtaataaatgtggaaaagccttcagccagaaggaaaacttcctttctcatcagaaacatcacactggagagaaaccttatgaatgtgaaaaagtttctattcagatgccaaccatcatcagacaccagaaaaatcatacaggaaccaaaccctatgcatgtaaggaatgtggcaaagcctttaacggcaaagcatatctcactgagcatgagaaaattcatactggagaaaaaccatttgaatgtaatcagtgtggaagagccttcagccagaagcaatacctcattaaacatcagaacatccatactggaaagaagccctttaaatgtagtgagtgtggaaaagcttttagccagaaggaaaacctcattatacatcagagaatccatactggagagaaaccttatgaatgtaaagggtgtgggaaagctttcattcagaagtcaagcctcattagacaccagagaagtcacacaggagagaaaccttatacgtgtaaggaatgtgggaaagccttcagtggcaagtcaaatctcacagagcatgagaaaattcatattggagagaaaccctacaaatgtaatgaatgtggaacaatcttcaggcagaagcaatacctcattaaacatcacaatattcatacaggagagaaaccctatgaatgtaataaatgtggaaaagccttctctcgaatcacatcacttattgtacatgtgagaattcatacaggtgataagccttatgagtgtaaggtctgtgggaaagccttctgtcaaagctcatctcttactgtgcatatgagaagccatacaggtgagaaaccctatggttgtaatgaatgtgggaaagccttttctcagttctcaacccttgctctgcacatgagaatccatactggtgaaaaaccttatcagtgtagtgaatgtgggaaagctttcagccaaaagtcacatcacattagacaccagagaattcatactcattaaagttctctatgaatgccttggatttagcaaaacgttcagcagattttacacttaatagtgtattggaaaattcattttacattaaagtgacatgaatgtgggaagtccttcagcagcaattcaaaacttaaatactatgatgtttaataagtattatagtgtaaagaaaacccgtacccccaaaactcccacaacaagcattatcaatgctgtacttctaggagtatactcattaaagttaggatctagtcatggacactacttaatgtgttcctggaaggcctacagatgcattaagaaatagatatgagatgtatgaggatttgaaattaagagacaaaattatcatttttgtgatgttttgctacatatatgaattgtaaaactagaatcatcaaaattatttgttgttgaagcagtcataaaactgagactgagacagaatattgaattcagaaatgtgtgcatgaatatatggggaattggtaattgatagaggcggtatcccagattggtggggaaatcatggattacttaaaaattaattgactcttcatatggaaaaataatatctcccatcataatataaaatatttttcttatgaattcttaaagtactaaagactaaaatgcaaaaagcaatacttaataatataacagttttataagaagatgtttttaaaaccttagggcaggaaagaacttctaaaacattccagaatacccggtagttccactcttgagtatggtagtcccctattttctgcaagagatggactctaagacccccagtggatacctaaaacccagataggaccaaactctatgtctatgtttttttcttatatatacatacctatgataaaatttagtttacagattagacacagcaagagatttaaaacaataataaacataatatggaacaattataacaatatactgtaatcataaaagttatgtgaatatgatctttctctcagaataccttattgtactgttctcaactatttatgaactgtggtgactacaggtaactgaaaccatggaaagcaaagctgtggataagggggaactactatatatatgcatctacccaagaaacatgaacacagggagtcatgtactggtctatagctgtatagttcattgcaccatgagttatagtagccagaagttgggaaacaaatgctgtctcttgtgaaatagatgaataaaatgtgatagtaacatagtagagtactctctagcagttaagtgacaaattaagtctatatattaacagaaatatttttaaaaaattagagtgaagaaaaatgatgaacatattgtaatgatgcttctgtgaatttgaataaaatcaacactaaccagccctagtactaagaattggttatggataaattatgtaaaactaaagaatggattgaaaggatatgtatatactcagttcccaaaagtggagtggttacctctaggaagaaaggaggtggaagggaaatgttaccaagcatggtagttaaaggatacttcaattttgtatctatttcttattaaaaagaaacattctaagtaaacataacgaaatattaattctgggtggtggtaatatttgtgttcattctatcattcgtgctatttatttccttaaacttctgaaagttaaaaagtccagataggagtgaggaagctgtacatgaaacataatggacttacattcctagtcagatactaatattctgtagaagatatttctaaaatcttatctttaaaatatgaaataatttttaattggggtggcaacttaaattcaattaaaataactcatgtgtcacaagagtaaattttacataatctgtacgtagttctaatctgtatatagtcttggaggttatgatttgccacagattggttggatcacatacatttaaggatcatattattaaataatatatgcacagacatggagagaattagtttttactaaaacatttatcagaaattttaatactctgcataaccagtattagcattagaaattagccacttttaaaatgagaaaactgtgtcactcttcaatttttttataagccattgaggaaaacattaactcctggatttcagcttcacttttaacctgcagactaaatttctttctcaattatgtcagacacacccaagtcaatcccaacccccttgttaccttgggaagaccgtgctgaaaaaggagatcttccacctaaacagtgttctcttatttgaagcaaatctttttgagaatttgtttacttgatttctttccacaataaactgacagagaacgctactaatgatttttttttttttttgagacggagttttgttcttgttgcccaggctgcagtgcaatggcacaatcttggctcactgcaacctctgcctcacaggttcaagtggttctcctgcctcagcctcttgagtagctgggattacaggcatgcgccaccatgcccggctaattttgtatttttagtagagacggagttgcaccatgttggccaggctggtcttgaattcctgacctcaggtgatccacctgcttcggcctcccaaagtgctaggattacaggtgtgagccaccacgcctggctaattttgtatttttagtagagatggggtttctccaaaggctggtcttgaactcccgacctcaggtgatccgcccaccttggcctcccgaagtgctgggattacaggcgtgagccaccgtgcccggcctgatgtttttgaatgattatgaaaatgggtatacagcattaaaaccttagactgattttaaatatattaatttcttttaaactcaatataatgttaatattactgtagcacttactagcatttctgaaggttggtcttgagataagattgaaaatgacagttgttgattttctgaggtaatatacccaaataaaatatatgtatgtgtacatgaa

SEQ ID NO: 35035 - DNA, 12161 bp, Homo sapiens
  source 1..12161: mol_type = unassigned DNA
attttcttctgcacttctgtctggagaggtctgtagccactgagggccccggtcggggccgctttgcaggtccctagtcaggaccgagcaggggagtaggataggaatccccgccgcacctttgtacgagcctgaccccttccgtgggtttgttcctgggtcgccgtcaagctgcggtctctcctcccccgcccttcagccccgcggtctccaggggcggcgccctgggtctggaacgcggttgccaccgaggaggcggcggccctgcgtctggaacgccgttgccaccgaggaggcggcggccccgagcgcgcctggaagccccgggcaaccggccagggtcgggcacaggtggggtccgtcaggccgcccggggctcctctgtcccagctctgcggcccagggggtgacgtgatggcggcagcggtgctgacggaccgggcccaggtgtctgtgacctttgatgatgtggctgtgactttcaccaaggaggagtgggggcagctggacctagctcagcggaccctgtaccaggaggtgatgctggaaaactgtgggctcctggtgtctctggggtgtcctgttcccaaagctgagctgatctgccacctagagcatgggcaggagccatggaccaggaaggaagacctctcccaagacacctgtccaggcgacaaaggaaaacctaagaccacagaacctaccacttgtgagccagccttgtcagagggaatctcacttcagggacaagtgacacaaggaaactcagtggactcacagttggggcaagccgaggatcaggatgggctatcagaaatgcaggaaggacacttcagaccaggaatagatccccaggagaagtctcctgggaagatgagccctgaatgtgatggtttagggacagctgatggtgtgtgttcaaggattggacaggagcaagtctctccaggagatagagtccgtagccataactcatgtgagtcaggtaaagatcccatgattcaggaagaggaaaataactttaaatgcagtgaatgtggaaaagtatttaacaagaaacacctccttgctggacatgagaaaattcactctggagttaagccctatgaatgcacagaatgtgggaaaacctttattaagagcacacatctcctgcaacatcacatgatccacactggggagaggccctatgagtgcatggagtgtggaaaggccttcaaccgcaagtcataccttacccagcaccagcggattcacagtggagagaagccttacaagtgcaatgaatgcggaaaggccttcacccaccgctccaattttgtcttgcataacaggagacacactggagaaaaatcctttgtgtgcacagaatgtggccaagtctttcgacataggccaggctttctccggcactatgttgtccacagtggtgagaatccctatgagtgcttggagtgtggcaaggtcttcaaacacaggtcatatctcatgtggcaccagcagactcataccggggagaagccctatgagtgcagtgaatgtgggaaggtcttcttggagagtgcagccctgattcaccactatgtcatccacactggagagaagccctttgagtgcctcgagtgtgggaaggctttcaaccaccgatcctacctcaagaggcaccagcggattcacactggggagaagcccttcgtgtgcagtgaatgtggaaaggccttcacccactgctctacttttatcttgcataaaagggcccacactggagaaaagcctttcgagtgcaaagagtgtgggaaagcctttagcaatcggaaggacctcattcgccacttcagcatccacactggagagaagccctatgagtgcgtggagtgtggaaaggccttcacccgcatgtcgggcctcacgaggcacaagcggattcatagtggagagaagccctatgaatgtgttgagtgtgggaaatcgttttgctggagcacaaacctcattcgacatgccattatccacactggagagaagccctataaatgtagtgaatgtggaaaggccttcagtcgcagctcgtccctcactcagcatcaaaggatgcatactgggaaaaatcccatcagtgtaacagatgtgggaagaccttttacaagtggacaaacctcagttacccttcgagaacttcttttagggaaggactttttgaatgtaaccactgaggcaaatattttgccagaggaaacatcttcctctgcatctgatcaaccataccaaagagaaaccccacaagtgtcttcactgtgagaaaaccttctgttgctgaatattacttgtcatctgaagagtcatattagaaattcgttcagtctagagccttattctccatctgataatttatcctggagagagacccagtggttattgtgcacataggagaaccttcagctgcatctttctccttagtttacagtgcaattttatctcaggaattatttttaaaaggaggaggggacatagaaaaaatgaaatgcaagcacacatcttttcaggcttctctgccaagcctatggcgctttgtcatggatttcttagtgtatttgggggaagggaaatgtttcaaggtaaagaaccttgaccctttatgtgcttgtatgtacatttattgctatccagtgtcagaacagttagtttaggaaaagtatgcaaactttaatcgcacatcttctgtattccacaatagtacttactcttgagaagcataactttatgacaacttagggggcttgagccatgaaatactcacgtttaagtcagtaaggatacacatgttaacattcaggcttttgtcttgatgcccgtcttttggtttacgtcatcattgtagccatatggtaaatttttatttgttaaatttttaaaaattacttagctcaaaatgtcagtggtaaatttttaaattgagtaaagtgattcttctttgctcttatttaaaatcgacagcatttctagttcctttgacattccatataatttttaggattagtttgtacttatttacaaaacagtcttgttcagatttttacagaaattgagttaagtctgtggattaatctgttaagaattggtatctttactatgttgggtcttgtagttcatgagtgcaggagtaggcctcttaatttataatagttaagcattccttaaagtatttcattaatgttaaaaattttcagcgtatagatccctatgcatttttgttagaatttgcatcctagggtgcttttttgtttgtgtgtgtgtgtaatttgagtgattgtaaatggcattgatgtttgaactttgaattgcacacaatttttggtagtatacagaaatataatatttttggacattgttttgctaccctgcaaccttattgagttcacttattatttttagctatttctttcgacagaatccttggaattttctatatagaaatgtcatctgcaaatacagaccattttttatctttcatcttacctgtaatataccttttatttcctttttgtttgtcttattgcattgcacaagctgggacttccattatagcgttgaataggaatagtgagaaaggccatccttacctggttcctgatagtaggggggacaatgttcagttttttgtttttttgttttttgtttgagacagggtctcgctctgtcacccaggctggagtgcagtggcacgatcttgtctcaccatagccttaagttcctgggctcaagtgatccccccacctcagccctcaccaccccccagtagctggtactacaagcatgcaccaccagtcccagctaatttttgtattttttggtagagacagggtttcaccatggtgcccaggctggtcttgaactcctgggctcaagcaacctgcttgcctgggtctcccaaagtgctgggattacaggcgtgagccacagtgcacagcatgttcagtttttcatcatgaagtataatgtaagttttataaaacatatgtcctctataagggtaaaaaatttcctctgttcccagttttctgagactctgtgttgctatgaataagtgtggaattttgttcagtactttttctccaccagttgatgtcattatgctattttccttctacatcctattgatggaatgtattgctttgatcaagttttgaatattgagccagccttgcatccttagaataaaccatacttgtttgtagagtataattgtttttatatatcatttgacatcattccctttgtttgtattttgttgaggaaatattcctctaatttattggctaataatgtgtagttcttttttcttttgtttcttatgttctaaatgtcttatgtgtggttttgatgtctaggtgatcttgacctttcaacatgaattggaaggagttctcttctaatttttggaagactgtgtagaattggtgttatttgttcttgtcatgtttgatgacctctagtcaaccattgggccagagatttttcttctggaggcttttaaattacatatttattttattggataggtagaactattcgaagtatctatttcttgtgtaataaattttgatagtctgtcctgttgaaggaatatttcatctgtatttgtagcactcccttattcttttgatagcaggatctgcacttctttttatttttaatatttaaaatgtgcatactcattttatgattgagtcttcttagacatttatcagttttattgcgcatcatgctgaaagatgtaatttttgcttcatctctcacttcagagaactagcactttatattaatgatttgtctctattcttgatttctttgatttctgctctgatcggtattatattccacttgctttggttgtatttggctctttctaacttttcaaggtggggttttagattattgatttgagatttttttgcttttttaatgtaagcattacattgtataaatttacctcatatcactattggtttgatcccacaagttttaatgttttcattacattttaattctaatagtttttattttttgagacattctctcttagccatgaattatttaatagtatgcttaattttctggtgtttggcatatttgttactgatttctaatttgttccatgtttgatctgactgtttaaatgtgttaacatttttttatgacccaggatagggtctatcttgtttcgtatagctgcttgaaaagaatgggtgttctgctgttactgggtggagtttctataaatgtctctatgatcctgctcattgttattcaagtcagctatgtccttgctgattttctgtccagcatttctgtcagttgctgagaggggtgttgaagtcctgaacataggccgggtgcagtggctcacgcctgtaatcctagcactttgagaccactaaggcaggtggatcacctgaggccaggagttcgagaccagcctggccaacatggcaaaaccctgtctactaaaaatacaaaaattagccaggcatggtggcgtgtgcctgtaatcccagctgctggggggctgaggcaggaggatcagttgaacgtgggaggcagaggttgcagtgagctgagatctcaccactgcactccagcctgggcaacagagcgagactctgtctcaacaacaacaacaaaaagtcctgaacatgattgtggaagtgtgttgctctttcaagttctatcactttttgtttgcaaagttcaaagctgtattgtttggtacatatacatgtaggtttgccaagtctttgtggtgaattgactcttctgtcattatgtgatgtcatttttttgccttttaatagtcttgtcaatactttacctgatgttctcatagtgactcctgcatattttgattaatgtttgcatggttaatatttcttcattttattttaaagcttacctgtatcattacttatgaagtcagtttctttgaacagcatatactcaggccatgctttttttattcattctgcatatgtctctcttaattggtatgttgaaatgatttacattaaaataattattgatattttagggcttaagtgtgcccttaaatgatttttgtgttcttttttattgttcctctgttatttggggttgtttactagtcttcctataggttacttcaccttttttttttttaataatttgatttgatacatatgtagtgttttttagtatagatcctccttgacttatgatggggttatgtcacaataaacccattgcaagttgaaaatactatgtcaaatatgcatttaatacacctaccctgctgaacatcatagccgatcttgccttcagaatgctcagaaaatttacattagcctgcagttgggcaaaatcatctaacacaaggcctactttataataaagttactgcaaagaattttaaataaaaattcaagtgtggtttctactgaatgcatgtcgcattcgcaccattgtaaagtcaagtagtaagtcgaaccatcctaagtcagggactgtctgtatatatctgcattttttagtgattgttctactattacagtgtaaatatataacttatgacagtttaataagttatcagcaatttagcactttacttccattaggttcctttagcttacctactaatgtaactatcttaagtaatagtaattcctcttcaaaaattgagcgctatgttgcaagatgtaatttttcttttccttttttttgagaccaagtctcactctgtcacccacgctggagtgctgtgatgcgatctcggctctctgcaacctctgcctcccgggttcaagcaattaactgcctcagcttccctagtaatggattacaggcgcccgccaccacgcctggctaatttttgtatttttagtagagacggggtttcaccatcttggccaggttggtcttgaactcttgacctcatgatccacccgcctcggccccccaaagtgctggggttacaggtgtgagccactgcacccggccacaagatgtaatttttactttatctctcacacgtattttacaaaacgtcatgagaaacattgtctcttgaccttttttttttttttttttttttaaagagacagagtctcactctgtcacccaggctggagtgcagtggcacgatcttggctcactgcaacctccgcctcctgggttcaagcgattctcctgcctcagcctcctgagtagctgggattacaggtgtgcgccgccacacccagctaattttgtatttttagtagagacggggtttcaccatgttgctcaggctggtctcaaactcctgaccttgtgatccgccaaccttggcctgtcgacctctttacccattccattgttcattcttctttcttgaaatcccaaaccttctattaacatttcttttcagttatacactgaactttactgtagcctttcttctagagtaacaaatgttctttgttttccttcctctaaagatgtctttatgtttccttcattcccaaagaatatttttgtggaatataagattcagagttggcagttgttttcttttagacttcagagatgtatctctctgttctgtacattattgtttaatataagaaacctactagcattcaaataatcattccctattttacaatgcatcagttctgtcaagcttcattcaaagtgtttttcattgtctctagtgttcagaagtttggctgtgatgtgcgtggcatggaagtttttgggtgtattctatttggcgctccctggtgcttgcccagctttttgatctgtaggattatgccttttgcaaaatttggggaactttcaactattatttcttcaaatattttttcaccccccagtcttgtcttttttagggacttcaataacatgagtggcagatcttgttttacactcccatgggtccttcaggctctcatcttttttctttttccagtctattttctgtcttgttaatattgattaatttttattgaccttccatggtcctcactgattgttttctttgtcatacctaatctgttgagtttgtgcagtgagttttcattttggttttgtattttccagttgtttaatttccattgggtgggttcttttgtacaccttctgtttctttgcttattttttaacgccaaagaaagactctcagagaatagacaactatattccaaagtcatggttctctggtggtttgtcttgacatttgaatagaaatgttaaactatctgggggaatagaaagcccacagtcttctgagttgtgctacaccaatatttctatgaacagatcttacaactgagagtgatctgcagatttttcagagtcatgttctccatggaatgtttgtaaaattccctagctctctgcactgagctgagatcgtgccactgcactccagcctgggcaacagagcgagactccatctcaaaaaaaaaaaaaattctctagctctctatgccttgttgtatcctcaggaaggagtcacctctcttccaggatcactcttgccttttgttattggacacattttcctacctcctgcccagtcttttttaggctctctgtcatacttcctcgcctagtctttaacttgtctctgataaccagatttttcccccataatctgtatctgtattcaagtctctatcctcatccccaaatggatttcaccccgcttgtccatcagtctctgcccatttcttctgtctcccacagacatggtctgtgtagttgttctgcacactacccgtcctcgccccttctcatttccctcactccacggacagctacaggagggcttccatcatttgtcctcttacttccttgttagaactttgtgctgctgaccaccactctgaaccaaaacttctttcttggttcttgaaagttgctgtctttctcctccagagggtctgtgtcttccttccaactcttaaacatttttgtttcccagaatccatcattggccattgctttttcacttgccatgagctctgtgaatgagatggttcctgctgaagacatttactttcaatgatctacagaatttcccaaatctatgtctccagactggatgtttctcacgtctgtggcccactgggcatcttctgcactttctctgcatttgtaaacactgagcctgtatgcgtgtctatgtggccatggccctggccgtggggatgcacccataattataatgagagcaggtgaatgtcatgtggctatgtatgagacattgttgtgaatgttttacatgcatcagctctttcaacatttacagcatctgtgtgtggtaggtaatgttgtttccttcattttgcagagcagaatatagataggctcaggttaagaatttgcccaaggttacacagttatgaagtttggatttaggaatgggaggccacgtagactggcttcagaattcatgtctttaaccactttattgcttctcatgttggggggtttgttttctggtcactatttttactaaagttgattcaacaatgctataatctgttactctcattcgacaatacatcttgactgtttcttcaacttgaggaaggtaaaccaaagccactctttaatgggtgcaaatatctgttgtaactatgtagaagatacagtgtctgggtttgaggacaggggagtgggaaaactgagtagggaagcggtaagacatgcatctggctttaggagtgtttgaagtgcctaaagatcagggtgaatttcccaaatttgaatcttgttgcccaagccacattgcaaccacctctttttctcttacctcgtccccacatccaggcactgccccattctgttcattccacctttttttttagtagaccctccatatatgtgtgtgttttggtgaatggccacacacagcaaagttatttttattgcaattttgttgttgttgtttgagacacagagtctcatactctgccacccagactgaagtgcagtggtgcgatctcagttcactgcaacctccatccccccatgttcaagcaattctcctgcctcagcctcccaagtagctgggattacaggcatgggccaccatgcccggctaatttttgtattttttgtagacacggggtttcaccatgttggccaggctggtctcacactcctgacctcaggtgatccacccgcctcggcctcccgaagtgctggcattacaggcatgagccaccacacccagcctttattgcaatttttggttccctcacagaatgtttaccatgaagctgtgcgtataggtggtaccatgtatgacataccttgacctcaaagataatctacctgggctttttttgtttgtttgttttgagatggagtctcactctgtcacccatgctggtgtgcagtggcgtgatcttggctcacagcagcctctgcctcccgggttcaagcgattctcctgcctcagcctcctgagtagctgggactacaggtgcctgcgaccacacccagctaatttttgtatttttagtagtagtgggatttcaccatgttggccaggatggcctccacctcctgacttcatgatccacccgcctcggcctcccaaagtgctgggattacaggcgtgagccaccgcacctggcctacctgggcttttttggacagatgtacatgattttagaaattgttatgaatgactgtcttgggatcctcaagaacacccccaggtttgacgatttgctgagaagactcaggtctcagcattctgtcatactcaacagctatgatttactgcagcaaaaaaatacaaagcaaatagtaaagggaaaaagccaaaattcagagaaaaccaggcacaatcttctgagtcttgtttcagtgaagtcacaggatgtgccttatttaagttccatctggtacttatgacaacacatgctatatgtccactgggaagcttattagagactcagtgccagggtttttattgggcatgttttctagcacatcccacaattctggacttccagaaggttagcaggggttcagcttttcagctgaaaacgttatccccctttcagctggggggaaaaaaaggcaccgaaaaacagggcagtgagctactcctgttttgggtgggtggagcagtagtaagcctcccaaaatctaaggtcccacactccagcaagggtgaaccttgcaaactcaaaaggatagcagtctccaacctgctgttttatacagtgacttaagtggtactaaaatgctatataagtcaaatttacgtaacattaagcaaataattttttttcagcaaaaaaataatggtcatgactttgtggtgaaggcttatgtaatgattgtaataaattcaggtggctcacgcctgtgataccagcacttttgggaggctgaggcgggtggatcacttgaggtcaggagtttgagaccagcctagccaacatggtgaaatcccatctctacaaaaatgaaaaattagccgggcgtagtggtacatgcatttagtcctagctacttgggaggctgaggcaggaaaatcgcttgaacctgggaggcagaggttgcagtgagccgagatcatgccactgcactccagcctgggtgacagagtgagactgtgtctcaaaaaaaaaaaaaaaaaaaaaatgcctcagttttgttaagaggaaaaagcaaatcctaagttacagtggaacttatgaacaccctagcctagagatttaatttagtgatgaaaaggtacagagagagtctttcaagaaaggacctagtctgctcgcgttctctctctctctctctctatatatatatatgtatatgtgtgtgtacatatggaccacttcaagctacacacacacacacacatatacacgtgtatgaatatatatatatggctataagtggtgcgacttgcaggtactccctttgttcacctttgtaaagatgttattgccagttcagtgtgtatttctatagtatatatgtaaacaatttgtcatccttttgttgctgcttttgaaactagttcatggcttcagtgggggagagatttaaataatatgggtttataatttctgcattattaaatgcagataacttgtgattaaagagtatgttattgg

SEQ ID NO: 35036 - DNA, 2078 bp, Homo sapiens
  source 1..2078: mol_type = unassigned DNA
acgccgttgccaccgaggctcctctgtcccagctctgcggcccagggggtgacgtgatggcggcagcggtgctgacggaccgggcccaggtgtctgtgacctttgatgatgtggctgtgactttcaccaaggaggagtgggggcagctggacctagctcagcggaccctgtaccaggaggtgatgctggaaaactgtgggctcctggtgtctctggggtgtcctgttcccaaagctgagctgatctgccacctagagcatgggcaggagccatggaccaggaaggaagacctctcccaagacacctgtccaggcgacaaaggaaaacctaagaccacagaacctaccacttgtgagccagccttgtcagagggaatctcacttcagggacaagtgacacaaggaaactcagtggactcacagttggggcaagccgaggatcaggatgggctatcagaaatgcaggaaggacacttcagaccaggaatagatccccaggagaagtctcctgggaagatgagccctgaatgtgatggtttagggacagctgatggtgtgtgttcaaggattggacaggagcaagtctctccaggagatagagtccgtagccataactcatgtgagtcaggtaaagatcccatgattcaggaagaggaaaataactttaaatgcagtgaatgtggaaaagtatttaacaagaaacacctccttgctggacatgagaaaattcactctggagttaagccctatgaatgcacagaatgtgggaaaacctttattaagagcacacatctcctgcaacatcacatgatccacactggggagaggccctatgagtgcatggagtgtggaaaggccttcaaccgcaagtcataccttacccagcaccagcggattcacagtggagagaagccttacaagtgcaatgaatgcggaaaggccttcacccaccgctccaattttgtcttgcataacaggagacacactggagaaaaatcctttgtgtgcacagaatgtggccaagtctttcgacataggccaggctttctccggcactatgttgtccacagtggtgagaatccctatgagtgcttggagtgtggcaaggtcttcaaacacaggtcatatctcatgtggcaccagcagactcataccggggagaagccctatgagtgcagtgaatgtgggaaggtcttcttggagagtgcagccctgattcaccactatgtcatccacactggagagaagccctttgagtgcctcgagtgtgggaaggctttcaaccaccgatcctacctcaagaggcaccagcggattcacactggggagaagcccttcgtgtgcagtgaatgtggaaaggccttcacccactgctctacttttatcttgcataaaagggcccacactggagaaaagcctttcgagtgcaaagagtgtgggaaagcctttagcaatcggaaggacctcattcgccacttcagcatccacactggagagaagccctatgagtgcgtggagtgtggaaaggccttcacccgcatgtcgggcctcacgaggcacaagcggattcatagtggagagaagccctatgaatgtgttgagtgtgggaaatcgttttgctggagcacaaacctcattcgacatgccattatccacactggagagaagccctataaatgtagtgaatgtggaaaggccttcagtcgcagctcgtccctcactcagcatcaaaggatgcatactgggaaaaatcccatcagtgtaacagatgtgggaagaccttttacaagtggacaaacctcagttacccttcgagaacttcttttagggaaggactttttgaatgtaaccactgaggcaaatattttgccagaggaaacatcttcctctgcatctgatcaaccataccaaagagaaaccccacaagtgtcttcactgtgagaaaaccttctgttgctgaatattacttgtcatctgaagagtcatattagaaattcgttcagtctagagccttattctccatctgataatttatcctggagagagacccagtggttattgtgcacataggagaacctt

SEQ ID NO: 35037 - DNA, 3320 bp, Homo sapiens
  source 1..3320: mol_type = unassigned DNA
gctttctccgcgccgccaaacccgttttcttcctggtggcgtttgggcttaatacagctttggcgaggtcggatgacgggtgggagccagcggtggaaggggtggcgaaagtaccggtttgccccaggccgccgaggggcctccttagagagaccttgcctgctccgctcgcgtccgccggggccgcgcgggtcctcctggcgccgccaggttcaaaaagccactcgagttgtcactgcgacggccctgggccaggagccgtttcgggatctgtcaaacaacgagttttcgtcgttcgaatcaggttgactggtccttcatccccccaatctcccgtacctggcgagtccagctcgtcgcggataccgttaaccctggataaagagaatggaggttacctctgtccgtgtagattcctaagctgtcctggagtgatccttggagtaaaggaaaggtgctttgaagcacattcagccatcagccctgtgggatggcagccactgatttgtcctatggtctttacagggacccagtctgccttcaagaaaagacagaagtagaaagggtggtggctgactgtctgacaaattgttatcaggtatgcaggaagtatatccttctccaaaatatcatacttgcatcaccaggtagacacatttccttctacacagaattatcttcagagcttcttaaagcaaataaagcctccttcaaggactgagtccctagtcgaattcccggaaggagtggagcctgtcatattgtgtttatctagcatctgctcaagagtgtgctgcagtggagggaaatcagatgacctcccagtctggttgtgttacatacaatcatgtgtaagaagtgccattcaagccgtgtcactggaggggactgacagtgagattcagtgacttttgatgatctggctgtggacttcaccccagaagaatggactttactggacccaactcagagaaacctctacagagatgtgatgctggagaactacaagaatttggccacagtaggatatcagctcttcaaacccagtctgatctcttggctggaacaagaagagtctaggacagtgcagagaggtgatttccaagcttcagaatggaaagtgcaacttaaaaccaaagagttagcccttcagcaggatgttttgggggagccaacctccagtgggattcaaatgataggaagccacaacggaggggaggtcagtgatgttaagcaatgtggagatgtctccagtgaacactcatgccttaagacacatgtgagaactcaaaatagtgagaacacatttgagtgttatctgtatggagtagacttccttactctgcacaagaaaacctctactggagagcaacgttctgtatttagtcagtgtggaaaagccttcagcctgaacccagatgttgtttgccagagaacgtgcacaggagagaaagcttttgattgcagtgactctgggaaatccttcattaatcattcacaccttcagggacatttaagaactcacaatggagaaagtctccatgaatggaaggaatgtgggagaggctttattcactccacagaccttgctgtgcgtatacaaactcacaggtcagaaaaaccctacaaatgtaaggaatgtggaaaaggatttagatattctgcataccttaatattcacatgggaacccacactggagacaatccctatgagtgtaaggagtgtgggaaagccttcaccaggtcttgtcaacttactcagcacagaaaaactcacactggagagaaaccttataaatgtaaggattgtgggagagccttcactgtttcctcttgcttaagtcaacatatgaaaatccatgtgggtgagaagccttatgaatgcaaggaatgtgggatagccttcactagatcttctcaacttactgaacatttaaaaactcacactgcaaaggatccctttgaatgtaagatatgtggaaaatcctttagaaattcctcatgcctcagtgatcactttcgaattcacactggaataaaaccctataaatgtaaggattgtgggaaagccttcactcagaactcagaccttactaagcatgcacgaactcacagtggagagaggccctatgaatgtaaggaatgtggaaaggcctttgccagatcctctcgccttagtgaacatacaagaactcacactggagagaagccttttgaatgtgtcaaatgtgggaaagcctttgctatttcttcaaatcttagtggacatttgagaattcacactggagagaagccctttgagtgcctggaatgtggtaaagcatttacgcattcctccagtcttaataatcacatgcggacccacagcgccaaaaaaccattcacgtgtatggaatgtggcaaagcttttaagtttcccacgtgtgttaaccttcacatgcggatccacactggagaaaaaccctacaaatgtaaacagtgtgggaaatccttcagttactccaattcgtttcagttacatgaacgaactcacactggagagaaaccctatgaatgtaaggagtgcgggaaagccttcagttcttccagttcctttcgaaatcatgaaagaaggcatgcggatgagagactgtcagcataaggaatgtgggaaaacctaaaggtgtccctgttctctctgaagacatgaaaactcactggggagaaaccctatgaatgtaaaaatgtggaagcaactttgtatctcaggtcttaatgaacacatatgaattcacagtggagaagaccctgcatcagggaatgtggaaatgactttgctgaattctcaagccttaccaaacacatcagaaatctcactggagagaaactgtatgaatgtagagaatctgggaatacctttctgaatcccacaaaccttaatgtgtgtatgtgaactcacattggagagaaaccctgcaatttaaatggtatggtctggatgatgccccactccatatttgtaagccctaagtcctagttccttacactataactgtatttggacatagggttttcaaacaggtgagtaacttcaaatgaggttgttgggttcgatccctaatctgacatcactggtgtccctataagggaaactgaaggaaggatacacatggagaagactgtgtggatccaccagaagatggccatctacaagccaaggacagagacctggaacagatgctttcattatggcctccagaggaaaccaaccctgtctccaccttgatattgcacttccaggctccagaactgtgaggcaataaatttctcttggttaaatc

SEQ ID NO: 35038 - DNA, 3600 bp, Homo sapiens
  source 1..3600: mol_type = unassigned DNA
gctttctccgcgccgccaaacccgttttcttcctggtggcgtttgggcttaatacagctttggcgaggtcggatgacgggtgggagccagcggtggaaggggtggcgaaagtaccggtttgccccaggccgccgaggggcctccttagagagaccttgcctgctccgctcgcgtccgccggggccgcgcgggtcctcctggcgccgccaggttcaaaaagccactcgagttgtcactgcgacggccctgggccaggagccgtttcgggatctgtcaaacaacgagttttcgtcgttcgaatcaggttgactggtccttcatccccccaatctcccgtacctggcgagtccagctcgtcgcggcaatgctaagaaaagagtgatatgcaagctgagaccaaaaatatggtatgatttagccatactgaaggggaaggaaataagagctgggcaaagcattctgtgaattggctgactccacttctatggtgagagagaggagtgcatcaaagattactcccagtagagatggtttcagcatgttggccagtctggtctcagactcctgacctcaagtgatccacccacctcggcctcccaaaatgctgggattacaggtataagccactgtgcctggccaaagataccgttaaccctggataaagagaatggaggttacctctgtccgtgtagattcctaagctgtcctggagtgatccttggagtaaaggaaaggtgctttgaagcacattcagccatcagccctgtgggatggcagccactgatttgtcctatggtctttacagggacccagtctgccttcaagaaaagacagaagtagaaagggtggtggctgactgtctgacaaattgttatcaggtatgcaggaagtatatccttctccaaaatatcatacttgcatcaccaggtagacacatttccttctacacagaattatcttcagagcttcttaaagcaaataaagcctccttcaaggactgagtccctagtcgaattcccggaaggagtggagcctgtcatattgtgtttatctagcatctgctcaagagtgtgctgcagtggagggaaatcagatgacctcccagtctggttgtgttacatacaatcatgtgtaagaagtgccattcaagccgtgtcactggaggggactgacagtgagattcagtgacttttgatgatctggctgtggacttcaccccagaagaatggactttactggacccaactcagagaaacctctacagagatgtgatgctggagaactacaagaatttggccacagtaggatatcagctcttcaaacccagtctgatctcttggctggaacaagaagagtctaggacagtgcagagaggtgatttccaagcttcagaatggaaagtgcaacttaaaaccaaagagttagcccttcagcaggatgttttgggggagccaacctccagtgggattcaaatgataggaagccacaacggaggggaggtcagtgatgttaagcaatgtggagatgtctccagtgaacactcatgccttaagacacatgtgagaactcaaaatagtgagaacacatttgagtgttatctgtatggagtagacttccttactctgcacaagaaaacctctactggagagcaacgttctgtatttagtcagtgtggaaaagccttcagcctgaacccagatgttgtttgccagagaacgtgcacaggagagaaagcttttgattgcagtgactctgggaaatccttcattaatcattcacaccttcagggacatttaagaactcacaatggagaaagtctccatgaatggaaggaatgtgggagaggctttattcactccacagaccttgctgtgcgtatacaaactcacaggtcagaaaaaccctacaaatgtaaggaatgtggaaaaggatttagatattctgcataccttaatattcacatgggaacccacactggagacaatccctatgagtgtaaggagtgtgggaaagccttcaccaggtcttgtcaacttactcagcacagaaaaactcacactggagagaaaccttataaatgtaaggattgtgggagagccttcactgtttcctcttgcttaagtcaacatatgaaaatccatgtgggtgagaagccttatgaatgcaaggaatgtgggatagccttcactagatcttctcaacttactgaacatttaaaaactcacactgcaaaggatccctttgaatgtaagatatgtggaaaatcctttagaaattcctcatgcctcagtgatcactttcgaattcacactggaataaaaccctataaatgtaaggattgtgggaaagccttcactcagaactcagaccttactaagcatgcacgaactcacagtggagagaggccctatgaatgtaaggaatgtggaaaggcctttgccagatcctctcgccttagtgaacatacaagaactcacactggagagaagccttttgaatgtgtcaaatgtgggaaagcctttgctatttcttcaaatcttagtggacatttgagaattcacactggagagaagccctttgagtgcctggaatgtggtaaagcatttacgcattcctccagtcttaataatcacatgcggacccacagcgccaaaaaaccattcacgtgtatggaatgtggcaaagcttttaagtttcccacgtgtgttaaccttcacatgcggatccacactggagaaaaaccctacaaatgtaaacagtgtgggaaatccttcagttactccaattcgtttcagttacatgaacgaactcacactggagagaaaccctatgaatgtaaggagtgcgggaaagccttcagttcttccagttcctttcgaaatcatgaaagaaggcatgcggatgagagactgtcagcataaggaatgtgggaaaacctaaaggtgtccctgttctctctgaagacatgaaaactcactggggagaaaccctatgaatgtaaaaatgtggaagcaactttgtatctcaggtcttaatgaacacatatgaattcacagtggagaagaccctgcatcagggaatgtggaaatgactttgctgaattctcaagccttaccaaacacatcagaaatctcactggagagaaactgtatgaatgtagagaatctgggaatacctttctgaatcccacaaaccttaatgtgtgtatgtgaactcacattggagagaaaccctgcaatttaaatggtatggtctggatgatgccccactccatatttgtaagccctaagtcctagttccttacactataactgtatttggacatagggttttcaaacaggtgagtaacttcaaatgaggttgttgggttcgatccctaatctgacatcactggtgtccctataagggaaactgaaggaaggatacacatggagaagactgtgtggatccaccagaagatggccatctacaagccaaggacagagacctggaacagatgctttcattatggcctccagaggaaaccaaccctgtctccaccttgatattgcacttccaggctccagaactgtgaggcaataaatttctcttggttaaatc

SEQ ID NO: 35039 - DNA, 3293 bp, Homo sapiens
  source 1..3293: mol_type = unassigned DNA
ggagccgtttcgggatctgtcaaacaacgagttttcgtcgttcgaatcaggttgactggtccttcatccccccaatctcccgtacctggcgagtccagctcgtcgcggcctgtacctccccacagagcttcaaaacgggcttttaggaagaaggaatggaggctttgaagcaatgctaagaaaagagtgatatgcaagctgagaccaaaaatatggtatgatttagccatactgaaggggaaggaaataagagctgggcaaagcattctgtgaattggctgactccacttctatggtgagagagaggagtgcatcaaagattactcccaggtttgacagagataccgttaaccctggataaagagaatggaggttacctctgtccgtgtagattcctaagctgtcctggagtgatccttggagtaaaggaaaggtgctttgaagcacattcagccatcagccctgtgggatggcagccactgatttgtcctatggtctttacagggacccagtctgccttcaagaaaagacagaagtagaaagggtggtggctgactgtctgacaaattgttatcaggtatgcaggaagtatatccttctccaaaatatcatacttgcatcaccaggtagacacatttccttctacacagaattatcttcagagcttcttaaagcaaataaagcctccttcaaggactgagtccctagtcgaattcccggaaggagtggagcctgtcatattgtgtttatctagcatctgctcaagagtgtgctgcagtggagggaaatcagatgacctcccagtctggttgtgttacatacaatcatgtgtaagaagtgccattcaagccgtgtcactggaggggactgacagattcagtgacttttgatgatctggctgtggacttcaccccagaagaatggactttactggacccaactcagagaaacctctacagagatgtgatgctggagaactacaagaatttggccacagtaggatatcagctcttcaaacccagtctgatctcttggctggaacaagaagagtctaggacagtgcagagaggtgatttccaagcttcagaatggaaagtgcaacttaaaaccaaagagttagcccttcagcaggatgttttgggggagccaacctccagtgggattcaaatgataggaagccacaacggaggggaggtcagtgatgttaagcaatgtggagatgtctccagtgaacactcatgccttaagacacatgtgagaactcaaaatagtgagaacacatttgagtgttatctgtatggagtagacttccttactctgcacaagaaaacctctactggagagcaacgttctgtatttagtcagtgtggaaaagccttcagcctgaacccagatgttgtttgccagagaacgtgcacaggagagaaagcttttgattgcagtgactctgggaaatccttcattaatcattcacaccttcagggacatttaagaactcacaatggagaaagtctccatgaatggaaggaatgtgggagaggctttattcactccacagaccttgctgtgcgtatacaaactcacaggtcagaaaaaccctacaaatgtaaggaatgtggaaaaggatttagatattctgcataccttaatattcacatgggaacccacactggagacaatccctatgagtgtaaggagtgtgggaaagccttcaccaggtcttgtcaacttactcagcacagaaaaactcacactggagagaaaccttataaatgtaaggattgtgggagagccttcactgtttcctcttgcttaagtcaacatatgaaaatccatgtgggtgagaagccttatgaatgcaaggaatgtgggatagccttcactagatcttctcaacttactgaacatttaaaaactcacactgcaaaggatccctttgaatgtaagatatgtggaaaatcctttagaaattcctcatgcctcagtgatcactttcgaattcacactggaataaaaccctataaatgtaaggattgtgggaaagccttcactcagaactcagaccttactaagcatgcacgaactcacagtggagagaggccctatgaatgtaaggaatgtggaaaggcctttgccagatcctctcgccttagtgaacatacaagaactcacactggagagaagccttttgaatgtgtcaaatgtgggaaagcctttgctatttcttcaaatcttagtggacatttgagaattcacactggagagaagccctttgagtgcctggaatgtggtaaagcatttacgcattcctccagtcttaataatcacatgcggacccacagcgccaaaaaaccattcacgtgtatggaatgtggcaaagcttttaagtttcccacgtgtgttaaccttcacatgcggatccacactggagaaaaaccctacaaatgtaaacagtgtgggaaatccttcagttactccaattcgtttcagttacatgaacgaactcacactggagagaaaccctatgaatgtaaggagtgcgggaaagccttcagttcttccagttcctttcgaaatcatgaaagaaggcatgcggatgagagactgtcagcataaggaatgtgggaaaacctaaaggtgtccctgttctctctgaagacatgaaaactcactggggagaaaccctatgaatgtaaaaatgtggaagcaactttgtatctcaggtcttaatgaacacatatgaattcacagtggagaagaccctgcatcagggaatgtggaaatgactttgctgaattctcaagccttaccaaacacatcagaaatctcactggagagaaactgtatgaatgtagagaatctgggaatacctttctgaatcccacaaaccttaatgtgtgtatgtgaactcacattggagagaaaccctgcaatttaaatggtatggtctggatgatgccccactccatatttgtaagccctaagtcctagttccttacactataactgtatttggacatagggttttcaaacaggtgagtaacttcaaatgaggttgttgggttcgatccctaatctgacatcactggtgtccctataagggaaactgaaggaaggatacacatggagaagactgtgtggatccaccagaagatggccatctacaagccaaggacagagacctggaacagatgctttcattatggcctccagaggaaaccaaccctgtctccaccttgatattgcacttccaggctccagaactgtgaggcaataaatttctcttggttaaa

SEQ ID NO: 35040 - DNA, 3261 bp, Homo sapiens
  source 1..3261: mol_type = unassigned DNA
ggagagcaggggcggcttccgggatttggcgggggccttcgtcggctccagttagagctcgggtctcctcgccacagctccgagtctttcgttctgggaggcccaggcggcttcgcgttctgagaataaacagaacctctgttgctctgcgacttgcaggcactgggagattcgtagctaagacgccagggcatcccggaagctgggaaatgggactgttgacattcagggatgtggccgtagaattctctttggaggagtgggaacacctggaaccagctcagaagaatttgtatcaggatgtgatgttagaaaactacagaaacctggtctctctgggtcttgttgtctctaagccggacctgatcacctttttggaacaaaggaaagagccttggaatgtgaagagtgaggagacagtagccatccagccagatgtgttttcgcattataacaaggacctgttgacagagcactgcacagaagcttcattccaaaaagtgatatcgaggagacatgggagctgtgatcttgagaatttacatttaagaaaaaggtggaaaagggaggagtgtgaagggcacaatggatgttatgatgaaaagacttttaaatatgatcaatttgatgaatcctctgttgaaagtttgtttcaccagcaaatactttcttcttgtgccaaaagctataactttgatcaatataggaaggtctttactcattcatcattgcttaatcaacaagaggaaatagatatttggggaaaacatcacatatatgataaaacttcagtgttatttaggcaggtctctactctaaatagttaccgaaatgtttttattggagagaaaaattatcattgcaataattctgaaaaaaccttgaaccaaagctcaagccctaaaaatcatcaggaaaattattttctagaaaaacaatacaaatgtaaagaatttgaggaagtctttcttcagagtatgcatgggcaagagaaacaagaacagtcttacaaatgtaataaatgtgtagaagtttgtacccagtcattaaaacatattcaacatcagaccatccatatcagagaaaactcatatagctataacaaatatgataaagatcttagtcagtcatcaaatcttagaaagcagataatccataatgaagagaaaccatacaaatgtgaaaaatgtggggatagcttaaaccatagtttgcaccttactcaacatcagatcattcctaccgaagagaaaccctgtaaatggaaagaatgtggcaaggtctttaaccttaactgtagtttataccttactaaacagcagcaaattgatactggagaaaacctttacaaatgtaaagcatgtagcaaatcttttactcgttcctccaatcttattgtgcatcagagaattcacactggagagaaaccatacaaatgtaaagaatgtggcaaagcctttcgctgtagttcataccttactaaacataagcgaattcatactggagagaaaccttataaatgtaaagaatgtggaaaagcttttaaccgtagttcatgccttactcaacatcagacaactcatacaggagaaaaactttacaaatgtaaagtatgtagcaaatcttatgctcgttcttcaaatcttattatgcatcagagagttcatactggagagaagccttataaatgtaaagaatgtggcaaagtctttagccgtagttcttgccttactcaacatcggaaaattcatactggagaaaatctttacaaatgcaaagtatgtgctaaaccttttacttgtttctcaaatcttattgtgcatgagagaattcatactggagagaaaccctataaatgtaaagaatgtggcaaagcctttccttatagttcacaccttattcgacatcatcgaattcatactggagaaaaaccatacaaatgtaaagcatgtagcaaatcttttagtgactcctcaggtcttactgtgcatcggcgaactcatactggagagaaaccctatacatgtaaagaatgtggcaaagcctttagttatagttcagatgttattcagcatcggagaattcatactggccagagaccctacaaatgtgaagaatgtggcaaagccttcaactataggtcatacctcactacacatcagagaagtcatactggagagagaccctacaaatgtgaagaatgtggcaaagccttcaactctaggtcatacctcactacacatcggagaagacatactggagagagaccctacaaatgtgatgaatgtggtaaagccttcagctataggtcatacctcactacacatcggagaagtcatagtggagagagaccctacaaatgtgaagaatgtggcaaagcctttaactctaggtcatacctcattgcacatcagagaagtcatactagagaaaaactttaaaaatgtaaaacatggagcagattttttacttgttacccatgtcttattgtgcatcagataatttatatgggagtgaaaccctacaaatgttaagaatgtggcataacctttaactattttcaagccttacacaatagcagagaatataaactgaaaaaatccatacaaatattaaaaatgtggcaaattattttaaactgtgctcaacccttactcaagataatccatactagagaaacactatagatgtaaaaatgtgaaaagttttattcaaaatatcaaacttatgagtcacctaggggttcatagaaaaaggaagtttgcagatgcaataaatgtgaggaagtatttaataaaaaatgaagtctaaatgtgtcagagaatttatgtgagaaaggactaaagcacagacactttcagcctttatactaaataagagtattttttgtacagaataatctaaaggcaaaataattagataatttatttgcttatatgttttaaagtagcaagaacattgatgttttgacaggtatatttcatagatacttcatttgtatttacagtatttgaggtttttggaaagcaaatattatttatataattcagctttcaaatctgttgctgcttttccttaatccgtggtgttcatgtgaaaatatgtgttctgtttttttttctgcatcagaacaatgtgaggtcattctacgttaatatcattaatatcagcatttttcatggaagtttaatgccaaatgtaaaacacatgaaaatttttaaaaatatgctctttgtgtttgaataaagtagtaatgcatgt

SEQ ID NO: 35041 - DNA, 2024 bp, Homo sapiens
  source 1..2024: mol_type = unassigned DNA
gtcggctccagttagagctcgggtctcctcgccacagctccgagtctttcgttctgggaggcccaggcggcttcgcgttctgagaataaacagaacctctgttgctctgcgacttgcaggcactgggagattcgtagctaagacgccagggcatcccggaagctgggaaatgggactgttgacattcagggatgtggccgtagaattctctttggaggagtgggaacacctggaaccagctcagaagaatttgtatcaggatgtgatgttagaaaactacagaaacctggtctctctgggtcttgttgtctctaagccggacctgttgacagagcactgcacagaagcttcattccaaaaagtgatatcgaggagacatgggagctgtgatcttgagaatttacatttaagaaaaaggtggaaaagggaggagtgtgaagggcacaatggatgttatgatgaaaagacttttaaatatgatcaatttgatgaatcctctgttgaaagtttgtttcaccagcaaatactttcttcttgtgccaaaagctataactttgatcaatataggaaggtctttactcattcatcattgcttaatcaacaagaggaaatagatatttggggaaaacatcacatatatgataaaacttcagtgttatttaggcaggtctctactctaaatagttaccgaaatgtttttattggagagaaaaattatcattgcaataattctgaaaaaaccttgaaccaaagctcaagccctaaaaatcatcaggaaaattattttctagaaaaacaatacaaatgtaaagaatttgaggaagtctttcttcagagtatgcatgggcaagagaaacaagaacagtcttacaaatgtaataaatgtgtagaagtttgtacccagtcattaaaacatattcaacatcagaccatccatatcagagaaaactcatatagctataacaaatatgataaagatcttagtcagtcatcaaatcttagaaagcagataatccataatgaagagaaaccatacaaatgtgatgaatgtggtaaagccttcagctataggtcatacctcactacacatcggagaagtcatagtggagagagaccctacaaatgtgaagaatgtggcaaagcctttaactctaggtcatacctcattgcacatcagagaagtcatactagagaaaaactttaaaaatgtaaaacatggagcagattttttacttgttacccatgtcttattgtgcatcagataatttatatgggagtgaaaccctacaaatgttaagaatgtggcataacctttaactattttcaagccttacacaatagcagagaatataaactgaaaaaatccatacaaatattaaaaatgtggcaaattattttaaactgtgctcaacccttactcaagataatccatactagagaaacactatagatgtaaaaatgtgaaaagttttattcaaaatatcaaacttatgagtcacctaggggttcatagaaaaaggaagtttgcagatgcaataaatgtgaggaagtatttaataaaaaatgaagtctaaatgtgtcagagaatttatgtgagaaaggactaaagcacagacactttcagcctttatactaaataagagtattttttgtacagaataatctaaaggcaaaataattagataatttatttgcttatatgttttaaagtagcaagaacattgatgttttgacaggtatatttcatagatacttcatttgtatttacagtatttgaggtttttggaaagcaaatattatttatataattcagctttcaaatctgttgctgcttttccttaatccgtggtgttcatgtgaaaatatgtgttctgtttttttttctgcatcagaacaatgtgaggtcattctacgttaatatcattaatatcagcatttttcatggaagtttaatgccaaatgtaaaacacatgaaaatttttaaaaatatgctctttgtgtttgaataaagtagtaatgcatgt

SEQ ID NO: 35042 - DNA, 3543 bp, Homo sapiens
  source 1..3543: mol_type = unassigned DNA
atgacgcaattcctgtgcgacatacgtagcggccgccattgttccgcgccgatggcgagatccttgttcctcagatagcgttcatcgcccgtcgtggtcaacgggccagccgagtctggagtggttgcgaacccttctggctgcagatctggagcatccctcgcgtcctgtcacttccagcgaggcacacaaaactgaccgtagggatggccaccagggtccggacagcttctatttgggtcccacctctccaagaacgaaacagttcatgggataggatcagaaagctccaaggtcaggaatccatcttgggccaagggactcctggtctgcaacctctccctggaacacccaggcagaagcagaagagtcgcagaatagagaaagtcctagagtggctgtttatttcccaagagcagccaaaaatcaccaagtcctggggacctttgtcattcatggatgtgtttgtggattttacctgggaggagtggcagctgctagacccagcacagaagtgcctgtacaggagtgtgatgttggagaactatagcaacctggtgtccctagggtaccaacacaccaaacctgatatcatcttcaagttggaacaaggagaagagctgtgtatggtgcaggcccaagttccaaatcagacctgtccaaacacagtctggaaaattgatgatcttatggattggcatcaggaaaataaagacaagctgggaagtacggcaaaaagctttgaatgcactacatttggaaaactatgtcttcttagtacaaagtatctttcaagacaaaaacctcataaatgtggcacgcatggaaagagtttgaaatatatagatttcactagtgattatgctagaaataatcctaatgggtttcaggtacatggaaaatcattcttccattctaaacatgagcaaactgttattggaataaaatactgtgaaagtattgaatctggaaaaaccgtcaataagaaatcgcaacttatgtgccaacaaatgtatatgggcgaaaaaccctttggatgcagctgttgtgagaaagccttcagcagcaagtcataccttctagtgcatcagcaaactcatgccgaagagaaaccctatggttgtaatgaatgtgggaaagacttcagtagtaaatcatacctcattgtacatcagagaattcatacaggagagaaactacatgaatgcagtgaatgcaggaaaacattcagtttccattcacagcttgttatacatcagagaattcacacaggtgagaatccctatgagtgctgtgaatgtgggaaagtcttcagtaggaaagaccagcttgtttcacaccagaaaactcattcaggacagaaaccatatgtgtgtaatgaatgtgggaaagcttttggtttaaaatcacagctcattatacatgaaagaattcatacaggagagaaaccatatgaatgcaatgaatgtcagaaagcctttaatacaaagtcaaaccttatggtacatcagagaacccatacaggggagaaaccttatgtttgtagtgattgtggaaaagcctttacattcaagtcacagctcattgtacatcaggggattcacacaggagtaaagccctatgggtgtattcagtgtggtaaaggattcagtttgaaatcacagctcattgtacatcagagaagtcacacaggaatgaaaccttatgtatgcaatgaatgtggcaaagccttcaggagcaagtcataccttattatacatacaaggactcatacaggagaaaaactccatgaatgcaacaattgtgggaaagccttcagttttaaatcacagctcattatacatcagaggattcatacaggagagaacccctatgaatgccatgaatgtgggaaagccttcagtcggaaataccagcttatttcacaccagagaactcatgcaggagagaagccttatgaatgcaccgactgtggaaaggcttttggtttaaagtcacagcttattatacaccagagaactcatacaggggagaaaccatttgaatgtagtgagtgtcagaaagcctttaatacaaagtcaaacctgattgtacatcagagaactcatacaggagagaaaccctatagttgtaatgaatgtggaaaagcctttacgttcaaatcacagctcattgtacataaaggagtgcacactggagtaaaaccctatggatgcagtcaatgtgcaaaaacctttagtttgaagtcccagctcattgtacatcagagaagtcacacaggagtaaaaccatatggatgcagtgagtgtgggaaagccttcaggagcaagtcataccttattatacatatgagaactcatacaggagagaaaccacatgagtgcagggaatgcgggaaatcctttagtttcaattcacaactcattgtgcatcagagaattcacacaggagaaaatccctatgaatgcagtgaatgtgggaaagcctttaataggaaagaccagctcatttcacatcagcgaactcatgcaggggaaaagccttatgggtgcagtgaatgtgggaaagcttttagcagcaagtcatacctaattatacacatgagaactcattcaggtgaaaaaccatatgaatgtaatgaatgtgggaaagccttcatttggaaatcactactcattgtacatgagcgaactcatgcaggggtcaacccttataaatgcagtcaatgtgagaaatccttcagtgggaaattacgccttcttgtacaccagagaatgcacacaagagagaaaccatatgaatgcagtgagtgtggaaaagccttcattaggaattctcaactcattgtacatcaaagaactcattcaggagagaaaccctatgggtgcaatgaatgtgggaaaaccttctctcaaaaatcaattctcagtgcacatcagagaacacatacaggagagaagccttgtaagtgcactgaatgtgggaaagccttttgttggaagtcacagctcattatgcatcagagaactcatgtagatgacaaacattgataattttacgaaactctgaaaagtggattcacaagagatagaaacaatcatatataaagagaaactctgtaagtggaatcatcttgtcatcttccagaaaactcatactgaatagaaactttatgaatgcacagcatatggaaaggcatccacagaaagctgttctttacatgcaaaaagatagtagacaatacacaggaaaactgaatttagtaaccactctgaaaatttttagcagcaagtcatacctttttttaaaaagttcatacaggtgaggaaccatgttaaacgttgtaaagtcattttactaaaataagattcacaaagaggaaacttcatgaaccagatgaatatagaatagacttctttgaaattcatagtttacagaattttaatgagagaaattattgagctaatgaatggcagaattaacaaaattacaaacattttatgtatcggaagcatataccttggagggaccatgctataaggg

SEQ ID NO: 35043 - DNA, 1374 bp, Homo sapiens
  source 1..1374: mol_type = unassigned DNA
ggagattgacgcagagtgggcggcggtggtgctttgtctcctcagcactctgctgtcactcaaggaagtatcatcaagaacaaggagggcatggatgctaagtcactaactgcctggtcccggacactggtgaccttcaaggatgtatttgtggacttcaccagggaggagtggaagctgctggacactgctcagcagatcgtgtacagaaatgtgatgctggagaactataagaacctggtttccttgggttatcagcttactaagccagatgtgatcctccggttggagaagggagaagagccctggctggtggagagagaaattcaccaagagacccatcctgattcagagactgcatttgaaatcaaatcatcagtttccagcaggagcatttttaaagataagcaatcctgtgacattaaaatggaaggaatggcaaggaatgatctctggtatttgtcattagaagaagtctggaaatgtagagaccagttagacaagtatcaggaaaacccagagagacatttgagcatccctcgcgtcctgtcacttccagcgaggcacacaaaactgaccgtagggatggccaccagggtccggacagcttctatttgggtcccacctctccaagaacgaaacagttcatgggataggatcagaaagctccaaggtcaggaatccatcttgggccaagggactcctggtctgcaacctctccctggaacacccaggcagaagcagaagagtcgcagaatagagaaagtcctagagtggctgtttatttcccaagagcagccaaaaatcaccaagtcctggggacctttgtcattcatggatgtgtttgtggattttacctgggaggagtggcagctgctagacccagcacagaagtgcctgtacaggagtgtgatgttggagaactatagcaacctggtgtccctagggtaccaacacaccaaacctgatatcatcttcaagttggaacaaggagaagagctgtgtatggtgcaggcccaagttccaaatcagacctgtccaattttgaaggctggaaagtccaaagccaaggtgctggcaggtttggtgtctggtgagggcctgctctgtgcttccaagatgacgccttgttgctgcatcctctggagacacagtctggaaaattgatgatcttatggattggcatcaggaaaataaagacaagctgggaagtacggcaaaaagctttgaatgcactacatttggaaaactatgtcttcttagtacaaagtatctttcaagacaaaaacctcataaatgtggcacgcatggaaagagtttgaaatatatagatttcactagtgattatgctagaaataatcctaatgggtttca

SEQ ID NO: 35044 - DNA, 5629 bp, Homo sapiens
  source 1..5629: mol_type = unassigned DNA
ccggcgcgggagtaactcctcgcagaggcctctgggagttgtagtttttttgcctttgcctctccatgacgcaattcctgtgcgacatacgtagcggccgccattgttccgcgccgatggcgagatccttgttcctcagatagcgttcatcgcccgtcgtggtcaacgggccagccgagtctggagtggttgcgaacccttctggctgcagatctggaggtggaggcagtaccctggactctattctgctgccccttcagggtttggaggagccggagcatccctcgcgtcctgtcacttccagcgaggcacacaaaactgaccgtagggatggccaccagggtccggacagcttctatttgggtcccacctctccaagaacgaaacagttcatgggataggatcagaaagctccaaggtcaggaatccatcttgggccaagggactcctggtctgcaacctctccctggaacacccaggcagaagcagaagagtcgcagaatagagaaagtcctagagtggctgtttatttcccaagagcagccaaaaatcaccaagtcctggggtaccaacacaccaaacctgatatcatcttcaagttggaacaaggagaagagctgtgtatggtgcaggcccaagttccaaatcagacctgtccaaacacagtctggaaaattgatgatcttatggattggcatcaggaaaataaagacaagctgggaagtacggcaaaaagctttgaatgcactacatttggaaaactatgtcttcttagtacaaagtatctttcaagacaaaaacctcataaatgtggcacgcatggaaagagtttgaaatatatagatttcactagtgattatgctagaaataatcctaatgggtttcaggtacatggaaaatcattcttccattctaaacatgagcaaactgttattggaataaaatactgtgaaagtattgaatctggaaaaaccgtcaataagaaatcgcaacttatgtgccaacaaatgtatatgggcgaaaaaccctttggatgcagctgttgtgagaaagccttcagcagcaagtcataccttctagtgcatcagcaaactcatgccgaagagaaaccctatggttgtaatgaatgtgggaaagacttcagtagtaaatcatacctcattgtacatcagagaattcatacaggagagaaactacatgaatgcagtgaatgcaggaaaacattcagtttccattcacagcttgttatacatcagagaattcacacaggtgagaatccctatgagtgctgtgaatgtgggaaagtcttcagtaggaaagaccagcttgtttcacaccagaaaactcattcaggacagaaaccatatgtgtgtaatgaatgtgggaaagcttttggtttaaaatcacagctcattatacatgaaagaattcatacaggagagaaaccatatgaatgcaatgaatgtcagaaagcctttaatacaaagtcaaaccttatggtacatcagagaacccatacaggggagaaaccttatgtttgtagtgattgtggaaaagcctttacattcaagtcacagctcattgtacatcaggggattcacacaggagtaaagccctatgggtgtattcagtgtggtaaaggattcagtttgaaatcacagctcattgtacatcagagaagtcacacaggaatgaaaccttatgtatgcaatgaatgtggcaaagccttcaggagcaagtcataccttattatacatacaaggactcatacaggagaaaaactccatgaatgcaacaattgtgggaaagccttcagttttaaatcacagctcattatacatcagaggattcatacaggagagaacccctatgaatgccatgaatgtgggaaagccttcagtcggaaataccagcttatttcacaccagagaactcatgcaggagagaagccttatgaatgcaccgactgtggaaaggcttttggtttaaagtcacagcttattatacaccagagaactcatacaggggagaaaccatttgaatgtagtgagtgtcagaaagcctttaatacaaagtcaaacctgattgtacatcagagaactcatacaggagagaaaccctatagttgtaatgaatgtggaaaagcctttacgttcaaatcacagctcattgtacataaaggagtgcacactggagtaaaaccctatggatgcagtcaatgtgcaaaaacctttagtttgaagtcccagctcattgtacatcagagaagtcacacaggagtaaaaccatatggatgcagtgagtgtgggaaagccttcaggagcaagtcataccttattatacatatgagaactcatacaggagagaaaccacatgagtgcagggaatgcgggaaatcctttagtttcaattcacaactcattgtgcatcagagaattcacacaggagaaaatccctatgaatgcagtgaatgtgggaaagcctttaataggaaagaccagctcatttcacatcagcgaactcatgcaggggaaaagccttatgggtgcagtgaatgtgggaaagcttttagcagcaagtcatacctaattatacacatgagaactcattcaggtgaaaaaccatatgaatgtaatgaatgtgggaaagccttcatttggaaatcactactcattgtacatgagcgaactcatgcaggggtcaacccttataaatgcagtcaatgtgagaaatccttcagtgggaaattacgccttcttgtacaccagagaatgcacacaagagagaaaccatatgaatgcagtgagtgtggaaaagccttcattaggaattctcaactcattgtacatcaaagaactcattcaggagagaaaccctatgggtgcaatgaatgtgggaaaaccttctctcaaaaatcaattctcagtgcacatcagagaacacatacaggagagaagccttgtaagtgcactgaatgtgggaaagccttttgttggaagtcacagctcattatgcatcagagaactcatgtagatgacaaacattgataattttacgaaactctgaaaagtggattcacaagagatagaaacaatcatatataaagagaaactctgtaagtggaatcatcttgtcatcttccagaaaactcatactgaatagaaactttatgaatgcacagcatatggaaaggcatccacagaaagctgttctttacatgcaaaaagatagtagacaatacacaggaaaactgaatttagtaaccactctgaaaatttttagcagcaagtcatacctttttttaaaaagttcatacaggtgaggaaccatgttaaacgttgtaaagtcattttactaaaataagattcacaaagaggaaacttcatgaaccagatgaatatagaatagacttctttgaaattcatagtttacagaattttaatgagagaaattattgagctaatgaatggcagaattaacaaaattacaaacattttatgtatcggaagcatataccttggagggaccatgctataagggaaagtgtaaatctagaaatgagaaacccctagggaaaaaatatatataggagtgaacatcttatgaatgtaccaaataaaccacagctggactgttaacctcaccttagaagcttcattctaaaaaaaaaaaaaaaaaaaaaaaaaaaaaccaacctgttattatatcttaatattaattttgaagaattatttcttttaggaatcattttaagaaattttattccaggtgttccaaaatttcaggaaaaggtttgagaaaattctcaattataaataataagatacagattatttcattgtacaagtgaatctagtaaggaggttaagaataagaaataacatcccagagcctacagggatatttagatatcttcctatgtgtactacataatatgaattttgcagtttggcattttacttgcgaatgccatatgtgagacaaaaatcatcttccagagatttcagtatctctgatactgacaatatctctgatatgacaatatcatcttccagagatttctactctgcataccaacattgtttctttgtgtcttaccaaatgcaacttgttactagaatatgacttactaaaaatgcatttccacactgcaaacattttttagggctatcttctgccctttggaagcagtcttggcagcaacctctttagtaatcaatataaggcacacttcatgtgtttgtgtagcctggaatctattctaccttcacaggttagaacatcttgatttcctcttaacgaaacattccctaacggtgtatgtagtcatgagggaaccaccattcaagatgccctgctcaggacttggcatgagcactatggtcagctgaggctcagaactgtacattgttaatgggtttttcaagttcagaaaagcaacatgagcttttgttctgtggtagcatgttgatgtaataagtagctatttcaatagaggttcccagaacagcttttgttactgtcattttcttaactttgttcacttgtcttttattttgagctattgggtgtgcttttaatacattccttgtttgattgcattagccattgtgtatcttttgcatacagcttactaaatcagatggcttcagaaatgggtggtagaggagtaggcagaaacttgcaaggatatgtggatatttggaaatggttgtttcccaagacaggatggaagtcttttaagcaagaaacttggcccatgctatgaagtcatgaaatgaattgttggcatcatgtgctcactgaggctttggggaaatggataagttgtcattgaaaaattttaaacagaattctggagtggtcaagaggggaatgcttttgatacccatgtataacatggagaataatgatcttaaaacttcaatttaagattatgtgtcagtgatactacttagttacatgtagctatagagtcacagtggtgaaaaactctgccagttgcttactcacaaagttagttttcttcactacctcatcaggtttgttatgtgagtgggcattaatctgggaagagtgggaccctgccagttagattagggctatcttggaggaatatgcggattcaatactgcaaatatttctgaaacaccttctgctttgtactctattagatacccaaagaaattttcatccttgaagcggaggaatttaatgatacctgaatgcctaactgttgtattctgcttatacagaatccaatctcaagatacttggggtgaagaatgatgattcacagaagggaagggacatcttacataaacaaataatcgcagatacttgctaaagtgtatcccccaatctgggaaatactgtaaaggtgtatattattattgatgtaccaaagaagacagaataaattcataagagaaagtttatattcagtttactactacctagggttagattttagtttgttgttttttcagatgcaaatctacatgcagccttgcctggtagaagccagaagtgttgacagtattgaggacagcactcacatactgtgggaaagaataatacttgattaggacttattatttaatgaaatgaaaattttacaaaacagaaa

SEQ ID NO: 35045 - DNA, 3236 bp, Homo sapiens
  source 1..3236: mol_type = unassigned DNA
gttccgcgccgatggcgagatccttgttcctcagatagcgttcatcgcccgtcgtggtcaacgggccagccgagtctggagtggttgcgaacccttctggctgcagatctggaggtggaggcagtaccctggactctattctgctgccccttcagggtttggaggagccggagcatccctcgcgtcctgtcacttccagcgaggcacacaaaactgaccgtagggatggccaccagggtccggacagcttctatttggacacagtctggaaaattgatgatcttatggattggcatcaggaaaataaagacaagctgggaagtacggcaaaaagctttgaatgcactacatttggaaaactatgtcttcttagtacaaagtatctttcaagacaaaaacctcataaatgtggcacgcatggaaagagtttgaaatatatagatttcactagtgattatgctagaaataatcctaatgggtttcaggtacatggaaaatcattcttccattctaaacatgagcaaactgttattggaataaaatactgtgaaagtattgaatctggaaaaaccgtcaataagaaatcgcaacttatgtgccaacaaatgtatatgggcgaaaaaccctttggatgcagctgttgtgagaaagccttcagcagcaagtcataccttctagtgcatcagcaaactcatgccgaagagaaaccctatggttgtaatgaatgtgggaaagacttcagtagtaaatcatacctcattgtacatcagagaattcatacaggagagaaactacatgaatgcagtgaatgcaggaaaacattcagtttccattcacagcttgttatacatcagagaattcacacaggtgagaatccctatgagtgctgtgaatgtgggaaagtcttcagtaggaaagaccagcttgtttcacaccagaaaactcattcaggacagaaaccatatgtgtgtaatgaatgtgggaaagcttttggtttaaaatcacagctcattatacatgaaagaattcatacaggagagaaaccatatgaatgcaatgaatgtcagaaagcctttaatacaaagtcaaaccttatggtacatcagagaacccatacaggggagaaaccttatgtttgtagtgattgtggaaaagcctttacattcaagtcacagctcattgtacatcaggggattcacacaggagtaaagccctatgggtgtattcagtgtggtaaaggattcagtttgaaatcacagctcattgtacatcagagaagtcacacaggaatgaaaccttatgtatgcaatgaatgtggcaaagccttcaggagcaagtcataccttattatacatacaaggactcatacaggagaaaaactccatgaatgcaacaattgtgggaaagccttcagttttaaatcacagctcattatacatcagaggattcatacaggagagaacccctatgaatgccatgaatgtgggaaagccttcagtcggaaataccagcttatttcacaccagagaactcatgcaggagagaagccttatgaatgcaccgactgtggaaaggcttttggtttaaagtcacagcttattatacaccagagaactcatacaggggagaaaccatttgaatgtagtgagtgtcagaaagcctttaatacaaagtcaaacctgattgtacatcagagaactcatacaggagagaaaccctatagttgtaatgaatgtggaaaagcctttacgttcaaatcacagctcattgtacataaaggagtgcacactggagtaaaaccctatggatgcagtcaatgtgcaaaaacctttagtttgaagtcccagctcattgtacatcagagaagtcacacaggagtaaaaccatatggatgcagtgagtgtgggaaagccttcaggagcaagtcataccttattatacatatgagaactcatacaggagagaaaccacatgagtgcagggaatgcgggaaatcctttagtttcaattcacaactcattgtgcatcagagaattcacacaggagaaaatccctatgaatgcagtgaatgtgggaaagcctttaataggaaagaccagctcatttcacatcagcgaactcatgcaggggaaaagccttatgggtgcagtgaatgtgggaaagcttttagcagcaagtcatacctaattatacacatgagaactcattcaggtgaaaaaccatatgaatgtaatgaatgtgggaaagccttcatttggaaatcactactcattgtacatgagcgaactcatgcaggggtcaacccttataaatgcagtcaatgtgagaaatccttcagtgggaaattacgccttcttgtacaccagagaatgcacacaagagagaaaccatatgaatgcagtgagtgtggaaaagccttcattaggaattctcaactcattgtacatcaaagaactcattcaggagagaaaccctatgggtgcaatgaatgtgggaaaaccttctctcaaaaatcaattctcagtgcacatcagagaacacatacaggagagaagccttgtaagtgcactgaatgtgggaaagccttttgttggaagtcacagctcattatgcatcagagaactcatgtagatgacaaacattgataattttacgaaactctgaaaagtggattcacaagagatagaaacaatcatatataaagagaaactctgtaagtggaatcatcttgtcatcttccagaaaactcatactgaatagaaactttatgaatgcacagcatatggaaaggcatccacagaaagctgttctttacatgcaaaaagatagtagacaatacacaggaaaactgaatttagtaaccactctgaaaatttttagcagcaagtcatacctttttttaaaaagttcatacaggtgaggaaccatgttaaacgttgtaaagtcattttactaaaataagattcacaaagaggaaacttcatgaaccagatgaatatagaatagacttctttgaaattcatagtttacagaattttaatgagagaaattattgagctaatgaatggcagaattaacaaaattacaaacattttatgtatcggaagcatataccttggagggaccatgctataagggaaagtgtaaatctagaaatgagaaacccctagggaaaaaatatatataggagtgaacatcttatgaatgtaccaaataaaccacagctggactgttaa

SEQ ID NO: 35046 - DNA, 4721 bp, Homo sapiens
  source 1..4721: mol_type = unassigned DNA
ccggcgcgggagtaactcctcgcagaggcctctgggagttgtagtttttttgcctttgcctctccatgacgcaattcctgtgcgacatacgtagcggccgccattgttccgcgccgatggcgagatccttgttcctcagatagcgttcatcgcccgtcgtggtcaacgggccagccgagtctggagtggttgcgaacccttctggctgcagatctggaggtggaggcagtaccctggactctattctgctgccccttcagggtttggaggagccggagcatccctcgcgtcctgtcacttccagcgaggcacacaaaactgaccgtagggatggccaccagggtccggacagcttctatttgggtcccacctctccaagaacgaaacagttcatgggataggatcagaaagctccaaggtcaggaatccatcttgggccaagggactcctggtctgcaacctctccctggaacacccaggcagaagcagaagagtcgcagaatagagaaagtcctagagtggctgtttatttcccaagagcagccaaaaatcaccaagtcctggggacctttgtcattcatggatgtgtttgtggattttacctgggaggagtggcagctgctagacccagcacagaagtgcctgtacaggagtgtgatgttggagaactatagcaacctggtgtccctagggtaccaacacaccaaacctgatatcatcttcaagttggaacaaggagaagagctgtgtatggtgcaggcccaagttccaaatcagacctgtccaaacacagtctggaaaattgatgatcttatggattggcatcaggaaaataaagacaagctgggaagtacggcaaaaagctttgaatgcactacatttggaaaactatgtcttcttagtacaaagtatctttcaagacaaaaacctcataaatgtggcacgcatggaaagagtttgaaatatatagatttcactagtgattatgctagaaataatcctaatgggtttcaggtacatggaaaatcattcttccattctaaacatgagcaaactgttattggaataaaatactgtgaaagtattgaatctggaaaaaccgtcaataagaaatcgcaacttatgtgccaacaaatgtatatgggcgaaaaaccctttggatgcagctgttgtgagaaagccttcagcagcaagtcataccttctagtgcatcagcaaactcatgccgaagagaaaccctatggttgtaatgaatgtgggaaagacttcagtagtaaatcatacctcattgtacatcagagaattcatacaggagagaaactacatgaatgcagtgaatgcaggaaaacattcagtttccattcacagcttgttatacatcagagaattcacacaggtgagaatccctatgagtgctgtgaatgtgggaaagtcttcagtaggaaagaccagcttgtttcacaccagaaaactcattcaggacagaaaccatatgtgtgtaatgaatgtgggaaagcttttggtttaaaatcacagctcattatacatgaaagaattcatacaggagagaaaccatatgaatgcaatgaatgtcagaaagcctttaatacaaagtcaaaccttatggtacatcagagaacccatacaggggagaaaccttatgtttgtagtgattgtggaaaagcctttacattcaagtcacagctcattgtacatcaggggattcacacaggagtaaagccctatgggtgtattcagtgtggtaaaggattcagtttgaaatcacagctcattgtacatcagagaagtcacacaggaatgaaaccttatgtatgcaatgaatgtggcaaagccttcaggagcaagtcataccttattatacatacaaggactcatacaggagaaaaactccatgaatgcaacaattgtgggaaagccttcagttttaaatcacagctcattatacatcagaggattcatacaggagagaacccctatgaatgccatgaatgtgggaaagccttcagtcggaaataccagcttatttcacaccagagaactcatgcaggagagaagccttatgaatgcaccgactgtggaaaggcttttggtttaaagtcacagcttattatacaccagagaactcatacaggggagaaaccatttgaatgtagtgagtgtcagaaagcctttaatacaaagtcaaacctgattgtacatcagagaactcatacaggagagaaaccctatagttgtaatgaatgtggaaaagcctttacgttcaaatcacagctcattgtacataaaggagtgcacactggagtaaaaccctatggatgcagtcaatgtgcaaaaacctttagtttgaagtcccagctcattgtacatcagagaagtcacacaggagtaaaaccatatggatgcagtgagtgtgggaaagccttcaggagcaagtcataccttattatacatatgagaactcatacaggagagaaaccacatgagtgcagggaatgcgggaaatcctttagtttcaattcacaactcattgtgcatcagagaattcacacaggagaaaatccctatgaatgcagtgaatgtgggaaagcctttaataggaaagaccagctcatttcacatcagcgaactcatgcaggggaaaagccttatgggtgcagtgaatgtgggaaagcttttagcagcaagtcatacctaattatacacatgagaactcattcaggtgaaaaaccatatgaatgtaatgaatgtgggaaagccttcatttggaaatcactactcattgtacatgagcgaactcatgcaggggtcaacccttataaatgcagtcaatgtgagaaatccttcagtgggaaattacgccttcttgtacaccagagaatgcacacaagagagaaaccatatgaatgcagtgagtgtggaaaagccttcattaggaattctcaactcattgtacatcaaagaactcattcaggagagaaaccctatgggtgcaatgaatgtgggaaaaccttctctcaaaaatcaattctcagtgcacatcagagaacacatacaggagagaagccttgtaagtgcactgaatgtgggaaagccttttgttggaagtcacagctcattatgcatcagagaactcatgtagatgacaaacattgataattttacgaaactctgaaaagtggattcacaagagatagaaacaatcatatataaagagaaactctgtaagtggaatcatcttgtcatcttccagaaaactcatactgaatagaaactttatgaatgcacagcatatggaaaggcatccacagaaagctgttctttacatgcaaaaagatagtagacaatacacaggaaaactgaatttagtaaccactctgaaaatttttagcagcaagtcatacctttttttaaaaagttcatacaggtgaggaaccatgttaaacgttgtaaagtcattttactaaaataagattcacaaagaggaaacttcatgaaccagatgaatatagaatagacttctttgaaattcatagtttacagaattttaatgagagaaattattgagctaatgaatggcagaattaacaaaattacaaacattttatgtatcggaagcatataccttggagggaccatgctataagggaaagtgtaaatctagaaatgagaaacccctagggaaaaaatatatataggagtgaacatcttatgaatgtaccaaataaaccacagctggactgttaacctcaccttagaagcttcattctaaaaaaaaaaaaaaaaaaaaaaaaaaaaaccaacctgttattatatcttaatattaattttgaagaattatttcttttaggaatcattttaagaaattttattccaggtgttccaaaatttcaggaaaaggtttgagaaaattctcaattataaataataagatacagattatttcattgtacaagtgaatctagtaaggaggttaagaataagaaataacatcccagagcctacagggatatttagatatcttcctatgtgtactacataatatgaattttgcagtttggcattttacttgcgaatgccatatgtgagacaaaaatcatcttccagagatttcagtatctctgatactgacaatatctctgatatgacaatatcatcttccagagatttctactctgcataccaacattgtttctttgtgtcttaccaaatgcaacttgttactagaatatgacttactaaaaatgcatttccacactgcaaacattttttagggctatcttctgccctttggaagcagtcttggcagcaacctctttagtaatcaatataaggcacacttcatgtgtttgtgtagcctggaatctattctaccttcacaggttagaacatcttgatttcctcttaacgaaacattccctaacggtgtatgtagtcatgagggaaccaccattcaagatgccctgctcaggacttggcatgagcactatggtcagctgaggctcagaactgtacattgttaatgggtttttcaagttcagaaaagcaacatgagcttttgttctgtggtagcatgttgatgtaataagtagctatttcaatagaggttcccagaacagcttttgttactgtcattttcttaactttgttcacttgtcttttattttgagctattgggtgtgcttttaatacattccttgttt

SEQ ID NO: 35047 - DNA, 2193 bp, Homo sapiens
  source 1..2193: mol_type = unassigned DNA
atggattggcatcaggaaaataaagacaagctgggaagtacggcaaaaagctttgaatgcactacatttggaaaactatgtcttcttagtacaaagtatctttcaagacaaaaacctcataaatgtggcacgcatggaaagagtttgaaatatatagatttcactagtgattatgctagaaataatcctaatgggtttcaggtacatggaaaatcattcttccattctaaacatgagcaaactgttattggaataaaatactgtgaaagtattgaatctggaaaaaccgtcaataagaaatcgcaacttatgtgccaacaaatgtatatgggcgaaaaaccctttggatgcagctgttgtgagaaagccttcagcagcaagtcataccttctagtgcatcagcaaactcatgccgaagagaaaccctatggttgtaatgaatgtgggaaagacttcagtagtaaatcatacctcattgtacatcagagaattcatacaggagagaaactacatgaatgcagtgaatgcaggaaaacattcagtttccattcacagcttgttatacatcagagaattcacacaggtgagaatccctatgagtgctgtgaatgtgggaaagtcttcagtaggaaagaccagcttgtttcacaccagaaaactcattcaggacagaaaccatatgtgtgtaatgaatgtgggaaagcttttggtttaaaatcacagctcattatacatgaaagaattcatacaggagagaaaccatatgaatgcaatgaatgtcagaaagcctttaatacaaagtcaaaccttatggtacatcagagaacccatacaggggagaaaccttatgtttgtagtgattgtggaaaagcctttacattcaagtcacagctcattgtacatcaggggattcacacaggagtaaagccctatgggtgtattcagtgtggtaaaggattcagtttgaaatcacagctcattgtacatcagagaagtcacacaggaatgaaaccttatgtatgcaatgaatgtggcaaagccttcaggagcaagtcataccttattatacatacaaggactcatacaggagaaaaactccatgaatgcaacaattgtgggaaagccttcagttttaaatcacagctcattatacatcagaggattcatacaggagagaacccctatgaatgccatgaatgtgggaaagccttcagtcggaaataccagcttatttcacaccagagaactcatgcaggagagaagccttatgaatgcaccgactgtggaaaggcttttggtttaaagtcacagcttattatacaccagagaactcatacaggggagaaaccatttgaatgtagtgagtgtcagaaagcctttaatacaaagtcaaacctgattgtacatcagagaactcatacaggagagaaaccctatagttgtaatgaatgtggaaaagcctttacgttcaaatcacagctcattgtacataaaggagtgcacactggagtaaaaccctatggatgcagtcaatgtgcaaaaacctttagtttgaagtcccagctcattgtacatcagagaagtcacacaggagtaaaaccatatggatgcagtgagtgtgggaaagccttcaggagcaagtcataccttattatacatatgagaactcatacaggagagaaaccacatgagtgcagggaatgcgggaaatcctttagtttcaattcacaactcattgtgcatcagagaattcacacaggagaaaatccctatgaatgcagtgaatgtgggaaagcctttaataggaaagaccagctcatttcacatcagcgaactcatgcaggggaaaagccttatgggtgcagtgaatgtgggaaagcttttagcagcaagtcatacctaattatacacatgagaactcattcaggtgaaaaaccatatgaatgtaatgaatgtgggaaagccttcatttggaaatcactactcattgtacatgagcgaactcatgcaggggtcaacccttataaatgcagtcaatgtgagaaatccttcagtgggaaattacgccttcttgtacaccagagaatgcacacaagagagaaaccatatgaatgcactgaatgtgggaaagccttttgttggaagtcacagctcattatgcatcagagaactcatgtagatgacaaacattga

SEQ ID NO: 35048 - DNA, 5428 bp, Homo sapiens
  source 1..5428: mol_type = unassigned DNA
ccggcgcgggagtaactcctcgcagaggcctctgggagttgtagtttttttgcctttgcctctccatgacgcaattcctgtgcgacatacgtagcggccgccattgttccgcgccgatggcgagatccttgttcctcagatagcgttcatcgcccgtcgtggtcaacgggccagccgagtctggagtggttgcgaacccttctggctgcagatctggaggtggaggcagtaccctggactctattctgctgccccttcagggtttggaggagccggagcatccctcgcgtcctgtcacttccagcgaggcacacaaaactgaccgtagggatggccaccagggtccggacagcttctatttggggtaccaacacaccaaacctgatatcatcttcaagttggaacaaggagaagagctgtgtatggtgcaggcccaagttccaaatcagacctgtccaaacacagtctggaaaattgatgatcttatggattggcatcaggaaaataaagacaagctgggaagtacggcaaaaagctttgaatgcactacatttggaaaactatgtcttcttagtacaaagtatctttcaagacaaaaacctcataaatgtggcacgcatggaaagagtttgaaatatatagatttcactagtgattatgctagaaataatcctaatgggtttcaggtacatggaaaatcattcttccattctaaacatgagcaaactgttattggaataaaatactgtgaaagtattgaatctggaaaaaccgtcaataagaaatcgcaacttatgtgccaacaaatgtatatgggcgaaaaaccctttggatgcagctgttgtgagaaagccttcagcagcaagtcataccttctagtgcatcagcaaactcatgccgaagagaaaccctatggttgtaatgaatgtgggaaagacttcagtagtaaatcatacctcattgtacatcagagaattcatacaggagagaaactacatgaatgcagtgaatgcaggaaaacattcagtttccattcacagcttgttatacatcagagaattcacacaggtgagaatccctatgagtgctgtgaatgtgggaaagtcttcagtaggaaagaccagcttgtttcacaccagaaaactcattcaggacagaaaccatatgtgtgtaatgaatgtgggaaagcttttggtttaaaatcacagctcattatacatgaaagaattcatacaggagagaaaccatatgaatgcaatgaatgtcagaaagcctttaatacaaagtcaaaccttatggtacatcagagaacccatacaggggagaaaccttatgtttgtagtgattgtggaaaagcctttacattcaagtcacagctcattgtacatcaggggattcacacaggagtaaagccctatgggtgtattcagtgtggtaaaggattcagtttgaaatcacagctcattgtacatcagagaagtcacacaggaatgaaaccttatgtatgcaatgaatgtggcaaagccttcaggagcaagtcataccttattatacatacaaggactcatacaggagaaaaactccatgaatgcaacaattgtgggaaagccttcagttttaaatcacagctcattatacatcagaggattcatacaggagagaacccctatgaatgccatgaatgtgggaaagccttcagtcggaaataccagcttatttcacaccagagaactcatgcaggagagaagccttatgaatgcaccgactgtggaaaggcttttggtttaaagtcacagcttattatacaccagagaactcatacaggggagaaaccatttgaatgtagtgagtgtcagaaagcctttaatacaaagtcaaacctgattgtacatcagagaactcatacaggagagaaaccctatagttgtaatgaatgtggaaaagcctttacgttcaaatcacagctcattgtacataaaggagtgcacactggagtaaaaccctatggatgcagtcaatgtgcaaaaacctttagtttgaagtcccagctcattgtacatcagagaagtcacacaggagtaaaaccatatggatgcagtgagtgtgggaaagccttcaggagcaagtcataccttattatacatatgagaactcatacaggagagaaaccacatgagtgcagggaatgcgggaaatcctttagtttcaattcacaactcattgtgcatcagagaattcacacaggagaaaatccctatgaatgcagtgaatgtgggaaagcctttaataggaaagaccagctcatttcacatcagcgaactcatgcaggggaaaagccttatgggtgcagtgaatgtgggaaagcttttagcagcaagtcatacctaattatacacatgagaactcattcaggtgaaaaaccatatgaatgtaatgaatgtgggaaagccttcatttggaaatcactactcattgtacatgagcgaactcatgcaggggtcaacccttataaatgcagtcaatgtgagaaatccttcagtgggaaattacgccttcttgtacaccagagaatgcacacaagagagaaaccatatgaatgcagtgagtgtggaaaagccttcattaggaattctcaactcattgtacatcaaagaactcattcaggagagaaaccctatgggtgcaatgaatgtgggaaaaccttctctcaaaaatcaattctcagtgcacatcagagaacacatacaggagagaagccttgtaagtgcactgaatgtgggaaagccttttgttggaagtcacagctcattatgcatcagagaactcatgtagatgacaaacattgataattttacgaaactctgaaaagtggattcacaagagatagaaacaatcatatataaagagaaactctgtaagtggaatcatcttgtcatcttccagaaaactcatactgaatagaaactttatgaatgcacagcatatggaaaggcatccacagaaagctgttctttacatgcaaaaagatagtagacaatacacaggaaaactgaatttagtaaccactctgaaaatttttagcagcaagtcatacctttttttaaaaagttcatacaggtgaggaaccatgttaaacgttgtaaagtcattttactaaaataagattcacaaagaggaaacttcatgaaccagatgaatatagaatagacttctttgaaattcatagtttacagaattttaatgagagaaattattgagctaatgaatggcagaattaacaaaattacaaacattttatgtatcggaagcatataccttggagggaccatgctataagggaaagtgtaaatctagaaatgagaaacccctagggaaaaaatatatataggagtgaacatcttatgaatgtaccaaataaaccacagctggactgttaacctcaccttagaagcttcattctaaaaaaaaaaaaaaaaaaaaaaaaaaaaaccaacctgttattatatcttaatattaattttgaagaattatttcttttaggaatcattttaagaaattttattccaggtgttccaaaatttcaggaaaaggtttgagaaaattctcaattataaataataagatacagattatttcattgtacaagtgaatctagtaaggaggttaagaataagaaataacatcccagagcctacagggatatttagatatcttcctatgtgtactacataatatgaattttgcagtttggcattttacttgcgaatgccatatgtgagacaaaaatcatcttccagagatttcagtatctctgatactgacaatatctctgatatgacaatatcatcttccagagatttctactctgcataccaacattgtttctttgtgtcttaccaaatgcaacttgttactagaatatgacttactaaaaatgcatttccacactgcaaacattttttagggctatcttctgccctttggaagcagtcttggcagcaacctctttagtaatcaatataaggcacacttcatgtgtttgtgtagcctggaatctattctaccttcacaggttagaacatcttgatttcctcttaacgaaacattccctaacggtgtatgtagtcatgagggaaccaccattcaagatgccctgctcaggacttggcatgagcactatggtcagctgaggctcagaactgtacattgttaatgggtttttcaagttcagaaaagcaacatgagcttttgttctgtggtagcatgttgatgtaataagtagctatttcaatagaggttcccagaacagcttttgttactgtcattttcttaactttgttcacttgtcttttattttgagctattgggtgtgcttttaatacattccttgtttgattgcattagccattgtgtatcttttgcatacagcttactaaatcagatggcttcagaaatgggtggtagaggagtaggcagaaacttgcaaggatatgtggatatttggaaatggttgtttcccaagacaggatggaagtcttttaagcaagaaacttggcccatgctatgaagtcatgaaatgaattgttggcatcatgtgctcactgaggctttggggaaatggataagttgtcattgaaaaattttaaacagaattctggagtggtcaagaggggaatgcttttgatacccatgtataacatggagaataatgatcttaaaacttcaatttaagattatgtgtcagtgatactacttagttacatgtagctatagagtcacagtggtgaaaaactctgccagttgcttactcacaaagttagttttcttcactacctcatcaggtttgttatgtgagtgggcattaatctgggaagagtgggaccctgccagttagattagggctatcttggaggaatatgcggattcaatactgcaaatatttctgaaacaccttctgctttgtactctattagatacccaaagaaattttcatccttgaagcggaggaatttaatgatacctgaatgcctaactgttgtattctgcttatacagaatccaatctcaagatacttggggtgaagaatgatgattcacagaagggaagggacatcttacataaacaaataatcgcagatacttgctaaagtgtatcccccaatctgggaaatactgtaaaggtgtatattattattgatgtaccaaagaagacagaataaattcataagagaaagtttatattcagtttactactacctagggttagattttagtttgttgttttttcagatgcaaatctacatgcagccttgcctggtagaagccagaagtgttgacagtattgaggacagcactcacatactgtgggaaagaataatacttgattaggacttattatttaatgaaatgaaaattttacaaaacagaaa

SEQ ID NO: 35049 - DNA, 5661 bp, Homo sapiens
  source 1..5661: mol_type = unassigned DNA
ccggcgcgggagtaactcctcgcagaggcctctgggagttgtagtttttttgcctttgcctctccatgacgcaattcctgtgcgacatacgtagcggccgccattgttccgcgccgatggcgagatccttgttcctcagatagcgttcatcgcccgtcgtggtcaacgggccagccgagtctggagtggttgcgaacccttctggctgcagatctggaggtggaggcagtaccctggactctattctgctgccccttcagggtttggaggagccggagcatccctcgcgtcctgtcacttccagcgaggcacacaaaactgaccgtagggatggccaccagggtccggacagcttctatttggggacctttgtcattcatggatgtgtttgtggattttacctgggaggagtggcagctgctagacccagcacagaagtgcctgtacaggagtgtgatgttggagaactatagcaacctggtgtccctagggtaccaacacaccaaacctgatatcatcttcaagttggaacaaggagaagagctgtgtatggtgcaggcccaagttccaaatcagacctgtccaattttgaaggctggaaagtccaaagccaaggtgctggcaggtttggtgtctggtgagggcctgctctgtgcttccaagatgacgccttgttgctgcatcctctggagacacagtctggaaaattgatgatcttatggattggcatcaggaaaataaagacaagctgggaagtacggcaaaaagctttgaatgcactacatttggaaaactatgtcttcttagtacaaagtatctttcaagacaaaaacctcataaatgtggcacgcatggaaagagtttgaaatatatagatttcactagtgattatgctagaaataatcctaatgggtttcaggtacatggaaaatcattcttccattctaaacatgagcaaactgttattggaataaaatactgtgaaagtattgaatctggaaaaaccgtcaataagaaatcgcaacttatgtgccaacaaatgtatatgggcgaaaaaccctttggatgcagctgttgtgagaaagccttcagcagcaagtcataccttctagtgcatcagcaaactcatgccgaagagaaaccctatggttgtaatgaatgtgggaaagacttcagtagtaaatcatacctcattgtacatcagagaattcatacaggagagaaactacatgaatgcagtgaatgcaggaaaacattcagtttccattcacagcttgttatacatcagagaattcacacaggtgagaatccctatgagtgctgtgaatgtgggaaagtcttcagtaggaaagaccagcttgtttcacaccagaaaactcattcaggacagaaaccatatgtgtgtaatgaatgtgggaaagcttttggtttaaaatcacagctcattatacatgaaagaattcatacaggagagaaaccatatgaatgcaatgaatgtcagaaagcctttaatacaaagtcaaaccttatggtacatcagagaacccatacaggggagaaaccttatgtttgtagtgattgtggaaaagcctttacattcaagtcacagctcattgtacatcaggggattcacacaggagtaaagccctatgggtgtattcagtgtggtaaaggattcagtttgaaatcacagctcattgtacatcagagaagtcacacaggaatgaaaccttatgtatgcaatgaatgtggcaaagccttcaggagcaagtcataccttattatacatacaaggactcatacaggagaaaaactccatgaatgcaacaattgtgggaaagccttcagttttaaatcacagctcattatacatcagaggattcatacaggagagaacccctatgaatgccatgaatgtgggaaagccttcagtcggaaataccagcttatttcacaccagagaactcatgcaggagagaagccttatgaatgcaccgactgtggaaaggcttttggtttaaagtcacagcttattatacaccagagaactcatacaggggagaaaccatttgaatgtagtgagtgtcagaaagcctttaatacaaagtcaaacctgattgtacatcagagaactcatacaggagagaaaccctatagttgtaatgaatgtggaaaagcctttacgttcaaatcacagctcattgtacataaaggagtgcacactggagtaaaaccctatggatgcagtcaatgtgcaaaaacctttagtttgaagtcccagctcattgtacatcagagaagtcacacaggagtaaaaccatatggatgcagtgagtgtgggaaagccttcaggagcaagtcataccttattatacatatgagaactcatacaggagagaaaccacatgagtgcagggaatgcgggaaatcctttagtttcaattcacaactcattgtgcatcagagaattcacacaggagaaaatccctatgaatgcagtgaatgtgggaaagcctttaataggaaagaccagctcatttcacatcagcgaactcatgcaggggaaaagccttatgggtgcagtgaatgtgggaaagcttttagcagcaagtcatacctaattatacacatgagaactcattcaggtgaaaaaccatatgaatgtaatgaatgtgggaaagccttcatttggaaatcactactcattgtacatgagcgaactcatgcaggggtcaacccttataaatgcagtcaatgtgagaaatccttcagtgggaaattacgccttcttgtacaccagagaatgcacacaagagagaaaccatatgaatgcagtgagtgtggaaaagccttcattaggaattctcaactcattgtacatcaaagaactcattcaggagagaaaccctatgggtgcaatgaatgtgggaaaaccttctctcaaaaatcaattctcagtgcacatcagagaacacatacaggagagaagccttgtaagtgcactgaatgtgggaaagccttttgttggaagtcacagctcattatgcatcagagaactcatgtagatgacaaacattgataattttacgaaactctgaaaagtggattcacaagagatagaaacaatcatatataaagagaaactctgtaagtggaatcatcttgtcatcttccagaaaactcatactgaatagaaactttatgaatgcacagcatatggaaaggcatccacagaaagctgttctttacatgcaaaaagatagtagacaatacacaggaaaactgaatttagtaaccactctgaaaatttttagcagcaagtcatacctttttttaaaaagttcatacaggtgaggaaccatgttaaacgttgtaaagtcattttactaaaataagattcacaaagaggaaacttcatgaaccagatgaatatagaatagacttctttgaaattcatagtttacagaattttaatgagagaaattattgagctaatgaatggcagaattaacaaaattacaaacattttatgtatcggaagcatataccttggagggaccatgctataagggaaagtgtaaatctagaaatgagaaacccctagggaaaaaatatatataggagtgaacatcttatgaatgtaccaaataaaccacagctggactgttaacctcaccttagaagcttcattctaaaaaaaaaaaaaaaaaaaaaaaaaaaaaccaacctgttattatatcttaatattaattttgaagaattatttcttttaggaatcattttaagaaattttattccaggtgttccaaaatttcaggaaaaggtttgagaaaattctcaattataaataataagatacagattatttcattgtacaagtgaatctagtaaggaggttaagaataagaaataacatcccagagcctacagggatatttagatatcttcctatgtgtactacataatatgaattttgcagtttggcattttacttgcgaatgccatatgtgagacaaaaatcatcttccagagatttcagtatctctgatactgacaatatctctgatatgacaatatcatcttccagagatttctactctgcataccaacattgtttctttgtgtcttaccaaatgcaacttgttactagaatatgacttactaaaaatgcatttccacactgcaaacattttttagggctatcttctgccctttggaagcagtcttggcagcaacctctttagtaatcaatataaggcacacttcatgtgtttgtgtagcctggaatctattctaccttcacaggttagaacatcttgatttcctcttaacgaaacattccctaacggtgtatgtagtcatgagggaaccaccattcaagatgccctgctcaggacttggcatgagcactatggtcagctgaggctcagaactgtacattgttaatgggtttttcaagttcagaaaagcaacatgagcttttgttctgtggtagcatgttgatgtaataagtagctatttcaatagaggttcccagaacagcttttgttactgtcattttcttaactttgttcacttgtcttttattttgagctattgggtgtgcttttaatacattccttgtttgattgcattagccattgtgtatcttttgcatacagcttactaaatcagatggcttcagaaatgggtggtagaggagtaggcagaaacttgcaaggatatgtggatatttggaaatggttgtttcccaagacaggatggaagtcttttaagcaagaaacttggcccatgctatgaagtcatgaaatgaattgttggcatcatgtgctcactgaggctttggggaaatggataagttgtcattgaaaaattttaaacagaattctggagtggtcaagaggggaatgcttttgatacccatgtataacatggagaataatgatcttaaaacttcaatttaagattatgtgtcagtgatactacttagttacatgtagctatagagtcacagtggtgaaaaactctgccagttgcttactcacaaagttagttttcttcactacctcatcaggtttgttatgtgagtgggcattaatctgggaagagtgggaccctgccagttagattagggctatcttggaggaatatgcggattcaatactgcaaatatttctgaaacaccttctgctttgtactctattagatacccaaagaaattttcatccttgaagcggaggaatttaatgatacctgaatgcctaactgttgtattctgcttatacagaatccaatctcaagatacttggggtgaagaatgatgattcacagaagggaagggacatcttacataaacaaataatcgcagatacttgctaaagtgtatcccccaatctgggaaatactgtaaaggtgtatattattattgatgtaccaaagaagacagaataaattcataagagaaagtttatattcagtttactactacctagggttagattttagtttgttgttttttcagatgcaaatctacatgcagccttgcctggtagaagccagaagtgttgacagtattgaggacagcactcacatactgtgggaaagaataatacttgattaggacttattatttaatgaaatgaaaattttacaaaacagaaa

SEQ ID NO: 35050 - DNA, 3236 bp, Homo sapiens; identical to SEQ ID NO: 35045
  source 1..3236: mol_type = unassigned DNA

SEQ ID NO: 35051 - DNA, 781 bp, Homo sapiens
  source 1..781: mol_type = unassigned DNA
atacgtagcggccgccattgttccgcgccgatggcgagatccttgttcctcagatagcgttcatcgcccgtcgtggtcaacgggccagccgagtctggagtggttgcgaacccttctggctgcagatctggaggtggaggcagtaccctggactctattctgctgccccttcagggtttggaggagccggagcatccctcgcgtcctgtcacttccagcgaggcacacaaaactgaccgtagggatggccaccagggtccggacagcttctatttgggtcccacctctccaagaacgaaacagttcatgggataggatcagaaagctccaaggtcaggaatccatcttgggccaagggactcctggtctgcaacctctccctggaacacccaggcagaagcagaagagtcgcagaatagagaaagtcctagagtggctgtttatttcccaagagcagccaaaaatcaccaagtcctggggtaccaacacaccaaacctgatatcatcttcaagttggaacaaggagaagagctgtgtatggtgcaggcccaagttccaaatcagacctgtccaaacacagtctggaaaattgatgatcttatggattggcatcaggaaaataaagacaagctgggaagtacggcaaaaagctttgaatgcactacatttggaaaactatgtcttcttagtacaaagtatctttcaagacaaaaacctcataaatgtggcacgcatggaaagagtttgaaatatatagatttcactagtgattatgctagaa

SEQ ID NO: 35052 - DNA, 686 bp, Homo sapiens
  source 1..686: mol_type = unassigned DNA
atctggaggtggaggcagtaccctggactctattctgctgccccttcagggtttggaggagccggagcatccctcgcgtcctgtcacttccagcgaggcacacaaaactgaccgtagggatggccaccagggtccggacagcttctatttggggacctttgtcattcatggatgtgtttgtggattttacctgggaggagtggcagctgctagacccagcacagaagtgcctgtacaggagtgtgatgttggagaactatagcaacctggtgtccctagggtaccaacacaccaaacctgatatcatcttcaagttggaacaaggagaagagctgtgtatggtgcaggcccaagttccaaatcagacctgtccaattttgaaggctggaaagtccaaagccaaggtgctggcaggtttggtgtctggtgagggcctgctctgtgcttccaagatgacgccttgttgctgcatcctctggagacacagtctggaaaattgatgatcttatggattggcatcaggaaaataaagacaagctgggaagtacggcaaaaagctttgaatgcactacatttggaaaactatgtcttcttagtacaaagtatctttcaagacaaaaacctcataaatgtggcacgcatggaaagagtttgaaatatatagatttcactagtgattatgctag

SEQ ID NO: 35053 - DNA, 2836 bp, Homo sapiens
  source 1..2836: mol_type = unassigned DNA
cgcccccaccgccacccaaccaagcatcacccattccagcacttccggcctgacccctgtccagcgcctttcctttctccagcttctgctctgccccaagagtggtcgccttcgtggcagggcacgactctctcccagctcgggtcgccgcccacattagtgtggggccctgcggcctagcgtccctcaccagaggcctccccttgcctagctggaccgccgagggacatcgacgagtatcctcctcctgctgtccccggcttcgcctgccgcccctaaccggccagtcaagatggccgccgctgggtgaggcaagctggcgcgccgcgggggcgtctgggagttgtagttcgggacggcgggctgacgcacttcgccgccggccgacgggcgccattgtgcggcgcgcgccgggactctgcccacttccaccagagacacattgagaaggaggaaactatggcctccaggcttccgacggcctggtcctgtgaaccagtgacctttgaagatgtaacactgggttttaccccggaagagtggggactgctggacctcaaacagaagtccctgtacagggaagtgatgctggagaactacaggaacctggtctcagtggaacatcagctttccaaaccagatgtggtatctcagttagaggaggcagaagatttctggccagtggagagaggaattcctcaagacaccattccagagtatcctgagctccagctggaccctaaattggatcctcttcctgctgagagtcccctaatgaacattgaggttgttgaggtcctcacactgaaccaggaggtggctggtccccggaatgcccagatccaggccctatatgctgaagatggaagcctgagtgcagatgcccccagtgagcaggtccaacagcagggcaagcatccaggtgaccctgaggccgcgcgccagaggttccggcagttccgttataaggacatgacaggtccccgggagctggaccagctccgagagctgtgtcaccagtggctacagcctaaggcacgctccaaggagcagatcctggagctgctggtgctggagcagttcctaggtgcactgcctgtgaagctccggacatgggtggaatcgcagcacccagagaactgccaagaggtggtggccctggtagagggtgtgacctggatgtctgaggaggaagtacttcctgcaggacaacctgccgagggcaccacctgctgcctcgaggtcactgcccagcaggaggagaagcaggaggatgcagccatctgcccagtgacagtgctccctgaggagccagtgaccttccaggatgtggctgtggacttcagccgggaggagtgggggctgctgggcccgacacagaggaccgagtaccgcgatgtgatgctggagacctttgggcacctggtctctgtggggtgggagactacactggaaaataaagagttagctccaaattctgacattcctgaggaagaaccagcccccagcctgaaagtacaagaatcctcaagggattgtgccttgtcctctacattagaagataccttgcagggtggggtccaggaagtccaagacacagtgttgaagcagatggagtctgctcaggaaaaagaccttcctcagaagaagcactttgacaaccgtgagtcccaggcaaacagtggtgctcttgacacaaaccaagtttcgctccagaaaattgacaaccctgagtcccaggcaaacagtggcgctcttgacacaaaccaagttttgctccacaaaattcctcctagaaaacgattgcgcaaacgtgactcacaagttaaaagtatgaaacataattcacgtgtaaaaattcatcagaagagctgtgaaaggcaaaaggccaaggaaggcaatggttgtaggaaaaccttcagtcggagtactaaacagattacgtttataagaattcacaaggggagccaagtttgccgatgcagtgaatgtggtaaaatattccggaacccaagatacttttctgtgcataagaaaatccataccggagagaggccctatgtgtgtcaagactgtgggaaaggatttgttcagagctcttccctcacacagcatcagagagttcattctggagagagaccatttgaatgtcaggagtgtgggaggaccttcaatgatcgctcagccatctcccagcacctgaggactcacactggcgctaagccctacaagtgtcaggactgtggaaaagccttccgccagagctcccacctcatcagacatcagaggactcacaccggggagcgcccatatgcatgcaacaaatgtggaaaggccttcacccagagctcacaccttattgggcaccagagaacccacaataggacaaagcgaaagaagaaacagcctacctcatagctctcaagccagttgaagaaaccttgccttttcagcttgaccctgcaatataacatgcacaggcctgcttgtgaatcaggactgaatgtgaaagggaagtattgagtgaggacattcccaaaaccaaaggacaactgaggagactgcccagcacataatgaataaataagaaaatgagtgaggagttattaacatcatttggaaaaaagatttcccattcacttgatattgtttgttcactcatttagtcattaaaagtgagattaataaaatctgaaaatgttatataataactttaaaaagccaggtaattaataatctgcactgatattacatccacagtaccacagtatttatgtgtatgaattaaggattaaaagataatgtggataaataaactattgatctatgtctgtgt

SEQ ID NO: 35054 - DNA, 2740 bp, Homo sapiens
  source 1..2740: mol_type = unassigned DNA
cgcccccaccgccacccaaccaagcatcacccattccagcacttccggcctgacccctgtccagcgcctttcctttctccagcttctgctctgccccaagagtggtcgccttcgtggcagggcacgactctctcccagctcgggtcgccgcccacattagtgtggggccctgcggcctagcgtccctcaccagaggcctccccttgcctagctggaccgccgagggacatcgacgagtatcctcctcctgctgtccccggcttcgcctgccgcccctaaccggccagtcaagatggccgccgctgggtgaggcaagctggcgcgccgcgggggcgtctgggagttgtagttcgggacggcgggctgacgcacttcgccgccggccgacgggcgccattgtgcggcgcgcgccgggactctgcccacttccaccagagacacattgagaaggaggaaactatggcctccaggcttccgacggcctggtcctgtgaaccagtgacctttgaagatgtaacactgggttttaccccggaagagtggggactgctggacctcaaacagaagtccctgtacagggaagtgatgctggagaactacaggaacctggtctcagtggagtatcctgagctccagctggaccctaaattggatcctcttcctgctgagagtcccctaatgaacattgaggttgttgaggtcctcacactgaaccaggaggtggctggtccccggaatgcccagatccaggccctatatgctgaagatggaagcctgagtgcagatgcccccagtgagcaggtccaacagcagggcaagcatccaggtgaccctgaggccgcgcgccagaggttccggcagttccgttataaggacatgacaggtccccgggagctggaccagctccgagagctgtgtcaccagtggctacagcctaaggcacgctccaaggagcagatcctggagctgctggtgctggagcagttcctaggtgcactgcctgtgaagctccggacatgggtggaatcgcagcacccagagaactgccaagaggtggtggccctggtagagggtgtgacctggatgtctgaggaggaagtacttcctgcaggacaacctgccgagggcaccacctgctgcctcgaggtcactgcccagcaggaggagaagcaggaggatgcagccatctgcccagtgacagtgctccctgaggagccagtgaccttccaggatgtggctgtggacttcagccgggaggagtgggggctgctgggcccgacacagaggaccgagtaccgcgatgtgatgctggagacctttgggcacctggtctctgtggggtgggagactacactggaaaataaagagttagctccaaattctgacattcctgaggaagaaccagcccccagcctgaaagtacaagaatcctcaagggattgtgccttgtcctctacattagaagataccttgcagggtggggtccaggaagtccaagacacagtgttgaagcagatggagtctgctcaggaaaaagaccttcctcagaagaagcactttgacaaccgtgagtcccaggcaaacagtggtgctcttgacacaaaccaagtttcgctccagaaaattgacaaccctgagtcccaggcaaacagtggcgctcttgacacaaaccaagttttgctccacaaaattcctcctagaaaacgattgcgcaaacgtgactcacaagttaaaagtatgaaacataattcacgtgtaaaaattcatcagaagagctgtgaaaggcaaaaggccaaggaaggcaatggttgtaggaaaaccttcagtcggagtactaaacagattacgtttataagaattcacaaggggagccaagtttgccgatgcagtgaatgtggtaaaatattccggaacccaagatacttttctgtgcataagaaaatccataccggagagaggccctatgtgtgtcaagactgtgggaaaggatttgttcagagctcttccctcacacagcatcagagagttcattctggagagagaccatttgaatgtcaggagtgtgggaggaccttcaatgatcgctcagccatctcccagcacctgaggactcacactggcgctaagccctacaagtgtcaggactgtggaaaagccttccgccagagctcccacctcatcagacatcagaggactcacaccggggagcgcccatatgcatgcaacaaatgtggaaaggccttcacccagagctcacaccttattgggcaccagagaacccacaataggacaaagcgaaagaagaaacagcctacctcatagctctcaagccagttgaagaaaccttgccttttcagcttgaccctgcaatataacatgcacaggcctgcttgtgaatcaggactgaatgtgaaagggaagtattgagtgaggacattcccaaaaccaaaggacaactgaggagactgcccagcacataatgaataaataagaaaatgagtgaggagttattaacatcatttggaaaaaagatttcccattcacttgatattgtttgttcactcatttagtcattaaaagtgagattaataaaatctgaaaatgttatataataactttaaaaagccaggtaattaataatctgcactgatattacatccacagtaccacagtatttatgtgtatgaattaaggattaaaagataatgtggataaataaactattgatctatgtctgtgt

SEQ ID NO: 35055 - DNA, 2535 bp, Homo sapiens
  source 1..2535: mol_type = unassigned DNA
cgcccccaccgccacccaaccaagcatcacccattccagcacttccggcctgacccctgtccagcgcctttcctttctccagcttctgctctgccccaagagtggtcgccttcgtggcagggcacgactctctcccagctcgggtcgccgcccacattagtgtggggccctgcggcctagcgtccctcaccagaggcctccccttgcctagctggaccgccgagggacatcgacgagtatcctcctcctgctgtccccggcttcgcctgccgcccctaaccggccagtcaagatggccgccgctgggtgaggcaagctggcgcgccgcgggggcgtctgggagttgtagttcgggacggcgggctgacgcacttcgccgccggccgacgggcgccattgtgcggcgcgcgccggagtatcctgagctccagctggaccctaaattggatcctcttcctgctgagagtcccctaatgaacattgaggttgttgaggtcctcacactgaaccaggaggtggctggtccccggaatgcccagatccaggccctatatgctgaagatggaagcctgagtgcagatgcccccagtgagcaggtccaacagcagggcaagcatccaggtgaccctgaggccgcgcgccagaggttccggcagttccgttataaggacatgacaggtccccgggagctggaccagctccgagagctgtgtcaccagtggctacagcctaaggcacgctccaaggagcagatcctggagctgctggtgctggagcagttcctaggtgcactgcctgtgaagctccggacatgggtggaatcgcagcacccagagaactgccaagaggtggtggccctggtagagggtgtgacctggatgtctgaggaggaagtacttcctgcaggacaacctgccgagggcaccacctgctgcctcgaggtcactgcccagcaggaggagaagcaggaggatgcagccatctgcccagtgacagtgctccctgaggagccagtgaccttccaggatgtggctgtggacttcagccgggaggagtgggggctgctgggcccgacacagaggaccgagtaccgcgatgtgatgctggagacctttgggcacctggtctctgtggggtgggagactacactggaaaataaagagttagctccaaattctgacattcctgaggaagaaccagcccccagcctgaaagtacaagaatcctcaagggattgtgccttgtcctctacattagaagataccttgcagggtggggtccaggaagtccaagacacagtgttgaagcagatggagtctgctcaggaaaaagaccttcctcagaagaagcactttgacaaccgtgagtcccaggcaaacagtggtgctcttgacacaaaccaagtttcgctccagaaaattgacaaccctgagtcccaggcaaacagtggcgctcttgacacaaaccaagttttgctccacaaaattcctcctagaaaacgattgcgcaaacgtgactcacaagttaaaagtatgaaacataattcacgtgtaaaaattcatcagaagagctgtgaaaggcaaaaggccaaggaaggcaatggttgtaggaaaaccttcagtcggagtactaaacagattacgtttataagaattcacaaggggagccaagtttgccgatgcagtgaatgtggtaaaatattccggaacccaagatacttttctgtgcataagaaaatccataccggagagaggccctatgtgtgtcaagactgtgggaaaggatttgttcagagctcttccctcacacagcatcagagagttcattctggagagagaccatttgaatgtcaggagtgtgggaggaccttcaatgatcgctcagccatctcccagcacctgaggactcacactggcgctaagccctacaagtgtcaggactgtggaaaagccttccgccagagctcccacctcatcagacatcagaggactcacaccggggagcgcccatatgcatgcaacaaatgtggaaaggccttcacccagagctcacaccttattgggcaccagagaacccacaataggacaaagcgaaagaagaaacagcctacctcatagctctcaagccagttgaagaaaccttgccttttcagcttgaccctgcaatataacatgcacaggcctgcttgtgaatcaggactgaatgtgaaagggaagtattgagtgaggacattcccaaaaccaaaggacaactgaggagactgcccagcacataatgaataaataagaaaatgagtgaggagttattaacatcatttggaaaaaagatttcccattcacttgatattgtttgttcactcatttagtcattaaaagtgagattaataaaatctgaaaatgttatataataactttaaaaagccaggtaattaataatctgcactgatattacatccacagtaccacagtatttatgtgtatgaattaaggattaaaagataatgtggataaataaactattgatctatgtctgtgt

SEQ ID NO: 35056 - DNA, 1849 bp, Homo sapiens
  source 1..1849: mol_type = unassigned DNA
gtccagagcgcggcgtaggtgtggagaaaacattacgtcgacggggagttcgcctccagtagcgtttctactggtgccaccccgcctccgacccgccctgcggccctcccttttcttttctgccgggtaatggctgcttccaagacccagggggctgtcgcccgaatgcaggaagaccgtgatgggagctgcagcacagtcgggggtgtaggttatggggacagtaaggattgtatcctggagccgctttccctgccagaaagtccaggtggcaccaccactttagaaggttctccatctgtgccttgtattttctgtgaagaacattttcctgtggctgaacaagacaaacttctgaagcacatgattattgagcataagattgtcatagctgatgtcaagttggttgctgatttccaaaggtacattttatattggaggaaaaggttcactgaacagcccatcacagatttttgtagtgtaataagaattaattccactgctccatttgaagaacaagagaattattttttgttatgtgacgttttaccagaagatagaattcttagagaagagcttcagaaacagagactgagagaaattctggaacaacagcagcaagaacgaaatgataccaattttcatggcgtttgtatgttttgcaatgaagaattccttggaaacagatctgttattttgaaccacatggccagagaacatgctttcaacattggattgccagacaacattgtaaactgcaatgaatttttgtgtacattacagaaaaagcttgacaatttgcagtgcttgtactgtgagaagaccttcagggacaaaaatacacttaaagatcacatgaggaaaaaacagcatcgtaagattaatcctaagaacagagaatatgacagattttatgtcatcaattatttggaacttggaaaatcgtgggaagaagttcagttggaagatgatcgggagttgctggaccatcaggaagatgactggtctgattgggaagaacaccctgcctctgcagtctgcttattttgtgaaaagcaagcagaaacaattgagaagttgtatgtccacatggaggatgcacacgaatttgatcttctcaaaataaagtcagaacttggattaaatttctatcagcaagtgaaactggtcaattttattcggaggcaagttcaccaatgcagatgttatggctgccatgtgaagttcaaatccaaagcagacttaagaactcacatggaagaaactaaacacacttcgctgctccccgatagaaagacgtgggatcaactggagtattattttccaacctatgaaaatgacactctcctgtgtacactatctgacagtgaaagtgacctgacagctcaggaacaaaatgaaaatgttcccatcatcagtgaagatacatctaaactgtatgctttgaaacaaagcagtattttgaaccagttgctactataagagtacttgaaaacctagaagaaactaccacagaagcaatttttcatgtttttctcctatgagacagatatgaaagaacaatttaaatttgaacatcaacaaaagattggtccttggtgaaataaacttttcaaaaatgaatgttcttttcaaaaaataaagtagaaaaatgcacttactaagaacatgaaaaaaaatgaagtaggaaaataagatgaagactttgtattttggctgtaaagttttattgtgtgatcatcttaaattatctcacttcattaaactcataattatatatagaagtatatgtcaattacaaagaaatgaaatgttcaaattatttataaacctgatttttcaatcagta

SEQ ID NO: 35057 - DNA, 1075 bp, Homo sapiens
  source 1..1075: mol_type = unassigned DNA
tcttttctgccgggtaatggctgcttccaagacccagggggctgtcgcccgaatgcaggaagaccgtgatgggagctgcagcacagtcgggggtgtaggttatggggacagtaaggattgtatcctggagccgctttccctgccagaaagtccaggtggcaccaccactttagaaggttctccatctgtgccttgtattttctgtgaagaacattttcctgtggctgaacaagacaaacttctgaagcacatgattattgagcataagattgtcatagctgatgtcaagttggttgctgatttccaaaggtacattttatattggaggaaaaggttcactgaacagcccatcacagatttttgtagtgtaataagaattaattccactgctccatttgaagaacaagagaattattttttgttatgtgacgttttaccagaagatagaattcttagagaagagcttcagaaacagagactgagagaaattctggaacaacagcagcaagaacgaaatgataccaattttcatggcgtttgtatgttttgcaatgaagaattccttggaaacagatctgttattttgaaccacatggccagagaacatgctttcaacattggattgccagacaacattgtaaactgcaatgaatttttgtgtacattacagaaaaagcttgacaatttgcagtgcttgtactgtgagaagaccttcagggacaaaaatacacttaaagatcacatgaggaaaaaacagcatcgtaagattaatcctaagaacagagaatatgacagattttatgtcatcaattatttggtaaggctttcttttcataacttaaaatttgattgcagtactgcaaacaaaatctttctgaggaccaactaatatttgaataagcaattattgcaaaagtcaaaatgtaattgaggggcacattcaagtagtgattagctttgaaatggttagagtacaagacatttgatttgacttgtcttttatttgacagtgtttatgtagtaaaaatgtcatgtctctagaactcacagtcatcttgaccaaaaaaaaaaaaaa

SEQ ID NO: 35058 - DNA, 1585 bp, Homo sapiens
  source 1..1585: mol_type = unassigned DNA
cctccgcccgcccgcctgcctgcctgcccgcccgctcgctcgcccggcccgcgactcatgtcccgccgcaaggccggcagcgcgccccgccgagtagagcccgcgcccgccgccaacccagacgacgagatggaaatgcaggacctcgtcatcgaactcaagcccgagccagacgcgcagccccaacaggccccaaggctggggcccttctccccgaaggaggtgtcctcggcggggcggttcggcggcgaaccccaccactcccctggccccatgcccgccggggccgccctcctcgccctcggcccgcggaacccgtggaccctgtggacgccgttgaccccgaactatcccgaccgccagccctggaccgacaaacacccagatctgttgacctgcggccgctgcctgcagaccttcccgttggaggccatcactgccttcatggaccacaagaagctgggctgtcagctcttcagaggccccagccgcggccagggctcagaacgagaggagctgaaggccttgagctgcctgcgctgtggcaaacagttcacagtggcctggaagctgctgcgtcacgcccagtgggaccacggactgtccatctaccagacagaatcagaggccccggaggccccgctcctgggcctggccgaggtggctgcagccgtgtcggcagtggtggggccagcagctgaggccaagagcccccgtgcaagtggcagcggcctcacccggcggagccccacctgtcctgtgtgcaagaagaccctcagctccttcagcaacctcaaagtgcacatgcgctcacacacaggcgagcggccctatgcttgcgaccagtgtccctacgcctgcgcccagagcagcaagctcaaccgccacaagaagacccaccggcaggtgccgccccagagccccctcatggccgacaccagccaggagcaggcctctgcagcccctccggagccggctgtccatgctgctgcccccaccagcacccttccatgcagcggtggtgagggggctggagccgccgccacagcaggtgtccaggaacccggggctcctggcagtggggctcaagccggccctggtggagacacttggggagccatcaccacggaacaaagaactgaccctgcaaacagccagaaggcatcacccaaaaagatgcccaagtcagggggcaagagccgcgggcccgggggcagctgtgagttctgcgggaagcattttaccaacagcagcaacctgacggtgcaccggcgctcacacaccggggagcgcccctacacctgtgagttctgcaactacgcctgcgcccagagcagtaagctcaaccgccaccgccgcatgcacggcatgacgcctggcagcacccgcttcgagtgcccccactgccatgtgcccttcggcctgcgagccaccctggacaaacacctgcggcagaagcaccctgaggcggccggcgaggcctgagcccaggaaagcccccctcactgtccctggtaccgctgccaacacccattgacctcctcgtttttgcccgccttctccaagtaaattttcccttttattt

SEQ ID NO: 35059 - DNA, 1631 bp, Homo sapiens
  source 1..1631: mol_type = unassigned DNA
gccgtcagggccccagcagggcggctcggtcccctcccatgagccccgccctggtaggcggagccacgggcccggccagcacgtgtaagagttcgcggcgggtcgccgcagtcactcacctgagcgcgcacggtccgcgcgtcctccgctcgtgcgtcccaacccagacgacgagatggaaatgcaggacctcgtcatcgaactcaagcccgagccagacgcgcagccccaacaggccccaaggctggggcccttctccccgaaggaggtgtcctcggcggggcggttcggcggcgaaccccaccactcccctggccccatgcccgccggggccgccctcctcgccctcggcccgcggaacccgtggaccctgtggacgccgttgaccccgaactatcccgaccgccagccctggaccgacaaacacccagatctgttgacctgcggccgctgcctgcagaccttcccgttggaggccatcactgccttcatggaccacaagaagctgggctgtcagctcttcagaggccccagccgcggccagggctcagaacgagaggagctgaaggccttgagctgcctgcgctgtggcaaacagttcacagtggcctggaagctgctgcgtcacgcccagtgggaccacggactgtccatctaccagacagaatcagaggccccggaggccccgctcctgggcctggccgaggtggctgcagccgtgtcggcagtggtggggccagcagctgaggccaagagcccccgtgcaagtggcagcggcctcacccggcggagccccacctgtcctgtgtgcaagaagaccctcagctccttcagcaacctcaaagtgcacatgcgctcacacacaggcgagcggccctatgcttgcgaccagtgtccctacgcctgcgcccagagcagcaagctcaaccgccacaagaagacccaccggcaggtgccgccccagagccccctcatggccgacaccagccaggagcaggcctctgcagcccctccggagccggctgtccatgctgctgcccccaccagcacccttccatgcagcggtggtgagggggctggagccgccgccacagcaggtgtccaggaacccggggctcctggcagtggggctcaagccggccctggtggagacacttggggagccatcaccacggaacaaagaactgaccctgcaaacagccagaaggcatcacccaaaaagatgcccaagtcagggggcaagagccgcgggcccgggggcagctgtgagttctgcgggaagcattttaccaacagcagcaacctgacggtgcaccggcgctcacacaccggggagcgcccctacacctgtgagttctgcaactacgcctgcgcccagagcagtaagctcaaccgccaccgccgcatgcacggcatgacgcctggcagcacccgcttcgagtgcccccactgccatgtgcccttcggcctgcgagccaccctggacaaacacctgcggcagaagcaccctgaggcggccggcgaggcctgagcccaggaaagcccccctcactgtccctggtaccgctgccaacacccattgacctcctcgtttttgcccgccttctccaagtaaattttcccttttattt

SEQ ID NO: 35060 - DNA, 2799 bp, Homo sapiens
  source 1..2799: mol_type = unassigned DNA
gggaacttccgttctttgttctgtccccggtgtgtgggtctgtgacagggtccaacagggcctggtccgtgtccggtcccccaaatctgtcgtccctgcccccaggcattggcatcaacaaaagtcagaattcccgggaacttgaacagaggctgctaaattcccagtaattgctcctttggccttctagggactgacttcaaagaaggaaggaaagaatcaggcagtgcttcctcattctcttttaaaacccgcttcccgctgagtctgcacccaggagaccagagagcaccttgcccttccatggaaactcaggctgatctcgtatctcaggaacctcaggccctgcttgacagtgctcttccttcaaaagttcctgccttttccgacaaggacagcctgggggatgagatgttggcggctgcgctcctaaaggccaagtcccaggagctggtaacctttgaggatgtagctgtgtacttcatccggaaggagtggaagcgtttggaacctgctcagagggacctctatagagatgtgatgctggagaattacgggaatgtgttctcactggatcgtgagaccaggactgaaaatgatcaagaaatttctgaagacacaagatcacatggggtcctactgggaagatttcaaaaggatatttctcagggtctcaagtttaaagaagcctatgaacgagaagtcagtctgaaaaggccgctggggaactcccctggagaaagactgaacaggaaaatgccagattttggtcaagtgacagttgaggagaagctaacccccaggggagagagaagcgagaaatataatgattttgggaacagcttcactgtgaattccaaccttatctcacatcagagactccccgtgggagacagaccccataagtgtgatgaatgtagcaagagctttaatcgaacttcagaccttattcaacatcagagaatccacactggggaaaagccctatgaatgtaatgagtgtgggaaggccttcagccagagctcacaccttattcagcatcagagaatccacactggggaaaaaccttatgaatgtagtgattgtgggaaaaccttcagctgtagctctgccctcattctgcatcggaggatccacacgggggagaaaccctatgaatgtaatgagtgtgggaagaccttcagctggagctccaccctcacccaccatcagagaatccacactggtgagaaaccctacgcctgcaatgaatgtgggaaggccttcagcaggagctcaacccttattcaccatcagagaatccacactggagaaaaaccctatgaatgtaatgaatgtgggaaagccttcagccagagctcacacctctatcagcaccagagaatccacactggagagaagccctacgaatgtatggaatgtggaggaaagtttacctacagttcaggccttattcagcatcaaagaatccacaccggggagaacccctatgaatgtagtgagtgtgggaaagccttcaggtacagctcggctcttgttcgccatcagagaattcacactggagagaagcctttgaatgggatcggcatgagcaaaagctccctcagagttacgaccgagttaaatatcagagagtccacgtgaaagagccacacacccattttcctcactttccctgagtctcaagagctcttgccttaccctataaatctcaacagcttaggatgtgtccctttcaactcagacttttcattttagagaatggggcagatggggcaaatcgttgaattttcccagaaatcacaccagccttagaaagcgtcaaggcaagtggatggcgtgctgggaatagaaagcagctctgggaccagttaccccatttaggaaaggagtttgcactaaactgtttttctcacagcagaggaacctttccaaggtggggatggaagcacagtcgggacagaattcgatggattcctttagttggagtccgcgtagtcagcacagacagcagtggaaaggacgctctgggtcctgttatttgctagggagggtaaagggagactatttcaaagctactgttcctagtccagctttaagtttcggtaagaaacatgctgttttgtttcatgatttcgttaattatggaaatttggcattgagggattattttattgagggtagaagagattccagaatcatcatctgtgatgatggtgtcctttagggctcttggagcagccagaccatgtttccaagagaaacctggtgatattgccagcagaccccctgccatcccccccagttgtcctggggctgaatgggcaaatctgtccaaacagctagtaaccggctgtgagggagagggtcagaagcacttagcgttggcctctgattgctgtcctctcttgtcctcttcccactccaatgatgaaaatgattttctctaaatgcctgggtaaggatgctttcaaggagctcacttggcctgcttgccctgccctctcacctctgacacccagccccaggagccagaccactcctgcctccacctctgactcttcagcagctgaagattaatgcagagaaagagcaaagcccaaaagggagaaaaaaaaaacaaaaaaacaaaaaaacgaagcccagagaaggcaggctgtgcctgagcctggtagcagagctcgttgctgggtgaggatggcactccccgagttttcccaaccgacgggatgaccttccattgtgttttcccaaccctgctcatcctgtagcataaatgaagtgcactattaaacagaa

SEQ ID NO: 35061 - DNA, 3473 bp, Homo sapiens
  source 1..3473: mol_type = unassigned DNA
gatatgatggttggctctgagacaccattgaagggaccctgctaggagggcgatggtggcaagaaggtgtgtcaccttgattgccagtggcctggcttgtgcctgagtcagtgctttccactgtgtaagggctctggtattggacattctatatcccctgctacccgaagaccagagttgcccaaacttgcgactgactttcaaacaggacccctcttcctttgttctttttttttcttttattctctcaaacattctcttatccattcctcttcctttgatgccttatgtgagtgtaacagtctgtaattatgaagcacatactttttgcattcccgatttttttactccttgcagttgtgagtggcaatagagttagccctcagcaaacatttgctatgtgagcaaatgagtaaagagataatgagaggtagatcaaatccagggttggttggtttgttttgttttgttttgttttgtttgagagagaatcgcttgaacccgggaggcagaggtggcagtgagatgagattgcgccattgcactccagcctgggtgacaagagtgaaattccgtcttaaaaaaaataaagaaaatttaaaaataccgggcgcggtggctcacgcctgtaatcccagctctcagggaggcaacaggtgggaggatagcttgagcccaggagttccagacctgcctgggcaatatagcgagaccctgttctccacaaaaaggaaaaaaaaaattaaaaaataaaagaaaataaaagactagtcccagttgccacatttcttctcactgttcctgggtactcactgaaatactagctcccatctttctgtattcaggaggtttttttgaattatctttgaaccttgaacttttgcttctgcagtgcttcctcattctcttttaaaacccgcttcccgctgagtctgcacccaggagaccagagagcaccttgcccttccatggaaactcaggctgatctcgtatctcaggaacctcaggccctgcttgacagtgctcttccttcaaaagttcctgccttttccgacaaggacagcctgggggatgagatgttggcggctgcgctcctaaaggccaagtcccaggagctggtaacctttgaggatgtagctgtgtacttcatccggaaggagtggaagcgtttggaacctgctcagagggacctctatagagatgtgatgctggagaattacgggaatgtgttctcactggatcgtgagaccaggactgaaaatgatcaagaaatttctgaagacacaagatcacatggggtcctactgggaagatttcaaaaggatatttctcagggtctcaagtttaaagaagcctatgaacgagaagtcagtctgaaaaggccgctggggaactcccctggagaaagactgaacaggaaaatgccagattttggtcaagtgacagttgaggagaagctaacccccaggggagagagaagcgagaaatataatgattttgggaacagcttcactgtgaattccaaccttatctcacatcagagactccccgtgggagacagaccccataagtgtgatgaatgtagcaagagctttaatcgaacttcagaccttattcaacatcagagaatccacactggggaaaagccctatgaatgtaatgagtgtgggaaggccttcagccagagctcacaccttattcagcatcagagaatccacactggggaaaaaccttatgaatgtagtgattgtgggaaaaccttcagctgtagctctgccctcattctgcatcggaggatccacacgggggagaaaccctatgaatgtaatgagtgtgggaagaccttcagctggagctccaccctcacccaccatcagagaatccacactggtgagaaaccctacgcctgcaatgaatgtgggaaggccttcagcaggagctcaacccttattcaccatcagagaatccacactggagaaaaaccctatgaatgtaatgaatgtgggaaagccttcagccagagctcacacctctatcagcaccagagaatccacactggagagaagccctacgaatgtatggaatgtggaggaaagtttacctacagttcaggccttattcagcatcaaagaatccacaccggggagaacccctatgaatgtagtgagtgtgggaaagccttcaggtacagctcggctcttgttcgccatcagagaattcacactggagagaagcctttgaatgggatcggcatgagcaaaagctccctcagagttacgaccgagttaaatatcagagagtccacgtgaaagagccacacacccattttcctcactttccctgagtctcaagagctcttgccttaccctataaatctcaacagcttaggatgtgtccctttcaactcagacttttcattttagagaatggggcagatggggcaaatcgttgaattttcccagaaatcacaccagccttagaaagcgtcaaggcaagtggatggcgtgctgggaatagaaagcagctctgggaccagttaccccatttaggaaaggagtttgcactaaactgtttttctcacagcagaggaacctttccaaggtggggatggaagcacagtcgggacagaattcgatggattcctttagttggagtccgcgtagtcagcacagacagcagtggaaaggacgctctgggtcctgttatttgctagggagggtaaagggagactatttcaaagctactgttcctagtccagctttaagtttcggtaagaaacatgctgttttgtttcatgatttcgttaattatggaaatttggcattgagggattattttattgagggtagaagagattccagaatcatcatctgtgatgatggtgtcctttagggctcttggagcagccagaccatgtttccaagagaaacctggtgatattgccagcagaccccctgccatcccccccagttgtcctggggctgaatgggcaaatctgtccaaacagctagtaaccggctgtgagggagagggtcagaagcacttagcgttggcctctgattgctgtcctctcttgtcctcttcccactccaatgatgaaaatgattttctctaaatgcctgggtaaggatgctttcaaggagctcacttggcctgcttgccctgccctctcacctctgacacccagccccaggagccagaccactcctgcctccacctctgactcttcagcagctgaagattaatgcagagaaagagcaaagcccaaaagggagaaaaaaaaaacaaaaaaacaaaaaaacgaagcccagagaaggcaggctgtgcctgagcctggtagcagagctcgttgctgggtgaggatggcactccccgagttttcccaaccgacgggatgaccttccattgtgttttcccaaccctgctcatcctgtagcataaatgaagtgcactattaaacagaatagtttttc

SEQ ID NO: 35062 - DNA, 1441 bp, Homo sapiens
  source 1..1441: mol_type = unassigned DNA
ctttgttctgtccccggtgtgtgggtctgtgacagggtccaacagggcctggtccgtgtccggtcccccaaatctgtcgtccctgcccccaggcattggcatcaacaaaagtcagaattcccgggaacttgaacagaggctgctaaattcccagtaattgctcctttggccttctagggactgacttcaaagaaggaaggaaagaatcaggcagtgcttcctcattctcttttaaaacccgcttcccgctgagtctgcacccaggagaccagagagcaccttgcccttccatggaaactcaggctgatctcgtatctcaggaacctcaggccctgcttgacagtgctcttccttcaaaagttcctgccttttccgacaaggacagcctgggggatgagatgttggcggctgcgctcctaaaggccaagtcccaggagctggtaacctttgaggatgtagctgtgtacttcatccggaaggagtggaagcgtttggaacctgctcagagggacctctatagagatgtgatgctggagaattacgggaatgtgttctcactggactggatacacgtctgtttaactacgcaaaaggtaatgctggcatggcttactgggaccctaagtgtggcgaagggactctgctccagtgaactggcgagtgtggaacctcctgacaccttctgaggacctcctgcctgccatgttgctgtggagctcgcactcctcaggcatcccctgatgttgagtgatacaaactctatcaccggaatcgatgctgctgcaatgacaagacttctttctggttttcagattctaaagtttaaaacaacgacaacaacaggagcgcttgaaagttacggtgcttctccctctccagtgtggactcgctgatgtttggaaagattggacttgctacagaaggtctttccacagtgatgacaccagtagggcttttccccggtgtggattctgtggtgtttattgaagttggagctgtggttgaaggctttcccacactccttacacttatatggcttctctccggtgtggagtctctggtgggagctgaggcccgcatgctgactgaagctcttcccacattcgttacactgataaggcttctccccagtgtggatccgatagtgacgaatgaggctgcctttcccgctgaaagccttgccacaatctttgcactgatatggcgcctcttctgtgtgcattctctgatgtttaagaaggtctgagctctgcccaaaagcttttccacacttacagtcatagggccggtccaccaagtgtgttctgtagtggagggtgaggtttgagctgtggctgaaagctttcccacacttggtgcacacgtaaggtttctccccagtgtgtgttctcctgtgtttggtgagatttgagctattactaaaggctttgccacattcagc

SEQ ID NO: 35063 - DNA, 543 bp, Homo sapiens
  source 1..543: mol_type = unassigned DNA
aaaattaaaaaataaaagaaaataaaagactagtcccagttgccacatttcttctcactgttcctgggtactcactgaaatactagctcccatctttctgtattcaggaggtttttttgaattatctttgaaccttgaacttttgcttctgcagtgcttcctcattctcttttaaaacccgcttcccgctgagtctgcacccaggagaccagagagcaccttgcccttccatggaaactcaggctgatctcgtatctcaggaacctcaggccctgcttgacagtgctcttccttcaaaagttcctgccttttccgacaaggacagcctgggggatgagatgttggcggctgcgctcctaaaggccaagtcccaggagctggtaacctttgaggatgtagctgtgtacttcatccggaaggagtggaagcgtttggaacctgctcagagggacctctatagagatgtgatgctggagaattacgggaatgtgttctcactggatcgtgagaccaggactgaaaatgatcaagaaatttctgaag

SEQ ID NO: 35064 - DNA, 2817 bp, Homo sapiens
  source 1..2817: mol_type = unassigned DNA
aaacgagggggaacttccgttctttgttctgtccccggtgtgtgggtctgtgacagggtccaacagggcctggtccgtgtccggtcccccaaatctgtcgtccctgcccccaggcattggcatcaacaaaagtcagaattcccgggaacttgaacagaggctgctaaattcccagtaattgctcctttggccttctagggactgacttcaaagaaggaaggaaagaatcagtgcttcctcattctcttttaaaacccgcttcccgctgagtctgcacccaggagaccagagagcaccttgcccttccatggaaactcaggctgatctcgtatctcaggaacctcaggccctgcttgacagtgctcttccttcaaaagttcctgccttttccgacaaggacagcctgggggatgagatgttggcggctgcgctcctaaaggccaagtcccaggagctggtaacctttgaggatgtagctgtgtacttcatccggaaggagtggaagcgtttggaacctgctcagagggacctctatagagatgtgatgctggagaattacgggaatgtgttctcactggatcgtgagaccaggactgaaaatgatcaagaaatttctgaagacacaagatcacatggggtcctactgggaagatttcaaaaggatatttctcagggtctcaagtttaaagaagcctatgaacgagaagtcagtctgaaaaggccgctggggaactcccctggagaaagactgaacaggaaaatgccagattttggtcaagtgacagttgaggagaagctaacccccaggggagagagaagcgagaaatataatgattttgggaacagcttcactgtgaattccaaccttatctcacatcagagactccccgtgggagacagaccccataagtgtgatgaatgtagcaagagctttaatcgaacttcagaccttattcaacatcagagaatccacactggggaaaagccctatgaatgtaatgagtgtgggaaggccttcagccagagctcacaccttattcagcatcagagaatccacactggggaaaaaccttatgaatgtagtgattgtgggaaaaccttcagctgtagctctgccctcattctgcatcggaggatccacacgggggagaaaccctatgaatgtaatgagtgtgggaagaccttcagctggagctccaccctcacccaccatcagagaatccacactggtgagaaaccctacgcctgcaatgaatgtgggaaggccttcagcaggagctcaacccttattcaccatcagagaatccacactggagaaaaaccctatgaatgtaatgaatgtgggaaagccttcagccagagctcacacctctatcagcaccagagaatccacactggagagaagccctacgaatgtatggaatgtggaggaaagtttacctacagttcaggccttattcagcatcaaagaatccacaccggggagaacccctatgaatgtagtgagtgtgggaaagccttcaggtacagctcggctcttgttcgccatcagagaattcacactggagagaagcctttgaatgggatcggcatgagcaaaagctccctcagagttacgaccgagttaaatatcagagagtccacgtgaaagagccacacacccattttcctcactttccctgagtctcaagagctcttgccttaccctataaatctcaacagcttaggatgtgtccctttcaactcagacttttcattttagagaatggggcagatggggcaaatcgttgaattttcccagaaatcacaccagccttagaaagcgtcaaggcaagtggatggcgtgctgggaatagaaagcagctctgggaccagttaccccatttaggaaaggagtttgcactaaactgtttttctcacagcagaggaacctttccaaggtggggatggaagcacagtcgggacagaattcgatggattcctttagttggagtccgcgtagtcagcacagacagcagtggaaaggacgctctgggtcctgttatttgctagggagggtaaagggagactatttcaaagctactgttcctagtccagctttaagtttcggtaagaaacatgctgttttgtttcatgatttcgttaattatggaaatttggcattgagggattattttattgagggtagaagagattccagaatcatcatctgtgatgatggtgtcctttagggctcttggagcagccagaccatgtttccaagagaaacctggtgatattgccagcagaccccctgccatcccccccagttgtcctggggctgaatgggcaaatctgtccaaacagctagtaaccggctgtgagggagagggtcagaagcacttagcgttggcctctgattgctgtcctctcttgtcctcttcccactccaatgatgaaaatgattttctctaaatgcctgggtaaggatgctttcaaggagctcacttggcctgcttgccctgccctctcacctctgacacccagccccaggagccagaccactcctgcctccacctctgactcttcagcagctgaagattaatgcagagaaagagcaaagcccaaaagggagaaaaaaaaaacaaaaaaacaaaaaaacgaagcccagagaaggcaggctgtgcctgagcctggtagcagagctcgttgctgggtgaggatggcactccccgagttttcccaaccgacgggatgaccttccattgtgttttcccaaccctgctcatcctgtagcataaatgaagtgcactattaaacagaatagtttttcagaag

SEQ ID NO: 35065 - DNA, 999 bp, Homo sapiens
  source 1..999: mol_type = unassigned DNA
agtggtgcgatgtcggctcactgcaacctccgcctcctgggttcaagcgattctcctgtctcagcctccagagtagctgggattacaggcgtctgccaccacgcccgggtaatttttttgtatttttagtcgagacggggtttcgccatgttggccaggctggtctcgaactcctgacctcaggtgatccgcccgcctcggcctcctaaagtgctgggattacaggcgtgagcctccgcgcccggccgcattggcatcaacaaaagtcagaattcccgggaacttgaacagaggctgctaaattcccagtaattgctcctttggccttctagggactgacttcaaagaaggaaggaaagaatcaggcagtgcttcctcattctcttttaaaacccgcttcccgctgagtctgcacccaggagaccagagagcaccttgcccttccatggaaactcaggctgatctcgtatctcaggaacctcaggccctgcttgacagtgctcttccttcaaaagttcctgccttttccgacaaggacagcctgggggatgagatgttggcggctgcgctcctaaaggccaagtcccaggagctggtaacctttgaggatgtagctgtgtacttcatccggaaggagtggaagcgtttggaacctgctcagagggacctctatagagatgtgatgctggagaattacgggaatgtgttctcactggatcgtgagaccaggactgaaaatgatcaagaaatttctgaagacacaagatcacatggggtcctactgggaagatttcaaaaggatatttctcagggtctcaagtttaaagaagcctatgaacgagaagtcagtctgaaaaggccgctggggaactcccctggagaaagactgaacaggaaaatgccagattttggtcaagtgacagttgaggagaagctaacccccaggggagagagaagcgagaaatataatgattttgggaacagcttcactgtgaattc

SEQ ID NO: 35066 - DNA, 735 bp, Homo sapiens
  source 1..735: mol_type = unassigned DNA
ggaacttccgttctttgttctgtccccggtgtgtgggtctgtgacagggtccaacagggcctggtccgtgtccggtcccccaaatctgtcgtccctgcccccaggtgcttcctcattctcttttaaaacccgcttcccgctgagtctgcacccaggagaccagagagcaccttgcccttccatggaaactcaggctgatctcgtatctcaggaacctcaggccctgcttgacagtgctcttccttcaaaagttcctgccttttccgacaaggacagcctgggggatgagatgttggcggctgcgctcctaaaggccaagtcccaggagctggtaacctttgaggatgtagctgtgtacttcatccggaaggagtggaagcgtttggaacctgctcagagggacctctatagagatgtgatgctggagaattacgggaatgtgttctcactggatcgtgagaccaggactgaaaatgatcaagaaatttctgaagacacaagatcacatggggtcctactgggaagatttcaaaaggatatttctcagggtctcaagtttaaagaagcctatgaacgagaagtcagtctgaaaaggccgctggggaactcccctggagaaagactgaacaggaaaatgccagattttggtcaagtgacagttgaggagaagctaacccccaggggagagagaagcgagaaatataatgattttgggaacagcttcactgtgaattc

SEQ ID NO: 35067 - DNA, 4994 bp, Homo sapiens
  source 1..4994: mol_type = unassigned DNA
aagtggccgatgcccgtcgccagtgacaccgggacaacagctgcgggctctgtgcgagcggcccagcagcgcggagcctcagcggagtgagcgagcgcggggcagtagcggcctgcgattgtgagatggggactgagaacaaggaggtgattcccaaggaagaaatttctgaagaatctgagccacatgggtcattattagaaaaatttccaaaagtggtttaccaaggtcatgagtttggagcaggatgtgaagaagacatgttggagggacattcgagagagtccatggaagaggttatagagcagatgtctcctcaggagagagactttccatcagggttgatgatctttaagaaatcaccctcaagtgagaaagaccgggagaataatgagagtgagagaggctgcagtcccagcccaaatctggttacacatcagggagatacaacagagggagttagtgcatttgctacctctggccaaaacttcctagagattttagaatctaacaaaacacagagaagttctgtgggagaaaagcctcatacatgtaaagaatgtgggaaagcctttaatcagaactcacatctcatccagcatatgagagttcatagtggagaaaaaccctttgaatgtaaagaatgtggaaagacatttggaactaattcaagccttcgacggcacctgagaattcatgctggagaaaaaccctttgcttgtaatgaatgtggaaaggccttcattcagagttcacaccttattcaccatcatagaattcatactggagagagaccctataaatgtgaagaatgtggtaaagccttcagtcaaaattcagcccttattctacaccagagaatccatactggagagaaaccatatgaatgtaatgaatgtgggaagacctttagggttagttcacagcttattcagcatcagagaattcatactgaagaaagataccatgaatgcaatgagtgtggcaaagccttcaagcatagctcaggccttattagacaccagaaaattcatactggagaaaaaccatatctgtgtaatgaatgtgggaagggcttcgggcagagttctgagcttatccggcatcagagaattcatacaggggacaaaccctatgaatgtaatgaatgtgggaaaacttttggccagaactcagagattattagacatattagaattcatactggtgagaagccctatgtatgtaaggaatgtgggaaggccttcagggggaactcagaacttcttagacatgagagaattcacactggagagaaaccctatgaatgctttgagtgtggaaaggctttcaggcggacctctcaccttattgtccaccagagaattcatactggagagaaaccccatcaatgtaatgagtgtgcaagaaccttttgggataattctgagctgcttctccaccagaaaattcatattggagagaaaccttatgaatgtagcgagtgtgagaaaacatttagccagcattcccaacttatcatacatcagagaattcacactggagagaagccttatgagtgccaagaatgtcagaagacttttagtcggagctctcacctcctccgacatcaaagtgttcactgtatggagtaatctgcaaaataggaaagcttttagtggaaaagctaaagtccaacttattcatttgttcataatatgcaaatatgcaccccaagtattcaaatccaatgaatggacagaacctcctctgtcctcccactgattttaaatagttggttgaagaagatgaggcacttttttttttttttttttaagcattggggtcttgctctgttgcccaggatgggatgcagtggcacagtcgtaactcactgcttccttgaactcctgggctcaaacagtcctcctgcctcagccttccaaatagctaggactgcaggcactaatgaggcacttttatgaattattcattgagaggtttcagtgtgctaagttaaatcataaaagctctttcaggccttaatttcccctctgtccttccttccccttctcctcccccagtggatcacataacaaacattaagggtctgtaccagccatctttcctaaattactcttcagcaaaattgtgggaacaggattccaccacctcctaagaatgagagttgactcattgactgttaccccctgaaatattagaaagtcataatttagaagacacacctcattctcctgtccactgtttagcattggaataatttagtaagctgttattagcttcaaagtcgtccagccctgctatgaagttactttagaagatggcagcattaatgaagaagcaggctcatttcacatctgtcaggcttccttattcatctgaagaggctgccatgatggaggaactgacaggcaatttacaacgggattataagtgaaggccttagaatccagaggggccgattaggcaacaccaggggataaacaattgaggtcacactgctcggcatgggcagaagcagctcttcaggagctgtccacacttcaggggtgctcagactgactgctcctaagaattctgctgcatatatttttagccccatctcctgccactgctgacagatattgtgacagtaagtagcagacaggactgtggcttcacctcctccgggcacctggctacagtgatgagtcagttcacctgatgacaaaccagggtctggccttgccaaagcacttaagttctcatgacctggaccgcactggaggccctggctaagtcaggatgtcgtagcctcttcttggttttgccccttggccttgaaattcttttttcttgaataactttaaaaaaatagagataaagtcttgctatgttgcccaggctggtcttgaatgcctgggctccagcaatctttttgcctcaacttcccaaagtattgagattacaggtgtgagctaccatgcccggccttgaaattctttcttcgctatgtctgcatgttttttgtgttctgtatttatttcttctccaaggaaacagcctacattttccatgtgtccatgtttctgaggccgtgggtgacagtgggaattgcactaatgggggcccaacaggcctgggggctggtcttagcgctagaccttgaacaaggcacttcacctgctggtctccaattttctcctctgtaaaatgaaagagttgaactaagtgatctcaaaagtttcaaccagcccgataattccttaattctttaaaaatttaactttatatatctttattattctttaacctcatctttgttacactaatattagtcactaatatttattgagtgtttactacctgacaggcagagtgccagtttacattttaattttcacatcatttctatgatgtgggtactcatttttttaaagctttatgaaggtataatttacgtactataaaattcacctgttttaagtgttcagttgaatgatttttaatttacatagtggtgcaaccatcaatgatgtgggtattcttaccccaatttaaaagataagaaggggcagtgttaagtaattgacccatgattccacagctagtaagagcgacagccaagactccaaacctggttgatgctcttaaccactgtgctatgccgcaggtaggcagattcattactgccttatctgaaaccctttgcacagtttctattactgatttctatgtagatttgaatataacaaatttaaatcatgtccttggtaacagaactgatcacagccaaaaaaaattcaccaaatgggtttattctgtactccaatataggtgtcttcccaggtttatatccttggcttgagaaaagggttgtacaaatagatgattgcagagtttccacatccttccagatacctctgcctctagcagtcacactcttagtaagggaagttgtttgatttacttcttcccttaggttgattacaagtgaagtgcgccgtcttattcctttttcattgctggagcacaaattgaattgtgcccagaccgtatctttctcacatgaaacctggatctcacctatcccttccatgcctgattcccgtgtttgcatattttatttccacatttacctcttgtcagccctgacagagaatttggcaccccttcaagcttctcctaaacaatctatgcacacaaacacccctgagcaatatggacttcactgaagatagtgtgtaagcaaaggagaagagttcacattgtgcatcctattagacattttgttctcagaagtaccttactggccaaaccaatgaaggttttcctcttgtcctcccctctcaaggctcagtcacctcaacttctttttgcctactagatatccaatccatcacctcgcctcccctggccctagctcaattaccctcttaaacccattcctgctcagcaaaacttcctctagttcaccattcattcatttgaacattaggaggcaatttagtgacctgttgtacctgaccatgttcttaagggggaggtctcacgtctcattcccagaaaagtctaccatatatagatacatattccccgccccgccccagatttctggtgaatgaaatcacttgtatcttattaggtacatatacgcaaatccttaacctcaattctctgtcctcttcatgtcttacccagatatctcaggaagatttctcttttccttctgtttgcctccctcttcgacttacttgggagtcagcatctgaccacagtcgtgactggtaatgatgatttgtgcaaatactatcaaggaaaggacatgaattgtcttaattttagacccattaaaaaaccgcacaggcctcaatcttaaaagtcctatctaaatacccagaaatacccttcagaatttttgaagctatgcccatgtacaaaattttcttccttccctaattttaatggtatactaacaccttaggtaaataaaatatttctttactattttattg

SEQ ID NO: 35068 - DNA, 3268 bp, Homo sapiens
  source 1..3268: mol_type = unassigned DNA
agtacgaagacgaccgggctctcaagatggcggccccatgcggaaacagctccagggagcagccatgttgcttcctgaacaaagcctctgaagatgcggaacgggcaaaaccgcccagtacggaacggcgcagcctcgggagcccggtgtggtgctcgcggacaggaagcaggagagtttgccaatagggatgtgacagcggttcccattaagcggtgatggtggttttgggacctgataatcgagctgggagtcagaggcgggatgtgtgcggtgaaggatgttttgatacccccatataaaataatctgtctgtcatgggagcccccacgtcctctgaaatagttcagctctgtctgcatgacttgtcctgggactgaggaaaatttaccagtcatctggccttttggaagagcaaaaaatgatgaagtcccaggggttagtatcattcaaggatgtggctgtggatttcacccaggaggagtggcagcaacttgacccttctcagaggaccctgtacagggatgtgatgctggagaactacagccacctggtctcaatggggtatccagtttccaaaccagatgtcatctccaagttggaacaaggagaagagccatggatcataaagggagacatatcaaattggatctatccagatgaatatcaggcagatgggagacaagacaggaagagtaaccttcacaactcccagtcatgtattttggggacagtttccttccatcataagatactgaaaggagtcacaagggatggttcattgtgctccattttaaaagtctgtcaaggtgatggtcagctgcagagatttctagagaatcaagacaaactcttcaggcaggtcacatttgttaacagcaaaacagtgactgaggcatcagggcataaatataatccactggggaaaatatttcaagagtgcatagaaacagatatatcaatacagagattccataaatatgatgcttttaaaaagaacttaaaaccaaatattgacctaccgagttgttataagagcaattcaagaaaaaaacctgatcagagttttggaggtggaaaatcatctagccagagtgagcccaattctaatcttgagaagattcacaatggagtaataccttttgatgataatcagtgtggaaacgtttttagaaatacacaatcccttattcaatatcagaatgtggaaactaaagagaaaagctgtgtatgtgttacatgtggaaaagcctttgctaagaagtcacaactcattgtacatcaaagaattcatactggaaagaaaccatatgattgtggtgcatgcggaaaagccttcagtgagaagtttcatcttgttgtacatcagagaactcatactggggagaaaccttatgattgttctgaatgtggaaaagccttctctcagaaatcgtcccttattatacatcagagagttcacactggggaaaaaccctatgaatgtagtgaatgcgggaaagccttctcccagaaatcacccctcattatacatcagagaatacatactggggaaaaaccctatgaatgtagagagtgtgggaaggccttttcccagaagtcacagctgattatacaccacagagctcatactggagagaagccgtatgagtgtaccgaatgtgggaaagccttctgtgagaagtcccacctcattatacataaaagaattcacactggtgagaaaccctacaaatgtgctcaatgtgaggaagccttcagcaggaagacagaactcattacacatcagttagttcatactggggaaaaaccttatgaatgtactgaatgtggaaagacattctcccgcaagtcacagctcatcatacatcagagaacacatactggagaaaaaccctataaatgtagtgaatgtggcaaagccttctgccagaagtcacatctcattggacatcagagaattcacacaggagaaaaaccttatatatgtactgaatgtgggaaagccttctctcagaagtcccaccttccgggacaccagcgaattcatacaggagagaaaccttacatatgtgctgaatgtggaaaggccttttctcagaagtcagaccttgttttacatcagaggattcatactggggaaagaccctatcaatgtgctatatgtgggaaggccttcatccagaagtcacaactaactgtacaccagagaattcacacagtggtaaaatcataatgaactggccacagaaaagccttagtattagctcaagccttaataattactagaaacccaattaatttgataagcttggggacaacatcccaatagataaaaatttttaagggaatttgtttctagtttggtgatgcctaacttttccagcaaagatgatggaaaatagttatataaatgaagaacatttttaatatggcatgtaaagcttttaaagttatgaactcagtgatcagcacagcaagttaagcatacagaatattgtcaagttgcatattccttatactacaaaatgataatcagccattgtgaaactgctaatattagcttgtcataattatggccataaactaatttttctataaaagacgtggaagaaagcttaagtaaacaataaaataaaacctatacactattttaagaaggggcttgagcatgacccctaaagctacatgtaaagttcttgtacaaaaaatggaatgataggttgatcagattcagtaaagttgatctgtatgcattttcccatctcaagcatataagttgacctgcatctctggaaggaccttgagattgatgcattttgagcaggtctcccttttactcttcccaactgggaacttggagctgaaaaacattggcactgaggccagatggccttgggtttaatcctggctcagtgcctcacagattgtgtgactttaggcaaacatacttctcctagctgagtattttttatcagtaagtacaaatacaatgcagagctcattttcagttaatattagtactttttaaatctttactctctatcttgaagcattagatgttaagactaatgtgtaaaaaccacgtctgagcttgcttttccctctggacactctgcttttgattgcctatccctataagtggctcattttactgtcttctgatcctggtggccttatttttgctatgttaaggttgtgttttttaatacttggatttattttcatatacttacataaaccgtggtgattgcacataaagaccctg

SEQ ID NO: 35069 - DNA, 3256 bp, Homo sapiens
  source 1..3256: mol_type = unassigned DNA
gaagacgaccgggctctcaagatggcggccccatgcggaaacagctccagggagcagccatgttgcttcctgaacaaagcctctgaagatgcggaacgggcaaaaccgcccagtacggaacggcgcagcctcgggagcccggtgtggtgctcgcggacaggaagcaggagagtttgccaatagggatgtgacagcggttcccattaagcggtgatggtggttttgggacctgataatcgagctgggagtcagaggcgggatgtgtgcggtgaaggatgttttgatacccccatataaaataatctgtctgtcatgggagcccccacgtcctctgaaatagttcagctctgtctgcatgacttgtcctgggactgaggaaaatttaccagtcatctggccttttggaagagcaaaaaatgatgaagtcccaggggttagtatcattcaaggatgtggctgtggatttcacccaggaggagtggcagcaacttgacccttctcagaggaccctgtacagggatgtgatgctggagaactacagccacctggtctcaatggggtatccagtttccaaaccagatgtcatctccaagttggaacaaggagaagagccatggatcataaagggagacatatcaaattggatctatccagatgaatatcaggcagatgggagacaagggaagaagagtaaccttcacaactcccagtcatgtattttggggacagtttccttccatcataagatactgaaaggagtcacaagggatggttcattgtgctccattttaaaagtctgtcaaggtgatggtcagctgcagagatttctagagaatcaagacaaactcttcaggcaggtcacatttgttaacagcaaaacagtgactgaggcatcagggcataaatataatccactggggaaaatatttcaagagtgcatagaaacagatatatcaatacagagattccataaatatgatgcttttaaaaagaacttaaaaccaaatattgacctaccgagttgttataagagcaattcaagaaaaaaacctgatcagagttttggaggtggaaaatcatctagccagagtgagcccaattctaatcttgagaagattcacaatggagtaataccttttgatgataatcagtgtggaaacgtttttagaaatacacaatcccttattcaatatcagaatgtggaaactaaagagaaaagctgtgtatgtgttacatgtggaaaagcctttgctaagaagtcacaactcattgtacatcaaagaattcatactggaaagaaaccatatgattgtggtgcatgcggaaaagccttcagtgagaagtttcatcttgttgtacatcagagaactcatactggggagaaaccttatgattgttctgaatgtggaaaagccttctctcagaaatcgtcccttattatacatcagagagttcacactggggaaaaaccctatgaatgtagtgaatgcgggaaagccttctcccagaaatcacccctcattatacatcagagaatacatactggggaaaaaccctatgaatgtagagagtgtgggaaggccttttcccagaagtcacagctgattatacaccacagagctcatactggagagaagccgtatgagtgtaccgaatgtgggaaagccttctgtgagaagtcccacctcattatacataaaagaattcacactggtgagaaaccctacaaatgtgctcaatgtgaggaagccttcagcaggaagacagaactcattacacatcagttagttcatactggggaaaaaccttatgaatgtactgaatgtggaaagacattctcccgcaagtcacagctcatcatacatcagagaacacatactggagaaaaaccctataaatgtagtgaatgtggcaaagccttctgccagaagtcacatctcattggacatcagagaattcacacaggagaaaaaccttatatatgtactgaatgtgggaaagccttctctcagaagtcccaccttccgggacaccagcgaattcatacaggagagaaaccttacatatgtgctgaatgtggaaaggccttttctcagaagtcagaccttgttttacatcagaggattcatactggggaaagaccctatcaatgtgctatatgtgggaaggccttcatccagaagtcacaactaactgtacaccagagaattcacacagtggtaaaatcataatgaactggccacagaaaagccttagtattagctcaagccttaataattactagaaacccaattaatttgataagcttggggacaacatcccaatagataaaaatttttaagggaatttgtttctagtttggtgatgcctaacttttccagcaaagatgatggaaaatagttatataaatgaagaacatttttaatatggcatgtaaagcttttaaagttatgaactcagtgatcagcacagcaagttaagcatacagaatattgtcaagttgcatattccttatactacaaaatgataatcagccattgtgaaactgctaatattagcttgtcataattatggccataaactaatttttctataaaagacgtggaagaaagcttaagtaaacaataaaataaaacctatacactattttaagaaggggcttgagcatgacccctaaagctacatgtaaagttcttgtacaaaaaatggaatgataggttgatcagattcagtaaagttgatctgtatgcattttcccatctcaagcatataagttgacctgcatctctggaaggaccttgagattgatgcattttgagcaggtctcccttttactcttcccaactgggaacttggagctgaaaaacattggcactgaggccagatggccttgggtttaatcctggctcagtgcctcacagattgtgtgactttaggcaaacatacttctcctagctgagtattttttatcagtaagtacaaatacaatgcagagctcattttcagttaatattagtactttttaaatctttactctctatcttgaagcattagatgttaagactaatgtgtaaaaaccacgtctgagcttgcttttccctctggacactctgcttttgattgcctatccctataagtggctcattttactgtcttctgatcctggtggccttatttttgctatgttaaggttgtgttttttaatacttggatttattttcatatacttacataaaccgtggtgattgcacataaa

SEQ ID NO: 35070 - DNA, 3226 bp, Homo sapiens
  source 1..3226: mol_type = unassigned DNA
agtacgaagacgaccgggctctcaagatggcggccccatgcggaaacagctccagggagcagccatgttgcttcctgaacaaagcctctgaagatgcggaacgggcaaaaccgcccagtacggaacggcgcagcctcgggagcccggtgtggtgctcgcggacaggaagcaggagagtttgccaatagggatgtgacagcggttcccattaagcggtgatggtggttttgggacctgataatcgagctgggagtcagaggcgggatgtgtgcggtgaaggatgttttgatacccccatataaaataatctgtctgtcatgggagcccccacgtcctctgaaatagttcagctctgtctgcatgacttgtcctgggactgaggaaaatttaccaggggttagtatcattcaaggatgtggctgtggatttcacccaggaggagtggcagcaacttgacccttctcagaggaccctgtacagggatgtgatgctggagaactacagccacctggtctcaatggggtatccagtttccaaaccagatgtcatctccaagttggaacaaggagaagagccatggatcataaagggagacatatcaaattggatctatccagatgaatatcaggcagatgggagacaagacaggaagagtaaccttcacaactcccagtcatgtattttggggacagtttccttccatcataagatactgaaaggagtcacaagggatggttcattgtgctccattttaaaagtctgtcaaggtgatggtcagctgcagagatttctagagaatcaagacaaactcttcaggcaggtcacatttgttaacagcaaaacagtgactgaggcatcagggcataaatataatccactggggaaaatatttcaagagtgcatagaaacagatatatcaatacagagattccataaatatgatgcttttaaaaagaacttaaaaccaaatattgacctaccgagttgttataagagcaattcaagaaaaaaacctgatcagagttttggaggtggaaaatcatctagccagagtgagcccaattctaatcttgagaagattcacaatggagtaataccttttgatgataatcagtgtggaaacgtttttagaaatacacaatcccttattcaatatcagaatgtggaaactaaagagaaaagctgtgtatgtgttacatgtggaaaagcctttgctaagaagtcacaactcattgtacatcaaagaattcatactggaaagaaaccatatgattgtggtgcatgcggaaaagccttcagtgagaagtttcatcttgttgtacatcagagaactcatactggggagaaaccttatgattgttctgaatgtggaaaagccttctctcagaaatcgtcccttattatacatcagagagttcacactggggaaaaaccctatgaatgtagtgaatgcgggaaagccttctcccagaaatcacccctcattatacatcagagaatacatactggggaaaaaccctatgaatgtagagagtgtgggaaggccttttcccagaagtcacagctgattatacaccacagagctcatactggagagaagccgtatgagtgtaccgaatgtgggaaagccttctgtgagaagtcccacctcattatacataaaagaattcacactggtgagaaaccctacaaatgtgctcaatgtgaggaagccttcagcaggaagacagaactcattacacatcagttagttcatactggggaaaaaccttatgaatgtactgaatgtggaaagacattctcccgcaagtcacagctcatcatacatcagagaacacatactggagaaaaaccctataaatgtagtgaatgtggcaaagccttctgccagaagtcacatctcattggacatcagagaattcacacaggagaaaaaccttatatatgtactgaatgtgggaaagccttctctcagaagtcccaccttccgggacaccagcgaattcatacaggagagaaaccttacatatgtgctgaatgtggaaaggccttttctcagaagtcagaccttgttttacatcagaggattcatactggggaaagaccctatcaatgtgctatatgtgggaaggccttcatccagaagtcacaactaactgtacaccagagaattcacacagtggtaaaatcataatgaactggccacagaaaagccttagtattagctcaagccttaataattactagaaacccaattaatttgataagcttggggacaacatcccaatagataaaaatttttaagggaatttgtttctagtttggtgatgcctaacttttccagcaaagatgatggaaaatagttatataaatgaagaacatttttaatatggcatgtaaagcttttaaagttatgaactcagtgatcagcacagcaagttaagcatacagaatattgtcaagttgcatattccttatactacaaaatgataatcagccattgtgaaactgctaatattagcttgtcataattatggccataaactaatttttctataaaagacgtggaagaaagcttaagtaaacaataaaataaaacctatacactattttaagaaggggcttgagcatgacccctaaagctacatgtaaagttcttgtacaaaaaatggaatgataggttgatcagattcagtaaagttgatctgtatgcattttcccatctcaagcatataagttgacctgcatctctggaaggaccttgagattgatgcattttgagcaggtctcccttttactcttcccaactgggaacttggagctgaaaaacattggcactgaggccagatggccttgggtttaatcctggctcagtgcctcacagattgtgtgactttaggcaaacatacttctcctagctgagtattttttatcagtaagtacaaatacaatgcagagctcattttcagttaatattagtactttttaaatctttactctctatcttgaagcattagatgttaagactaatgtgtaaaaaccacgtctgagcttgcttttccctctggacactctgcttttgattgcctatccctataagtggctcattttactgtcttctgatcctggtggccttatttttgctatgttaaggttgtgttttttaatacttggatttattttcatatacttacataaaccgtggtgattgcacataaagaccctg

SEQ ID NO: 35071 - DNA, 3323 bp, Homo sapiens
  source 1..3323: mol_type = unassigned DNA
agtacgaagacgaccgggctctcaagatggcggccccatgcggaaacagctccagggagcagccatgttgcttcctgaacaaagcctctgaagatgcggaacgggcaaaaccgcccagtacggaacggcgcagcctcgggagcccggtgtggtgctcgcggacaggaagcaggagagtttgccaatagggatgtgacagcggttcccattaagcggtgatggtggttttgggacctgataatcgagctgggagtcagaggcgggatgtgtgcggtgaaggatgttttgatacccccatataaaataatctgtctgtcatgggagcccccacgtcctctgaaatagttcagctctgtctgcatgacttgtcctgggactgaggaaaatttaccaggtacaagaggagtaaagaatgatccctcctccacatggtgcctgctgagacttcttcatctggccttttggaagagcaaaaaatgatgaagtcccaggggttagtatcattcaaggatgtggctgtggatttcacccaggaggagtggcagcaacttgacccttctcagaggaccctgtacagggatgtgatgctggagaactacagccacctggtctcaatggggtatccagtttccaaaccagatgtcatctccaagttggaacaaggagaagagccatggatcataaagggagacatatcaaattggatctatccagatgaatatcaggcagatgggagacaagacaggaagagtaaccttcacaactcccagtcatgtattttggggacagtttccttccatcataagatactgaaaggagtcacaagggatggttcattgtgctccattttaaaagtctgtcaaggtgatggtcagctgcagagatttctagagaatcaagacaaactcttcaggcaggtcacatttgttaacagcaaaacagtgactgaggcatcagggcataaatataatccactggggaaaatatttcaagagtgcatagaaacagatatatcaatacagagattccataaatatgatgcttttaaaaagaacttaaaaccaaatattgacctaccgagttgttataagagcaattcaagaaaaaaacctgatcagagttttggaggtggaaaatcatctagccagagtgagcccaattctaatcttgagaagattcacaatggagtaataccttttgatgataatcagtgtggaaacgtttttagaaatacacaatcccttattcaatatcagaatgtggaaactaaagagaaaagctgtgtatgtgttacatgtggaaaagcctttgctaagaagtcacaactcattgtacatcaaagaattcatactggaaagaaaccatatgattgtggtgcatgcggaaaagccttcagtgagaagtttcatcttgttgtacatcagagaactcatactggggagaaaccttatgattgttctgaatgtggaaaagccttctctcagaaatcgtcccttattatacatcagagagttcacactggggaaaaaccctatgaatgtagtgaatgcgggaaagccttctcccagaaatcacccctcattatacatcagagaatacatactggggaaaaaccctatgaatgtagagagtgtgggaaggccttttcccagaagtcacagctgattatacaccacagagctcatactggagagaagccgtatgagtgtaccgaatgtgggaaagccttctgtgagaagtcccacctcattatacataaaagaattcacactggtgagaaaccctacaaatgtgctcaatgtgaggaagccttcagcaggaagacagaactcattacacatcagttagttcatactggggaaaaaccttatgaatgtactgaatgtggaaagacattctcccgcaagtcacagctcatcatacatcagagaacacatactggagaaaaaccctataaatgtagtgaatgtggcaaagccttctgccagaagtcacatctcattggacatcagagaattcacacaggagaaaaaccttatatatgtactgaatgtgggaaagccttctctcagaagtcccaccttccgggacaccagcgaattcatacaggagagaaaccttacatatgtgctgaatgtggaaaggccttttctcagaagtcagaccttgttttacatcagaggattcatactggggaaagaccctatcaatgtgctatatgtgggaaggccttcatccagaagtcacaactaactgtacaccagagaattcacacagtggtaaaatcataatgaactggccacagaaaagccttagtattagctcaagccttaataattactagaaacccaattaatttgataagcttggggacaacatcccaatagataaaaatttttaagggaatttgtttctagtttggtgatgcctaacttttccagcaaagatgatggaaaatagttatataaatgaagaacatttttaatatggcatgtaaagcttttaaagttatgaactcagtgatcagcacagcaagttaagcatacagaatattgtcaagttgcatattccttatactacaaaatgataatcagccattgtgaaactgctaatattagcttgtcataattatggccataaactaatttttctataaaagacgtggaagaaagcttaagtaaacaataaaataaaacctatacactattttaagaaggggcttgagcatgacccctaaagctacatgtaaagttcttgtacaaaaaatggaatgataggttgatcagattcagtaaagttgatctgtatgcattttcccatctcaagcatataagttgacctgcatctctggaaggaccttgagattgatgcattttgagcaggtctcccttttactcttcccaactgggaacttggagctgaaaaacattggcactgaggccagatggccttgggtttaatcctggctcagtgcctcacagattgtgtgactttaggcaaacatacttctcctagctgagtattttttatcagtaagtacaaatacaatgcagagctcattttcagttaatattagtactttttaaatctttactctctatcttgaagcattagatgttaagactaatgtgtaaaaaccacgtctgagcttgcttttccctctggacactctgcttttgattgcctatccctataagtggctcattttactgtcttctgatcctggtggccttatttttgctatgttaaggttgtgttttttaatacttggatttattttcatatacttacataaaccgtggtgattgcacataaagaccctg

SEQ ID NO: 35072 - DNA, 4417 bp, Homo sapiens
  source 1..4417: mol_type = unassigned DNA
ttcctatgcccggtccgtgcattctggttgtgaaggctgagttctagagatcgggtcggctttctacgcggctctcgtggaacctagcaaagaaagacagtgaagactgcaggaccttccttcgcgcttttgttacaatccatgacccctgtcgtgggacgggcggcctctcgcggaggtgtctgccggggctgggctcttaccgaggcctccacacacgtcctcttgtccttgtctcccccagaagcagccgccttagtcttgtgagcgtttttacaccgggtagattgagacttggagtgctacactcagcccgagggcgtccagcgcggtggaggcgtggggtttcggctgagcccacagggcacagactgttcatccgcttctcatggcagcggcggtgctgatggaccgggttcagagttgtgtgaccttcgaggatgtgttcgtgtacttctctcgggaggagtgggaactccttgaggaggcacagagattcctgtaccgtgatgtgatgctggagaactttgcacttgtggctacactaggtttttggtgtgaagcagaacatgaggcaccttctgagcagagcgtttctgtagaaggagtgtcacaggtcaggactgctgagtcaggtcttttccagaaagcacacccatgtgagatgtgtgacccactcttgaaagacattttgcacctggctgaacaccagggatcacaccttacacagaaactgtgcacacgtgggctgtgtaggagaagattctcgttcagtgcaaacttttaccagcaccagaagcaacataatggagagaattgcttcagaggggatgatggaggggcctcatttgtgaagagctgtacagtccacatgttagggagatcctttacgtgcagggaggaagggatggacttaccagatagctctggccttttccagcaccagaccacttacaatagggtgagtccatgcagaaggactgaatgcatggagtctttcccacacagctccagtctcaggcaacaccaaggagactatgatggacagatgcttttcagttgcggtgatgaagggaaagccttcctggacacctttactcttcttgacagccagatgactcatgctgaggtgagacccttcagatgcctaccatgtggaaatgtgttcaaggagaaatcagctcttattaatcacagaaaaatccacagtggagaaatatctcatgtgtgtaaggagtgtggaaaagccttcattcacttgcaccacctaaaaatgcaccagaaatttcacactggaaaaagacactatacatgcagtgaatgtgggaaggccttcagccgcaaggacacacttgttcagcatcagagagttcacactggagaaagatcttatgactgcagtgaatgtggaaaagcctacagcagaagctcccaccttgttcagcaccagagaattcacacaggagaaaggccttataagtgcaacaaatgtgggaaagcctttagccgtaaagacacacttgttcagcaccagagatttcatactggagaaaggccttatgagtgcagtgaatgtggaaaattctttagccaaagctcccaccttattgagcactggagaattcataccggggcaaggccctatgaatgcatagaatgtggaaaattctttagccataactctagcctcattaaacatcggagagtccacacaggagcaagatcctacgtgtgcagcaaatgtgggaaggcctttggctgcaaagacacacttgttcagcaccagataattcacactggagcaaggccttatgagtgcagtgaatgtgggaaggccttcagccgtaaagacacacttgtgcaacaccaaaaaatccacactggagaaaggccttatgagtgtggtgaatgtggtaaattcttcagccatagctccaaccttattgtacaccagagaattcacactggagcaaagccttatgagtgcaatgaatgtgggaaatgctttagccacaactccagcctcattttgcaccagagagttcacacaggagcaaggccttatgtgtgcagtgaatgtgggaaggcttacattagtagctcccaccttgttcaacacaagaaagttcacactggagcaagaccttatgagtgcagtgaatgtgggaaattctttagccgcaactctggcctcattctgcaccagagggttcacactggagaaaagccttacgtatgcagcgaatgtgggaaagcctatagcagaagctcccatcttgttcgtcaccagaaagctcacactggagaaagagctcacgagtgcaacagttttggtggccctttagctgcatctcttaaacttgtttaacaccagaaaattcacacaagagaaaggccttatgaatgcagaaaatatgtcatcttgttcatcctcataggactcacaccagagcaatgctctgtgagtaccctttgtgagggaaccatcagctagcagatgagcaccgtatattcattccaccctggggagattcctgataagcaccacatatgtgggaggctttcatgaggtgtgttgcactttgtaactgtctagagctcttgatggaattatatcactgccagtgcctgtggcggaagccatcttattgctaccagctgtgtgtgtcaatcactccattttgctcagggaaggcagacttctgtgctttctttcctgttccctacaggtaatcatgaatattttcaaggacttccccccccccccacttcaccccctaccattgagggtcctcatcttttccctcatgattaggttctgagcaaacatgatctagctctcaccaaaaggacctgagctagggtctgctgggatttcctgacacgattttccatcttcatggacaatgttaactgtaaacgtgatagctgtgacttacttgtcttactgccaaatcgcccaaatttggaactgcttgtcccatgctgctctgatttatacagtgataagggcctattgtggcagtctttactcttggggattttgttactgtgtagagtggattgagaaaagaattgggttctgtcatgaagggagtagcaccttttgtgggcaccacctttatgtgcctcagaggggaccaaaggatggcagaaaactgttctcagtctagtttgacctaatttacactattgccctaggcttgctaggaaagactgaaaaaatttttgtgcctaactttgtggcctggctgccaggatttcctgtgagcccagtgaggagggcatagttggtgcgaaaatctcctgtgcttgtggaagcaacataagttgggtcccttaactgtcacgtactccccagcactgttgagggattgctgtcttctgtacctgtacaggatcaagtccctgatatccagaaccccataggcaagtaacattgactgtaagacctctgtagggcaatgtgaaaatcatgattgctacagaagcactgagataatggagtggggatgactgtggcaaacaaaaggagattcgaacattctagaggggcatccacaagtctcggtgcagttatgatggtgtgggatgggagtgcatagaaattctcaggaccttcagacatctgtatctcctgtggccaaggccactgtcagaggaaataatctaaatgtttgtggattcctgtgtctccctgggcagttgacctgcacagacaggaacctcagcagtgacagaagagagatccagggatgggtcttctctgacccagccagcattccgagtgactgaggtggatgtggacatcattgcttaccaatttttaccaacattgaggcagggctcactctcctaaattgtagggagaggaatatggtaaagccaaaatagttgacagatctaactttcctagtggaacagtatatatagattttaatgaggaacatttatttaatagctttatggaggtatgattaacatgcaataaactgcaaatatgtaaagtgtaaaatgtgctgtttcagcatgtgtgtacacctatgaaaccaccacagtcaagatatccaacacaacaaaagattgtccctttataatcctcaatttttccttatcttgttttccacaattcacaagcaacagcaagcattttctataattttataaatgaaaccatatggtgtgtactttttagggggtggggctctggctttttcagtaaacataactattttaaggttaatccattatcttgttgcatgaatcaattgtttgctcatttgtattgctgcgtagtatttcagtatttcattgtataccacaatttttcttctttgtcaacttaattgttatggatgtttgggtaactttcagtttttggctattacaaataaacctctgaagatttgtgtgcaaa

SEQ ID NO: 35073 - DNA, 4313 bp, Homo sapiens
  source 1..4313: mol_type = unassigned DNA
tgaaggctgagttctagagatcgggtcggctttctacgcggctctcgtggaacctagcaaagaaagacagtgaagactgcaggaccttccttcgcgcttttgttacaatccacacgtcctcttgtccttgtctcccccagaagcagccgccttagtcttgtgagcgtttttacaccgggtagattgagacttggagtgctacactcagcccgagggcgtccagcgcggtggaggcgtggggtttcggctgagcccacagggcacagactgttcatccgcttctcatggcagcggcggtgctgatggaccgggttcagagttgtgtgaccttcgaggatgtgttcgtgtacttctctcgggaggagtgggaactccttgaggaggcacagagattcctgtaccgtgatgtgatgctggagaactttgcacttgtggctacactaggtttttggtgtgaagcagaacatgaggcaccttctgagcagagcgtttctgtagaaggagtgtcacaggtcaggactgctgagtcaggtcttttccagaaagcacacccatgtgagatgtgtgacccactcttgaaagacattttgcacctggctgaacaccagggatcacaccttacacagaaactgtgcacacgtgggctgtgtaggagaagattctcgttcagtgcaaacttttaccagcaccagaagcaacataatggagagaattgcttcagaggggatgatggaggggcctcatttgtgaagagctgtacagtccacatgttagggagatcctttacgtgcagggaggaagggatggacttaccagatagctctggccttttccagcaccagaccacttacaatagggtgagtccatgcagaaggactgaatgcatggagtctttcccacacagctccagtctcaggcaacaccaaggagactatgatggacagatgcttttcagttgcggtgatgaagggaaagccttcctggacacctttactcttcttgacagccagatgactcatgctgaggtgagacccttcagatgcctaccatgtggaaatgtgttcaaggagaaatcagctcttattaatcacagaaaaatccacagtggagaaatatctcatgtgtgtaaggagtgtggaaaagccttcattcacttgcaccacctaaaaatgcaccagaaatttcacactggaaaaagacactatacatgcagtgaatgtgggaaggccttcagccgcaaggacacacttgttcagcatcagagagttcacactggagaaagatcttatgactgcagtgaatgtggaaaagcctacagcagaagctcccaccttgttcagcaccagagaattcacacaggagaaaggccttataagtgcaacaaatgtgggaaagcctttagccgtaaagacacacttgttcagcaccagagatttcatactggagaaaggccttatgagtgcagtgaatgtggaaaattctttagccaaagctcccaccttattgagcactggagaattcataccggggcaaggccctatgaatgcatagaatgtggaaaattctttagccataactctagcctcattaaacatcggagagtccacacaggagcaagatcctacgtgtgcagcaaatgtgggaaggcctttggctgcaaagacacacttgttcagcaccagataattcacactggagcaaggccttatgagtgcagtgaatgtgggaaggccttcagccgtaaagacacacttgtgcaacaccaaaaaatccacactggagaaaggccttatgagtgtggtgaatgtggtaaattcttcagccatagctccaaccttattgtacaccagagaattcacactggagcaaagccttatgagtgcaatgaatgtgggaaatgctttagccacaactccagcctcattttgcaccagagagttcacacaggagcaaggccttatgtgtgcagtgaatgtgggaaggcttacattagtagctcccaccttgttcaacacaagaaagttcacactggagcaagaccttatgagtgcagtgaatgtgggaaattctttagccgcaactctggcctcattctgcaccagagggttcacactggagaaaagccttacgtatgcagcgaatgtgggaaagcctatagcagaagctcccatcttgttcgtcaccagaaagctcacactggagaaagagctcacgagtgcaacagttttggtggccctttagctgcatctcttaaacttgtttaacaccagaaaattcacacaagagaaaggccttatgaatgcagaaaatatgtcatcttgttcatcctcataggactcacaccagagcaatgctctgtgagtaccctttgtgagggaaccatcagctagcagatgagcaccgtatattcattccaccctggggagattcctgataagcaccacatatgtgggaggctttcatgaggtgtgttgcactttgtaactgtctagagctcttgatggaattatatcactgccagtgcctgtggcggaagccatcttattgctaccagctgtgtgtgtcaatcactccattttgctcagggaaggcagacttctgtgctttctttcctgttccctacaggtaatcatgaatattttcaaggacttccccccccccccacttcaccccctaccattgagggtcctcatcttttccctcatgattaggttctgagcaaacatgatctagctctcaccaaaaggacctgagctagggtctgctgggatttcctgacacgattttccatcttcatggacaatgttaactgtaaacgtgatagctgtgacttacttgtcttactgccaaatcgcccaaatttggaactgcttgtcccatgctgctctgatttatacagtgataagggcctattgtggcagtctttactcttggggattttgttactgtgtagagtggattgagaaaagaattgggttctgtcatgaagggagtagcaccttttgtgggcaccacctttatgtgcctcagaggggaccaaaggatggcagaaaactgttctcagtctagtttgacctaatttacactattgccctaggcttgctaggaaagactgaaaaaatttttgtgcctaactttgtggcctggctgccaggatttcctgtgagcccagtgaggagggcatagttggtgcgaaaatctcctgtgcttgtggaagcaacataagttgggtcccttaactgtcacgtactccccagcactgttgagggattgctgtcttctgtacctgtacaggatcaagtccctgatatccagaaccccataggcaagtaacattgactgtaagacctctgtagggcaatgtgaaaatcatgattgctacagaagcactgagataatggagtggggatgactgtggcaaacaaaaggagattcgaacattctagaggggcatccacaagtctcggtgcagttatgatggtgtgggatgggagtgcatagaaattctcaggaccttcagacatctgtatctcctgtggccaaggccactgtcagaggaaataatctaaatgtttgtggattcctgtgtctccctgggcagttgacctgcacagacaggaacctcagcagtgacagaagagagatccagggatgggtcttctctgacccagccagcattccgagtgactgaggtggatgtggacatcattgcttaccaatttttaccaacattgaggcagggctcactctcctaaattgtagggagaggaatatggtaaagccaaaatagttgacagatctaactttcctagtggaacagtatatatagattttaatgaggaacatttatttaatagctttatggaggtatgattaacatgcaataaactgcaaatatgtaaagtgtaaaatgtgctgtttcagcatgtgtgtacacctatgaaaccaccacagtcaagatatccaacacaacaaaagattgtccctttataatcctcaatttttccttatcttgttttccacaattcacaagcaacagcaagcattttctataattttataaatgaaaccatatggtgtgtactttttagggggtggggctctggctttttcagtaaacataactattttaaggttaatccattatcttgttgcatgaatcaattgtttgctcatttgtattgctgcgtagtatttcagtatttcattgtataccacaatttttcttctttgtcaacttaattgttatggatgtttgggtaactttcagtttttggctattacaaataaacctctgaagatttgtgtgcaaa

SEQ ID NO: 35074 - DNA, 3391 bp, Homo sapiens
  source 1..3391: mol_type = unassigned DNA
atcgggtcggctttctacgcggctctcgtggaacctagcaaagaaagacagtgaagactgcaggaccttccttcgcgcttttgttacaatccatgacccctgtcgtgggacgggcggcctctcgcggaggtgtctgccggggctgggctcttaccgaggcctccacacacgtcctcttgtccttgtctcccccagaagcagccgccttagtcttgtgagcgtttttacaccgggtagattgagacttggagtgctacactcagcccgagggcgtccagcgcggtggaggcgtggggtttcggctgagcccacagggcacagactgttcatccgcttctcatggcagcggcggtgctgatggaccgggttcagagttgtgtgaccttcgaggatgtgttcgtgtacttctctcgggaggagtgggaactccttgaggaggcacagagattcctgtaccgtgatgtgatgctggagaactttgcacttgtggctacactagctttcattttcccagtcccatgcagttgcgcagttggagggggcagaaaaccttgggtgcctgacagggcagacatcactgcagccacagtaaaggagacctacagagggcatggccctgctgaatgggagctggaagagggtttttggtgtgaagcagaacatgaggcaccttctgagcagagcgtttctgtagaaggagtgtcacaggtcaggactgctgagtcaggtcttttccagaaagcacacccatgtgagatgtgtgacccactcttgaaagacattttgcacctggctgaacaccagggatcacaccttacacagaaactgtgcacacgtgggctgtgtaggagaagattctcgttcagtgcaaacttttaccagcaccagaagcaacataatggagagaattgcttcagaggggatgatggaggggcctcatttgtgaagagctgtacagtccacatgttagggagatcctttacgtgcagggaggaagggatggacttaccagatagctctggccttttccagcaccagaccacttacaatagggtgagtccatgcagaaggactgaatgcatggagtctttcccacacagctccagtctcaggcaacaccaaggagactatgatggacagatgcttttcagttgcggtgatgaagggaaagccttcctggacacctttactcttcttgacagccagatgactcatgctgaggtgagacccttcagatgcctaccatgtggaaatgtgttcaaggagaaatcagctcttattaatcacagaaaaatccacagtggagaaatatctcatgtgtgtaaggagtgtggaaaagccttcattcacttgcaccacctaaaaatgcaccagaaatttcacactggaaaaagacactatacatgcagtgaatgtgggaaggccttcagccgcaaggacacacttgttcagcatcagagagttcacactggagaaagatcttatgactgcagtgaatgtggaaaagcctacagcagaagctcccaccttgttcagcaccagagaattcacacaggagaaaggccttataagtgcaacaaatgtgggaaagcctttagccgtaaagacacacttgttcagcaccagagatttcatactggagaaaggccttatgagtgcagtgaatgtggaaaattctttagccaaagctcccaccttattgagcactggagaattcataccggggcaaggccctatgaatgcatagaatgtggaaaattctttagccataactctagcctcattaaacatcggagagtccacacaggagcaagatcctacgtgtgcagcaaatgtgggaaggcctttggctgcaaagacacacttgttcagcaccagataattcacactggagcaaggccttatgagtgcagtgaatgtgggaaggccttcagccgtaaagacacacttgtgcaacaccaaaaaatccacactggagaaaggccttatgagtgtggtgaatgtggtaaattcttcagccatagctccaaccttattgtacaccagagaattcacactggagcaaagccttatgagtgcaatgaatgtgggaaatgctttagccacaactccagcctcattttgcaccagagagttcacacaggagcaaggccttatgtgtgcagtgaatgtgggaaggcttacattagtagctcccaccttgttcaacacaagaaagttcacactggagcaagaccttatgagtgcagtgaatgtgggaaattctttagccgcaactctggcctcattctgcaccagagggttcacactggagaaaagccttacgtatgcagcgaatgtgggaaagcctatagcagaagctcccatcttgttcgtcaccagaaagctcacactggagaaagagctcacgagtgcaacagttttggtggccctttagctgcatctcttaaacttgtttaacaccagaaaattcacacaagagaaaggccttatgaatgcagaaaatatgtcatcttgttcatcctcataggactcacaccagagcaatgctctgtgagtaccctttgtgagggaaccatcagctagcagatgagcaccgtatattcattccaccctggggagattcctgataagcaccacatatgtgggaggctttcatgaggtgtgttgcactttgtaactgtctagagctcttgatggaattatatcactgccagtgcctgtggcggaagccatcttattgctaccagctgtgtgtgtcaatcactccattttgctcagggaaggcagacttctgtgctttctttcctgttccctacaggtaatcatgaatattttcaaggacttccccccccccccacttcaccccctaccattgagggtcctcatcttttccctcatgattaggttctgagcaaacatgatctagctctcaccaaaaggacctgagctagggtctgctgggatttcctgacacgattttccatcttcatggacaatgttaactgtaaacgtgatagctgtgacttacttgtcttactgccaaatcgcccaaatttggaactgcttgtcccatgctgctctgatttatacagtgataagggcctattgtggcagtctttactcttggggattttgttactgtgtagagtggattgagaaaagaattgggttctgtcatgaagggagtagcaccttttgtgggcaccacctttatgtgcctcagaggggaccaaaggatggcagaaaactgttctcagtctagtttgacctaatttacactattgccctaggcttgctaggaaagactgaaaaaatttttgtgcctaactttgtggcctggctgccaggatttcctgtgagcccagtgaggagggcatagttggtgcga

SEQ ID NO: 35075 - DNA, 4074 bp, Homo sapiens
  source 1..4074: mol_type = unassigned DNA
gagaattggaaggcggcagtgaagcggaagccattactctctggagtcgattgccccgagacacatgggccaaggaggggtcagcggcgaattctttcggcctgttggggacccctcgtgtccccacgccagactggacctcccgtatgaacttctcttcgcatcggcggcggcttccgtcacctccgctcccccgatcctattcccagtcgtatgccagcttggagagtcacgtgagagcaagagagtagctttctggttgtcctggtgccctgctcaggcaaactgactgccattctctgaggatggcagctctgtcccccacatttgccacgtccacccaggattccacctgtctccaggactcagaatttcctgtttcttcaaaagaccattcctgtccccagaatttggacctgttcgtgtgcagtggtctggagcctcacacacccagtgttggttcccaggaatcggtgactttccaagatgtcgctgtggactttaccgagaaggagtggcccttgctggattcttctcagagaaaactgtacaaagatgtaatgctggagaactacagcaacctcacttcactggggtatcaggtcggcaaacccagcctcatctcacacttggagcaggaggaggagccgaggacagaggagaggggcgctcaccagggcgcttgtgcagattgggagactccatctaaaaccaagtggtcacttcttatggaagatatttttgggaaggaaacgcccagtggtgtgacgatggaaagagccggtcttggagagaagtccactgaatacgctcacttgttcgaagtctttggcatggaccctcatctcactcagccaatgggaaggcacgctggcaagaggccctatcaccgccgcgactatggggtagcgttcaagggcaggccgcacctcactcagcacatgagcatgtacgacgggagaaaaatgcatgaatgtcatcagtgccaaaaagccttcaccacgagcgcgtccctcacacggcacaggagaatccacaccggggagaagccttacgagtgcagcgactgcgggaaagccttcaacgacccttcagcccttaggagccacgcaagaactcacctcaaagagaagccctttgactgcagtcagtgtggaaatgcattccggaccctctcggccctgaaaatccacatgcgagttcacactggcgagaggccttacaagtgtgatcagtgcgggaaggcttacggccggagctgccacctcatcgcacacaagagaacgcacaccggagagaggccctacgagtgtcacgactgtgggaaagctttccagcacccctcccacctcaaagagcacgtgaggaatcacacgggggagaagccctacgcgtgcacgcagtgcggcaaagccttccgctggaagtccaactttaatttgcacaagaagaaccacatggtggagaagacctacgaatgtaaagaatgcgggaaatcctttggcgatctcgtgtcccggaggaaacacatgaggattcacatcgtcaagaaacccgtggaatgtcggcagtgcgggaagaccttccgaaaccagtccatccttaagactcacatgaactctcacactggagagaaaccatacgggtgcgatctctgcgggaaagctttcagcgcgagttcaaacctcaccgcacacaggaagatacacacgcaagagagacgctacgaatgcgccgcctgcgggaaagtcttcggtgactatttatcccggcggaggcacatgagcgttcaccttgtaaagaaacgagttgagtgtaggcagtgtggcaaggccttcaggaaccagtcaacgctgaagacgcacatgcgaagccacacgggggagaaaccgtacgaatgcgatcactgtgggaaggccttcagcataggctccaacctgaatgtgcacaggcggatccacaccggggagaagccctacgaatgccttgtctgcgggaaagccttcagcgaccactcatccctcaggagccacgtgaaaactcaccggggagagaagctctttgtgtcatccgtgtggaaaaggctccagtgagcgcgcctgctttagagacacaggatgattcagaccggaaacagacctcgtgggtgtaagaggaagcctctgtgagctcgcaccttactgggtgcaaaagaatccacggaacttgggagaagtccagttcctgtaaaaactgggaagacgaggcgttctcatcccataggaggtttgtgagaactcacgccgggggtgaaaatgtacgtctgtagcatggagaagccttcagggtacattcagctcttaacaaacacaggaggacttaatggcagcttggcatttaatgtcaaaatccaagccgtggcatttaatgtcaaaatgacttcagaccacttctagccttctgggcccatgagtaataatgagcacactagggagcatctctgtaaacacagtggctggggaaacccttcctagtctcacttgattcctcatgacggaaatcacactaaagagagaaatcagtgaagtaaggaacgtggaaggtcatgaatgggccgcaaaccacggccagctgcttgtctttgtatggcttgccagctaacaatagtggttccatctttaaggaagaagaatgtttgatggagaaaatttgtggccaatgaagtctgaaatacttcctgtcatctgcccctttccagaaaaacttggccgacccttggtctacagcacgggttctcagtcgggcgacgatttggctgtctaggcgtcatttggcaatgtctagagacatttttggtagttagaatggggggaagatactcctgacttgtaataagaagacatcagagatgctgctaagtcggctccagcacacaggagccccccacaacgaagagttagtgcccccaaacgtcactgttgctgaggttgaaaataatcatgcagtcattcctcaattactgcctgcagcaattcctccatttttatgaatcttgtgagcacttacgctaggagaaatttcttttacaaaacttttaaaatacaattagtgctgataattcctatgtggaaatgattccagccatggtcccctcacttgagcatgtgaatattctcacggagagaagccccagcgagattttccggtgaatacgggattgcacttactctttcatcacggaaacagaccccccgagagaagccccaacgagattttccggtgaatacgggactgcacgtactctctcatcatgaaaacagagccccgttcataaatttttcatctttatttttaaggttatactcctctaaataacccttaagcctcatcaagaaaggtttgtttatagtatttttactatagcttcatccttgataacgtcctaatttccttctggacaacctccttgaccaatggcatattgagatctatgtgacatgaggatatttctcagtaccactttgttactggtacctgatgcacacggattgcgaccagagcatgatgcctccatcaagtggtaatatgtttgcagcctgctgtccagccaagagtgacagatacttctagtgacttccccggtatccactctcatcttcttccaatatcaagagaatccaggttctgtcagattagtaaggtgtgctaatctaaattttaaaaaatctcttacaggttttcttgcagctggtaccatccatgtctcacagccctggccactgacagatcagcagatgtcaccacatgggcttctgagaaagctcttgaatggggatcgttcttaaacatgaattcctccctgtatgttttgttctttgctttacttttcaccttgcaaagagatccagtacctagtattggaagatccaccttaacgaccgtgcatatgaaaaccacagtctaaggaagtgactgcagaaagctcacagcgaccctggcctcccctgtggcctctttgagtgtctgcagcagccctggacttccagacttctatcacatgagaaaaaataaaactgattattggtttaagctgct

SEQ ID NO: 35076 - DNA, 3978 bp, Homo sapiens
  source 1..3978: mol_type = unassigned DNA
gagaattggaaggcggcagtgaagcggaagccattactctctggagtcgattgccccgagacacatgggccaaggaggggtcagcggcgaattctttcggcctgttggggacccctcgtgtccccacgccagactggacctcccgtatgaacttctcttcgcatcggcggcggcttccgtcacctccgctcccccgatcctattcccagtcgtatgccagcttggagagtcacgtgagagcaagagagtagctttctggttgtcctggtgccctgctcaggcaaactgactgccattctctgaggatggcagctctgtcccccacatttgccacgtccacccaggattccacctgtctccaggactcagaatttcctgtttcttcaaaagaccattcctgtccccagaatttggacctgttcgtgtgcagtggtctggagcctcacacacccagtgttggttcccaggaatcggtgactttccaagatgtcgctgtggactttaccgagaaggagtggcccttgctggattcttctcagagaaaactgtacaaagatgtaatgctggagaactacagcaacctcacttcactggattgggagactccatctaaaaccaagtggtcacttcttatggaagatatttttgggaaggaaacgcccagtggtgtgacgatggaaagagccggtcttggagagaagtccactgaatacgctcacttgttcgaagtctttggcatggaccctcatctcactcagccaatgggaaggcacgctggcaagaggccctatcaccgccgcgactatggggtagcgttcaagggcaggccgcacctcactcagcacatgagcatgtacgacgggagaaaaatgcatgaatgtcatcagtgccaaaaagccttcaccacgagcgcgtccctcacacggcacaggagaatccacaccggggagaagccttacgagtgcagcgactgcgggaaagccttcaacgacccttcagcccttaggagccacgcaagaactcacctcaaagagaagccctttgactgcagtcagtgtggaaatgcattccggaccctctcggccctgaaaatccacatgcgagttcacactggcgagaggccttacaagtgtgatcagtgcgggaaggcttacggccggagctgccacctcatcgcacacaagagaacgcacaccggagagaggccctacgagtgtcacgactgtgggaaagctttccagcacccctcccacctcaaagagcacgtgaggaatcacacgggggagaagccctacgcgtgcacgcagtgcggcaaagccttccgctggaagtccaactttaatttgcacaagaagaaccacatggtggagaagacctacgaatgtaaagaatgcgggaaatcctttggcgatctcgtgtcccggaggaaacacatgaggattcacatcgtcaagaaacccgtggaatgtcggcagtgcgggaagaccttccgaaaccagtccatccttaagactcacatgaactctcacactggagagaaaccatacgggtgcgatctctgcgggaaagctttcagcgcgagttcaaacctcaccgcacacaggaagatacacacgcaagagagacgctacgaatgcgccgcctgcgggaaagtcttcggtgactatttatcccggcggaggcacatgagcgttcaccttgtaaagaaacgagttgagtgtaggcagtgtggcaaggccttcaggaaccagtcaacgctgaagacgcacatgcgaagccacacgggggagaaaccgtacgaatgcgatcactgtgggaaggccttcagcataggctccaacctgaatgtgcacaggcggatccacaccggggagaagccctacgaatgccttgtctgcgggaaagccttcagcgaccactcatccctcaggagccacgtgaaaactcaccggggagagaagctctttgtgtcatccgtgtggaaaaggctccagtgagcgcgcctgctttagagacacaggatgattcagaccggaaacagacctcgtgggtgtaagaggaagcctctgtgagctcgcaccttactgggtgcaaaagaatccacggaacttgggagaagtccagttcctgtaaaaactgggaagacgaggcgttctcatcccataggaggtttgtgagaactcacgccgggggtgaaaatgtacgtctgtagcatggagaagccttcagggtacattcagctcttaacaaacacaggaggacttaatggcagcttggcatttaatgtcaaaatccaagccgtggcatttaatgtcaaaatgacttcagaccacttctagccttctgggcccatgagtaataatgagcacactagggagcatctctgtaaacacagtggctggggaaacccttcctagtctcacttgattcctcatgacggaaatcacactaaagagagaaatcagtgaagtaaggaacgtggaaggtcatgaatgggccgcaaaccacggccagctgcttgtctttgtatggcttgccagctaacaatagtggttccatctttaaggaagaagaatgtttgatggagaaaatttgtggccaatgaagtctgaaatacttcctgtcatctgcccctttccagaaaaacttggccgacccttggtctacagcacgggttctcagtcgggcgacgatttggctgtctaggcgtcatttggcaatgtctagagacatttttggtagttagaatggggggaagatactcctgacttgtaataagaagacatcagagatgctgctaagtcggctccagcacacaggagccccccacaacgaagagttagtgcccccaaacgtcactgttgctgaggttgaaaataatcatgcagtcattcctcaattactgcctgcagcaattcctccatttttatgaatcttgtgagcacttacgctaggagaaatttcttttacaaaacttttaaaatacaattagtgctgataattcctatgtggaaatgattccagccatggtcccctcacttgagcatgtgaatattctcacggagagaagccccagcgagattttccggtgaatacgggattgcacttactctttcatcacggaaacagaccccccgagagaagccccaacgagattttccggtgaatacgggactgcacgtactctctcatcatgaaaacagagccccgttcataaatttttcatctttatttttaaggttatactcctctaaataacccttaagcctcatcaagaaaggtttgtttatagtatttttactatagcttcatccttgataacgtcctaatttccttctggacaacctccttgaccaatggcatattgagatctatgtgacatgaggatatttctcagtaccactttgttactggtacctgatgcacacggattgcgaccagagcatgatgcctccatcaagtggtaatatgtttgcagcctgctgtccagccaagagtgacagatacttctagtgacttccccggtatccactctcatcttcttccaatatcaagagaatccaggttctgtcagattagtaaggtgtgctaatctaaattttaaaaaatctcttacaggttttcttgcagctggtaccatccatgtctcacagccctggccactgacagatcagcagatgtcaccacatgggcttctgagaaagctcttgaatggggatcgttcttaaacatgaattcctccctgtatgttttgttctttgctttacttttcaccttgcaaagagatccagtacctagtattggaagatccaccttaacgaccgtgcatatgaaaaccacagtctaaggaagtgactgcagaaagctcacagcgaccctggcctcccctgtggcctctttgagtgtctgcagcagccctggacttccagacttctatcacatgagaaaaaataaaactgattattggtttaagctgct

SEQ ID NO: 35077 - DNA, 744 bp, Homo sapiens
  source 1..744: mol_type = unassigned DNA
attgccccgagacacatgggccaaggaggggtcagcggcgaattctttcggcctgttggggacccctcgtgtccccacgccagactggacctcccgtatgaacttctcttcgcatcggcggcggcttccgtcacctccgctcccccgatcctattcccagtcgtccacgtccacccaggattccacctgtctccaggactcagaatttcctgtttcttcaaaagaccattcctgtccccagaatttggacctgttcgtgtgcagtggtctggagcctcacacacccagtgttggttcccaggaatcggtgactttccaagatgtcgctgtggactttaccgagaaggagtggcccttgctggattcttctcagagaaaactgtacaaagatgtaatgctggagaactacagcaacctcacttcactgggtaaggccagtgccatttctccacttattcatccatgaattagatgtttttgtttgagtatgttctgtgacccaggaactatgcagcggttcagaacgcagctgtgaacaagcagccccagcacccatgcttaatggggcctctcctgggtatcgaggcccatctattgcagggaccatggtggttctccggtgtgtgtctgagcttggcatgggcttctgaaatacgaaatccccattcttttggagggtcagtgtgtgggtacttgtgatcttatttcctatttctttttttttttttttttttttatttttgg

SEQ ID NO: 35078 - DNA, 1137 bp, Homo sapiens
  source 1..1137: mol_type = unassigned DNA
ctggcgctgctgcgggctcggcgccggcctttgtctgcgggcacgcgccgctgcggtgctcaggaacagcccatggaagaatcatatgaagaggtggtgactgaggtcgtaagcaggagtggacatgtttggatttccaacagctaccctgctggactgtcatggaagatatgcccagaatgtagcgttcttcaatgtgatgactgaagcccaccacaaatatgaccactctgaggctacaggatcctcaagctgggatatccaaaattctttcagaagagagaagctggaacaaaaatccccagattcgaagacactacaggaagattcacctggagtgagacaaagggtctatgagtgccaggagtgtggaaaatccttccggcaaaaaggtagtctaacgttacatgagagaatccacactggtcaaaagccttttgagtgcacccactgtggaaaaagcttcagggccaaaggcaatcttgttacacatcaacggatacacacgggagagaagccttatcagtgcaaggagtgtgggaaaagcttcagtcaacgaggtagtctcgctgtccacgagagactccacactggacagaaaccctacgagtgtgctatttgtcagagaagcttcaggaatcagagtaaccttgctgttcacaggagagttcacagtggtgagaagccctatagatgtgatcagtgtggaaaagccttcagtcagaaaggaagcttaattgttcacatcagagtccacacaggcctgaagccctatgcctgtacccagtgcaggaagagtttccacaccagggggaattgtattctgcatggcaaaatccacacaggagagacaccctatctgtgcggccagtgtggaaaaagcttcacccagagagggagtctggctgtgcaccagcgaagctgctcacagaggctcaccctttgaccactttcctgaagagaagttctctttatgaattaagagtacaaaatcctctgagatgaagcaacctatccagttctatggaatgaatggagaatctttcagaaagaccatcattgggtagggcaaactgatttttttcctttcccccaaaagagtatgaaaaataaatgtcttgtttattatcattatca

SEQ ID NO: 35079 - DNA, 1201 bp, Homo sapiens
  source 1..1201: mol_type = unassigned DNA
gcggccgccaaggaaatgagcaggcctggccggcccgggccccgagggaggccagccgcgagcggagaggtcggcggtccgcagagcagggtcccgtggaccggagagcgggatgccgaggtgctcaggaacagcccatggaagaatcatatgaagaggtggtgactgaggtcgtaagcaggagtggacatgtttggatttccaacagctaccctgctggactgtcatggaagatatgcccagaatgtagcgttcttcaatgtgatgactgaagcccaccacaaatatgaccactctgaggctacaggatcctcaagctgggatatccaaaattctttcagaagagagaagctggaacaaaaatccccagattcgaagacactacaggaagattcacctggagtgagacaaagggtctatgagtgccaggagtgtggaaaatccttccggcaaaaaggtagtctaacgttacatgagagaatccacactggtcaaaagccttttgagtgcacccactgtggaaaaagcttcagggccaaaggcaatcttgttacacatcaacggatacacacgggagagaagccttatcagtgcaaggagtgtgggaaaagcttcagtcaacgaggtagtctcgctgtccacgagagactccacactggacagaaaccctacgagtgtgctatttgtcagagaagcttcaggaatcagagtaaccttgctgttcacaggagagttcacagtggtgagaagccctatagatgtgatcagtgtggaaaagccttcagtcagaaaggaagcttaattgttcacatcagagtccacacaggcctgaagccctatgcctgtacccagtgcaggaagagtttccacaccagggggaattgtattctgcatggcaaaatccacacaggagagacaccctatctgtgcggccagtgtggaaaaagcttcacccagagagggagtctggctgtgcaccagcgaagctgctcacagaggctcaccctttgaccactttcctgaagagaagttctctttatgaattaagagtacaaaatcctctgagatgaagcaacctatccagttctatggaatgaatggagaatctttcagaaagaccatcattgggtagggcaaactgatttttttcctttcccccaaaagagtatgaaaaataaatgtcttgtttattatcattatc

SEQ ID NO: 35080 - DNA, 6038 bp, Homo sapiens
  source 1..6038: mol_type = unassigned DNA
ctaacatttaggattgacttctaaagactcttggtacctgaggaagaaacccagaagaggaagaggaaagcaaaggagtcggggatggctctttctcagggtctactgacattcagggatgtggccatagaattctctcaggaggagtggaaatgcctggaccctgctcagaggactctatacagagacgtgatgctggagaattataggaacctggtctccctggatatctcttccaaatgcatgatgaatacattgtcatcaacagggcaaggcaatacagaagtgatccacacagggacattgcagagacaagcaagttatcacattggagcattttgctcccaggaaattgagaaagacattcatgactttgtgtttcagtggcaagaagatgaaacaaatgaccatgaagcacccatgacagaaataaaaaagttgactagtagtacagaccgatatgatcaaaggcatgctggaaacaagcctattaaaggtcagcttgaatcaagatttcatttgcatttgcgaagacataggagaattcatactggagagaaaccttacaaatgtgaagaatgtgagaaagttttcagttgcaaatcacatcttgaaatacataggataattcatactggagagaaaccatacaaatgtaaggtttgcgacaaggcttttaagcatgattcacacctggcaaaacatactagaattcacaggggagacaaacattacacatgtaatgaatgtggcaaggtttttgatcaaaaagcaacccttgcatgtcatcatagaagtcatactggagagaaaccttataagtgtaatgagtgtggcaagacctttagtcagacatcacaccttgtgtaccatcatagactgcatactggagagaaaccttacaaatgtaatgagtgtggcaagaccttcgctcgaaattcagtcctcgtaattcataaggcagttcatactgcagagaaaccctataagtgtaatgaatgtggcaaggtttttaagcaacgagcaactcttgcaggacatcgtagagttcacactggagagaaaccttacagatgtgaagaatgcgacaaagttttcagtcgcaaatcacatcttgaaagacataggaggattcatactggagagaaaccatacaaatgtaaggtttgtgacaaggctttccggagtgattcacgtcttgcagaacatcagagagttcatactggagagagaccttacacatgtaatgaatgtggcaaggtttttagtacaaaagcgtacctcgcatgtcatcaaaaacttcatactggagagaaactttacgaatgtgaagaatgtgacaaagtttacattcgcaaatcacaccttgaaagacataggaggattcatacaggagagaaacctcacaagtgtggtgattgtggtaaagcctttaattcaccttcacaccttattaggcatcagagaatccatactggacagaaatcttacaaatgtcatcagtgtggcaaggtctttagtctgaggtcactccttgcagaacatcagaaaattccttttggagacaattgtttcaagtgcaatgagtatagcaaaccatcaagcattaattgacatcagagtcaaatcagcattgacctgagtttgagttgacttaacattgatttcaagcattaatcgacattaaactgtttatgttaagaggattgggccaggcgtggtgtctcacacctgtaatcccagcactttgagaggccaagacaggtaggtcacttgaggtcatgaatttgagaccagcctggccaacagacgggagccacttttcccagcctgtatgttcttttatttatttatttatttttaagatggaatcttgctctgtcgcccacgttggagtgcagtgatgtgatctcggttcactgcaacattcacctcccaggttcatgcaattctcctgcctcagtctcctgagtagctgggactacaggtgcgtgccaccatgcccgggtaattttttgtatttttagtagagactgggtttcaccgtgttagctaggatggtctcgatcttctgtccttaaaatccacctgcctccacctgccaaagtgctgagattacaggcgtgagccaccacacctggcctgttttttgtttctttaacaaaaagttatagaaatttctctgggtattgtgttgaatctacatcacattcagttataatcatttagcaatattattccattcaatatggcttgtatctcttatttgcacatgtttttatcactttgatcaatgtttgtagatttgaaggtagaaacttctcaacttttttcatttattcctaagtatttcttactttaagttctttagcaaatgaaagtgtttttttaattttctttttaaattgtttattgttaatgtatggaaattcaactaatttttggtgctgttattctattcttcaaatccactgcatatgttttttagttccagttgcattttggttgactctttgtgattttctacacagaagatcatgtcatctacaaagaaatagttttacttctttctttctgatttggatgagtttgatttcttttgctatttcattgctctagctaggacagccagtattgattgaatagaaggggtgagagcattcttgcatcatgtgagatcctacaggaaaagcattccattttccctgactggttatttctgctgtggtcatttcatggatggtctttgtattgttgaggtaaatttccttctctttctattttgtttaggatttccatgatgactggatgttgaattttgtgaaatgctttttctccatgtattgagatgatgtggttttcatctttcattatgttcaagtggtatatcacattgatttgcttgactatgttgaaccattttgcatcccagaaataagtggcacttgcatatcaacaatcctttttataacctcttgaatacagttcgctagtacaaggggtcttcaggaagttcatggaaaaatacatattatgagaaaattgtgcatgatatcacattttttgcaccaagataaactgatacaaatccgttataacatgtctgaacagggtttggtttgaggcactcagatgggtaagacatgagtttgaaaagagactcaatcaaggcaatgtaaattctgctaaaactgaaacaagaagaaacatcaaatttgcgatgagaccagatgctgtggctcaggcctgtaatcccataattttcagaggctgagacagttgggtcacgtgggccccggtactcaagaccagcctgggcagaatggtgaaaccaccttctctacaaaaaatacataaattagctgggcattgtggcacatgtctgctggttcagcttctgtggagtctgcagtgggaggatggcttgagcctaggagttcgaggctgcagggagccatgatcatgccattgtactccagcatgggtgacagagacagatagtgtatcgaaaaatgaatctggtaaagtttgggtagagggacaatgaaatcattgatgctttatgaaaaggttatggggacgattcccaaaataaatcaccagtttgtaaatggaaaacttattttaagttgggacaagatgatgttgaaagtgatgcacaggacaggtgtggtggctcacacctgtaatcccagcactttgggaggccgaggcaagagcatcacgaggtcaggagatcgagaaaatcctggctaacacggtgaaaccccatctctactaaaaatacaaaaaattagccaggcgtggttgtgggcgcctgtagtcccagctactcaggaggctgaggcaggagaatggcatgaaccgaggaggtggagcttgccatgagcagagatcatgctactgcactccagcctgggtgacagagcgagactccatctcaaaaaaaaaaaaaaaaaaaaaaaaaagaaagtgatgcacagagtggcaggcagaccatccacataagttttataggtacaactgtcaaagacgacactggagaagagccaagctggatctataaggaattgcatatgagatggcacacatattcatgctgtctgaagattcagtcacgttaccatatcaagctgaaaatgtcaccactatctggagagttggacatgttttattgagaatgtattttttttctctggatctgttatgaacacctttgttggcttggttcagtaataaatatgtgagacttttcatttaaaaaaagtcaaatgacttaattctgtattttaaattctgttttgtttgttttgtttttttgagatggagtcttctgaaaattttctcatcttctctaacccggttcatgacagacccttggactttactgttgtggaaaaatctatataaaacagtatcagtgtgtcaaagcattatggctgtcacaagcttgtgaaaggaaaataaaaattactaagccaaagagaaaagtcaatctgggaactgcgtcagacaaacctgccttccattttattcctaaacaagatagttacaaagattttttaaaaagctacatatgcccctcccaaaccgggaacctcaagatctccaccctaaaatagttctgttgaatttcaccctggcgatgtaaactgagagcttatcttcacagatgtgggaaagagcccatccctctgcacacctgagtcaaatgtctatctgattgcttcccttgccctatttatgtaaaaatacagggtccctgagccagcctaaggcataagtgacttatccctcctccctgctcacatataaattgtgtatttagtgaaaggctgatcaaagattcaaagaatgttatttgttatctacctgtgacccagaaggtccccaattccagttattccacctttccagaccggaccaatgtatatatgtactgattgctgtctcgtgtgtctgtaaaatgtgtgaaaccaaactgcagcctcaacaccatggacacacgtcatcaggacctcctgaggttcgtgttaattggccttagactctccctgtccccagacccaggacgcatgtgtttcctttttcttcatttctattaaagatgggtctcattctgttggccaggcatgagagcggtgacaggatcagccctcactgaagcttcaatctcctgggttcaagggatcctcccacctcagcctccaaagttgctaggaccatagccaggtgccaccgcaccgggcaaatttttgtgttcctagtagagatgggctttcaccatgttgcccgagctggtcttgaattccagggctcaagcgatccagccgtattggcctcccaaggtgctgggattacagccatgagccaccatgaccaacgtgtttcttaatttaaaaaaaaaaaaatagaccaggtgctctggctcatgcctgtaatcccagcactttgggaggccaaggtgggcagatcacctgagatcaagtatttgagaacagcctggctaacatggcgaatcctcgttttgaccaaaatatagaaattagcctggtgtggtggcgagtgcctgtaatcccagctattcaggagggtgaggcagaagaatggcttgaattcgggaggcggaggttgcagtgagctgagatcctgcaactgcactctggctgggcaagagcgagactccatctctaaaataaaattaaagtaatataaaaaactgcttctcatgaaagctttggtataatcttacgaggtaacatcattgttttgcaactacggtatgtgttcaaaatgttcttctttgaccccacatttcattagatatatttttaagccattttaaaattgtttttctctgaaatttattgtgtttagtttacattgaggactgcatgctttctagtctgtatcatacattggaaacattttctagtacctgataaatgattttaggttgtttcgatgtgtacttgataaagatatcaaggaactttttctttatgctaacattaaaatttagttgaagtagcctatta

SEQ ID NO: 35081 - DNA, 6448 bp, Homo sapiens
  source 1..6448: mol_type = unassigned DNA
cggcccctctttctcaacccagagcaaattgagacgtccgggctggagtgcaatggcgcgatcttggctcaccacaacctccgcctcctgggttcaagtgatctcctgcctcagcctccccagtagccgggattacagtagagacaaggtttcaccatattggccagactgttctctgaactcgacctcaagtgatccacccacctcggcctcccagagtcctgggattacaggctggagggcagttgtgcgatcttgattcacttcaacctctgctctccgggctcaagcaattctcccacctcagcctgagtctcactctgtccttcaggctgtgagtgcagtctcctgatcttggctcactgcaacctctgtctcctgggttcaagtgattcttgtgcctcagcctaccaagtagctgagatacaggattgacttctaaagactcttggtacctgaggaagaaacccagaagaggaagaggaaagcaaaggagtcggggatggctctttctcagggtctactgacattcagggatgtggccatagaattctctcaggaggagtggaaatgcctggaccctgctcagaggactctatacagagacgtgatgctggagaattataggaacctggtctccctggatatctcttccaaatgcatgatgaatacattgtcatcaacagggcaaggcaatacagaagtgatccacacagggacattgcagagacaagcaagttatcacattggagcattttgctcccaggaaattgagaaagacattcatgactttgtgtttcagtggcaagaagatgaaacaaatgaccatgaagcacccatgacagaaataaaaaagttgactagtagtacagaccgatatgatcaaaggcatgctggaaacaagcctattaaaggtcagcttgaatcaagatttcatttgcatttgcgaagacataggagaattcatactggagagaaaccttacaaatgtgaagaatgtgagaaagttttcagttgcaaatcacatcttgaaatacataggataattcatactggagagaaaccatacaaatgtaaggtttgcgacaaggcttttaagcatgattcacacctggcaaaacatactagaattcacaggggagacaaacattacacatgtaatgaatgtggcaaggtttttgatcaaaaagcaacccttgcatgtcatcatagaagtcatactggagagaaaccttataagtgtaatgagtgtggcaagacctttagtcagacatcacaccttgtgtaccatcatagactgcatactggagagaaaccttacaaatgtaatgagtgtggcaagaccttcgctcgaaattcagtcctcgtaattcataaggcagttcatactgcagagaaaccctataagtgtaatgaatgtggcaaggtttttaagcaacgagcaactcttgcaggacatcgtagagttcacactggagagaaaccttacagatgtgaagaatgcgacaaagttttcagtcgcaaatcacatcttgaaagacataggaggattcatactggagagaaaccatacaaatgtaaggtttgtgacaaggctttccggagtgattcacgtcttgcagaacatcagagagttcatactggagagagaccttacacatgtaatgaatgtggcaaggtttttagtacaaaagcgtacctcgcatgtcatcaaaaacttcatactggagagaaactttacgaatgtgaagaatgtgacaaagtttacattcgcaaatcacaccttgaaagacataggaggattcatacaggagagaaacctcacaagtgtggtgattgtggtaaagcctttaattcaccttcacaccttattaggcatcagagaatccatactggacagaaatcttacaaatgtcatcagtgtggcaaggtctttagtctgaggtcactccttgcagaacatcagaaaattccttttggagacaattgtttcaagtgcaatgagtatagcaaaccatcaagcattaattgacatcagagtcaaatcagcattgacctgagtttgagttgacttaacattgatttcaagcattaatcgacattaaactgtttatgttaagaggattgggccaggcgtggtgtctcacacctgtaatcccagcactttgagaggccaagacaggtaggtcacttgaggtcatgaatttgagaccagcctggccaacagacgggagccacttttcccagcctgtatgttcttttatttatttatttatttttaagatggaatcttgctctgtcgcccacgttggagtgcagtgatgtgatctcggttcactgcaacattcacctcccaggttcatgcaattctcctgcctcagtctcctgagtagctgggactacaggtgcgtgccaccatgcccgggtaattttttgtatttttagtagagactgggtttcaccgtgttagctaggatggtctcgatcttctgtccttaaaatccacctgcctccacctgccaaagtgctgagattacaggcgtgagccaccacacctggcctgttttttgtttctttaacaaaaagttatagaaatttctctgggtattgtgttgaatctacatcacattcagttataatcatttagcaatattattccattcaatatggcttgtatctcttatttgcacatgtttttatcactttgatcaatgtttgtagatttgaaggtagaaacttctcaacttttttcatttattcctaagtatttcttactttaagttctttagcaaatgaaagtgtttttttaattttctttttaaattgtttattgttaatgtatggaaattcaactaatttttggtgctgttattctattcttcaaatccactgcatatgttttttagttccagttgcattttggttgactctttgtgattttctacacagaagatcatgtcatctacaaagaaatagttttacttctttctttctgatttggatgagtttgatttcttttgctatttcattgctctagctaggacagccagtattgattgaatagaaggggtgagagcattcttgcatcatgtgagatcctacaggaaaagcattccattttccctgactggttatttctgctgtggtcatttcatggatggtctttgtattgttgaggtaaatttccttctctttctattttgtttaggatttccatgatgactggatgttgaattttgtgaaatgctttttctccatgtattgagatgatgtggttttcatctttcattatgttcaagtggtatatcacattgatttgcttgactatgttgaaccattttgcatcccagaaataagtggcacttgcatatcaacaatcctttttataacctcttgaatacagttcgctagtacaaggggtcttcaggaagttcatggaaaaatacatattatgagaaaattgtgcatgatatcacattttttgcaccaagataaactgatacaaatccgttataacatgtctgaacagggtttggtttgaggcactcagatgggtaagacatgagtttgaaaagagactcaatcaaggcaatgtaaattctgctaaaactgaaacaagaagaaacatcaaatttgcgatgagaccagatgctgtggctcaggcctgtaatcccataattttcagaggctgagacagttgggtcacgtgggccccggtactcaagaccagcctgggcagaatggtgaaaccaccttctctacaaaaaatacataaattagctgggcattgtggcacatgtctgctggttcagcttctgtggagtctgcagtgggaggatggcttgagcctaggagttcgaggctgcagggagccatgatcatgccattgtactccagcatgggtgacagagacagatagtgtatcgaaaaatgaatctggtaaagtttgggtagagggacaatgaaatcattgatgctttatgaaaaggttatggggacgattcccaaaataaatcaccagtttgtaaatggaaaacttattttaagttgggacaagatgatgttgaaagtgatgcacaggacaggtgtggtggctcacacctgtaatcccagcactttgggaggccgaggcaagagcatcacgaggtcaggagatcgagaaaatcctggctaacacggtgaaaccccatctctactaaaaatacaaaaaattagccaggcgtggttgtgggcgcctgtagtcccagctactcaggaggctgaggcaggagaatggcatgaaccgaggaggtggagcttgccatgagcagagatcatgctactgcactccagcctgggtgacagagcgagactccatctcaaaaaaaaaaaaaaaaaaaaaaaaaagaaagtgatgcacagagtggcaggcagaccatccacataagttttataggtacaactgtcaaagacgacactggagaagagccaagctggatctataaggaattgcatatgagatggcacacatattcatgctgtctgaagattcagtcacgttaccatatcaagctgaaaatgtcaccactatctggagagttggacatgttttattgagaatgtattttttttctctggatctgttatgaacacctttgttggcttggttcagtaataaatatgtgagacttttcatttaaaaaaagtcaaatgacttaattctgtattttaaattctgttttgtttgttttgtttttttgagatggagtcttctgaaaattttctcatcttctctaacccggttcatgacagacccttggactttactgttgtggaaaaatctatataaaacagtatcagtgtgtcaaagcattatggctgtcacaagcttgtgaaaggaaaataaaaattactaagccaaagagaaaagtcaatctgggaactgcgtcagacaaacctgccttccattttattcctaaacaagatagttacaaagattttttaaaaagctacatatgcccctcccaaaccgggaacctcaagatctccaccctaaaatagttctgttgaatttcaccctggcgatgtaaactgagagcttatcttcacagatgtgggaaagagcccatccctctgcacacctgagtcaaatgtctatctgattgcttcccttgccctatttatgtaaaaatacagggtccctgagccagcctaaggcataagtgacttatccctcctccctgctcacatataaattgtgtatttagtgaaaggctgatcaaagattcaaagaatgttatttgttatctacctgtgacccagaaggtccccaattccagttattccacctttccagaccggaccaatgtatatatgtactgattgctgtctcgtgtgtctgtaaaatgtgtgaaaccaaactgcagcctcaacaccatggacacacgtcatcaggacctcctgaggttcgtgttaattggccttagactctccctgtccccagacccaggacgcatgtgtttcctttttcttcatttctattaaagatgggtctcattctgttggccaggcatgagagcggtgacaggatcagccctcactgaagcttcaatctcctgggttcaagggatcctcccacctcagcctccaaagttgctaggaccatagccaggtgccaccgcaccgggcaaatttttgtgttcctagtagagatgggctttcaccatgttgcccgagctggtcttgaattccagggctcaagcgatccagccgtattggcctcccaaggtgctgggattacagccatgagccaccatgaccaacgtgtttcttaatttaaaaaaaaaaaaatagaccaggtgctctggctcatgcctgtaatcccagcactttgggaggccaaggtgggcagatcacctgagatcaagtatttgagaacagcctggctaacatggcgaatcctcgttttgaccaaaatatagaaattagcctggtgtggtggcgagtgcctgtaatcccagctattcaggagggtgaggcagaagaatggcttgaattcgggaggcggaggttgcagtgagctgagatcctgcaactgcactctggctgggcaagagcgagactccatctctaaaataaaattaaagtaatataaaaaactgcttctcatgaaagctttggtataatcttacgaggtaacatcattgttttgcaactacggtatgtgttcaaaatgttcttctttgaccccacatttcattagatatatttttaagccattttaaaattgtttttctctgaaatttattgtgtttagtttacattgaggactgcatgctttctagtctgtatcatacattggaaacattttctagtacctgataaatgattttaggttgtttcgatgtgtacttgataaagatatcaaggaactttttctttatgctaacattaaaatttagttgaagta

SEQ ID NO: 35082 - DNA, 2910 bp, Homo sapiens
  source 1..2910: mol_type = unassigned DNA
gggggtggggctgcgccggcctcttcccagccagcttgaaagggtttgcgtagccggccttgtgggcccttgaagcgctctgttaaagcgctctgtgggcggcctggccccaactcctctagtctaggcgcacgaagggagttgctcctaggtcttgtccgtgccgggttcgcttttctttccttcccgaagcctggcccttagatctactatcgcagagtctgcggccgccaggaagcccagattcgagtgtccggagagtaaccggaagtgctgtccccaggcctaggggcggcgccggcggctgccagggagaggcaagaattgagtgttgtgaatagttctgaactagagaccttttgaaaccaaaaggaagatggtcttgagtctttcttgttacgaatgctatcttctttgagaagtcaaattgtcaggatcaggaatgtatgttttcttccatctggattctagggttggaaataccaagtaaggaattaacatatatgatgctggaaacttgtagaggctcatgattgaaaggcctgaaacagatgtatcttccaagttcttatcaagaaaatgactgtgagggcaacgatgggtcaagaagaccagcggaaaactccctaggagagagccatagaaaatgtacacttcagaagagaaatgtaatcagagaactcaaaaaaggaaaatatataatgtatgccctcggaagggtaaaaagatttttattcatatgcatgagattattcagatagatggtcatatataccagtgccttgaatgcaagcaaaacttctgtgaaaacttagctcttattatgtgtgagagaacccatactggggagaaaccttataaatgtgatatgtgtgagaaaacctttgtccaaagctcagatcttacttcacaccagaggatccacaattacgagaaaccttataaatgtagcaaatgtgagaagagcttttggcatcacttagcgctttcaggacatcagagaacacatgcaggtaaaaaattctatacatgtgacatttgtggcaagaattttggtcagagttctgatctgcttgtccaccagcgaagccatactggcgagaaaccatatctatgtagtgagtgtgacaaatgcttcagtagaagtacaaacctcataaggcatcgaagaactcacacaggtgagaaaccatttaagtgtctcgagtgtgaaaaagcttttagtgggaaatcagatcttattagccaccagagaactcacactggggaaaggccctacaaatgtaataagtgtgagaaaagttaccgacaccgttcagccttcattgtacataaaagagttcatactggggagaagccctataagtgtggtgcctgtgaaaaatgctttggccagaaatcagaccttatcgtgcaccagagagtccacacaggtgagaagccgtataaatgcctggaatgtatgagaagttttactcggagtgccaacctaattaggcaccaggcaactcacactcacacttttaaatgccttgaatatgaaaaaagctttaactgtagctcagatcttattgtacatcagagaattcacatggaagagaaaccacatcagtggtctgcgtgtgagagtggcttcctcctaggaatggactttgttgcccaacagaaaatgagaactcaaacagaggagctacactataaatacactgtatgtgataaaagcttccaccagagttcagcccttcttcaacatcagacagtacacattggtgaaaaaccgtttgtctgtaatgtgagtgaaaaaggtcttgagcttagccctccccatgcgtcagaagcctcacagatgtcttgaccaggcgagaagctgtaataccaatattaaaaattatttatgtatcagagaactcattaagatgaggacaaatctcagactttgctcagagctcagaattcagtggggaccagagagcctgcaattggaaatatgagaaattctttgcccagagagctgccctaacagaacacttcatcctcactccaacgagaaatctacagatgcccagaggttttgaaaacttaccgtctgagctcaaatttgatcactcacaagaggattcatacaagtgggaaaccttagaaatgcactgagtgtgagagagctttctactaatgctcagcccttctcgttgtaagagaattcacaccggagaacaactttttaaatgccttcagtgtcagttgtgctgcagacagtatgaacatctcattggacctcagaaaacccaccctggggagaagccccagcaagtgtgaaaaaagcttctaacaaaactctgacttacccatcagagaagccatactggtgaaaaattgtatatttgtcttaagtatggcaaaagcattcgttggagagccttacttgggtttgcacccaaaaaaaaaaacccaatctgaggaaagactgcaagtgtctgaatgaagagtgcttgtcaatgatcaactcttgtggtacatcagggaactcacataggtgaaaaaacccatacttaccttgagtctgagaaaacctttggtagaagctcctgtcttatcaggccccaaaaaacctgttctgcagtgagagatttaattgtgggtgagaatctatgtacatataatatgtatgagaagactgttctcatagttagttgactcatatggtagagaggactttacatgaaatcagtatgaaaatagttttttagatacccagaagcttgttctgggagaagctagggtgggtcagagtagacctgatgggtaactcaggtaaagatgcttttcttttatctgaactacttaatgattgctttacttttactttttaaaaaattcagaaatccaataaaggaaaggacggtaacctta

SEQ ID NO: 35083 - DNA, 2675 bp, Homo sapiens
  source 1..2675: mol_type = unassigned DNA
attcctcctgtttaactgaaattttgtatcctttgaccaatttcttcccaaccctgctatgtctcagcctctggtaaccaccattttaccatctgtttctatcagttagactgttttatactccatatcattatctctctattccagtattatgttgaaaagcagtgaatgctatcttctttgagaagtcaaattgtcaggatcaggaatgtatgttttcttccatctggattctagggttggaaataccaagtaaggaattaacatatatgatgctggaaacttgtagaggctcatgattgaaaggcctgaaacagatgtatcttccaagttcttatcaagaaaatgactgtgagggcaacgatgggtcaagaagaccagcggaaaactccctaggagagagccatagaaaatgtacacttcagaagagaaatgtaatcagagaactcaaaaaaggaaaatatataatgtatgccctcggaagggtaaaaagatttttattcatatgcatgagattattcagatagatggtcatatataccagtgccttgaatgcaagcaaaacttctgtgaaaacttagctcttattatgtgtgagagaacccatactggggagaaaccttataaatgtgatatgtgtgagaaaacctttgtccaaagctcagatcttacttcacaccagaggatccacaattacgagaaaccttataaatgtagcaaatgtgagaagagcttttggcatcacttagcgctttcaggacatcagagaacacatgcaggtaaaaaattctatacatgtgacatttgtggcaagaattttggtcagagttctgatctgcttgtccaccagcgaagccatactggcgagaaaccatatctatgtagtgagtgtgacaaatgcttcagtagaagtacaaacctcataaggcatcgaagaactcacacaggtgagaaaccatttaagtgtctcgagtgtgaaaaagcttttagtgggaaatcagatcttattagccaccagagaactcacactggggaaaggccctacaaatgtaataagtgtgagaaaagttaccgacaccgttcagccttcattgtacataaaagagttcatactggggagaagccctataagtgtggtgcctgtgaaaaatgctttggccagaaatcagaccttatcgtgcaccagagagtccacacaggtgagaagccgtataaatgcctggaatgtatgagaagttttactcggagtgccaacctaattaggcaccaggcaactcacactcacacttttaaatgccttgaatatgaaaaaagctttaactgtagctcagatcttattgtacatcagagaattcacatggaagagaaaccacatcagtggtctgcgtgtgagagtggcttcctcctaggaatggactttgttgcccaacagaaaatgagaactcaaacagaggagctacactataaatacactgtatgtgataaaagcttccaccagagttcagcccttcttcaacatcagacagtacacattggtgaaaaaccgtttgtctgtaatgtgagtgaaaaaggtcttgagcttagccctccccatgcgtcagaagcctcacagatgtcttgaccaggcgagaagctgtaataccaatattaaaaattatttatgtatcagagaactcattaagatgaggacaaatctcagactttgctcagagctcagaattcagtggggaccagagagcctgcaattggaaatatgagaaattctttgcccagagagctgccctaacagaacacttcatcctcactccaacgagaaatctacagatgcccagaggttttgaaaacttaccgtctgagctcaaatttgatcactcacaagaggattcatacaagtgggaaaccttagaaatgcactgagtgtgagagagctttctactaatgctcagcccttctcgttgtaagagaattcacaccggagaacaactttttaaatgccttcagtgtcagttgtgctgcagacagtatgaacatctcattggacctcagaaaacccaccctggggagaagccccagcaagtgtgaaaaaagcttctaacaaaactctgacttacccatcagagaagccatactggtgaaaaattgtatatttgtcttaagtatggcaaaagcattcgttggagagccttacttgggtttgcacccaaaaaaaaaaacccaatctgaggaaagactgcaagtgtctgaatgaagagtgcttgtcaatgatcaactcttgtggtacatcagggaactcacataggtgaaaaaacccatacttaccttgagtctgagaaaacctttggtagaagctcctgtcttatcaggccccaaaaaacctgttctgcagtgagagatttaattgtgggtgagaatctatgtacatataatatgtatgagaagactgttctcatagttagttgactcatatggtagagaggactttacatgaaatcagtatgaaaatagttttttagatacccagaagcttgttctgggagaagctagggtgggtcagagtagacctgatgggtaactcaggtaaagatgcttttcttttatctgaactacttaatgattgctttacttttactttttaaaaaattcagaaatccaataaaggaaaggacggtaacctt

SEQ ID NO: 35084 - DNA, 587 bp, Homo sapiens
  source 1..587: mol_type = unassigned DNA
ccttgaagcgctctgttaaagcgctctgtgggcggcctggccccaactcctctagtctaggcgcacgaagggagttgctcctaggtcttgtccgtgccgggttcgcttttctttccttcccgaagcctggcccttagatctactatcgcagagtctgcggccgccaggaagcccagattcgagtgtccggagagtaaccggaagtgctgtccccaggcctaggggcggcgccggcggctgccagggagaggcaagaattgagtgttgtgaatagttctgaactagagaccttttgaaaccaaaaggaagatggtcttgagtctttcttgttacgggttggaaataccaagtaaggaattaacatatatgatgctggaaacttgtagaggctcatgattgaaaggcctgaaacagatgtatcttccaagttcttatcaagaaaatgactgtgagggcaacgatgggtcaagaagaccagcggaaaactccctaggagagagccatagaaaatgtacacttcagaagagaaatgtaatcagagaactcaaaaaaggaaaatatataatgtatgccctcggaagggtaaa

SEQ ID NO: 35085 - DNA, 2619 bp, Homo sapiens
  source 1..2619: mol_type = unassigned DNA
acgcatttccggcctttgcggttgatcggtcattggggtgctgcagccccgccacctgttccgtagcttgccggtgccccgaaggtgtcttctcctaaggaagattaaatcagaaaattttaaatcacagttatccctttacttaaagccagagtaagccttccaaattaaccccaggaatggcttcaacagaggaacagtacgatcttaagattgtgaaagtggaggaagaccctatctgggaccaagaaacccaccttcgagggaacaacttttctggccaagaagcctcccgacaactttttaggcagttttgttaccaagagactcctggtccccgagaagctctgagccggctccgagaactctgtcatcagtggctaaggccagaaatccacaccaaagagcaaatcttggagctgctggtgctggagcaattcctgactatcctgcctgaggagctccaggcctgggtgcgggagcaccatccggagagtggggaggaggctgtggctgtagttgaagatctggaacaagagcttagtgagccagggaaccaggctccagaccatgaacatggacattctgaagtgctcttggaggatgtggaacatctgaaggtcaagcaggaaccaacagacatacagcttcagcctatggtgacacagctcagatatgaatctttttgcctccaccaatttcaagaacaagatggtgaaagtatacctgagaaccaggagttggcatcaaagcaagaaatcttaaaagaaatggaacatttgggggatagcaaactccaaagagatgtatctttggattctaagtacagagaaacttgtaaacgagacagcaaggcagaaaagcagcaggcacattccactggagagagacgccacaggtgcaatgaatgtgggaaaagcttcactaagagttcagtactcattgagcaccagagaatccacactggggagaagccatatgaatgtgaagaatgtgggaaggccttcagccggaggtcaagcctgaatgaacatcggcggagccacactggagagaaaccctatcaatgtaaggagtgtgggaaagccttcagtgccagcaatggcctcactcgacacagaagaatccacacaggggaaaaaccatatgaatgcaaagtgtgtgggaaggctttcctcctcagctcatgccttgttcagcatcagaggatacacactggagagaagcgctatcagtgtcgtgagtgtggcaaagccttcattcagaatgcagggcttttccagcatctccgagtccacactggtgagaaaccctatcagtgcagtcagtgcagtaaactctttagtaagcggacacttcttaagaaacatcagaaaatccacactggagagagaccataagggtgatgagtttgggaaagccttcagtcatcattgcaaccttattaggcattttagaatccatactgttccagcagaactggactaattctgtggaccctcagacccctaaatggggccgtcttggaaagtaagattttcaagtggcttattctgttcttataaaatttattttgtattgcattgaaccacttgtctacaaaccaggtgttggtgtctcctgtgtggatgactgtgattgtagggggttgctgggtggccttcttattccctagcctttggtccatttcttatgatttcctttaaaggcaccaaatcttatctggaaataaattgttatggaggggctgtttttgagcaatactgcatattgaacaattctaaaagaccagtatctatgtatacttttaaaaaaaagatttgctaagatcaaaggatattcagaggtgcatctttttctgtaagagtgacattttaaacaaatgtaaggttttggggaataagaatcgtccacattcccacaggaaatcattgctatggtctcccctaggaatgtgatagatagcttctataattatgcagcattatccatagtatgaaacctgtagttttaatggtttagaaatctatgtctcatttcatatctaactcatgtttttgatacgaatcaatatatatgttgatatcatgagttaatatgagtttgacatgaatcatcaacatagtatatacatatcaacataactatgttgatgattcatatcaaattctcaatgcaggtcattactgtaagttttccatttttgttacaaataataagtaagatgatactttaaaatctctgttcttcacaaggtacctctttaattcatagccttttatgtcagcattattcttcttttgggggttggtcagcaactttgagtgccattgcaagcagcatcatttaagtagttttataaagaaaagaagtctgatatcttgggcagcttgctgcttactggggagaccagcatgcttagacacttattgccagggttaaacatatgctctggcaccaagttcaaatctttcctccccatttgtgagctgtgggactttaggcaagttatctaaatgctgctatgctatagtctccccacctgtaaaacagaggatgataccaataccttcctcatagggtacataagattaaataaatacaaacttgtacttaaaa

SEQ ID NO: 35086 - DNA, 3176 bp, Homo sapiens
  source 1..3176: mol_type = unassigned DNA
cagagagagagagaaaaactgctgaccctgtaagagagaactggccatcttgcagacagacagagccccgagtgttctttcaactacctgccacccatccaacaactcccctcggacctcagtatgggctggaacctgacacttggcatgacagtgaccccaggcatccaaaccatgacagttccatcagctctccaaatgagagacagagtctcactatgtcgcccaggcttgtcttgaactcctggactcaagagatcctcccatctcggcctctcaaagtgttgggattacaggcgtgagctattacacctgacttaagtctccattttcatatctatactttgggattccagaagacagaggtttgagtgtaaaacacaaaataacaaaaccacaacaaaaacaactctgtattctcgtccccaccattaccatctctcctttgtgatgtcaaagagaccagaggaagtggacagactcggggaagaatagccagagtaagccttccaaattaaccccaggaatggcttcaacagaggaacagtacgatcttaagattgtgaaagtggaggaagaccctatctgggaccaagaaacccaccttcgagggaacaacttttctggccaagaagcctcccgacaactttttaggcagttttgttaccaagagactcctggtccccgagaagctctgagccggctccgagaactctgtcatcagtggctaaggccagaaatccacaccaaagagcaaatcttggagctgctggtgctggagcaattcctgactatcctgcctgaggagctccaggcctgggtgcgggagcaccatccggagagtggggaggaggctgtggctgtagttgaagatctggaacaagagcttagtgagccagggaaccaggctccagaccatgaacatggacattctgaagtgctcttggaggatgtggaacatctgaaggtcaagcaggaaccaacagacatacagcttcagcctatggtgacacagctcagatatgaatctttttgcctccaccaatttcaagaacaagatggtgaaagtatacctgagaaccaggagttggcatcaaagcaagaaatcttaaaagaaatggaacatttgggggatagcaaactccaaagagatgtatctttggattctaagtacagagaaacttgtaaacgagacagcaaggcagaaaagcagcaggcacattccactggagagagacgccacaggtgcaatgaatgtgggaaaagcttcactaagagttcagtactcattgagcaccagagaatccacactggggagaagccatatgaatgtgaagaatgtgggaaggccttcagccggaggtcaagcctgaatgaacatcggcggagccacactggagagaaaccctatcaatgtaaggagtgtgggaaagccttcagtgccagcaatggcctcactcgacacagaagaatccacacaggggaaaaaccatatgaatgcaaagtgtgtgggaaggctttcctcctcagctcatgccttgttcagcatcagaggatacacactggagagaagcgctatcagtgtcgtgagtgtggcaaagccttcattcagaatgcagggcttttccagcatctccgagtccacactggtgagaaaccctatcagtgcagtcagtgcagtaaactctttagtaagcggacacttcttaagaaacatcagaaaatccacactggagagagaccataagggtgatgagtttgggaaagccttcagtcatcattgcaaccttattaggcattttagaatccatactgttccagcagaactggactaattctgtggaccctcagacccctaaatggggccgtcttggaaagtaagattttcaagtggcttattctgttcttataaaatttattttgtattgcattgaaccacttgtctacaaaccaggtgttggtgtctcctgtgtggatgactgtgattgtagggggttgctgggtggccttcttattccctagcctttggtccatttcttatgatttcctttaaaggcaccaaatcttatctggaaataaattgttatggaggggctgtttttgagcaatactgcatattgaacaattctaaaagaccagtatctatgtatacttttaaaaaaaagatttgctaagatcaaaggatattcagaggtgcatctttttctgtaagagtgacattttaaacaaatgtaaggttttggggaataagaatcgtccacattcccacaggaaatcattgctatggtctcccctaggaatgtgatagatagcttctataattatgcagcattatccatagtatgaaacctgtagttttaatggtttagaaatctatgtctcatttcatatctaactcatgtttttgatacgaatcaatatatatgttgatatcatgagttaatatgagtttgacatgaatcatcaacatagtatatacatatcaacataactatgttgatgattcatatcaaattctcaatgcaggtcattactgtaagttttccatttttgttacaaataataagtaagatgatactttaaaatctctgttcttcacaaggtacctctttaattcatagccttttatgtcagcattattcttcttttgggggttggtcagcaactttgagtgccattgcaagcagcatcatttaagtagttttataaagaaaagaagtctgatatcttgggcagcttgctgcttactggggagaccagcatgcttagacacttattgccagggttaaacatatgctctggcaccaagttcaaatctttcctccccatttgtgagctgtgggactttaggcaagttatctaaatgctgctatgctatagtctccccacctgtaaaacagaggatgataccaataccttcctcatagggtacataagattaaataaatacaaacttgtacttaaaatgtagctctcaataaatatgcattatgatttacatacgaaataatagcatttaacaaatgtaggtagaattttaagtatcatgttaaaattaggatacgaaatgcctctgctgacattcttgttactcttttctccacagtcaaaacctgaatcagaatatttcaaaagagaggaaataaaagttcagcttaaaactgttctgccctaaa

SEQ ID NO: 35087 - DNA, 3551 bp, Homo sapiens
  source 1..3551: mol_type = unassigned DNA
attgctgggcaactaggtcccgccggagcgttccagctcaaagattacctgctgcagtcaggcagaaatgtaaagtctttcctgtttgattgggaactgacccaggtgccaggcttggggggacaccggacaaccaaaggcaatatgtggactcggcaagccactggtccctaaacctgaataagtttccgggcagagctgcatttattgacggttatgaaagctgatttagaagcagcaacgcagcctcttgcctggaattgggatgatgcggctgaaaccaccttcctggcagccaaacaggctattcagcaggcacaagccctatgggtagctgatcggggcacccatttaaacttgatgtgcatgtgaccagatagttttgactggggcttatggcatcacacagagctctttagaatgccagtagacttttggtcccaactttggaagggagctgagctccagtattcctcgacagagaagcagttactaactgcatatgctgccctttagactcgtgacagcctggcaggatgggctacagtcgtcgcgcgcatgacttacccaatagcaggccccgagtgttctttcaactacctgccacccatccaacaactcccctcggacctcagtatgggctggaacctgacacttggcatgacagtgcagaccccaggcatccaaaccatgacagttccatcagctctccaaatgagactttgggattccagaagacagaggtttgagtgtaaaacacaaaataacaaaaccacaacaaaaacaactctgtattctcgtccccaccattaccatctctcctttgtgatgtcaaagagaccagaggaagtggacagactcggggaagaatagccagagtaagccttccaaattaaccccaggaatggcttcaacagaggaacagtacgatcttaagattgtgaaagtggaggaagaccctatctgggaccaagaaacccaccttcgagggaacaacttttctggccaagaagcctcccgacaactttttaggcagttttgttaccaagagactcctggtccccgagaagctctgagccggctccgagaactctgtcatcagtggctaaggccagaaatccacaccaaagagcaaatcttggagctgctggtgctggagcaattcctgactatcctgcctgaggagctccaggcctgggtgcgggagcaccatccggagagtggggaggaggctgtggctgtagttgaagatctggaacaagagcttagtgagccagggaaccaggctccagaccatgaacatggacattctgaagtgctcttggaggatgtggaacatctgaaggtcaagcaggaaccaacagacatacagcttcagcctatggtgacacagctcagatatgaatctttttgcctccaccaatttcaagaacaagatggtgaaagtatacctgagaaccaggagttggcatcaaagcaagaaatcttaaaagaaatggaacatttgggggatagcaaactccaaagagatgtatctttggattctaagtacagagaaacttgtaaacgagacagcaaggcagaaaagcagcaggcacattccactggagagagacgccacaggtgcaatgaatgtgggaaaagcttcactaagagttcagtactcattgagcaccagagaatccacactggggagaagccatatgaatgtgaagaatgtgggaaggccttcagccggaggtcaagcctgaatgaacatcggcggagccacactggagagaaaccctatcaatgtaaggagtgtgggaaagccttcagtgccagcaatggcctcactcgacacagaagaatccacacaggggaaaaaccatatgaatgcaaagtgtgtgggaaggctttcctcctcagctcatgccttgttcagcatcagaggatacacactggagagaagcgctatcagtgtcgtgagtgtggcaaagccttcattcagaatgcagggcttttccagcatctccgagtccacactggtgagaaaccctatcagtgcagtcagtgcagtaaactctttagtaagcggacacttcttaagaaacatcagaaaatccacactggagagagaccataagggtgatgagtttgggaaagccttcagtcatcattgcaaccttattaggcattttagaatccatactgttccagcagaactggactaattctgtggaccctcagacccctaaatggggccgtcttggaaagtaagattttcaagtggcttattctgttcttataaaatttattttgtattgcattgaaccacttgtctacaaaccaggtgttggtgtctcctgtgtggatgactgtgattgtagggggttgctgggtggccttcttattccctagcctttggtccatttcttatgatttcctttaaaggcaccaaatcttatctggaaataaattgttatggaggggctgtttttgagcaatactgcatattgaacaattctaaaagaccagtatctatgtatacttttaaaaaaaagatttgctaagatcaaaggatattcagaggtgcatctttttctgtaagagtgacattttaaacaaatgtaaggttttggggaataagaatcgtccacattcccacaggaaatcattgctatggtctcccctaggaatgtgatagatagcttctataattatgcagcattatccatagtatgaaacctgtagttttaatggtttagaaatctatgtctcatttcatatctaactcatgtttttgatacgaatcaatatatatgttgatatcatgagttaatatgagtttgacatgaatcatcaacatagtatatacatatcaacataactatgttgatgattcatatcaaattctcaatgcaggtcattactgtaagttttccatttttgttacaaataataagtaagatgatactttaaaatctctgttcttcacaaggtacctctttaattcatagccttttatgtcagcattattcttcttttgggggttggtcagcaactttgagtgccattgcaagcagcatcatttaagtagttttataaagaaaagaagtctgatatcttgggcagcttgctgcttactggggagaccagcatgcttagacacttattgccagggttaaacatatgctctggcaccaagttcaaatctttcctccccatttgtgagctgtgggactttaggcaagttatctaaatgctgctatgctatagtctccccacctgtaaaacagaggatgataccaataccttcctcatagggtacataagattaaataaatacaaacttgtacttaaaatgtagctctcaataaatatgcattatgatttacatacgaaataatagcatttaacaaatgtaggtagaattttaagtatcatgttaaaattaggatacgaaatgcctctgctgacattcttgttactcttttctccacagtcaaaacctgaatcagaatatttcaaaagagaggaaataaaagttcagcttaaaactgttctgccct

SEQ ID NO: 35088 - DNA, 575 bp, Homo sapiens
  source 1..575: mol_type = unassigned DNA
aatgagactttgggattccagaagacagaggtttgagtgtaaaacacaaaataacaaaaccacaacaaaaacaactctgtattctcgtccccaccattaccatctctcctttgtgatgtcaaagagaccagaggaagtggacagactcggggaagaataggtgtcttctcctaaggaagattaaatcagaaaattttaaatcacagttatccctttacttaaagccagagtaagccttccaaattaaccccaggaatggcttcaacagaggaacagtacgatcttaagattgtgaaagtggaggaagaccctatctgggaccaagaaacccaccttcgagggaacaacttttctggccaagaagcctcccgacaactttttaggcagttttgttaccaagagactcctggtccccgagaagctctgagccggctccgagaactctgtcatcagtggctaaggccagaaatccacaccaaagagcaaatcttggagctgctggtgctggagcaattcctgactatcctgcctgaggagctccaggcctgggtgcgggagcaccatccggagagtgg

SEQ ID NO: 35089 - DNA, 584 bp, Homo sapiens
  source 1..584: mol_type = unassigned DNA
acttgtgcccagagagagagagaaaaactgctgaccctgtaagagagaactggccatcttgcagacagacagagccccgagtgttctttcaactacctgccacccatccaacaactcccctcggacctcagtatgggctggaacctgacacttggcatgacagtgactttgggattccagaagacagaggtttgagtgtaaaacacaaaataacaaaaccacaacaaaaacaactctgtattctcgtccccaccattaccatctctcctttgtgatgtcaaagagaccagaggaagtggacagactcggggaagaatagccagagtaagccttccaaattaaccccaggaatggcttcaacagaggaacagtacgatcttaagattgtgaaagtggaggaagaccctatctgggaccaagaaacccaccttcgagggaacaacttttctggccaagaagcctcccgacaactttttaggcagttttgttaccaagagactcctggtccccgagaagctctgagccggctccgagaactctgtcatcagtggctaaggccagaaatccacaccaaagagcaaatc

SEQ ID NO: 35090 - DNA, 3050 bp, Homo sapiens
  source 1..3050: mol_type = unassigned DNA
attggggtgctgcagccccgccacctgttccgtagcttgccggtgccccgaaggtgagtcttggccccttgtcgcgacccgccaggttcccagaagatttcaggtctgtgccttggagtaggcggggagggaacgtctgcgcaggcgtgacccccgcccctacacattcactggcctgaagcccccgtggagtaggtggaggtcccgccccttatcctgaagattaaacagcctttctttgtctgagataacgcccggagttctttgtcctgcctccaagacgataaaggagcgcagacacaaaggtgtcttctcctaaggaagattaaatcagaaaattttaaatcacagttatccctttacttaaagccagagtaagccttccaaattaaccccaggaatggcttcaacagaggaacagtacgatcttaagattgtgaaagtggaggaagaccctatctgggaccaagaaacccaccttcgagggaacaacttttctggccaagaagcctcccgacaactttttaggcagttttgttaccaagagactcctggtccccgagaagctctgagccggctccgagaactctgtcatcagtggctaaggccagaaatccacaccaaagagcaaatcttggagctgctggtgctggagcaattcctgactatcctgcctgaggagctccaggcctgggtgcgggagcaccatccggagagtggggaggaggctgtggctgtagttgaagatctggaacaagagcttagtgagccagggaaccaggctccagaccatgaacatggacattctgaagtgctcttggaggatgtggaacatctgaaggtcaagcaggaaccaacagacatacagcttcagcctatggtgacacagctcagatatgaatctttttgcctccaccaatttcaagaacaagatggtgaaagtatacctgagaaccaggagttggcatcaaagcaagaaatcttaaaagaaatggaacatttgggggatagcaaactccaaagagatgtatctttggattctaagtacagagaaacttgtaaacgagacagcaaggcagaaaagcagcaggcacattccactggagagagacgccacaggtgcaatgaatgtgggaaaagcttcactaagagttcagtactcattgagcaccagagaatccacactggggagaagccatatgaatgtgaagaatgtgggaaggccttcagccggaggtcaagcctgaatgaacatcggcggagccacactggagagaaaccctatcaatgtaaggagtgtgggaaagccttcagtgccagcaatggcctcactcgacacagaagaatccacacaggggaaaaaccatatgaatgcaaagtgtgtgggaaggctttcctcctcagctcatgccttgttcagcatcagaggatacacactggagagaagcgctatcagtgtcgtgagtgtggcaaagccttcattcagaatgcagggcttttccagcatctccgagtccacactggtgagaaaccctatcagtgcagtcagtgcagtaaactctttagtaagcggacacttcttaagaaacatcagaaaatccacactggagagagaccataagggtgatgagtttgggaaagccttcagtcatcattgcaaccttattaggcattttagaatccatactgttccagcagaactggactaattctgtggaccctcagacccctaaatggggccgtcttggaaagtaagattttcaagtggcttattctgttcttataaaatttattttgtattgcattgaaccacttgtctacaaaccaggtgttggtgtctcctgtgtggatgactgtgattgtagggggttgctgggtggccttcttattccctagcctttggtccatttcttatgatttcctttaaaggcaccaaatcttatctggaaataaattgttatggaggggctgtttttgagcaatactgcatattgaacaattctaaaagaccagtatctatgtatacttttaaaaaaaagatttgctaagatcaaaggatattcagaggtgcatctttttctgtaagagtgacattttaaacaaatgtaaggttttggggaataagaatcgtccacattcccacaggaaatcattgctatggtctcccctaggaatgtgatagatagcttctataattatgcagcattatccatagtatgaaacctgtagttttaatggtttagaaatctatgtctcatttcatatctaactcatgtttttgatacgaatcaatatatatgttgatatcatgagttaatatgagtttgacatgaatcatcaacatagtatatacatatcaacataactatgttgatgattcatatcaaattctcaatgcaggtcattactgtaagttttccatttttgttacaaataataagtaagatgatactttaaaatctctgttcttcacaaggtacctctttaattcatagccttttatgtcagcattattcttcttttgggggttggtcagcaactttgagtgccattgcaagcagcatcatttaagtagttttataaagaaaagaagtctgatatcttgggcagcttgctgcttactggggagaccagcatgcttagacacttattgccagggttaaacatatgctctggcaccaagttcaaatctttcctccccatttgtgagctgtgggactttaggcaagttatctaaatgctgctatgctatagtctccccacctgtaaaacagaggatgataccaataccttcctcatagggtacataagattaaataaatacaaacttgtacttaaaatgtagctctcaataaatatgcattatgatttacatacgaaataatagcatttaacaaatgtaggtagaattttaagtatcatgttaaaattaggatacgaaatgcctctgctgacattcttgttactcttttctccacagtcaaaacctgaatcagaatatttcaaaagagaggaaataaaagttcagcttaaaactgttctgccctaaa

SEQ ID NO: 35091 - DNA, 580 bp, Homo sapiens
  source 1..580: mol_type = unassigned DNA
acttgtgcccagagagagagagaaaaactgctgaccctgtaagagagaactggccatcttgcagacagacagaggtgagccaggaattaacaagcatgccaaggagtacagctgtaagtgtgggagcggcaggagccacagagccgtttgctgagaagggctgcggtcggaggaggcagccgagacagaggcagacagtgtgagagctgcagcagctgctgctgaataaaatcatattttacctgcctacagccccgagtgttctttcaactacctgccacccatccaacaactcccctcggacctcagtatgggctggaacctgacacttggcatgacagtgactttgggattccagaagacagaggtttgagtgtaaaacacaaaataacaaaaccacaacaaaaacaactctgtattctcgtccccaccattaccatctctcctttgtgatgtcaaagagaccagaggaagtggacagactcggggaagaatagccagagtaagccttccaaattaaccccaggaatggcttcaacagaggaacagtacgatcttaagattgtgaaagtggaggaag

SEQ ID NO: 35092 - DNA, 583 bp, Homo sapiens
  source 1..583: mol_type = unassigned DNA
aaaaggagaagaaacttttcctgggaacctgctgactatacaaaggacaaaggcattatgtgtcaggccttgttcccttatctgaccagagtaagccttccaaattaaccccaggaatggcttcaacagaggaacagtacgatcttaagattgtgaaagtggaggaagaccctatctgggaccaagaaacccaccttcgagggaacaacttttctggccaagaagcctcccgacaactttttaggcagttttgttaccaagagactcctggtccccgagaagctctgagccggctccgagaactctgtcatcagtggctaaggccagaaatccacaccaaagagcaaatcttggagctgctggtgctggagcaattcctgactatcctgcctgaggagctccaggcctgggtgcgggagcaccatccggagagtggggaggaggctgtggctgtagttgaagatctggaacaagagcttagtgagccagggaaccaggctccagaccatgaacatggacattctgaagtgctcttggaggatgtggaacatctgaaggtcaagcaggaaccaacagacataca

SEQ ID NO: 35093 - DNA, 557 bp, Homo sapiens
  source 1..557: mol_type = unassigned DNA
agagccgtttgctgagaagggctgcggtcggaggaggcagccgagacagaggcagacagtgtgagagctgcagcagctgctgctgaataaaatcatattttacctgcctacagccccgagtgttctttcaactacctgccacccatccaacaactcccctcggacctcagtatgggctggaacctgacacttggcatgacagtgagacagagtctcactatgtcgcccaggcttgtcttgaactcctggactcaagagatcctcccatctcggcctctcaaagtgttgggattacaggcactttgggattccagaagacagaggtttgagtgtaaaacacaaaataacaaaaccacaacaaaaacaactctgtattctcgtccccaccattaccatctctcctttgtgatgtcaaagagaccagaggaagtggacagactcggggaagaatagccagagtaagccttccaaattaaccccaggaatggcttcaacagaggaacagtacgatcttaagattgtgaaagtggaggaagaccctatctgggaccaagaaa

SEQ ID NO: 35094 - DNA, 706 bp, Homo sapiens
  source 1..706: mol_type = unassigned DNA
agagaaaaactgctgaccctgtaagagagaactggccatcttgcagacagacagagccccgagtgttctttcaactacctgccacccatccaacaactcccctcggacctcagtatgggctggaacctgacacttggcatgacagtgactttgggattccagaagacagaggtttgagtgtaaaacacaaaataacaaaaccacaacaaaaacaactctgtattctcgtccccaccattaccatctctcctttgtgatgtcaaagagaccagaggaagtggacagactcggggaagaataggtgtcttctcctaaggaagattaaatcagaaaattttaaatcacagttatccctttacttaaagccagagtaagccttccaaattaaccccaggaatggcttcaacagaggaacagtacgatcttaagattgtgaaagtggaggaagaccctatctgggaccaagaaacccaccttcgagggaacaacttttctggccaagaagcctcccgacaactttttaggcagttttgttaccaagagactcctggtccccgagaagctctgagccggctccgagaactctgtcatcagtggctaaggccagaaatccacaccaaagagcaaatcttggagctgctggtgctggagcaattcctgactatcctgcctgaggagctccaggcctgggtgcgggagcaccatc

SEQ ID NO: 35095 - DNA, 581 bp, Homo sapiens
  source 1..581: mol_type = unassigned DNA
gaggtcccgccccttatcctgaagattaaacagcctttctttgtctgagataacgcccggagttctttgtcctgcctccaagacgataaaggagcgcagacacaaagccagagtaagccttccaaattaaccccaggaatggcttcaacagaggaacagtacgatcttaagattgtgaaagtggaggaagaccctatctgggaccaagaaacccaccttcgagggaacaacttttctggccaagaagcctcccgacaactttttaggcagttttgttaccaagagactcctggtccccgagaagctctgagccggctccgagaactctgtcatcagtggctaaggccagaaatccacaccaaagagcaaatcttggagctgctggtgctggagcaattcctgactatcctgcctgaggagctccaggcctgggtgcgggagcaccatccggagagtggggaggaggctgtggctgtagttgaagatctggaacaagagcttagtgagccagggaaccaggctccagaccatgaacatggacattctgaagtgctcttggaggatgtggaacatctgaaggt

SEQ ID NO: 35096 - DNA, 799 bp, Homo sapiens
  source 1..799: mol_type = unassigned DNA
gcctggcttcagccagtgggctcagaacggctgacgcatttccggcctttgcggttgatcggtcattggggtgctgcagccccgccacctgttccgtagcttgccggtgccccgaagccagagtaagccttccaaattaaccccaggaatggcttcaacagaggaacagtacgatcttaagattgtgaaagtggaggaagaccctatctgggaccaagaaacccaccttcgagggaacaacttttctggccaagaagcctcccgacaactttttaggcagttttgttaccaagagactcctggtccccgagaagctctgagccggctccgagaactctgtcatcagtggctaaggccagaaatccacaccaaagagcaaatcttggagctgctggtgctggagcaattcctgactatcctgcctgaggagctccaggcctgggtgcgggagcaccatccggagagtggggaggaggctgtggctgtagttgaagatctggaacaagagcttagtgagccagggaaccaggctccagaccatgaacatggacattctgaagtgctcttggaggatgtggaacatctgaaggtcaagcaggaaccaacagacatacagcttcagcctatggtgacacagctcagatatgaatctttttgcctccaccaatttcaagaacaagatggtgaaagtatacctgagaaccaggagttggcatcaaagcaagaaatcttaaaagaaatggaacatttgggggatagcaaactccaaagagatgtatctttggattctaagtacaga

SEQ ID NO: 35097 - DNA, 1899 bp, Homo sapiens
  source 1..1899: mol_type = unassigned DNA
aaggcgctgctgtcgtaaaaggacgtccggtccgtctcctagtgtccggaatcggctgtcagcctccctggctgttagtaccttctttcccggagtcctggtccacgagttggatttactgctgtcgcgggtgggcctcacgccattccctgtccctcggccccctgagtgagtccggtctcccggcgaaagtgagcgaggtttgcccggagcgcgcacgaggggaaaatgcctaaaaaaaagactggtgcgaggaagaaggctgagaaccgccgagaacgtgaaaaacaactaagagcatcaagaagcactatagatttagctaaacatccatgtaatgcctcaatggaatgtgacaagtgtcagaggcggcagaagaatagagcattttgctacttttgtaattctgtacagaagttaccaatttgtgcacagtgtgggaaaacaaagtgcatgatgaagtcttcagactgtgtcataaagcatgctggtgtatacagtactggccttgcaatggtgggtgcaatatgtgacttctgtgaagcttgggtttgccatggtaggaaatgtctcagtacacatgcttgtgcctgccctcttaccgatgctgagtgtgttgaatgtgaacgaggcgtgtgggaccatggaggcagaatattcagttgttctttttgccataactttctctgtgaagatgatcaatttgagcatcaagccagctgccaggttttagaggcagaaacatttaaatgtgtttcatgcaatcggcttggtcagcactcatgtctccgttgtaaggcttgtttctgtgatgatcatacaaggagcaaagtgtttaagcaagaaaaaggaaaacagcctccttgtcctaaatgtgggcatgaaactcaggagactaaggaccttagcatgtcaacacgctccctgaaatttggcaggcagactggaggtgaagagggagatggagcttctgggtatgatgcttattggaagaacctttcatctgataagtatggtgataccagctaccacgatgaggaggaggatgagtatgaagcagaggatgatgaagaggaagaagatgaaggcagaaaggattcagatactgagtcatcagatttgtttactaatttgaatttaggaaggacctatgctagtggctatgctcactatgaggaacaagagaactaggggagctgctctggtggccgtgtgtgagaggagcaggagtgagtgtgtgtgcttgatgaattgtgtgtggttgttcaaaagtaccttagccacttagccttgtgcagaagactagttacacttaatgggccaagcaatagggtgtagcgtttttatagaactgataatcaggcttatggcataagaaaaatgagtttcaaatttaagatgtttattgatcgaagcaattgaagtatcatggattggattgttactgatttcagtaaagtatgttttgccaattagatacatatatacaagataaaggaataggatggtaatatatttgtttgaaattaaattactgtttttattaaaaaatactgcttcattgggctgattttgtaaaatgtaatgagtaaaatgaattactgtatttttccttttatgtccacagaatgagagtcatatgttgttatattctaaattttcattaaatattcatgtcaccttgagttgtcatgataagtatgttttagtatttgacttattcttctctttcttcacaatgtatgtcctcagtggtacctattattgatgccttaaatgtattgataaggtgactagttagccatttttcagagatacagtatcagaaatagtattattacagaagctttacccaggacattttatttctctttgaataaatctattatttcacttaaa

SEQ ID NO: 35098 - DNA, 1180 bp, Homo sapiens
  source 1..1180: mol_type = unassigned DNA
ggaatcggctgtcagcctccctggctgttagtaccttctttcccggagtcctggtccacgagttggatttactgctgtcgcgggtgggcctcacgccattccctgtccctcggccccctgagtgagtccggtctcccggcgaaagtgagcgaggtttgcccggagcgcgcacgaggggaaaatgcctaaaaaaaagactggtgcgaggaagaaggctgagaaccgccgagaacgtgaaaaacaactaagagcatcaagaagcactatagatttagctaaacatccatgtaatgcctcaatggaatgtgacaagtgtcagagggaaaacaaagtgcatgatgaagtcttcagactgtgtcataaagcatgctggtgtatacagtactggccttgcaatggtgggtgcaatatgtgacttctgtgaagcttgggtttgccatggtaggaaatgtctcagtacacatgcttgtgcctgccctcttaccgatgctgagtgtgttgaatgtgaacgaggcgtgtgggaccatggaggcagaatattcagttgttctttttgccataactttctctgtgaagatgatcaatttgagcatcaagccagctgccaggttttagaggcagaaacatttaaatgtgtttcatgcaatcggcttggtcagcactcatgtctccgttgtaaggcttgtttctgtgatgatcatacaaggagcaaagtgtttaagcaagaaaaaggaaaacagcctccttgtcctaaatgtgggcatgaaactcaggagactaaggaccttagcatgtcaacacgctccctgaaatttggcaggcagactggaggtgaagagggagatggagcttctgggtatgatgcttattggaagaacctttcatctgataagtatggtgataccagctaccacgatgaggaggaggatgagtatgaagcagaggatgatgaagaggaagaagatgaaggcagaaaggattcagatactgagtcatcagatttgtttactaatttgaatttaggaaggacctatgctagtggctatgctcactatgaggaacaagagaactaggggagctgctctggtggccgtgtgtgagaggagcaggagtgagtgtgtgtgcttgatgaattgtgtgtggttgttcaaaagtaccttagccacttagccttgtgcag

SEQ ID NO: 35099 - DNA, 573 bp, Homo sapiens
  source 1..573: mol_type = unassigned DNA
gtccggaatcggctgtcagcctccctggctgttagtaccttctttcccggagtcctggtccacgagttggatttactgctgtcgcgggtgggcctcacgccattccctgtccctcggccccctgagtgagtccggtctcccggcgaaagggaaaatgcctaaaaaaaagactggtgcgaggaagaaggctgagaaccgccgagaacgtgaaaaacaactaagagcatcaagaagcactatagatttagctaaacatccatgtaatgcctcaatggaatgtgacaagtgtcagaggcggcagaagaatagagcattttgctacttttgtaattctgtacagaagttaccaatttgtgcacagtgtgggaaaacaaagtgcatgatgaagtcttcagactgtgtcataaagcatgctggtgtatacagtactggccttgcaatggtgggtgcaatatgtgacttctgtgaagcttgggtttgccatggtaggaaatgtctcagtacacatgcttgtgcctgccctcttaccgatgctgagtgtgttgaatgtgaacgaggcgtgtgggaccatgg

SEQ ID NO: 35100 - DNA, 552 bp, Homo sapiens
  source 1..552: mol_type = unassigned DNA
gtccggaatcggctgtcagcctccctggctgttagtaccttctttcccggagtcctggtccacgagttggatttactgctgtcgcgggggaaaatgcctaaaaaaaagactggtgcgaggaagaaggctgagaaccgccgagaacgtgaaaaacaactaagagcatcaagaagcactatagatttagctaaacatccatgtaatgcctcaatggaatgtgacaagtgtcagaggcggcagaagaatagagcattttgctacttttgtaattctgtacagaagttaccaatttgtgcacagtgtgggaaaacaaagtgcatgatgaagtcttcagactgtgtcataaagcatgctggtgtatacagtactggccttgcaatggtgggtgcaatatgtgacttctgtgaagcttgggtttgccatggtaggaaatgtctcagtacacatgcttgtgcctgccctcttaccgatgctgagtgtgttgaatgtgaacgaggcgtgtgggaccatggaggcagaatattcagttgttctttttgccataactttctc

SEQ ID NO: 35101 - DNA, 838 bp, Homo sapiens
  source 1..838: mol_type = unassigned DNA
gtccggtccgtctcctagtgtccggaatcggctgtcagcctccctggctgttagtaccttctttcccggagtcctggtccacgagttggatttactgctgtcgcgggtgggcctcacgccattccctgtccctcggccccctgagggaaaatgcctaaaaaaaagactggtgcgaggaagaaggctgagaaccgccgagaacgtgaaaaacaactaagagcatcaagaagcactatagatttagctaaacatccatgtaatgcctcaatggaatgtgacaagtgtcagaggcggcagaagaatagagcattttgctacttttgtaattctgtacagaagttaccaatttgtgcacagtgtgggaaaacaaagtgcatgatgaagtcttcagactgtgtcataaagcatgctggtgtatacagtactggccttgcaatggtgggtgcaatatgtgacttctgtgaagcttgggtttgccatggtaggaaatgtctcagtacacatgcttgtgcctgccctcttaccgatgctgagtgtgttgaatgtgaacgaggcgtgtgggaccatggaggcagaatattcagttgttctttttgccataactttctctgtgaagatgatcaatttgagcatcaagccagctgccaggttttagaggcagaaacatttaaatgtgtttcatgcaatcggcttggtcagcactcatgtctccgttgtaaggcttgtttctgtgatgatcatacaaggagcaaagtgtttaagcaagaaaaaggaaaacagcctccttgtcctaaatgtgggcatgaaactcaggagactaaggaccttagcatgtcaa

SEQ ID NO: 35102 - DNA, 5042 bp, Homo sapiens
  source 1..5042: mol_type = unassigned DNA
ggggcacagtccaatgaggagcgagccgggtggccggctgaggggcgtgcttcatgctcgcgggatttttaaaaatggtttctcctggatcttatcccaactgcgcctgagaccttgtttcacctcctgatgtgctgggtgtggttaggcctcgagccgggagctatttgcctcccaggaggaagccagggcagggttccgcggggaatggcggtgagggagccactcgggacgcggaggccctaaaatgaagaagcttcggcctgaggcttcgggagcggcgagcagggaagtgggagtgtgtgtgagtgtgtgtgtgtgtgtgtgtgtgtgtgtgtgaataagccagaggctgcctggtggggccccgccgtggcccagtgactgagataattgtcttcgtctgtggggtaatgcgaacaagccccgttcccctaagccgtgatgcatgcggggttgacgcggccgggctctgtccccataaactgtgacacaggtgtgtgtagacgtctatgagggccatagcgccgggctgtaagggcatctgtaggggtgacgcagccgggctgtgtctctgcacctccgttctgtgcgaggtcaatgctggtggggtctgcagaggtggcacggccaggacgggtctccgtgtctctgaaatgtgcctttgcacttctgtcaggttgacagggacaggcagtgtccctctggtgtgagcgtctgtgggtgtgaaagggccagcgagtgtgcggctgtgactggtcgggatcgggcctgggtgcatggccttttgagtgagcacaggtgtgtgcgaccatgtcacctgtctttctagtgtctccgttgcttcctgtgccttggccttccagccatgtggtacctgctagggagcagtggtcccaaagtgacgtgagaggctctacgctattgtgaaaatgaccaagaagaaggcttcacaagtcacgagatggcagttttggagccagaagtgctctccgtgcacactacctggacgacaagaggaagtaacctcaagaatagaattccttttggggaagaaagagctggccttcaggaaaagcatcccggaggaggaagaagaagtgttatatgtcctaaagtaaggtttcaggccagcatccttcagaaaaagcatccccgaggaggaagacgaatcgttaaacatctgaaagggtcaggccagcatccttcagaaaaagcatccccgaggaggaagacgaatcgttaaacatcttaggtcagctctagcctctcggaatttgtcttcttcagtggaaaccccgagaagactgatcagttcttcagttctaaaacaatggcccagggtttggtgacgttcgccgacgtagccatagacttttctcaggaggagtgggcctgtctgaactctgctcagagggacctgtactgggacgtgatgctggagaactacagtaacttggtctcactggatttggagtcagcatatgaaaataagagtttacctacagaaaaaaacattcatgaaataagggcttccaaaaggaattcagatagaagaagtaaatcccttggccgtaactggatatgtgaaggtacgcttgaaagaccacagcgctccagagggaggtatgtcaatcagatgatcatcaattatgtcaaaagacctgctactagagaaggcacccctcctagaacacatcagagacatcataaggagaattcctttgaatgtaaggactgtgggaaggcctttagtcgtggctatcaacttagtcaacatcagaaaatccatactggtgagaaaccttatgaatgtaaagaatgtaagaaggccttccgttggggcaatcagcttactcaacatcaaaaaattcatactggggagaagccctacgaatgtaaagactgtgggaaggcttttcgatggggctcaagcctcgttattcataagaggattcatactggtgaaaaaccctatgaatgtaaagactgtggaaaggcctttcggcgtggtgatgagctcactcagcaccagagattccacactggggagaaagactacgaatgcaaagactgtgggaagacctttagccgtgtgtataaacttattcagcacaagagaattcatagtggggagaagccttacgagtgtaaagactgtgggaaggcttttatttgtggttcaagcctcattcagcataaaagaattcacacaggtgagaaaccctatgaatgtcaagaatgtgggaaggcctttactcgagtcaattaccttactcagcatcagaagatccacaccggtgagaagcctcacgaatgtaaggagtgtgggaaggcctttcgctggggttcgagcctcgttaagcacgagaggatacatacgggcgagaagccgtacaagtgcacagaatgtgggaaggccttcaattgtggctatcacctcactcagcacgagagaatccacacaggcgaaaccccgtataaatgtaaggagtgtgggaaggctttcatttatggatcgagcctcgtgaaacatgagagaattcataccggggtgaaaccctatgggtgtacagaatgtgggaagagctttagtcacggccatcagcttacacaacatcagaaaacgcacagtggggcgaaatcctacgaatgtaaggagtgcgggaaggcatgtaaccacctaaaccatctccgagaacatcagaggatccacaacagttgaagagccttttgaacgcagtagcccgctcgtatctatggtttcgctttccacagtttgttacctgcagtcaactgcagttcaaaaatattaaatggaaaattccagaaataaagaattttaagtctcaaatggtgtgcccttctgagtagcgtgatgaaatctctcgctgtccggctccagccggccggggatgtgagtcatcccttggtccagcacatccacgctgtatacgccacccaccctgctagtgacttagtagccgtcttggtgatcagatcaactatcccagcatcacagtgcctgtgcccaagcagtcctcactttgcttaacagtggccccagagagcaggagtagtgatgctggtgattcggatatgccaaagagaagccacaaagtgcttccttttaaatgaaaaggtgaaagttctcaacttaaaaaagaaaagaaaaaaatcatatactgaggttgctaagatctacatgacaataagatattttgggagagagatacgttcacataattttattacatatattgttacaattgttctattttgttagttactgttggtaatctcttactgtgcctaatttataaattaaactttagatatgtatgtacaggaaaaaatgtagtatatagtatcgtatatatgtacaggaaaaaaacgtactatctgtggtttcaggtgtccactgcgggtcttcaaacgtacccccctcaggtgagaggggactgctgtacaaagaatataggaaggcctctagactacatccattccttcctcaacaggaggaaaattcctggtacagtttaacgtaaggcttcactgatcactgttgtttttgtttttgtttttgtttttttgagacagagtctcactcttgcccaggctggagtgcagtggcacggtcttggctcactgcaacctccacctcccaggttccagcaattctcctgcctcagcctccccagtagctgggattacagacatgcaccaccacacctggctaatttttgtatttttagtagagacagttttcaccatgttgtccaggctggtctcaactcctgacctcaggtgatccacccaccttgccctcccaaagtgctaggattacaggcgtgagccactgcacctagcccactgatcactcttctgcttacagaatatcagaagtcattctagaggcaaatttgaagagtggaaaaatcactttttctgaatgatcttgtttttggtgtagatgtttttattgtgtgggttagtttaatgaatacataaagactaccagtaccattctgtctttactccgtggcatctgtggaataaccctgctaatgtaacacgtgagaaagcctttggtcatgccacccactctaccagttgtccccaccatcccccgccctcctccctgtgagacactgggccaaaggctcactacccctgtgcgttgtccagcacacagacactatgtgcattatttgtacataaggataatcacatctacctgagactgctatcatggaaattaaatgtttggtacatgtaaagtctttgaaagtgtaactggaatattgtgtaattttaataaataataactattgttgtttttatgatcattactaccatttgtgttgccattagtgaatttttacaagaaaactccctgtgggtgcaatgagtctggaaaagaccattgagtcttctagaagaaaacattaagagattattggcacagccgtgggttacgcaatgatttcttagtacacaaaacacagcaaacataaaaagttgttacacttcatcaaaagtacaaagttctgttcatcaaatgatgctgttaagatagggaaaagacaagaaacaggactggaagaagatgtttgctctaaggtacacctgacaaaggaactctcatagaaaatataaagaatccctcaagttgaaaaaaaaatcaatttaaaggggagaaaacttcagcacgtctcaacagaagaccaccaaatggccaataagtaagtgaaaatgtattcaatgtcattgctcctcaaggaactgtagagtaaaaccacaatgtgctgtcactctagacagtcaccaggatgattaaatttaaatcacaataacaaggctgatttcagatgtctcaccacaaagaaggaggataagggagcgaggtgatggatatgttaattagcttgatttaatccttccacattgtatacatgtatcagaacatcacattgtactccatcaatataatacaattattatttgtcaatcaaatattaataaaatcaaagatgagcagg

SEQ ID NO: 35103 - DNA, 2248 bp, Homo sapiens
  source 1..2248: mol_type = unassigned DNA
gcggccgctgggtgcgcgtgcgcatgcgcgctggcctccagggggtggcgggaccgagtgtgtgacgcacttgcgtgggagtacgaggctgacgcggcggccctgtccccgtaactgtgacacgggtgcacgcgagcgtcattgggggcgatgggggccgtgctgggtgcgcgtttgcaccagtgacgcagccgctgcatctccgccagtccgcgcaggccagcatccttcagaaaaagcatccccgaggaggaagacgaatcgttaaacatctgaaagggtcaggccagcatccttcagaaaaagcatccccgaggaggaagacgaatcgttaaacatcttaggtcagctctagcctctcggaatttgtcttcttcagtggaaaccccgagaagactgatcagttcttcagttctaaaacaatggcccagggtttggtgacgttcgccgacgtagccatagacttttctcaggaggagtgggcctgtctgaactctgctcagagggacctgtactgggacgtgatgctggagaactacagtaacttggtctcactggatttggagtcagcatatgaaaataagagtttacctacagaaaaaaacattcatgaaataagggcttccaaaaggaattcagatagaagaagtaaatcccttggccgtaactggatatgtgaaggtacgcttgaaagaccacagcgctccagagggaggtatgtcaatcagatgatcatcaattatgtcaaaagacctgctactagagaaggcacccctcctagaacacatcagagacatcataaggagaattcctttgaatgtaaggactgtgggaaggcctttagtcgtggctatcaacttagtcaacatcagaaaatccatactggtgagaaaccttatgaatgtaaagaatgtaagaaggccttccgttggggcaatcagcttactcaacatcaaaaaattcatactggggagaagccctacgaatgtaaagactgtgggaaggcttttcgatggggctcaagcctcgttattcataagaggattcatactggtgaaaaaccctatgaatgtaaagactgtggaaaggcctttcggcgtggtgatgagctcactcagcaccagagattccacactggggagaaagactacgaatgcaaagactgtgggaagacctttagccgtgtgtataaacttattcagcacaagagaattcatagtggggagaagccttacgagtgtaaagactgtgggaaggcttttatttgtggttcaagcctcattcagcataaaagaattcacacaggtgagaaaccctatgaatgtcaagaatgtgggaaggcctttactcgagtcaattaccttactcagcatcagaagatccacaccggtgagaagcctcacgaatgtaaggagtgtgggaaggcctttcgctggggttcgagcctcgttaagcacgagaggatacatacgggcgagaagccgtacaagtgcacagaatgtgggaaggccttcaattgtggctatcacctcactcagcacgagagaatccacacaggcgaaaccccgtataaatgtaaggagtgtgggaaggctttcatttatggatcgagcctcgtgaaacatgagagaattcataccggggtgaaaccctatgggtgtacagaatgtgggaagagctttagtcacggccatcagcttacacaacatcagaaaacgcacagtggggcgaaatcctacgaatgtaaggagtgcgggaaggcatgtaaccacctaaaccatctccgagaacatcagaggatccacaacagttgaagagccttttgaacgcagtagcccgctcgtatctatggtttcgctttccacagtttgttacctgcagtcaactgcagttcaaaaatattaaatggaaaattccagaaataaagaattttaagtctcaaatggtgtgcccttctgagtagcgtgatgaaatctctcgctgtccggctccagccggccggggatgtgagtcatcccttggtccagcacatccacgctgtatacgccacccaccctgctagtgacttagtagccgtcttggtgatcagatcaactatcccagcatcacagtgcctgtgcccaagcagtcctcactttgcttaacagtggccccagagagcaggagtagtgatgctggtgattcggatatgccaaagagaagccacaaagtgcttccttttaaatgaaaaggtgaaagttctcaactt

SEQ ID NO: 35104 - DNA, 3817 bp, Homo sapiens
  source 1..3817: mol_type = unassigned DNA
gttttaccagtgaggaaactttaccacactgtgaactctagcctctcggaatttgtcttcttcagtggaaaccccgagaagactgatcagttcttcagttctaaaacaatggcccagggtttggtgacgttcgccgacgtagccatagacttttctcaggaggagtgggcctgtctgaactctgctcagagggacctgtactgggacgtgatgctggagaactacagtaacttggtctcactggatttggagtcagcatatgaaaataagagtttacctacagaaaaaaacattcatgaaataagggcttccaaaaggaattcagatagaagaagtaaatcccttggccgtaactggatatgtgaaggtacgcttgaaagaccacagcgctccagagggaggtatgtcaatcagatgatcatcaattatgtcaaaagacctgctactagagaaggcacccctcctagaacacatcagagacatcataaggagaattcctttgaatgtaaggactgtgggaaggcctttagtcgtggctatcaacttagtcaacatcagaaaatccatactggtgagaaaccttatgaatgtaaagaatgtaagaaggccttccgttggggcaatcagcttactcaacatcaaaaaattcatactggggagaagccctacgaatgtaaagactgtgggaaggcttttcgatggggctcaagcctcgttattcataagaggattcatactggtgaaaaaccctatgaatgtaaagactgtggaaaggcctttcggcgtggtgatgagctcactcagcaccagagattccacactggggagaaagactacgaatgcaaagactgtgggaagacctttagccgtgtgtataaacttattcagcacaagagaattcatagtggggagaagccttacgagtgtaaagactgtgggaaggcttttatttgtggttcaagcctcattcagcataaaagaattcacacaggtgagaaaccctatgaatgtcaagaatgtgggaaggcctttactcgagtcaattaccttactcagcatcagaagatccacaccggtgagaagcctcacgaatgtaaggagtgtgggaaggcctttcgctggggttcgagcctcgttaagcacgagaggatacatacgggcgagaagccgtacaagtgcacagaatgtgggaaggccttcaattgtggctatcacctcactcagcacgagagaatccacacaggcgaaaccccgtataaatgtaaggagtgtgggaaggctttcatttatggatcgagcctcgtgaaacatgagagaattcataccggggtgaaaccctatgggtgtacagaatgtgggaagagctttagtcacggccatcagcttacacaacatcagaaaacgcacagtggggcgaaatcctacgaatgtaaggagtgcgggaaggcatgtaaccacctaaaccatctccgagaacatcagaggatccacaacagttgaagagccttttgaacgcagtagcccgctcgtatctatggtttcgctttccacagtttgttacctgcagtcaactgcagttcaaaaatattaaatggaaaattccagaaataaagaattttaagtctcaaatggtgtgcccttctgagtagcgtgatgaaatctctcgctgtccggctccagccggccggggatgtgagtcatcccttggtccagcacatccacgctgtatacgccacccaccctgctagtgacttagtagccgtcttggtgatcagatcaactatcccagcatcacagtgcctgtgcccaagcagtcctcactttgcttaacagtggccccagagagcaggagtagtgatgctggtgattcggatatgccaaagagaagccacaaagtgcttccttttaaatgaaaaggtgaaagttctcaacttaaaaaagaaaagaaaaaaatcatatactgaggttgctaagatctacatgacaataagatattttgggagagagatacgttcacataattttattacatatattgttacaattgttctattttgttagttactgttggtaatctcttactgtgcctaatttataaattaaactttagatatgtatgtacaggaaaaaatgtagtatatagtatcgtatatatgtacaggaaaaaaacgtactatctgtggtttcaggtgtccactgcgggtcttcaaacgtacccccctcaggtgagaggggactgctgtacaaagaatataggaaggcctctagactacatccattccttcctcaacaggaggaaaattcctggtacagtttaacgtaaggcttcactgatcactgttgtttttgtttttgtttttgtttttttgagacagagtctcactcttgcccaggctggagtgcagtggcacggtcttggctcactgcaacctccacctcccaggttccagcaattctcctgcctcagcctccccagtagctgggattacagacatgcaccaccacacctggctaatttttgtatttttagtagagacagttttcaccatgttgtccaggctggtctcaactcctgacctcaggtgatccacccaccttgccctcccaaagtgctaggattacaggcgtgagccactgcacctagcccactgatcactcttctgcttacagaatatcagaagtcattctagaggcaaatttgaagagtggaaaaatcactttttctgaatgatcttgtttttggtgtagatgtttttattgtgtgggttagtttaatgaatacataaagactaccagtaccattctgtctttactccgtggcatctgtggaataaccctgctaatgtaacacgtgagaaagcctttggtcatgccacccactctaccagttgtccccaccatcccccgccctcctccctgtgagacactgggccaaaggctcactacccctgtgcgttgtccagcacacagacactatgtgcattatttgtacataaggataatcacatctacctgagactgctatcatggaaattaaatgtttggtacatgtaaagtctttgaaagtgtaactggaatattgtgtaattttaataaataataactattgttgtttttatgatcattactaccatttgtgttgccattagtgaatttttacaagaaaactccctgtgggtgcaatgagtctggaaaagaccattgagtcttctagaagaaaacattaagagattattggcacagccgtgggttacgcaatgatttcttagtacacaaaacacagcaaacataaaaagttgttacacttcatcaaaagtacaaagttctgttcatcaaatgatgctgttaagatagggaaaagacaagaaacaggactggaagaagatgtttgctctaaggtacacctgacaaaggaactctcatagaaaatataaagaatccctcaagttgaaaaaaaaatcaatttaaaggggagaaaacttcagcacgtctcaacagaagaccaccaaatggccaataagtaagtgaaaatgtattcaatgtcattgctcctcaaggaactgtagagtaaaaccacaatgtgctgtcactctagacagtcaccaggatgattaaatttaaatcacaataacaaggctgatttcagatgtctcaccacaaagaaggaggataagggagcgaggtgatggatatgttaattagcttgatttaatccttccacattgtatacatgtatcagaacatcacattgtactccatcaatataatacaattattatttgtcaatcaaatattaataaaatcaaagatgagcagg

SEQ ID NO: 35105 - DNA, 670 bp, Homo sapiens
  source 1..670: mol_type = unassigned DNA
gtcacctgtctttctagtgtctccgttgcttcctgtgccttggccttccagccatgtggtacctgctagggagcagtggtcccaaagtgacgtgagaggctctacgctattgtgaaaatgaccaagaagaaggcttcacaagtcacgagatggcagttttggagccagaagtgctctccgtgcacactacctggacgacaagaggaagtaacctcaagaatagaattccttttggggaagaaagaggccagcatccttcagaaaaagcatccccgaggaggaagacgaatcgttaaacatctgaaagggtcaggccagcatccttcagaaaaagcatccccgaggaggaagacgaatcgttaaacatcttaggtcagctttaccagtgaggaaaccgacactgtgagctctagcctctcggaatttgtcttcttcagtggaaaccccgagaagactgatcagttcttcagttctaaaacaatggcccagggtttggtgacgttcgccgacgtagccatagacttttctcaggaggagtgggcctgtctgaactctgctcagagggacctgtactgggacgtgatgctggagaactacagtaacttggtctcactggatttggagtcagcatatgaaaataagagtttacctacagaaaaaaacattcatg

SEQ ID NO: 35106 - DNA, 573 bp, Homo sapiens
  source 1..573: mol_type = unassigned DNA
ggtgatcgggccttctgggtgacgcaggtgtgtgtgacagcacaacctgtagttccagcgtctctgtgctgagatgggtgatcgggccttctgggtgacgcaggtgtgtgtgacaacacaacctgtagctccagcttctctgtgctgggatggatgatcgggccttctgggtgacgcaggccagcatccttcagaaaaagcatccccgaggaggaagacgaatcgttaaacatcttaggtcagctctagcctctcggaatttgtcttcttcagtggaaaccccgagaagactgatcagttcttcagttctaaaacaatggcccagggtttggtgacgttcgccgacgtagccatagacttttctcaggaggagtgggcctgtctgaactctgctcagagggacctgtactgggacgtgatgctggagaactacagtaacttggtctcactggatttggagtcagcatatgaaaataagagtttacctacagaaaaaaacattcatgaaataagggcttccaaaaggaattcagatagaagaagtaaatcccttggccgtaactggatatgtga

SEQ ID NO: 35107 - DNA, 641 bp, Homo sapiens
  source 1..641: mol_type = unassigned DNA
gctgagatgggtgatcgggccttctgggtgacgcaggtgtgtgtgacaacacaacctgtagctccagcttctctgtgctgggatggatgatcgggccttctgggtgacgcaggtgtgtgtgacagcacaacctgtagctccagcgtctctgctgcttcccctgccttcacctcctaaccaagcggtacctgcctgagaacaagggccgcggaaggacgggagtgcctgagccctgccaggaaattcaccaacaagaaggcagaaacagccatgaggccagcatccttcagaaaaagcatccccgaggaggaagacgaatcgttaaacatcttaggtcagctttaccagtgaggaaaccgacactgtgagctctagcctctcggaatttgtcttcttcagtggaaaccccgagaagactgatcagttcttcagttctaaaacaatggcccagggtttggtgacgttcgccgacgtagccatagacttttctcaggaggagtgggcctgtctgaactctgctcagagggacctgtactgggacgtgatgctggagaactacagtaacttggtctcactggatttggagtcagcatatgaaaataagagtttacctacagaaaaaaacattcatgaaataaggg

SEQ ID NO: 35108 - DNA, 688 bp, Homo sapiens
  source 1..688: mol_type = unassigned DNA
agcggtacctgcctgagaacaagggccgcggaaggacgggagtgcctgagccctgccaggaaattcaccaacaagaaggcagaaacagccatgaggtgacgctttcagagctagaagtgctctccactcagggcgcctgagtgacaggagacggtggcctcaggagtagaattcctcctgtagagggacacgtccctgatgtgggagacagggagaggggcagctccacgcttcatcatctcagttaccacagcgtgctcttcaggaatctcccagaaactccatctcggggcctcgtatttctcattggttttattaggtatggcaggtgttacccttctggttctgttttccccaggccagcatccttcagaaaaagcatccccgaggaggaagacgaatcgttaaacatcttaggtcagctctagcctctcggaatttgtcttcttcagtggaaaccccgagaagactgatcagttcttcagttctaaaacaatggcccagggtttggtgacgttcgccgacgtagccatagacttttctcaggaggagtgggcctgtctgaactctgctcagagggacctgtactgggacgtgatgctggagaactacagtaacttggtctcactggatttggagtcagcatatgaaaataagagtttacctacagaaaaaaacattcatgaaa

SEQ ID NO: 35109 - DNA, 761 bp, Homo sapiens
  source 1..761: mol_type = unassigned DNA
ggggcgacggaacccgcacctgtgaacctcggcagtgcgtccccgggactctgttctgtgaggccagcatccttcagaaaaagcatccccgaggaggaagacgaatcgttaaacatcttaggtcagctttaccagtgaggaaaccgacactgtgagctctagcctctcggaatttgtcttcttcagtggaaaccccgagaagactgatcagttcttcagttctaaaacaatggcccagggtttggtgacgttcgccgacgtagccatagacttttctcaggaggagtgggcctgtctgaactctgctcagagggacctgtactgggacgtgatgctggagaactacagtaacttggtctcactggatttggagtcagcatatgaaaataagagtttacctacagaaaaaaacattcatgaaataagggcttccaaaaggaattcagatagaagaagtaaatcccttggccgtaactggatatgtgaaggtacgcttgaaagaccacagcgctccagagggaggtatgtcaatcagatgatcatcaattatgtcaaaagacctgctactagagaaggcacccctcctagaacacatcagagacatcataaggagaattcctttgaatgtaaggactgtgggaaggcctttagtcgtggctatcaacttagtcaacatcagaaaatccatactggtgagaaaccttatgaatgtaaagaatgtaagaaggccttccgttggggcaatcagcttactcaacatc

SEQ ID NO: 35110 - DNA, 670 bp, Homo sapiens
  source 1..670: mol_type = unassigned DNA
agtccgcgcaggtgagattggtgcgcgtggctccgaggggagacgggcacggggcttctgacggtgacgcacttgctggagagtgtggggtgacacagccgggctctccccataactggtgaccgggggtgctccagaggctttgggtcaacgcagcccgtgcctgtgaacctcggcggtgcgtccctgggactctgctccgtgaggccagcatccttcagaaaaagcatccccgaggaggaagacgaatcgttaaacatctgaaagggtcaggccagcatccttcagaaaaagcatccccgaggaggaagacgaatcgttaaacatcttaggtcagctctagcctctcggaatttgtcttcttcagtggaaaccccgagaagactgatcagttcttcagttctaaaacaatggcccagggtttggtgacgttcgccgacgtagccatagacttttctcaggaggagtgggcctgtctgaactctgctcagagggacctgtactgggacgtgatgctggagaactacagtaacttggtctcactggatttggagtcagcatatgaaaataagagtttacctacagaaaaaaacattcatgaaataagggcttccaaaaggaattcagatagaagaagtaaatcccttggccgtaactggatatgtgaagg

SEQ ID NO: 35111 - DNA, 562 bp, Homo sapiens
  source 1..562: mol_type = unassigned DNA
ggtgcgcgtggctccgaggggagacgggcacggggcttctgacggtgacgcacttgctggagagtgtggggtgacacagccgggctctccccataactggtgaccgggggtgctccagaggctttgggtcaacgcagcccgtgcctgtgaacctcggcggtgcgtccctgggactctgctccgtgaggccagcatccttcagaaaaagcatccccgaggaggaagacgaatcgttaaacatctgaaagggtcaggccagcatccttcagaaaaagcatccccgaggaggaagacgaatcgttaaacatcttaggtcagctttaccagtgaggaaaccgacactgtgagctctagcctctcggaatttgtcttcttcagtggaaaccccgagaagactgatcagttcttcagttctaaaacaatggcccagggtttggtgacgttcgccgacgtagccatagacttttctcaggaggagtgggcctgtctgaactctgctcagagggacctgtactgggacgtgatgctggagaactacagtaacttggtctcactggatttg

SEQ ID NO: 35112 - DNA, 2120 bp, Homo sapiens
  source 1..2120: mol_type = unassigned DNA
acgcacttgcgtgggagtacgaggctgacgcggcggccctgtccccgtaactgtgacacgggtgcacgcgagcgtcattgggggcgatgggggccgtgctgggtgcgcgtttgcaccagtgacgcagccgctgcatctccgccagtccgcgcaggccagcatccttcagaaaaagcatccccgaggaggaagacgaatcgttaaacatctgaaagggtcagctctagcctctcggaatttgtcttcttcagtggaaaccccgagaagactgatcagttcttcagttctaaaacaatggcccagggtttggtgacgttcgccgacgtagccatagacttttctcaggaggagtgggcctgtctgaactctgctcagagggacctgtactgggacgtgatgctggagaactacagtaacttggtctcactggatttggagtcagcatatgaaaataagagtttacctacagaaaaaaacattcatgaaataagggcttccaaaaggaattcagatagaagaagtaaatcccttggccgtaactggatatgtgaaggtacgcttgaaagaccacagcgctccagagggaggtatgtcaatcagatgatcatcaattatgtcaaaagacctgctactagagaaggcacccctcctagaacacatcagagacatcataaggagaattcctttgaatgtaaggactgtgggaaggcctttagtcgtggctatcaacttagtcaacatcagaaaatccatactggtgagaaaccttatgaatgtaaagaatgtaagaaggccttccgttggggcaatcagcttactcaacatcaaaaaattcatactggggagaagccctacgaatgtaaagactgtgggaaggcttttcgatggggctcaagcctcgttattcataagaggattcatactggtgaaaaaccctatgaatgtaaagactgtggaaaggcctttcggcgtggtgatgagctcactcagcaccagagattccacactggggagaaagactacgaatgcaaagactgtgggaagacctttagccgtgtgtataaacttattcagcacaagagaattcatagtggggagaagccttacgagtgtaaagactgtgggaaggcttttatttgtggttcaagcctcattcagcataaaagaattcacacaggtgagaaaccctatgaatgtcaagaatgtgggaaggcctttactcgagtcaattaccttactcagcatcagaagatccacaccggtgagaagcctcacgaatgtaaggagtgtgggaaggcctttcgctggggttcgagcctcgttaagcacgagaggatacatacgggcgagaagccgtacaagtgcacagaatgtgggaaggccttcaattgtggctatcacctcactcagcacgagagaatccacacaggcgaaaccccgtataaatgtaaggagtgtgggaaggctttcatttatggatcgagcctcgtgaaacatgagagaattcataccggggtgaaaccctatgggtgtacagaatgtgggaagagctttagtcacggccatcagcttacacaacatcagaaaacgcacagtggggcgaaatcctacgaatgtaaggagtgcgggaaggcatgtaaccacctaaaccatctccgagaacatcagaggatccacaacagttgaagagccttttgaacgcagtagcccgctcgtatctatggtttcgctttccacagtttgttacctgcagtcaactgcagttcaaaaatattaaatggaaaattccagaaataaagaattttaagtctcaaatggtgtgcccttctgagtagcgtgatgaaatctctcgctgtccggctccagccggccggggatgtgagtcatcccttggtccagcacatccacgctgtatacgccacccaccctgctagtgacttagtagccgtcttggtgatcagatcaactatcccagcatcacagtgcctgtgcccaagcagtcctcactttgcttaacagtggccccagagagcaggagtagtgatgctggtgattcggatatgccaaagagaagccacaaagtgcttccttttaaatgaaaaggtgaaagttctcaactt

SEQ ID NO: 35113 - DNA, 540 bp, Homo sapiens
  source 1..540: mol_type = unassigned DNA
gtgcacgcaagcgtcattgggggtgatgggggccgtgctcggtgcgcttctgcaccggtgacgcaaccgctgtgtctccgccagtccgcgcaggccagcatccttcagaaaaagcatccccgaggaggaagacgaatcgttaaacatcttagctctagcctctcggaatttgtcttcttcagtggaaaccccgagaagactgatcagttcttcagttctaaaacaatggcccagggtttggtgacgttcgccgacgtagccatagacttttctcaggaggagtgggcctgtctgaactctgctcagagggacctgtactgggacgtgatgctggagaactacagtaacttggtctcactggatttggagtcagcatatgaaaataagagtttacctacagaaaaaaacattcatgaaataagggcttccaaaaggaattcagatagaagaagtaaatcccttggccgtaactggatatgtgaaggtacgcttgaaagaccacagcgctccagagggaggtatgtcaatcagatgatcatc

SEQ ID NO: 35114 - DNA, 2180 bp, Homo sapiens
  source 1..2180: mol_type = unassigned DNA
atcccaactgcgcctgagaccttgtttcacctcctgatgtgctgggtgtggttaggcctcgagccgggagctatttgcctcccaggaggaagccagggcagggttccgcggggaatggcggtgagggagccactcgggacgcggaggccctaaaatgaagaagcttcggcctgaggcttcgggagcggcgagcagtgtctccgttgcttcctgtgccttggccttccagccatgtggtacctgctagggagcagtggtcccaaagtgacgtgagaggctctacgctattgtgaaaatgaccaagaagaaggcttcacaagtcacgagatggcagttttggagccagaagtgctctccgtgcacactacctggacgacaagaggaagtaacctcaagaatagaattccttttggggaagaaagagctggccttcaggaaaagcatcccggaggaggaagaagaagtgttatatgtcctaaagtaaggtttcaggccagcatccttcagaaaaagcatccccgaggaggaagacgaatcgttaaacatcttaggtcagctttaccagtgaggaaaccgacactgtgagctctagcctctcggaatttgtcttcttcagtggaaaccccgagaagactgatcagttcttcagttctaaaacaatggcccagggtttggtgacgttcgccgacgtagccatagacttttctcaggaggagtgggcctgtctgaactctgctcagagggacctgtactgggacgtgatgctggagaactacagtaacttggtctcactggatttggagtcagcatatgaaaataagagtttacctacagaaaaaaacattcatgaaataagggcttccaaaaggaattcagatagaagaagtaaatcccttggccgtaactggatatgtgaaggtacgcttgaaagaccacagcgctccagagggaggtatgtcaatcagatgatcatcaattatgtcaaaagacctgctactagagaaggcacccctcctagaacacatcagagacatcataaggagaattcctttgaatgtaaggactgtgggaaggcctttagtcgtggctatcaacttagtcaacatcagaaaatccatactggtgagaaaccttatgaatgtaaagaatgtaagaaggccttccgttggggcaatcagcttactcaacatcaaaaaattcatactggggagaagccctacgaatgtaaagactgtgggaaggcttttcgatggggctcaagcctcgttattcataagaggattcatactggtgaaaaaccctatgaatgtaaagactgtggaaaggcctttcggcgtggtgatgagctcactcagcaccagagattccacactggggagaaagactacgaatgcaaagactgtgggaagacctttagccgtgtgtataaacttattcagcacaagagaattcatagtggggagaagccttacgagtgtaaagactgtgggaaggcttttatttgtggttcaagcctcattcagcataaaagaattcacacaggtgagaaaccctatgaatgtcaagaatgtgggaaggcctttactcgagtcaattaccttactcagcatcagaagatccacaccggtgagaagcctcacgaatgtaaggagtgtgggaaggcctttcgctggggttcgagcctcgttaagcacgagaggatacatacgggcgagaagccgtacaagtgcacagaatgtgggaaggccttcaattgtggctatcacctcactcagcacgagagaatccacacaggcgaaaccccgtataaatgtaaggagtgtgggaaggctttcatttatggatcgagcctcgtgaaacatgagagaattcataccggggtgaaaccctatgggtgtacagaatgtgggaagagctttagtcacggccatcagcttacacaacatcagaaaacgcacagtggggcgaaatcctacgaatgtaaggagtgcgggaaggcatgtaaccacctaaaccatctccgagaacatcagaggatccacaacagttgaagagccttttgaacgcagtagcccgctcgtatctatggtttcgctttccacagtttgttacctgcagtcaactgcagttcaaaaatattaaatggaaaattccagaaataaagaattttaagtctcaaa

SEQ ID NO: 35115 - DNA, 2130 bp, Homo sapiens
  source 1..2130: mol_type = unassigned DNA
gactgtgtgacgcacttgcgtgggagtgcgaggctgacgcggcggctctatctcccgtaactgtgacacgggtgcacgcaagcgtcattgggggtgatgggggccgtgctcggtgcgcttctgcaccggtgacgcaaccgctgtgtctccgccagtccgcgcaggccagcatccttcagaaaaagcatccccgaggaggaagacgaatcgttaaacatcttaggtcagctctagcctctcggaatttgtcttcttcagtggaaaccccgagaagactgatcagttcttcagttctaaaacaatggcccagggtttggtgacgttcgccgacgtagccatagacttttctcaggaggagtgggcctgtctgaactctgctcagagggacctgtactgggacgtgatgctggagaactacagtaacttggtctcactggatttggagtcagcatatgaaaataagagtttacctacagaaaaaaacattcatgaaataagggcttccaaaaggaattcagatagaagaagtaaatcccttggccgtaactggatatgtgaaggtacgcttgaaagaccacagcgctccagagggaggtatgtcaatcagatgatcatcaattatgtcaaaagacctgctactagagaaggcacccctcctagaacacatcagagacatcataaggagaattcctttgaatgtaaggactgtgggaaggcctttagtcgtggctatcaacttagtcaacatcagaaaatccatactggtgagaaaccttatgaatgtaaagaatgtaagaaggccttccgttggggcaatcagcttactcaacatcaaaaaattcatactggggagaagccctacgaatgtaaagactgtgggaaggcttttcgatggggctcaagcctcgttattcataagaggattcatactggtgaaaaaccctatgaatgtaaagactgtggaaaggcctttcggcgtggtgatgagctcactcagcaccagagattccacactggggagaaagactacgaatgcaaagactgtgggaagacctttagccgtgtgtataaacttattcagcacaagagaattcatagtggggagaagccttacgagtgtaaagactgtgggaaggcttttatttgtggttcaagcctcattcagcataaaagaattcacacaggtgagaaaccctatgaatgtcaagaatgtgggaaggcctttactcgagtcaattaccttactcagcatcagaagatccacaccggtgagaagcctcacgaatgtaaggagtgtgggaaggcctttcgctggggttcgagcctcgttaagcacgagaggatacatacgggcgagaagccgtacaagtgcacagaatgtgggaaggccttcaattgtggctatcacctcactcagcacgagagaatccacacaggcgaaaccccgtataaatgtaaggagtgtgggaaggctttcatttatggatcgagcctcgtgaaacatgagagaattcataccggggtgaaaccctatgggtgtacagaatgtgggaagagctttagtcacggccatcagcttacacaacatcagaaaacgcacagtggggcgaaatcctacgaatgtaaggagtgcgggaaggcatgtaaccacctaaaccatctccgagaacatcagaggatccacaacagttgaagagccttttgaacgcagtagcccgctcgtatctatggtttcgctttccacagtttgttacctgcagtcaactgcagttcaaaaatattaaatggaaaattccagaaataaagaattttaagtctcaaatggtgtgcccttctgagtagcgtgatgaaatctctcgctgtccggctccagccggccggggatgtgagtcatcccttggtccagcacatccacgctgtatacgccacccaccctgctagtgacttagtagccgtcttggtgatcagatcaactatcccagcatcacagtgcctgtgcccaagcagtcctcactttgcttaacagtggccccagagagcaggagtagtgatgctggtgattcggatatgccaaagagaagccacaaagtgcttccttttaaatgaaaaggtgaaagttctcaacttaaa

SEQ ID NO: 35116 - DNA, 739 bp, Homo sapiens
  source 1..739: mol_type = unassigned DNA
ggggcgacggaacccgcacctgtgaacctcggcagtgcgtccccgggactctgttctgtgaggccagcatccttcagaaaaagcatccccgaggaggaagacgaatcgttaaacatcttaggtcagctctagcctctcggaatttgtcttcttcagtggaaaccccgagaagactgatcagttcttcagttctaaaacaatggcccagggtttggtgacgttcgccgacgtagccatagacttttctcaggaggagtgggcctgtctgaactctgctcagagggacctgtactgggacgtgatgctggagaactacagtaacttggtctcactggatttggagtcagcatatgaaaataagagtttacctacagaaaaaaacattcatgaaataagggcttccaaaaggaattcagatagaagaagtaaatcccttggccgtaactggatatgtgaaggtacgcttgaaagaccacagcgctccagagggaggtgagaaaccctatgaatgtcaagaatgtgggaaggcctttactcgagtcaattaccttactcagcatcagaagatccacaccggtgagaagcctcacgaatgtaaggagtgtgggaaggcctttcgctggggttcgagcctcgttaagcacgagaggatacatacgggcgagaagccgtacaagtgcacagaatgtgggaaggccttcaattgtggctatcacctcactcagcacgagagaatcca

SEQ ID NO: 35117 - DNA, 1890 bp, Homo sapiens
  source 1..1890: mol_type = unassigned DNA
aggtgtgtgtgacagtgcaacttgtagctccagcgtctctgctgcttcccctgccttcacctcctaaccaagcggtacctgcctgagaacaagggccgcggagggacgtgagcgcctgagcctcgcctggaaattcaccagcaagaaggcagaaacagccatgaggccagcatccttcagaaaaagcatccccgaggaggaagacgaatcgttaaacatctgaaagggtcaggccagcatccttcagaaaaagcatccccgaggaggaagacgaatcgttaaacatcttaggtcagctctagcctctcggaatttgtcttcttcagtggaaaccccgagaagactgatcagttcttcagttctaaaacaatggcccagggtttggtgacgttcgccgacgtagccatagacttttctcaggaggagtgggcctgtctgaactctgctcagagggacctgtactgggacgtgatgctggagaactacagtaacttggtctcactggatttggagtcagcatatgaaaataagagtttacctacagaaaaaaacattcatgaaataagggcttccaaaaggaattcagatagaagaagtaaatcccttggccgtaactggatatgtgaaggtacgcttgaaagaccacagcgctccagagggaggtatgtcaatcagatgatcatcaattatgtcaaaagacctgctactagagaaggcacccctcctagaacacatcagagacatcataaggagaattcctttgaatgtaaggactgtgggaaggcctttagtcgtggctatcaacttagtcaacatcagaaaatccatactggtgagaaaccttatgaatgtaaagaatgtaagaaggccttccgttggggcaatcagcttactcaacatcaaaaaattcatactggggagaagccctacgaatgtaaagactgtgggaaggcttttcgatggggctcaagcctcgttattcataagaggattcatactggtgaaaaaccctatgaatgtaaagactgtggaaaggcctttcggcgtggtgatgagctcactcagcaccagagattccacactggggagaaagactacgaatgcaaagactgtgggaagacctttagccgtgtgtataaacttattcagcacaagagaattcatagtggggagaagccttacgagtgtaaagactgtgggaaggcttttatttgtggttcaagcctcattcagcataaaagaattcacacaggtgagaaaccctatgaatgtcaagaatgtgggaaggcctttactcgagtcaattaccttactcagcatcagaagatccacaccggtgagaagcctcacgaatgtaaggagtgtgggaaggcctttcgctggggttcgagcctcgttaagcacgagaggatacatacgggcgagaagccgtacaagtgcacagaatgtgggaaggccttcaattgtggctatcacctcactcagcacgagagaatccacacaggcgaaaccccgtataaatgtaaggagtgtgggaaggctttcatttatggatcgagcctcgtgaaacatgagagaattcataccggggtgaaaccctatgggtgtacagaatgtgggaagagctttagtcacggccatcagcttacacaacatcagaaaacgcacagtggggcgaaatcctacgaatgtaaggagtgcgggaaggcatgtaaccacctaaaccatctccgagaacatcagaggatccacaacagttgaagagccttttgaacgcagtagcccgctcgtatctatggtttcgctttccacagtttgttacctgcagtcaactgcagttcaaaaatattaaatggaaaattccagaaataaagaattttaagtctcaaa

SEQ ID NO: 35118 - DNA, 913 bp, Homo sapiens
  source 1..913: mol_type = unassigned DNA
gtcattgggggtgatgggggccgtgctcggtgcgcttctgcaccggtgacgcaaccgctgtgtctccgccagtccgcgcaggtgagattggcgcccatggctccaaggggagacgggcacggagcttctagcggtgacgcacttgctggagagggtgtggggtgacgcagccgggctctccccataactagggctggggtgctcccgaggctttggggcgacggaacccgcacctgtgaacctcggcagtgcgtccccgggactctgttctgtgaggccagcatccttcagaaaaagcatccccgaggaggaagacgaatcgttaaacatcttaggtcagctctagcctctcggaatttgtcttcttcagtggaaaccccgagaagactgatcagttcttcagttctaaaacaatggcccagggtttggtgacgttcgccgacgtagccatagacttttctcaggaggagtgggcctgtctgaactctgctcagagggacctgtactgggacgtgatgctggagaactacagtaacttggtctcactggatttggagtcagcatatgaaaataagagtttacctacagaaaaaaacattcatgaaataagggcttccaaaaggaattcagatagaagaagtaaatcccttggccgtaactggatatgtgaaggtacgcttgaaagaccacagcgctccagagggaggtatgtcaatcagatgatcatcaattatgtcaaaagacctgctactagagaaggcacccctcctagaacacatcagagacatcataaggagaattcctttgaatgtaaggactgtgggaaggcctttagtcgtggctatcaacttagtcaacatcagaaaatccatactggtgagaaaccttatgaatgtaaagaatgtaagaaggc

SEQ ID NO: 35119 - DNA, 574 bp, Homo sapiens
  source 1..574: mol_type = unassigned DNA
ttcccccgacggccccgcgtcctcttctagcctcaccctctcccgaggccccagcgttgggggactaccgggccagcatccttcagaaaaagcatccccgaggaggaagacgaatcgttaaacatctgaaagggtcaggccagcatccttcagaaaaagcatccccgaggaggaagacgaatcgttaaacatcttaggtcagctctagcctctcggaatttgtcttcttcagtggaaaccccgagaagactgatcagttcttcagttctaaaacaatggcccagggtttggtgacgttcgccgacgtagccatagacttttctcaggaggagtgggcctgtctgaactctgctcagagggacctgtactgggacgtgatgctggagaactacagtaacttggtctcactggatttggagtcagcatatgaaaataagagtttacctacagaaaaaaacattcatgaaataagggcttccaaaaggaattcagatagaagaagtaaatcccttggccgtaactggatatgtgaaggtacgcttgaaagaccacagcgctccagagggaggtatgt

SEQ ID NO: 35120 - DNA, 4660 bp, Homo sapiens
  source 1..4660: mol_type = unassigned DNA
gcggcgcggtgcggcacggcacggtgggagtgtctccggctggcttgcagggagaacaccgactgagacctcaaaccctggctccagtgtcatggaatccgtcacctttgaggatgtggccgtggagttcatccaggagtgggcattgctggacagcgcacggaggagcctgtgcaaatacaggatgcttgaccagtgcaggaccctggcctccaggggaactccaccatgcaaacccagttgtgtctcccagctggggcaaagagcagagccaaaggcaacagaacgagggattctccgtgccacaggtgttgcctgggaatctcaacttaaacccgaagagttgccttctatgcaggatcttttggaagaagcatcctccagggacatgcaaatggggccggggctgttcctgaggatgcagctggtgccctccatagaagagagggagacaccattgactcgagaggaccggccagctctccaggagccgccttggtctctgggatgcacgggactgaaggccgctatgcagattcagagggtggtgataccagtgcctactctgggccaccgcaacccatgggtggccagggattctgctgtgcctgcacgtgaccctgcctggcttcaggaggacaaagtggaggaagaagctatggctcctgggctgccaaccgcctgttcacaggaaccagtcacctttgcagatgtggctgtggtgttcaccccagaagaatgggtgtttctggactctactcagaggagcctgtatagagatgtgatgctggagaactacaggaacctggcctctgtggctgatcaactgtgcaaacccaatgcgttgtcttatttggaagaaagaggagagcagtggaccactgacaggggcgtcctctcagacacctgtgcagaacctcagtgtcaaccccaagaggcaattcctagccaagatacttttacagagatcctgtccattgatgtgaaaggggagcaacctcagcctggagaaaaactctataaatataatgaacttgagaaaccttttaacagcattgaaccacttttccagtaccagagaattcatgctggagaggcatcctgtgaatgtcaagagattagaaattccttcttccagagtgcccacctaattgtgcccgagaaaatccgtagtggggataaatcctatgcatgtaacaaatgtgaaaaatccttcagatacagctctgaccttatcaggcatgagaagactcatactgcagagaagtgctttgactgtcaagaatgtgggcaagccttcaaatattcctcgaatctccggcgacacatgagaacccataccggagagaagccatttgaatgtagtcagtgtgggaaaaccttcacgaggaactttaacctgattttgcaccagagaaaccacacaggagagaagccctacgagtgtaaagattgtgggaaagccttcaatcagccatcatccctcaggagccacgtgagaactcacactggagagaagccctttgaatgcagccagtgtgggaaagccttcagggaacactcttcactgaagacacatctgcgaacccataccagagagaaaccatatgaatgcaaccagtgtggcaagcccttccggacgagcactcatctgaacgtgcacaagaggatacacacaggggagaaactgtatgagtgcgcgacttgcggtcaggtcttgagtcgtctttcaaccctgaagagtcacatgcgaactcacactggagagaagccctatgtgtgccaggaatgtgggcgagccttcagtgagccctcatccctcaggaaacatgcaaggactcacagtggcaagaagccctatgcatgccaggaatgcgggcgagcctttggtcagtcttcacatcttattgtacatgtgagaacacacagtgccgggagaccctatcaatgtaatcagtgtgagaaagccttcaggcacagctcctcactcactgtacacaaaagaacccatgtgggaagagagaccattaggaatggcagcctgcctttatccatgtctcatccatactgtgggccccttgctaattaacttccattttgtaaaaatataaacacatggggctatgactttccctcgtaatactcctttagctgcatcctgtgtttcaatgtataatattttcattttggtttaattgtaagtattgtcttaacctccattatcgtttattctttgacccatctattatttggaattagatttttcaaaactaatatgtggatatattttcatagaggtataatgacttatagtgaaatgcatacatctgaagtgtacagttggatgagtttgacagatgcatacatgcatgtaaccaccaccccattccagatatagaatgtttctatctctctggaaggttcctgcatgttatatggctatttcttagttgcctttttgttgttggtttctaatttaattacatggtgagaagagtatgtggcctctttgttactgagtcataggtatttgctgagatttgctattaggtctggtgtggcttattcttctagctgccaacccaaattaccccttcctccttagaaaagaacctgggttttctgttcagattggcagtgtgcactattaaaaagcttccatctcccggctgggcacggtggctcatgcctctaatcccagcactttgggaggctgaggctgggggatcacctgaggtcaggagttcgagatcagcctggccaacatggtgaaatcccctctctactaaaaatataaaaattagccaagtttggtggcatgcacctgtaatcccagctacttgggaggctgaggcaggagaattctttgaacccaggaggcagaggttgcagtgagccgagattgcgccactgcactccagcctgggcaacagagtgaaactctgtctcaaaaataataataataaaaaaaagcttccatctcccagcccttcttgcaagcaagggcaggccatttcctccggtcctggctagtatgaatatgagaagtcactggatgtgactctggggaagatattgtgttcagggatggtttcatgtagccacatctctccacttcttgccttttggacaagtagacatgatttctagacctagaggagccctcctgtgaccataagggtaaaagccgcaagctaagaagagggtggccggaagtcataaccatcttgcttctgtaatctaaaaaatatttaggatagatttaatagaattggcatatttatgtgattgcagcagccctggactatttatttctggatgtcccatacatgaaaaatatgcacttcttactggtacagttttcttttgtttgtttttgtttttggtgggaggtttatttcacctgaatataattcctaactgatgcacttagtatatgtcagtttttataaatgcttcatggatggttgaaatcaatgtattgtattctacaaatgtctgctagatcaagcaaatgtgtttaaaaaccatctacacatttataaatgttgatctgtgatctagcatttattgagagaggtatgttaaactctcccaccatgattatgtattgctgaaaaatctttgtcattctgtcagtttttaaatttatgtatatacatacatatatatgttttgaagcaatgaaattaaatatagatactgacattttttacatttccaacaaattgttacttttattcttataaagtgatcatccttttccctattactgaacattcaaccattcattgtaatgatagtaaatacttatttagagtttactattaatagatagtagccactgcctgaagctttgcatcttttaatttagtcctcacactgacactttgaggtatgtactgttatccccaattcccagatgaggaagctgaggcccagcaagttaaggtgggctatcaaagtcatctgggtggcatgtgacaggcctgactctctctacagtggcagacccaggggactagtctccatttttacttgttctttttttttttttttttttttttttggttttaaagttctcttaggtataacttacataaacgttaataaatcttagggtacaccttggtgaattttgtatatgtctatacccaccacggtctccatcaaaatattttatcgtcccagaaatttcccttgggccccacctcatcctcaaaggttatcactattctgatgtctatcaccatagatttgtttttcctgttcatgtaaatggaaccataaacagccctcttgtgtctgttttcttcacttaatatagtgtcattgagatttatctatgttgtattatcagtagtttatgctttttaattgctgtgtaatagtccatagtctgaatataccacaatttaaaaattctattctgtttacaaacatttgagttctgtcctccaggttcatccatgttatcacaaatgacagaatttccttcctcatcaaggctgaatagtattccattgtgtagatataccacattttctttatccattcatccaccgatggacagttaggttgattccatatcttggctattgtgaataatcctgcaggttttattgttatgaataaagctgctgtgaatgttcttgttaag

SEQ ID NO: 35121 - DNA, 1151 bp, Homo sapiens
  source 1..1151: mol_type = unassigned DNA
acttttgccccgggacctaagccccacccctatccctgtctctcggacataggctccgcccccagcaccaccctccatgctctgtgggaccccactccagagcctaacctcatcccccggggagaacaccgactgagacctcaaaccctggctccagtgtcatggaatccgtcacctttgaggatgtggccgtggagttcatccaggagtgggcattgctggacagcgcacggaggagcctgtgcaaatacaggatgcttgaccagtgcaggaccctggcctccaggggaactccaccatgcaaacccagttgtgtctcccagctggggcaaagagcagagccaaaggcaacagaacgagggattctccgtgccacaggtgttgcctgggaatctcaacttaaacccgaagagttgccttctatgcaggatcttttggaagaagcatcctccagggacatgcaaatggggccggggctgttcctgaggatgcagctggtgccctccatagaagagagggagacaccattgactcgagaggaccggccagctctccaggagccgccttggtctctgggatgcacgctgcctctcctgtccctgctgctgccatcctgcccagagccaccgttagttctcctggactccagttctgctcctgacaggcacctgggctccaccctggacacagaggccagagggatcccttagaagtgcaagtcaggtcagacgtgtttcctgagcgagcagctgccagcagagaagagaccacatcctactccaaggagaggtcttcctcccagaaaaactcactgactgcctgctccgcattcacgcaggtccacctccaaactccatcttccctccacccctcaacctcctggccatccactccccacttttttcccagcttttccctgacttctggagcctccttggagggtgccaccttccccagcccctgcctgggtgccctctctccaggccattttggatcacagtgattagctttgtatttaaggattgggtaaatcctgacaaggtaaatgggtctctctcttcttttattaatatgttccccaaagcaggatcaaatatgcacgttcatttggggtgagcaggtgtgagtggccccctcagcttcttgactct

SEQ ID NO: 35122 - DNA, 2784 bp, Homo sapiens
  source 1..2784: mol_type = unassigned DNA
agagcctaacctcatcccccggggagaacaccgactgagacctcaaaccctggctccagtgtcatggaatccgtcacctttgaggatgtggccgtggagttcatccaggagtgggcattgctggacagcgcacggaggagcctgtgcaaatacaggatgcttgaccagtgcaggaccctggcctccaggggaactccaccatgcaaacccagttgtgtctcccagctggggcaaagagcagagccaaaggcaacagaacgagggattctccgtgccacaggtgttgcctgggaatctcaacttaaacccgaagagttgccttctatgcaggatcttttggaagaagcatcctccagggacatgcaaatggtggaccccatgtgaagaaaggagagagggagggagaatgagcaacgagggcccggtgccctctttgtttctgtgggctctctcctttcagtacagggctccagtgccctccacagaactccacacccagcccagcaagcccctccataatgggtgctgagagtggcaggcatggggctcttgttacatcagagccccaggaaacaggcggtcacagactattctgagtgggcagaggaggtccacctatggacacacgtttagagaagctgaggagttcatccctgaagacatccagcccgtgagtagtagaggggccggggctgttcctgaggatgcagctggtgccctccatagaagagagggagacaccattgactcgagaggaccggccagctctccaggagccgccttggtctctgggatgcacgggactgaaggccgctatgcagattcagagggtggtgataccagtgcctactctgggccaccgcaacccatgggtggccagggattctgctgtgcctgcacgtgaccctgcctggcttcaggaggacaaagtggaggaagaagctatggctcctgggctgccaaccgcctgttcacaggaaccagtcacctttgcagatgtggctgtggtgttcaccccagaagaatgggtgtttctggactctactcagaggagcctgtatagagatgtgatgctggagaactacaggaacctggcctctgtggctgatcaactgtgcaaacccaatgcgttgtcttatttggaagaaagaggagagcagtggaccactgacaggggcgtcctctcagacacctgtgcagaacctcagtgtcaaccccaagaggcaattcctagccaagatacttttacagagatcctgtccattgatgtgaaaggggagcaacctcagcctggagaaaaactctataaatataatgaacttgagaaaccttttaacagcattgaaccacttttccagtaccagagaattcatgctggagaggcatcctgtgaatgtcaagagattagaaattccttcttccagagtgcccacctaattgtgcccgagaaaatccgtagtggggataaatcctatgcatgtaacaaatgtgaaaaatccttcagatacagctctgaccttatcaggcatgagaagactcatactgcagagaagtgctttgactgtcaagaatgtgggcaagccttcaaatattcctcgaatctccggcgacacatgagaacccataccggagagaagccatttgaatgtagtcagtgtgggaaaaccttcacgaggaactttaacctgattttgcaccagagaaaccacacaggagagaagccctacgagtgtaaagattgtgggaaagccttcaatcagccatcatccctcaggagccacgtgagaactcacactggagagaagccctttgaatgcagccagtgtgggaaagccttcagggaacactcttcactgaagacacatctgcgaacccataccagagagaaaccatatgaatgcaaccagtgtggcaagcccttccggacgagcactcatctgaacgtgcacaagaggatacacacaggggagaaactgtatgagtgcgcgacttgcggtcaggtcttgagtcgtctttcaaccctgaagagtcacatgcgaactcacactggagagaagccctatgtgtgccaggaatgtgggcgagccttcagtgagccctcatccctcaggaaacatgcaaggactcacagtggcaagaagccctatgcatgccaggaatgcgggcgagcctttggtcagtcttcacatcttattgtacatgtgagaacacacagtgccgggagaccctatcaatgtaatcagtgtgagaaagccttcaggcacagctcctcactcactgtacacaaaagaacccatgtgggaagagagaccattaggaatggcagcctgcctttatccatgtctcatccatactgtgggccccttgctaattaacttccattttgtaaaaatataaacacatggggctatgactttccctcgtaatactcctttagctgcatcctgtgtttcaatgtataatattttcattttggtttaattgtaagtattgtcttaacctccattatcgtttattctttgacccatctattatttggaattagatttttcaaaactaatatgtggatatattttcatagaggtataatgacttatagtgaaatgcatacatctgaagtgtacagttggatgagtttgacagatgcatacatgcatgtaaccaccaccccattccagatatagaatgtttctatctctctggaaggttcctgcatgttatatggctatttcttagttgcctttttgttgttggtttctaatttaattacatggtgagaagagt

SEQ ID NO: 35123 - DNA, 3594 bp, Homo sapiens
  source 1..3594: mol_type = unassigned DNA
cggccgacggcggctgagctgtgctgcgcggcgcggcgcggtgcggcacggcacggtgggagtgtctccggctggcttgcagggagaacaccgactgagacctcaaaccctggctccagtgtcatggaatccgtcacctttgaggatgtggccgtggagttcatccaggagtgggcattgctggacagcgcacggaggagcctgtgcaaatacaggatgcttgaccagtgcaggaccctggcctccaggggaactccaccatgcaaacccagttgtgtctcccagctggggcaaagagcagagccaaaggcaacagaacgagggattctccgtgccacaggtgttgcctgggaatctcaacttaaacccgaagagttgccttctatgcaggatcttttggaagaagcatcctccagggacatgcaaatggggccggggctgttcctgaggatgcagctggtgccctccatagaagagagggagacaccattgactcgagaggaccggccagctctccaggagccgccttggtctctgggatgcacgggactgaaggccgctatgcagattcagagggtggtgataccagtgcctactctgggccaccgcaacccatgggtggccagggattctgctgtgcctgcacgtgaccctgcctggcttcaggaggacaaagtggaggaagaagctatggctcctgggctgccaaccgcctgttcacaggaaccagtcacctttgcagatgtggctgtggtgttcaccccagaagaatgggtgtttctggactctactcagaggagcctgtatagagatgtgatgctggagaactacaggaacctggcctctgtggctgatcaactgtgcaaacccaatgcgttgtcttatttggaagaaagaggagagcagtggaccactgacaggggcgtcctctcagacacctgtgcagaacctcagtgtcaaccccaagaggcaattcctagccaagatacttttacagagatcctgtccattgatgtgaaagggccacccaactaatttggaagaatttccacatccagtactctcttgcatgttcagatcgctagaatccaacctctggatatcaaaggatcactactggggcttgaagactccaaatctgcagattctgaagcttgcaggtcagtggccttggactttcaaacttccagttccgtgacatccgggctccttaacttccggcttccgggagcttagtcacatacttctggcttccggattgtaggttccccgcaaggagactaaggcctgtgtgggtctttgtttccccagccgtgcaatgactgttagatgcagaaagggggaaaacagccagggaaactgctcacagtggacccccacggtggagagctggagggagagggttcttcaaacgtgtaccctagctcctttgtctgctgtctttggtgggcgtggtcttgtacttaaaatccagctgagaagccaaactctaccttaaagccgtatttcatgtttcaaactggatgatataattctggagaaatgagatgggaaactctgctgcctacttgccccttaactcttgtttatctttgggtttcttactacataccagagcttaatctttattttcttacttaatattcaaacacaacccatgagcaaattaacattatttccatcataaataaagagaatggacttaataaatttaaaaagtgaagatatgggggcaaatggatgctgccatcagctgaccctagagtttcctctgaccttccttccccaacctcgtctgtgtttcacttctgccatgtccttaaaggggctgtgtgtcccccagaccacagagtccattgcactgcacctttccttcctcctcattttccatcttacaaatcatcaatattcctggatgtaggatcatgtctgtcttatatgttttagtttctctcaatttagcattatgccttgcacgagagtataggaatacctcatttcattgcccttcacagatattgcattttttacaaattgaacgtttatggcagccctgtgtcgagcaagtctgtaggtgccattttcccaacagcatgtgctcactttgtgtccctgcttgagcattttttaggaataaactatttttaaattaaagtatgtacattaaaaaaaagacataatgctattgcacacattacagtatagggtaagcatacttttatgcacactgggaaaccaaaaaatgtgtatgacttgctttattgcaatattcacattattgtggtgatctggagtggagcctgcaatatctctgaggtgtgtctgtatgtgctcatcacatatgtgatgaatggatgaataaattagtgtagagtgaagtgcttccatgaacctgaacatcatggtctggaaactatgggcagtgagtcaaatctgacccaccatctgtttctgtacagctaagaatagtttttacatttttcaaatgggtgaaaacaaataaaaagaagaatgatattttgtgtcacatgactgatatatgaagttcaagctcagtgtccataaagttttattaaaacatagccatgatcattcatttatgattgtctatagctgttttcatatcacaatggaagttcaagttcagtgtctgtaaagttttattaaaacatagccatgatcattcatttatgattgtctatagctgttttcataccacagtggtagaattgagttgctgtaaatacctggctcacaaagcctaacatatacactatcaggctctttaagaaaacatttggcgacccctgctctaggtagactctatggggatatgggctctacactcatagggacccacatgttccaagcctccagctgtgtgttctgcttcctcaagcagcagctgactctgatattccccatctcaccttagcagtctatatcaagcaaagggcacgcagaatcccatgcacccatcatgtatgtaataaaaggcagatattatgtggtctcttgaaccagccttaggcatggaggttgaggatcaggagtgacttgagggtactgactggcagagcaggagccccgttattttggacaaacaccgccactttaagtttcagcttcatttttagccttctggatttaaggaaattacttttttaaaaactataagcagccaaaaaaagcagacagtaaaatgcagataaaacagctcgggcacagaggaaggtggaggaaaagtctcttgggtaactgccaaacttcaccctcatacaatgggccccagtaaaacagtgggccttaataagcacattcctttccctccaggtgcactaaaatagggaagctaaaagcagacttggggggtatgcctacagctgcagaaaaatgtataaaagcaaacacaccactctccctcccatataagcacaacaaaaaaaacacagaagcagtccaagcctctaagaaactctcccaccctaaatccttaaacactcttagtctgtagaaaagactctaacctaattcagccagcagcccctctcaggtgtgttttctctaaaataaacctgtcttaaccatcaagcc

SEQ ID NO: 35124 - DNA, 3660 bp, Homo sapiens
  source 1..3660: mol_type = unassigned DNA
cgcagcggaggaaagaggatggcgacctcgtcgatgccggagtcagagaggaacgtggctacgaaagcctcggagtgaagttcccagaccctacgccccgctgtcaggcagcccgccgatcagatggaggagaacgaggtggagagcagcagcgacgcggcccctgggcctggccggcccgaggagccctctgagagcggcctgggtgtgggcacctagccgtgtccgccgacagcagcgacgccgcggccgccccggggcaggcagaggcattgatgacctggaggaggatagcgactataatccagctgaggatgagccccgaggccggcagcttcggctccagcgccccacccccagtaccccaaggccccgaaggagacctggccggccccggaagctgccccgcctggagatctcagacctcccagatggtgtggaaggagagcctctagtgagttcccagagtggacagagccctccagagccacaggatcccgaggctcccagctcctcaggcccaggacacctggtggccatgggcaaggtgagcaggacccctgtggaagctggtgtgagccagtcagatgcagagaacgcagccccctcctgcccggatgagcatgacactctgccccggcgccgaggtcgaccttccaggcgcttcctaggcaagaaataccgcaagtactattacaagtcgcccaaaccacttttgaggcccttcctgtgccgcatctgtggttctcgctttctgtcccacgaggacctgcgcttccacgtcaactcccatgaggctggcgatccccagctcttcaagtgcctgcagtgcagctatcgttcccgccgctggtcctcgctcaaggagcacatgttcaaccacgtgggcagcaagccctacaagtgtgacgagtgcagctacaccagtgtctaccggaaggacgtcattcggcacgccgctgtgcacagccgggaccggaagaagaggccagatccgactccaaagctgagctctttcccctgccctgtgtgtggccgtgtgtaccccatgcagaaaagactcacgcagcacatgaagacgcacagcactgagaagccccacatgtgtgacaagtgtggaaagtcctttaagaagcgctacaccttcaaaatgcacctgctcacgcacatccaggctgttgccaaccgcaggttcaagtgtgagttctgtgagtttgtttgtgaagacaagaaggcactgctgaaccaccagttgtcccacgtcagtgacaagcccttcaaatgcagcttttgtccctaccgcaccttccgagaggacttcttgctgtcccatgtggctgtcaagcacacaggggccaagcccttcgcctgtgagtactgccacttcagcacacggcacaagaagaacctgcgcctgcacgtacggtgccgacacgcaagcagcttcgaggaatgggggaggcgccaccctgaggagcccccctcccgccgtcgccccttcttctctctgcagcagattgaggagctgaagcagcagcacagtgcggcccctggaccacctcccagttccccaggacctcctgagatacccccagaggcgacaactttccagtcatctgaggctccctcattgctctgttctgacaccctgggcggcgccaccatcatctaccagcaaggagctgaggagtcgacagcgatggccacgcagacagccttggatcttctgctgaacatgagtgctcagcgggaactggggggcacagccctgcaggtggctgtggtgaagtcggaagatgtggaagcagggttagcatcccctggtgggcagccctcccctgaaggtgccactccacaggtggtcaccctccacgtggcagagccagggggcggtgcagcagccgagagccagctaggccctcctgacctaccgcagatcaccctggcacctggtccatttggtgggactggctacagtgtcatcacagcaccccctatggaggagggaacatcagctcctggcacaccttacagcgaggagcccgcaggagaggcagcccaggctgtggttgtgagtgacaccctaaaagaagctggcacccactacatcatggctactgatggtacccagttgcaccacattgagctcaccgcagatggctccatctccttcccaagtccagatgctctggcctctggtgccaaatggcccctgctgcagtgtgggggactgcccagagacggccctgagcccccatctccagccaagacccactgcgtaggggactcccagagctctgcctcctcacctcctgcaaccagcaaagccctgggcctggcagtgcccccgtcaccgccatctgcagccactgctgcatcaaagaagttttcctgcaagatctgtgccgaggccttccctggccgagctgagatggagagtcacaagcgggcccacgctgggcctggtgccttcaagtgccccgactgccccttcagtgcccgccagtggcccgaggtccgggcgcacatggcacagcactcaagcctacggccccaccagtgtagccagtgcagctttgcctccaagaacaagaaggacctgcgtcggcacatgctgactcacacaaaggagaagccttttgcatgccacctctgcgggcagcgtttcaaccgtaacgggcacctcaagttccacatccagcggctgcacagtcctgatgggaggaagtcaggaacccctacagcccgggcccctacccagaccccaacccagaccatcatcctgaacagtgatgacgaaacactggccaccctgcacactgcactccagtccagtcacggggtcctgggcccagagcggctacagcaggcactgagccaggaacacatcatcgttgcccaggaacagacagtgaccaatcaggaggaagccgcctacatccaagagatcaccacggcagatggccagaccgtacagcacctggtgacctccgacaaccaggtgcagtatatcatctcccaggatggtgtccagcacctgctcccccaggaatatgttgtggtccctgaaggccatcacatccaggtacaggagggccagatcacacacatccagtatgaacaaggagccccgttccttcaggagtcccagatccagtatgtgcctgtgtccccaggccagcagcttgtcacacaggctcaacttgaggctgcagcacactcagctgtcacagcagtggctgatgctgccatggcccaagcccagggcctgtttggtacagacgagacagtgcccgaacacattcaacagctgcagcaccagggcatcgagtacgacgtcatcaccctggccgatgactgagccccgagggcccaacacagatcatggatttgcggccagctctcctgggggtagggggccaccaggactcacctccctcttcatttaggatctccagatactggatagccagcatcctctcattcccagggagccagacctgtgctgttggggttaggggcagccatgggccccagccaggacatgctgggtgccccagcctgcaggcaggctttgggagagaaatttatttttgtttgggtggacccactggcctgtcagtctcaataaagggaccggagtccagtcctgaacagctt

SEQ ID NO: 35125 - DNA, 4430 bp, Homo sapiens
  source 1..4430: mol_type = unassigned DNA
cgacctcgtcgatgccggagtcagagaggaacgtggctacgaaagcctcggagtgaagttcccagaccctacgccccgctgtcaggcagcccgccgatcagatggaggagaacgaggtggagagcagcagcgacgcggcccctgggcctggccggcccgaggagccctctgagagcggcctgggtgtgggcacctcagaagccgtgtccgccgacagcagcgacgccgcggccgccccggggcaggcagaggccgatgactctggcgtggggcaaagctcggaccgcggcagccgttctcaggaggaggtatctgagagcagctcgagcgcagaccccctgcctaatagctacctccctgattcatcgtctgtgtctcatgggccagtggcaggggtgacaggcggtcccccagcacttgtgcactctagtgcactcccagaccccaacatgctggtgtccgactgcacagcttcctcctcggacctgggctcggccatcgacaagatcatcgagtccaccatcgggcccgacctcatccagaactgcatcactgtgaccagtgctgaggatggcggggccgagaccacacggtacctgatcctacagggcccagatgatggagcccccatgacatcaccaatgtccagttccaccttggcccacagcctagcagccattgaggccctggcagatggccccacatccacatccacatgcctggaggcacagggtgggcccagctccccggtgcagctgcccccagcctccggtgccgaagagccggacctgcagagcctggaggccatgatggaggtggtggtggtgcagcagttcaaatgcaagatgtgccagtaccggagcagcaccaaggccacactgctgcgccacatgcgggaacgccacttccgtccagtagcagcagccgcagcagcagctggtaaaaaaggacgtctacggaagtggagcacctccaccaagagccaagaggaagagggaccagaggaggaggacgatgatgacattgtagacgctggagccattgatgacctggaggaggatagcgactataatccagctgaggatgagccccgaggccggcagcttcggctccagcgccccacccccagtaccccaaggccccgaaggagacctggccggccccggaagctgccccgcctggagatctcagacctcccagatggtgtggaaggagagcctctagtgagttcccagagtggacagagccctccagagccacaggatcccgaggctcccagctcctcaggcccaggacacctggtggccatgggcaaggtgagcaggacccctgtggaagctggtgtgagccagtcagatgcagagaacgcagccccctcctgcccggatgagcatgacactctgccccggcgccgaggtcgaccttccaggcgcttcctaggcaagaaataccgcaagtactattacaagtcgcccaaaccacttttgaggcccttcctgtgccgcatctgtggttctcgctttctgtcccacgaggacctgcgcttccacgtcaactcccatgaggctggcgatccccagctcttcaagtgcctgcagtgcagctatcgttcccgccgctggtcctcgctcaaggagcacatgttcaaccacgtgggcagcaagccctacaagtgtgacgagtgcagctacaccagtgtctaccggaaggacgtcattcggcacgccgctgtgcacagccgggaccggaagaagaggccagatccgactccaaagctgagctctttcccctgccctgtgtgtggccgtgtgtaccccatgcagaaaagactcacgcagcacatgaagacgcacagcactgagaagccccacatgtgtgacaagtgtggaaagtcctttaagaagcgctacaccttcaaaatgcacctgctcacgcacatccaggctgttgccaaccgcaggttcaagtgtgagttctgtgagtttgtttgtgaagacaagaaggcactgctgaaccaccagttgtcccacgtcagtgacaagcccttcaaatgcagcttttgtccctaccgcaccttccgagaggacttcttgctgtcccatgtggctgtcaagcacacaggggccaagcccttcgcctgtgagtactgccacttcagcacacggcacaagaagaacctgcgcctgcacgtacggtgccgacacgcaagcagcttcgaggaatgggggaggcgccaccctgaggagcccccctcccgccgtcgccccttcttctctctgcagcagattgaggagctgaagcagcagcacagtgcggcccctggaccacctcccagttccccaggacctcctgagatacccccagaggcgacaactttccagtcatctgaggctccctcattgctctgttctgacaccctgggcggcgccaccatcatctaccagcaaggagctgaggagtcgacagcgatggccacgcagacagccttggatcttctgctgaacatgagtgctcagcgggaactggggggcacagccctgcaggtggctgtggtgaagtcggaagatgtggaagcagggttagcatcccctggtgggcagccctcccctgaaggtgccactccacaggtggtcaccctccacgtggcagagccagggggcggtgcagcagccgagagccagctaggccctcctgacctaccgcagatcaccctggcacctggtccatttggtgggactggctacagtgtcatcacagcaccccctatggaggagggaacatcagctcctggcacaccttacagcgaggagcccgcaggagaggcagcccaggctgtggttgtgagtgacaccctaaaagaagctggcacccactacatcatggctactgatggtacccagttgcaccacattgagctcaccgcagatggctccatctccttcccaagtccagatgctctggcctctggtgccaaatggcccctgctgcagtgtgggggactgcccagagacggccctgagcccccatctccagccaagacccactgcgtaggggactcccagagctctgcctcctcacctcctgcaaccagcaaagccctgggcctggcagtgcccccgtcaccgccatctgcagccactgctgcatcaaagaagttttcctgcaagatctgtgccgaggccttccctggccgagctgagatggagagtcacaagcgggcccacgctgggcctggtgccttcaagtgccccgactgccccttcagtgcccgccagtggcccgaggtccgggcgcacatggcacagcactcaagcctacggccccaccagtgtagccagtgcagctttgcctccaagaacaagaaggacctgcgtcggcacatgctgactcacacaaaggagaagccttttgcatgccacctctgcgggcagcgtttcaaccgtaacgggcacctcaagttccacatccagcggctgcacagtcctgatgggaggaagtcaggaacccctacagcccgggcccctacccagaccccaacccagaccatcatcctgaacagtgatgacgaaacactggccaccctgcacactgcactccagtccagtcacggggtcctgggcccagagcggctacagcaggcactgagccaggaacacatcatcgttgcccaggaacagacagtgaccaatcaggaggaagccgcctacatccaagagatcaccacggcagatggccagaccgtacagcacctggtgacctccgacaaccaggtgcagtatatcatctcccaggatggtgtccagcacctgctcccccaggaatatgttgtggtccctgaaggccatcacatccaggtacaggagggccagatcacacacatccagtatgaacaaggagccccgttccttcaggagtcccagatccagtatgtgcctgtgtccccaggccagcagcttgtcacacaggctcaacttgaggctgcagcacactcagctgtcacagcagtggctgatgctgccatggcccaagcccagggcctgtttggtacagacgagacagtgcccgaacacattcaacagctgcagcaccagggcatcgagtacgacgtcatcaccctggccgatgactgagccccgagggcccaacacagatcatggatttgcggccagctctcctgggggtagggggccaccaggactcacctccctcttcatttaggatctccagatactggatagccagcatcctctcattcccagggagccagacctgtgctgttggggttaggggcagccatgggccccagccaggacatgctgggtgccccagcctgcaggcaggctttgggagagaaatttatttttgtttgggtggacccactggcctgtcagtctcaataaagggaccggagtccagtcctgaacagctta

SEQ ID NO: 35126 - DNA, 3881 bp, Homo sapiens
  source 1..3881: mol_type = unassigned DNA
cgcagcggaggaaagaggatggcgacctcgtcgatgccggagtcagagaggaacgtggctacgaaagcctcgggagcccccatgacatcaccaatgtccagttccaccttggcccacagcctagcagccattgaggccctggcagatggccccacatccacatccacatgcctggaggcacagggtgggcccagctccccggtgcagctgcccccagcctccggtgccgaagagccggacctgcagagcctggaggccatgatggaggtggtggtggtgcagcagttcaaatgcaagatgtgccagtaccggagcagcaccaaggccacactgctgcgccacatgcgggaacgccacttccgtccagtagcagcagccgcagcagcagctggtaaaaaaggacgtctacggaagtggagcacctccaccaagagccaagaggaagagggaccagaggaggaggacgatgatgacattgtagacgctggagccattgatgacctggaggaggatagcgactataatccagctgaggatgagccccgaggccggcagcttcggctccagcgccccacccccagtaccccaaggccccgaaggagacctggccggccccggaagctgccccgcctggagatctcagacctcccagatggtgtggaaggagagcctctagtgagttcccagagtggacagagccctccagagccacaggatcccgaggctcccagctcctcaggcccaggacacctggtggccatgggcaaggtgagcaggacccctgtggaagctggtgtgagccagtcagatgcagagaacgcagccccctcctgcccggatgagcatgacactctgccccggcgccgaggtcgaccttccaggcgcttcctaggcaagaaataccgcaagtactattacaagtcgcccaaaccacttttgaggcccttcctgtgccgcatctgtggttctcgctttctgtcccacgaggacctgcgcttccacgtcaactcccatgaggctggcgatccccagctcttcaagtgcctgcagtgcagctatcgttcccgccgctggtcctcgctcaaggagcacatgttcaaccacgtgggcagcaagccctacaagtgtgacgagtgcagctacaccagtgtctaccggaaggacgtcattcggcacgccgctgtgcacagccgggaccggaagaagaggccagatccgactccaaagctgagctctttcccctgccctgtgtgtggccgtgtgtaccccatgcagaaaagactcacgcagcacatgaagacgcacagcactgagaagccccacatgtgtgacaagtgtggaaagtcctttaagaagcgctacaccttcaaaatgcacctgctcacgcacatccaggctgttgccaaccgcaggttcaagtgtgagttctgtgagtttgtttgtgaagacaagaaggcactgctgaaccaccagttgtcccacgtcagtgacaagcccttcaaatgcagcttttgtccctaccgcaccttccgagaggacttcttgctgtcccatgtggctgtcaagcacacaggggccaagcccttcgcctgtgagtactgccacttcagcacacggcacaagaagaacctgcgcctgcacgtacggtgccgacacgcaagcagcttcgaggaatgggggaggcgccaccctgaggagcccccctcccgccgtcgccccttcttctctctgcagcagattgaggagctgaagcagcagcacagtgcggcccctggaccacctcccagttccccaggacctcctgagatacccccagaggcgacaactttccagtcatctgaggctccctcattgctctgttctgacaccctgggcggcgccaccatcatctaccagcaaggagctgaggagtcgacagcgatggccacgcagacagccttggatcttctgctgaacatgagtgctcagcgggaactggggggcacagccctgcaggtggctgtggtgaagtcggaagatgtggaagcagggttagcatcccctggtgggcagccctcccctgaaggtgccactccacaggtggtcaccctccacgtggcagagccagggggcggtgcagcagccgagagccagctaggccctcctgacctaccgcagatcaccctggcacctggtccatttggtgggactggctacagtgtcatcacagcaccccctatggaggagggaacatcagctcctggcacaccttacagcgaggagcccgcaggagaggcagcccaggctgtggttgtgagtgacaccctaaaagaagctggcacccactacatcatggctactgatggtacccagttgcaccacattgagctcaccgcagatggctccatctccttcccaagtccagatgctctggcctctggtgccaaatggcccctgctgcagtgtgggggactgcccagagacggccctgagcccccatctccagccaagacccactgcgtaggggactcccagagctctgcctcctcacctcctgcaaccagcaaagccctgggcctggcagtgcccccgtcaccgccatctgcagccactgctgcatcaaagaagttttcctgcaagatctgtgccgaggccttccctggccgagctgagatggagagtcacaagcgggcccacgctgggcctggtgccttcaagtgccccgactgccccttcagtgcccgccagtggcccgaggtccgggcgcacatggcacagcactcaagcctacggccccaccagtgtagccagtgcagctttgcctccaagaacaagaaggacctgcgtcggcacatgctgactcacacaaaggagaagccttttgcatgccacctctgcgggcagcgtttcaaccgtaacgggcacctcaagttccacatccagcggctgcacagtcctgatgggaggaagtcaggaacccctacagcccgggcccctacccagaccccaacccagaccatcatcctgaacagtgatgacgaaacactggccaccctgcacactgcactccagtccagtcacggggtcctgggcccagagcggctacagcaggcactgagccaggaacacatcatcgttgcccaggaacagacagtgaccaatcaggaggaagccgcctacatccaagagatcaccacggcagatggccagaccgtacagcacctggtgacctccgacaaccaggtgcagtatatcatctcccaggatggtgtccagcacctgctcccccaggaatatgttgtggtccctgaaggccatcacatccaggtacaggagggccagatcacacacatccagtatgaacaaggagccccgttccttcaggagtcccagatccagtatgtgcctgtgtccccaggccagcagcttgtcacacaggctcaacttgaggctgcagcacactcagctgtcacagcagtggctgatgctgccatggcccaagcccagggcctgtttggtacagacgagacagtgcccgaacacattcaacagctgcagcaccagggcatcgagtacgacgtcatcaccctggccgatgactgagccccgagggcccaacacagatcatggatttgcggccagctctcctgggggtagggggccaccaggactcacctccctcttcatttaggatctccagatactggatagccagcatcctctcattcccagggagccagacctgtgctgttggggttaggggcagccatgggccccagccaggacatgctgggtgccccagcctgcaggcaggctttgggagagaaatttatttttgtttgggtggacccactggcctgtcagtctcaataaagggaccggagtccagtcctgaacagctt

SEQ ID NO: 35127 - DNA, 1336 bp, Homo sapiens
  source 1..1336: mol_type = unassigned DNA
gaggagtggcagcacctggaccctagtcagagggctctgtatagagatgtgatgctggagaactacagcaaccttgtctcagtggggtattgtgttcacaaaccagaggtgatcttcaggctgcaacaaggagaagagccatggaaacaggaggaagaattcccaagccaaagctttccagagatggggtttcaccatgttcctgctggtcttaaactcctgagttcaagtgatccacctgccttggcctcccaaagtggtaggattacaggcatgagccacagcatcccacctgtaatggggagttttaaatttacaacttcaatctttacttgtgtaggtcttttcagatttttctttttctacttgagttggttttagttgtttttgttttatggattttcccattttgttgaagttaaataatttgttggcatacattgttcataccattctttgtaattatttttatttctgtaagagtactagtaatacatctttaatccctacttttagtaatttgaaccttctctctcttttttttctttttcaatgtcagtctagctagaggtttgtatattttgttgatcttttccaggaatcagctattgtttttctgttctctagttcattaatttttactctataatctttctgctttcctgccttctgcttgatttggttttgtattgctgctcctgtccaagtgttttaaggtggaaaattagtttactgatttgagatctttttaaatatggttattacagctacaaatctctaaggattgctttatctgtgttccataagtttgagtatgtcttcatttttatctcaaagcattttttctaattttccttcttattgcttctttaacttttttttttaacttcggaatatgttatataatttgtgcatgtttgtgcattctaaaaattcctttgtcttactgatttgtaatttcgactgtggtcagagaatcattttaaatttattctggggaatgtttcatgtgtacttttgaagcatacctgctccactgttcgagtggaatgttctgtctatatctcttagatctggttgctttagagtgtcatctatatcttctgtttccatgtttatattgtgcccagttgtcctaaccattattgaaaatggggtattacagtttgcaataagtattgtagacttgtatatttttttcttttaattctgtcagtttttgctacacatactttgaggctctgttagtagtacataggcttagaattgttatgtctcctttattgattgacccttttattgttatattaataaaattcccctctttatccttagt

SEQ ID NO: 35128 - DNA, 2003 bp, Homo sapiens
  source 1..2003: mol_type = unassigned DNA
tccttttgtttttctcaggttttgcgtgggaggcggtcccgggatttcaagggtctacgcgcttttctatggcgaatgcaacccgacgagggagtgggctgtatcttcagagttgtctccgtctttccaagaacagaacaaaatgaacaaggtagaacagaagtcccaggagtcagtatcatttaaagatgtgactgtgggcttcacccaggaggagtggcagcacctggaccctagtcagagggctctgtatagagatgtgatgctggagaactacagcaaccttgtctcagtggggtattgtgttcacaaaccagaggtgatcttcaggctgcaacaaggagaagagccatggaaacaggaggaagaattcccaagccaaagctttccagaagtctggacagctgatcacctgaaagagaggagccaagaaaaccaatctaaacatttgtgggaagttgtattcatcaataatgaaatgctgactaaggaacaaggtgatgtaataggaataccatttaatgtggatgcccctgagatgctcatgcccttggattaaacccctgcagtgctggaagaagaggactctgcactgcctgccacaccaggactggaagatccatggccttcccttcttccaaactaccttcccacaagatggggatggtggtcacatctccaacactagcatgctgtggaagagacatcagcattcttgcaacaaatctggaaacagcctaaagagacatttctacttcaaagagttgcactgaggaagtgcactggcactgctggggactcacctggggcccagggctgaggcttctcgtgtccttggagctgctgtcctcccgaggagtgtccacactgcagccagctcagcctcaggtgtcttctctggttttgaaaccaaatctaagtgggaaaagaagattcaagttttatccgatttagtctacataattttaagtatctatttgagctcaataccaagaatcacttccttctctctcccatctgtgatctccagaggaaaggtccccgggctaggagacactggctggcatcctaaagccagagctggccaaagggtgtgtgtccactcttccttcacctcttccccaccccacacttgtttttgtctcacgctcacttgctctttctgcctccctctcactctttaggtctcacaaaggctttggccaaagactgactgactttccttggctctctgtcatctccccatagtcaaaagcatttcataacacacaatccatgtgaagggacctctgatgaaaatccatttaaagaggagctcactaattatcaatacttactgctgagcctggaatcattcatatatacctcagagttcattcattccagatgcaatactagataaggagactcctatgaaccaaatatctaactctgaatagatagtgactgtcataatcaaaccctgtggctgcctcctccttactggagggtgtagaggaatgcagttttttgtttgtttatttgtttgttctgagattgcatcactgcactccagcctgggtgatagagtgagactctgtctcaaaacaaaacagtagaaaagaaacaaaaaccatgtgatgagaaacgggactttatggcagcactgacctcactgtcctcaatatgacctattaaagaacaagcattctgagcattctgtaatattggttccaggtatcaattacaacctatcatgatcatggtgaccctattacctatattctctagagcatgcaaatatgatttaattttctcctaccaggaaaaaggcccaatttcacttccttcccccatcaatgaatacaccagaccacatgttccatgattggtaaaaggcagagataggggtcttactttcagttcattcttaacatggtgtaattggagactgcttagcccagcttgtcttttttctttgaccccaaggaaatgaaacaaaaatacaagcccacctgtatcct

SEQ ID NO: 35129 - DNA, 2433 bp, Homo sapiens
  source 1..2433: mol_type = unassigned DNA
atgaacaaggtagaacagaagtcccaggagtcagtatcatttaaagatgtgactgtgggcttcacccaggaggagtggcagcacctggaccctagtcagagggctctgtatagagatgtgatgctggagaactacagcaaccttgtctcagtggggtattgtgttcacaaaccagaggtgatcttcaggctgcaacaaggagaagagccatggaaacaggaggaagaattcccaagccaaagctttccagtctggacagctgatcacctgaaagagaggagccaagaaaaccaatctaaacatttgtgggaagttgtattcatcaataatgaaatgctgactaaggaacaaggtgatgtaataggaataccatttaatgtggatgtaagttcttttccttccagaaaaatgttctgtcagtgtgattcatgtggaatgagtttcaacactgtttcagaattggttatcagtaagataaactatttaggaaaaaagtctgatgaatttaatgcctgtgggaaattgttactcaatattaagcatgatgaaactcatactcaagagaaaaatgaagttttgaaaaataggaacacactgagtcatcatgaggagactttgcagcatgagaagattcaaactttagagcacaattttgaatacagtatatgtcaggaaaccctccttgaaaaggcagtattcaatacacagaagagagagaacgcagaagagaataactgtgattataatgaatttgggagaactttgtgtgatagttcatccctcttgttccatcagatatctccgtcaagggacaatcactatgaatttagtgattgtgagaagttcttatgtgtgaagtccaccctttctaaacctcatggggtatctatgaaacactatgattgtggtgaaagtgggaataatttcaggaggaaattgtgtctgtcacaccttcagaaaggtgataaaggagagaaacactttgaatgtaatgaatgtgggaaagctttctgggagaagtcacatctcactcgacatcagagggtgcacacaggacagaaaccctttcaatgtaatgaatgtgaaaaagctttctgggataagtcaaacctcactaaacatcaaagatcacacacaggggagaaaccttttgaatgcaatgaatgtgggaaagcctttagccataagtcagccctcacattacaccagagaacacatacaggggagaaaccctatcaatgtaatgcgtgtgggaaaactttttgccagaaatctgacctcactaaacatcagagaacacacacagggctgaaaccctatgaatgttatgaatgtggaaaatccttccgtgtgacttcgcaccttaaagtacaccagagaactcacacaggtgagaaaccttttgaatgtcttgagtgtgggaaatcctttagtgaaaagtcaaatcttacacagcatcagagaattcacataggagataaatcttatgaatgtaatgcatgtgggaaaactttctaccacaagtcattactcaccaggcatcagataattcatacagggtggaaaccttatgaatgttatgaatgtgggaaaaccttctgcttgaagtcagacctcacagtacatcagagaacacacacagggcagaaaccctttgcatgtcccgaatgtgggaaattctttagccataagtcaaccctctctcaacattatagaacacacacaggggagaaaccctacgaatgtcatgaatgtggaaaaatcttttacaataaatcatacctaactaaacataatagaacacatacaggggagaaaccctatgaatgtaatgaatgtggaaaagccttctaccagaagtcacaactcactcagcatcagagaattcacataggggagaaaccctataaatgtaatgagtgtggaaaagctttctgccataagtcagctctaattgtacatcagagaacccatacacaagaaaagccctataaatgtaatgaatgtggaaaatctttctgtgtaaaatcaggacttattttccatgagagaaagcacacgggggagaaaccctatgaatgcaatgaatgtgggaaattcttcaggcacaaatcatcactcacagtacatcacagggctcacacaggagagaaatcttgtcaatgtaatgaatgtggaaaaatcttttaccgtaaatcggaacttgctcaacatcagagatcacatacaggggaaaagccctatgaatgtaacacatgcaggaaaactttctctcaaaagtcaaatctcattgtacatcagagaagacatataggagaaaaccttatgaatgaaatggatattagaaatttccagccacaagtcagcctccataatgcctcagagtattcacactgtggagaaagccctgatgacatcctgaatgttcagtaa

SEQ ID NO: 35130 - DNA, 6117 bp, Homo sapiens
  source 1..6117: mol_type = unassigned DNA
tgcctcgtccgccggctacgtctgcgtttccgcctttccttttgtttttctcaggttttgcgtgggaggcggtcccgggatttcaagggtctacgcgcttttctatggcgaatgcaacccgacgagggagtgggctgtatcttcagagttgtctccgtctttccaagaacagaacaaaatgaacaaggtagaacagaagtcccaggagtcagtatcatttaaagatgtgactgtgggcttcacccaggaggagtggcagcacctggaccctagtcagagggctctgtatagagatgtgatgctggagaactacagcaaccttgtctcagtggggtattgtgttcacaaaccagaggtgatcttcaggctgcaacaaggagaagagccatggaaacaggaggaagaattcccaagccaaagctttccagaagtctggacagctgatcacctgaaagagaggagccaagaaaaccaatctaaacatttgtgggaagttgtattcatcaataatgaaatgctgactaaggaacaaggtgatgtaataggaataccatttaatgtggatgtaagttcttttccttccagaaaaatgttctgtcagtgtgattcatgtggaatgagtttcaacactgtttcagaattggttatcagtaagataaactatttaggaaaaaagtctgatgaatttaatgcctgtgggaaattgttactcaatattaagcatgatgaaactcatactcaagagaaaaatgaagttttgaaaaataggaacacactgagtcatcatgaggagactttgcagcatgagaagattcaaactttagagcacaattttgaatacagtatatgtcaggaaaccctccttgaaaaggcagtattcaatacacagaagagagagaacgcagaagagaataactgtgattataatgaatttgggagaactttgtgtgatagttcatccctcttgttccatcagatatctccgtcaagggacaatcactatgaatttagtgattgtgagaagttcttatgtgtgaagtccaccctttctaaacctcatggggtatctatgaaacactatgattgtggtgaaagtgggaataatttcaggaggaaattgtgtctgtcacaccttcagaaaggtgataaaggagagaaacactttgaatgtaatgaatgtgggaaagctttctgggagaagtcacatctcactcgacatcagagggtgcacacaggacagaaaccctttcaatgtaatgaatgtgaaaaagctttctgggataagtcaaacctcactaaacatcaaagatcacacacaggggagaaaccttttgaatgcaatgaatgtgggaaagcctttagccataagtcagccctcacattacaccagagaacacatacaggggagaaaccctatcaatgtaatgcgtgtgggaaaactttttgccagaaatctgacctcactaaacatcagagaacacacacagggctgaaaccctatgaatgttatgaatgtggaaaatccttccgtgtgacttcgcaccttaaagtacaccagagaactcacacaggtgagaaaccttttgaatgtcttgagtgtgggaaatcctttagtgaaaagtcaaatcttacacagcatcagagaattcacataggagataaatcttatgaatgtaatgcatgtgggaaaactttctaccacaagtcattactcaccaggcatcagataattcatacagggtggaaaccttatgaatgttatgaatgtgggaaaaccttctgcttgaagtcagacctcacagtacatcagagaacacacacagggcagaaaccctttgcatgtcccgaatgtgggaaattctttagccataagtcaaccctctctcaacattatagaacacacacaggggagaaaccctacgaatgtcatgaatgtggaaaaatcttttacaataaatcatacctaactaaacataatagaacacatacaggggagaaaccctatgaatgtaatgaatgtggaaaagccttctaccagaagtcacaactcactcagcatcagagaattcacataggggagaaaccctataaatgtaatgagtgtggaaaagctttctgccataagtcagctctaattgtacatcagagaacccatacacaagaaaagccctataaatgtaatgaatgtggaaaatctttctgtgtaaaatcaggacttattttccatgagagaaagcacacgggggagaaaccctatgaatgcaatgaatgtgggaaattcttcaggcacaaatcatcactcacagtacatcacagggctcacacaggagagaaatcttgtcaatgtaatgaatgtggaaaaatcttttaccgtaaatcggaacttgctcaacatcagagatcacatacaggggaaaagccctatgaatgtaacacatgcaggaaaactttctctcaaaagtcaaatctcattgtacatcagagaagacatataggagaaaaccttatgaatgaaatggatattagaaatttccagccacaagtcagcctccataatgcctcagagtattcacactgtggagaaagccctgatgacatcctgaatgttcagtaactatccacaaactcaccttatgttactccaaagtaatagtaggggataaacccatagactacaacaattataggacagcttttgttaggaagtgatattctatgtaatatcagatggttaatacgggcataacaccttacagattttttttgaatttgtgaaagtttttggcaaaaatgcaaataaggttatgttagaatttacactgaggagaaaattgtcaatttaagaaatctaaagtgaaaattttgcttagaaataaaatacgacaagttatgttttgagtttgatgccataatagtttttagggcacctaacaataatttatagatgtatattgtggaatgtaaagctttaagaacttaaacaaaggtaataattaaaataacctcacaagaagtttaatgagtagagagaattcccatgtacacttcaccaaacttcctctaaggataatgtataatcatagtatatggtcaagtccaagaaatcgatgttaccttgctggtagatagagacttagtcagattttactatggtttgcatgcactctgtgtgtgtgtgtacgtgtatgtgtgtgtgtgtggttatatcaaacttttacgacttttacatttgagtaaccatcaacacgattagtttacagaactgaaaaggaatctgagatctgtactgtatcaggattacaaaggatttagcctcaagtagttccctttttgtattaataaccacacgctttctgcaaccctatcccttgcatccacttgactatgaagtttttttaaagcacagataaattgaataatcagggcaatagcattaagcacatctgcgaattatccctgaagttcaaaagacttatatatgtataagtggtatgtgatataaatcgtgtgtttcatatgcataatggaatttaacgtaattgtgaataggaagtaggtatcctagtttagtagtggttacattatcaggcccatcccagatgtttgtgatgtcctgaaacaatttaaaaggagacccacagagctaatgtttatccatttaaaaggtataaatcaaaataacaaattatctaaaaaaaatctatcctgtacatgtgaagatctaggctcgcctccatgttactccctttctcttcctacctgtggctcatgccatgccatgaagtgcctagggtacatatgtgaacattccagccttcagcataagtggtagtccaaattttctttaagcagctgctctccaagacagggccctggaaaggcccacacatacagcccagggctgcccagggctgttggactgtcatttcaaggctcattgtccccagacagggatctgggccctcagacttttgagaatatgaagaggagggttgaggctggagcagaaccagaatcaagctggtgtggggcttttattgatagtgtgaagattgtacactatattacatgatcagatcatacaaataatctaagattatacagtctagtgatcctagattacacaagtaatctaagcttccactttaggaaactagaaaaagaagagcaaattaaatccaaagtaacctgaaaaaacattagagtaaaaatcattgaaattgaaaagagaaaatcgataaaacccaaaactggttccttgaaaaggtcagtaaaattgataaacctctagctagcttaagaacaaacagaagacaaatattgctaataccaaaaatgaaagaggccatcacagctaatcctatggtcaccaaaaggattagaaagaaacatggacaactctgtccataaatttgataacttagctaaaatggaccaattccttgcaagacgcattctctcaaagctcacacaagatagacctcaataggcatatgtatctattaaataaaccaaagcagtaattaataaccttccaaggccaggtacagtggttcatgcctgtaatcccagcacttcactttgggaggctgaggcgggtggatcacaaggtcaggagttcgagaccagcctggtcaacatggtgaaaccccctatctactaaaaatacaaaaaattagctgggcatggtggcatgcgtgtgtagtcgaagctactcaggaggctgaggcagaagaatcacttgaacctgggaggtggatgttgcagtgagctgagattgtgccactgtactgcagcctgggtgacagaatgagactgcatctcaaaaaataataatgaaactttccaaaacaaagtgccaggaccagctgggttcactgatgtgtttttgagatacttaaggtagaaatgataccaagtctctaccatctctttcagaaaataaaagcagagataacacttcccaactcattttgtgaggccagtattaccctaatagcaaaaccaggcaaagatattacaagaaaggaaaactacagatcaatatttccattgaacacagatgcagaaatcctcaaaatattagcaaatcaggaatgcaaggcttgttcaacatttgatattcagtgtaatccattgcatgcattagcagctcaaagatgaaatacgatcatatcaataggtacagaaaaagcatttgacaaaatccaatatccattcatgttaaaacctctcaacacagaaggaatacaggagaacttactcaagttggtaaagaacatactacaaaaaaccctacagctaacattatccttgatgtttccaactagacactttcctactaagatcaggaacatggcaaggaacaccacaccactgcttttcagcattgtactggaagtgctatataatgcagtgttaaaaaaaaaagaaataaaatgcacatagatttgaaaggatgaaatacaactttgttcacaagtaacatgattgtctttgtagagaattctaaataacaaaaaccctgctgacattaataagcaattacagcaggattgcaggatacagtcctcaggtagatgataaaaaggaattggacatcaagtcattaaaagacacggagaaaccctaaatgcttattgttaagtgaaaaccaatctgaaaaggctttctattttgtatgattgcaattatatgacattttgggagaggcaaaactattgagccagtgaaaggaccagtggttgctgagagttgaggggaaaggagggatggcaggtagagaggtgatttttaaggcagtgaaagtactctctagggtactgtaatttgtcaaaacgcagagaatggaaaacagtgaacggaaaacacagagtaaaccctaatgtcaactctggacttcagttaataataatgtatcactgttggctcattaattgtaacaaatgaaccataatgatgcaagatgttaatgattggggagcctgtggaagatgggaggggaaagggttatatgagaattctctatactttttgctcaactttctgtaaccctaaagctactctaaaaaatgaagtgtatcaagtaaataaataaccaaccaaccaaccctgagg

SEQ ID NO: 35131 - DNA, 2854 bp, Homo sapiens
  source 1..2854: mol_type = unassigned DNA
cgtccgccggctacgtctgcgtttccgcctttccttttgtttttctcaggttttgcgtgggaggcggtcccgggatttcaagggtctacgcgcttttctatggcgaatgcaacccgacgagggagtggggtagaacagaagtcccaggagtcagtatcatttaaagatgtgactgtgggcttcacccaggaggagtggcagcacctggaccctagtcagagggctctgtatagagatgtgatgctggagaactacagcaaccttgtctcagtggggtattgtgttcacaaaccagaggtgatcttcaggctgcaacaaggagaagagccatggaaacaggaggaagaattcccaagccaaagctttccagtctggacagctgatcacctgaaagagaggagccaagaaaaccaatctaaacatttgtgggaagttgtattcatcaataatgaaatgctgactaaggaacaaggtgatgtaataggaataccatttaatgtggatgtaagttcttttccttccagaaaaatgttctgtcagtgtgattcatgtggaatgagtttcaacactgtttcagaattggttatcagtaagataaactatttaggaaaaaagtctgatgaatttaatgcctgtgggaaattgttactcaatattaagcatgatgaaactcatactcaagagaaaaatgaagttttgaaaaataggaacacactgagtcatcatgaggagactttgcagcatgagaagattcaaactttagagcacaattttgaatacagtatatgtcaggaaaccctccttgaaaaggcagtattcaatacacagaagagagagaacgcagaagagaataactgtgattataatgaatttgggagaactttgtgtgatagttcatccctcttgttccatcagatatctccgtcaagggacaatcactatgaatttagtgattgtgagaagttcttatgtgtgaagtccaccctttctaaacctcatggggtatctatgaaacactatgattgtggtgaaagtgggaataatttcaggaggaaattgtgtctgtcacaccttcagaaaggtgataaaggagagaaacactttgaatgtaatgaatgtgggaaagctttctgggagaagtcacatctcactcgacatcagagggtgcacacaggacagaaaccctttcaatgtaatgaatgtgaaaaagctttctgggataagtcaaacctcactaaacatcaaagatcacacacaggggagaaaccttttgaatgcaatgaatgtgggaaagcctttagccataagtcagccctcacattacaccagagaacacatacaggggagaaaccctatcaatgtaatgcgtgtgggaaaactttttgccagaaatctgacctcactaaacatcagagaacacacacagggctgaaaccctatgaatgttatgaatgtggaaaatccttccgtgtgacttcgcaccttaaagtacaccagagaactcacacaggtgagaaaccttttgaatgtcttgagtgtgggaaatcctttagtgaaaagtcaaatcttacacagcatcagagaattcacataggagataaatcttatgaatgtaatgcatgtgggaaaactttctaccacaagtcattactcaccaggcatcagataattcatacagggtggaaaccttatgaatgttatgaatgtgggaaaaccttctgcttgaagtcagacctcacagtacatcagagaacacacacagggcagaaaccctttgcatgtcccgaatgtgggaaattctttagccataagtcaaccctctctcaacattatagaacacacacaggggagaaaccctacgaatgtcatgaatgtggaaaaatcttttacaataaatcatacctaactaaacataatagaacacatacaggggagaaaccctatgaatgtaatgaatgtggaaaagccttctaccagaagtcacaactcactcagcatcagagaattcacataggggagaaaccctataaatgtaatgagtgtggaaaagctttctgccataagtcagctctaattgtacatcagagaacccatacacaagaaaagccctataaatgtaatgaatgtggaaaatctttctgtgtaaaatcaggacttattttccatgagagaaagcacacgggggagaaaccctatgaatgcaatgaatgtgggaaattcttcaggcacaaatcatcactcacagtacatcacagggctcacacaggagagaaatcttgtcaatgtaatgaatgtggaaaaatcttttaccgtaaatcggaacttgctcaacatcagagatcacatacaggggaaaagccctatgaatgtaacacatgcaggaaaactttctctcaaaagtcaaatctcattgtacatcagagaagacatataggagaaaaccttatgaatgaaatggatattagaaatttccagccacaagtcagcctccataatgcctcagagtattcacactgtggagaaagccctgatgacatcctgaatgttcagtaactatccacaaactcaccttatgttactccaaagtaatagtaggggataaacccatagactacaacaattataggacagcttttgttaggaagtgatattctatgtaatatcagatggttaatacgggcataacaccttacagattttttttgaatttgtgaaagtttttggcaaaaatgcaaataaggttatgttagaatttacactgaggagaaaattgtcaatttaagaaatctaaagtgaaaattttgcttagaaataaaatacgacaagttatgttttgagtttgatgccataatag

SEQ ID NO: 35132 - DNA, 6084 bp, Homo sapiens
  source 1..6084: mol_type = unassigned DNA
tctgcgtttccgcctttccttttgtttttctcaggttttgcgtgggaggcggtcccgggatttcaagggtctacgcgcttttctatggcgaatgcaacccgacgagggagtgggctgtatcttcagagttgtctccgtctttccaagaacagaacaaaatgaacaaggtagaacagaagtcccaggagtcagtatcatttaaagatgtgactgtgggcttcacccaggaggagtggcagcacctggaccctagtcagagggctctgtatagagatgtgatgctggagaactacagcaaccttgtctcagtggggtattgtgttcacaaaccagaggtgatcttcaggctgcaacaaggagaagagccatggaaacaggaggaagaattcccaagccaaagctttccagtctggacagctgatcacctgaaagagaggagccaagaaaaccaatctaaacatttgtgggaagttgtattcatcaataatgaaatgctgactaaggaacaaggtgatgtaataggaataccatttaatgtggatgtaagttcttttccttccagaaaaatgttctgtcagtgtgattcatgtggaatgagtttcaacactgtttcagaattggttatcagtaagataaactatttaggaaaaaagtctgatgaatttaatgcctgtgggaaattgttactcaatattaagcatgatgaaactcatactcaagagaaaaatgaagttttgaaaaataggaacacactgagtcatcatgaggagactttgcagcatgagaagattcaaactttagagcacaattttgaatacagtatatgtcaggaaaccctccttgaaaaggcagtattcaatacacagaagagagagaacgcagaagagaataactgtgattataatgaatttgggagaactttgtgtgatagttcatccctcttgttccatcagatatctccgtcaagggacaatcactatgaatttagtgattgtgagaagttcttatgtgtgaagtccaccctttctaaacctcatggggtatctatgaaacactatgattgtggtgaaagtgggaataatttcaggaggaaattgtgtctgtcacaccttcagaaaggtgataaaggagagaaacactttgaatgtaatgaatgtgggaaagctttctgggagaagtcacatctcactcgacatcagagggtgcacacaggacagaaaccctttcaatgtaatgaatgtgaaaaagctttctgggataagtcaaacctcactaaacatcaaagatcacacacaggggagaaaccttttgaatgcaatgaatgtgggaaagcctttagccataagtcagccctcacattacaccagagaacacatacaggggagaaaccctatcaatgtaatgcgtgtgggaaaactttttgccagaaatctgacctcactaaacatcagagaacacacacagggctgaaaccctatgaatgttatgaatgtggaaaatccttccgtgtgacttcgcaccttaaagtacaccagagaactcacacaggtgagaaaccttttgaatgtcttgagtgtgggaaatcctttagtgaaaagtcaaatcttacacagcatcagagaattcacataggagataaatcttatgaatgtaatgcatgtgggaaaactttctaccacaagtcattactcaccaggcatcagataattcatacagggtggaaaccttatgaatgttatgaatgtgggaaaaccttctgcttgaagtcagacctcacagtacatcagagaacacacacagggcagaaaccctttgcatgtcccgaatgtgggaaattctttagccataagtcaaccctctctcaacattatagaacacacacaggggagaaaccctacgaatgtcatgaatgtggaaaaatcttttacaataaatcatacctaactaaacataatagaacacatacaggggagaaaccctatgaatgtaatgaatgtggaaaagccttctaccagaagtcacaactcactcagcatcagagaattcacataggggagaaaccctataaatgtaatgagtgtggaaaagctttctgccataagtcagctctaattgtacatcagagaacccatacacaagaaaagccctataaatgtaatgaatgtggaaaatctttctgtgtaaaatcaggacttattttccatgagagaaagcacacgggggagaaaccctatgaatgcaatgaatgtgggaaattcttcaggcacaaatcatcactcacagtacatcacagggctcacacaggagagaaatcttgtcaatgtaatgaatgtggaaaaatcttttaccgtaaatcggaacttgctcaacatcagagatcacatacaggggaaaagccctatgaatgtaacacatgcaggaaaactttctctcaaaagtcaaatctcattgtacatcagagaagacatataggagaaaaccttatgaatgaaatggatattagaaatttccagccacaagtcagcctccataatgcctcagagtattcacactgtggagaaagccctgatgacatcctgaatgttcagtaactatccacaaactcaccttatgttactccaaagtaatagtaggggataaacccatagactacaacaattataggacagcttttgttaggaagtgatattctatgtaatatcagatggttaatacgggcataacaccttacagattttttttgaatttgtgaaagtttttggcaaaaatgcaaataaggttatgttagaatttacactgaggagaaaattgtcaatttaagaaatctaaagtgaaaattttgcttagaaataaaatacgacaagttatgttttgagtttgatgccataatagtttttagggcacctaacaataatttatagatgtatattgtggaatgtaaagctttaagaacttaaacaaaggtaataattaaaataacctcacaagaagtttaatgagtagagagaattcccatgtacacttcaccaaacttcctctaaggataatgtataatcatagtatatggtcaagtccaagaaatcgatgttaccttgctggtagatagagacttagtcagattttactatggtttgcatgcactctgtgtgtgtgtgtacgtgtatgtgtgtgtgtgtggttatatcaaacttttacgacttttacatttgagtaaccatcaacacgattagtttacagaactgaaaaggaatctgagatctgtactgtatcaggattacaaaggatttagcctcaagtagttccctttttgtattaataaccacacgctttctgcaaccctatcccttgcatccacttgactatgaagtttttttaaagcacagataaattgaataatcagggcaatagcattaagcacatctgcgaattatccctgaagttcaaaagacttatatatgtataagtggtatgtgatataaatcgtgtgtttcatatgcataatggaatttaacgtaattgtgaataggaagtaggtatcctagtttagtagtggttacattatcaggcccatcccagatgtttgtgatgtcctgaaacaatttaaaaggagacccacagagctaatgtttatccatttaaaaggtataaatcaaaataacaaattatctaaaaaaaatctatcctgtacatgtgaagatctaggctcgcctccatgttactccctttctcttcctacctgtggctcatgccatgccatgaagtgcctagggtacatatgtgaacattccagccttcagcataagtggtagtccaaattttctttaagcagctgctctccaagacagggccctggaaaggcccacacatacagcccagggctgcccagggctgttggactgtcatttcaaggctcattgtccccagacagggatctgggccctcagacttttgagaatatgaagaggagggttgaggctggagcagaaccagaatcaagctggtgtggggcttttattgatagtgtgaagattgtacactatattacatgatcagatcatacaaataatctaagattatacagtctagtgatcctagattacacaagtaatctaagcttccactttaggaaactagaaaaagaagagcaaattaaatccaaagtaacctgaaaaaacattagagtaaaaatcattgaaattgaaaagagaaaatcgataaaacccaaaactggttccttgaaaaggtcagtaaaattgataaacctctagctagcttaagaacaaacagaagacaaatattgctaataccaaaaatgaaagaggccatcacagctaatcctatggtcaccaaaaggattagaaagaaacatggacaactctgtccataaatttgataacttagctaaaatggaccaattccttgcaagacgcattctctcaaagctcacacaagatagacctcaataggcatatgtatctattaaataaaccaaagcagtaattaataaccttccaaggccaggtacagtggttcatgcctgtaatcccagcacttcactttgggaggctgaggcgggtggatcacaaggtcaggagttcgagaccagcctggtcaacatggtgaaaccccctatctactaaaaatacaaaaaattagctgggcatggtggcatgcgtgtgtagtcgaagctactcaggaggctgaggcagaagaatcacttgaacctgggaggtggatgttgcagtgagctgagattgtgccactgtactgcagcctgggtgacagaatgagactgcatctcaaaaaataataatgaaactttccaaaacaaagtgccaggaccagctgggttcactgatgtgtttttgagatacttaaggtagaaatgataccaagtctctaccatctctttcagaaaataaaagcagagataacacttcccaactcattttgtgaggccagtattaccctaatagcaaaaccaggcaaagatattacaagaaaggaaaactacagatcaatatttccattgaacacagatgcagaaatcctcaaaatattagcaaatcaggaatgcaaggcttgttcaacatttgatattcagtgtaatccattgcatgcattagcagctcaaagatgaaatacgatcatatcaataggtacagaaaaagcatttgacaaaatccaatatccattcatgttaaaacctctcaacacagaaggaatacaggagaacttactcaagttggtaaagaacatactacaaaaaaccctacagctaacattatccttgatgtttccaactagacactttcctactaagatcaggaacatggcaaggaacaccacaccactgcttttcagcattgtactggaagtgctatataatgcagtgttaaaaaaaaaagaaataaaatgcacatagatttgaaaggatgaaatacaactttgttcacaagtaacatgattgtctttgtagagaattctaaataacaaaaaccctgctgacattaataagcaattacagcaggattgcaggatacagtcctcaggtagatgataaaaaggaattggacatcaagtcattaaaagacacggagaaaccctaaatgcttattgttaagtgaaaaccaatctgaaaaggctttctattttgtatgattgcaattatatgacattttgggagaggcaaaactattgagccagtgaaaggaccagtggttgctgagagttgaggggaaaggagggatggcaggtagagaggtgatttttaaggcagtgaaagtactctctagggtactgtaatttgtcaaaacgcagagaatggaaaacagtgaacggaaaacacagagtaaaccctaatgtcaactctggacttcagttaataataatgtatcactgttggctcattaattgtaacaaatgaaccataatgatgcaagatgttaatgattggggagcctgtggaagatgggaggggaaagggttatatgagaattctctatactttttgctcaactttctgtaaccctaaagctactctaaaaaatgaagtgtatcaagtaaataaataaccaaccaacc

SEQ ID NO: 35133 - DNA, 2011 bp, Homo sapiens
  source 1..2011: mol_type = unassigned DNA
gcctttccttttgtttttctcaggttttgcgtgggaggcggtcccgggatttcaagggtctacgcgcttttctatggcgaatgcaacccgacgagggagtgggctgtatcttcagagttgtctccgtctttccaagaacagaacaaaatgaacaaggtagaacagaagtcccaggagtcagtatcatttaaagatgtgactgtgggcttcacccaggaggagtggcagcacctggaccctagtcagagggctctgtatagagatgtgatgctggagaactacagcaaccttgtctcagtggggtattgtgttcacaaaccagaggtgatcttcaggctgcaacaaggagaagagccatggaaacaggaggaagaattcccaagccaaagctttccagaagtctggacagctgatcacctgaaagagaggagccaagaaaaccaatctaaacatttgtgggaagttgtattcatcaataatgaaatgctgactaaggaacaaggtgatgtaataggaataccatttaatgtggatgcccctgagatgctcatgcccttggattaaacccctgcagtgctggaagaagaggactctgcactgcctgccacaccaggactggaagatccatggccttcccttcttccaaactaccttcccacaagatggggatggtggtcacatctccaacactagcatgctgtggaagagacatcagcattcttgcaacaaatctggaaacagcctaaagagacatttctacttcaaagagttgcactgaggaagtgcactggcactgctggggactcacctggggcccagggctgaggcttctcgtgtccttggagctgctgtcctcccgaggagtgtccacactgcagccagctcagcctcaggtgtcttctctggttttgaaaccaaatctaagtgggaaaagaagattcaagttttatccgatttagtctacataattttaagtatctatttgagctcaataccaagaatcacttccttctctctcccatctgtgatctccagaggaaaggtccccgggctaggagacactggctggcatcctaaagccagagctggccaaagggtgtgtgtccactcttccttcacctcttccccaccccacacttgtttttgtctcacgctcacttgctctttctgcctccctctcactctttaggtctcacaaaggctttggccaaagactgactgactttccttggctctctgtcatctccccatagtcaaaagcatttcataacacacaatccatgtgaagggacctctgatgaaaatccatttaaagaggagctcactaattatcaatacttactgctgagcctggaatcattcatatatacctcagagttcattcattccagatgcaatactagataaggagactcctatgaaccaaatatctaactctgaatagatagtgactgtcataatcaaaccctgtggctgcctcctccttactggagggtgtagaggaatgcagttttttgtttgtttatttgtttgttttgagattgcatcactgcactccagcctgggtgatagagtgagactctgtctcaaaacaaaacagtagaaaagaaacaaaaaccatgtgatgagaaacgggactttatggcagcactgacctcactgtcctcaatatgacctattaaagaacaagcattctgagcattctgtaatattggttccaggtatcaattacaacctatcatgatcatggtgaccctattacctatattctctagagcatgcaaatatgatttaattttctcctaccaggaaaaaggcccaatttcacttccttcccccatcaatgaatacaccagaccacatgttccatgattggtaaaaggcagagataggggtcttactttcagttcattcttaacatggtgtaattggagactgcttagcccagcttgtcttttttctttgaccccaaggaaatgaaacaaaaatacaagcccacctgtatcctaga

SEQ ID NO: 35134 - DNA, 5945 bp, Homo sapiens
  source 1..5945: mol_type = unassigned DNA
gcggtcccgggatttcaggggtctaccggctctcttatggcgaatgcaacccgaagagagagtgagctgtatcttcagagttgtctccgtctttccaagaacagaacaaaatgaacaaggtagatcagaagttccaggggtcagtatcatttaaagatgtgactgtgggcttcacccaggaggagtggcagcacctggaccctagtcagagggctctgtatagagatgtgatgctggagaactacagcaaccttgtctcagtggggtattgtgctcacaaaccagaggtgatcttcaggctggaacaaggagaagaaccatggagactggaggaagaattcccaagccagagctttccagaagtctggacagctgatcacctgaaagagaggagccaagaaaatcaatctaaacatttgtgggaagttgtattcatcaataatgaaatgctgactaaggaacaaggtaatgtaataggaataccatttaacatggacgtaagttcttttccttccagaaaaatgttctgtcagtatgactcacgtggaatgagtttcaacactgtttcagaattggttatcagtaagataaactatttaggaaaaaagtctgacgaatttaatgcatgtgggaaattgttactcaatattaagcatgatgaaactcatactcgagagaaaaatgaagttttgaaaaataggaacactctgagtcatcgtgagaacactttgcagcatgagaagattcaaactttagaccacaattttgaatacagtatatgtcaggaaaccctccttgaaaaggcagtattcaatacacggaagagagagaatgcagaagagaataactgtgactataatgaatttgggagaactttctgtgatagttcatccctcttgttccatcagatacctccatcaaaggacagtcactatgaatttagtgattgtgagaagttcttatgtgtgaagtccaccctttctaaacatgatggggtacctgtgaaacactatgattgtggtgaaagtgggaataatttcaggaggaaattgtgtctgtcacagcttcagaaaggtgataaaggagagaaacactttgaatgtaatgaatgtgggaaagctttctgggagaagtcacatctcactcgacatcagagggtgcacacaggagagaaacactttcaatgtaatcaatgtggaaaaactttctgggagaagtcaaacctcactaaacatcagagatcacacacaggggagaaaccttttgaatgcaatgaatgtgggaaagcctttagccataagtcagccctcacattacaccagagaacacatacaggggagaaaccctatcagtgtaatgcatgtgggaaaactttttaccagaaatctgacctcactaaacatcagagaacacacacagggcagaaaccctatgaatgttatgaatgtggaaaatccttctgtatgaattcacaccttacagtacaccagagaactcacacaggtgagaaaccttttgaatgtcttgagtgtgggaaatccttttgtcaaaagtcacatcttacacagcatcagagaactcacataggagataaaccttatgaatgtaatgcatgtgggaaaactttctaccacaagtcagtactcaccaggcatcagataattcatacagggttgaaaccttatgaatgttatgaatgtgggaaaaccttctgcttgaagtcagacctcacaatacatcagagaacgcacacaggggagaaaccctttgcatgtcctgaatgtgggaaattctttagccataagtcaaccctctctcaacattatagaacacacacgggggagaaaccctatgaatgtcatgaatgtggaaaaatcttttacaataaatcatacctaacaaaacataatagaacacatacaggggagaaaccctatgaatgtaatgaatgtggaaaaaccttctgccagaagtcacaactcactcagcatcagagaattcacataggggagaaaccctatgaatgtaatgagtgtggaaaagctttctgccataagtcagctctaattgtacatcagagaacccatacacaagaaaagccttataaatgtaacgaatgtggaaaatctttctgtgtgaagtcaggacttattttacatgagagaaagcacacgggggagaaaccctatgaatgcaatgaatgtgggaaatccttcagtcacaaatcatcactcacagtacatcacagggctcacacaggagagaaatcttgtcagtgtaatgaatgtggaaaaatcttttaccgtaaatcagaccttgctaaacatcagagatcacatacaggggaaaagccctatgaatgtaacacatgcaggaaaaccttctctcaaaagtcaaatctcattgtacatcagagaacacacataggagaaaaaccttatgaatgaattggatattagaaatttccagccacaagtcagcctccataatgcctcagagtcttcacactgtggagaagggcctgttgacatcctgaatgttcaataactatccacaaactcgccttatgttactccaaagtaacagtaggggataaacccatagactacaacaactataggatggcttttgttaggaagtgatattctgttgaatatcagatggttaatactggcataaaacctcacagatttttttgaatttgtgaaagtttttggcaaaactacaaataggattatgttagcatttacactgaggagaaaattgtcaatttaagaaatctaaagtgaaaattttgcttagaaataaaatatgacaagttctgttttgagtttgatgccataatagtttttaaggtatctaacaataatttatagatgtacattgtggaatgtaaagctttaagaattttttaagaagtaataattaaaataacctcacaagaagttgtaatgagtacagagaattcccgtgtacccttcaccaagcttcctctaaggataatatataatcatagtatatggtcaagtccaagaaatcgatgttaccttgctagtagatgcagacttactcagattttgctatggtttgcgtgcactctgtgtgtgtacgtgtatgtgtgtgtgtgtggttataacaaactggtacttttacatttgagtaaccatcaacacaattagtttacagaatggaaaaggagtctgagatctgtactgtttcaggattacaaaggaatcaggatttagcctcaagtagttcccttgttgtattaataaccacaccctttctgcatccctgtccctggcatccacttgactatgaagctttttgtaaagcatagataaattgaataatcagggcaacagcattaagcacatctgtgaattatccctgaagttcataggacttacatatgtacaagtggtatgtgatataaatcgtgtgtttcatatgcataatggtatttaacgtaattgtgaataggaagtaggtatcctaatttagtagtggttacttcatcaggcccatcccaggtgtttgtcgtgtcctgaaacaatttaaatagagacccacagagctaatgtttatccatttaaaagttataaatcaaaataacagattatctgaaaaaaaatctatcctgtacgtgtgaagatctaggcctgcctccatgttactccctttctcttactacctgtggctcatcccatgccatgaactgcctggggtacatatgtgaacactccagccttcagcgtaagtgatagtccaaattttctttaagcagctgctctccaagacagggccctggaaagaggcccacacatacagcccagttgctgcccagggctgttggactgtcatttcattgctcattgtacccagacagggatctgggccttcagagacttttgagaatatgaagaggagggttgaggctggagaagagccagaatcaagctggcatggggcttttattgacagtgtgaagattgtacactacattacatgatcagatcatacaaataatctaagattttacagtctggtgaccctagattacacaagtaatctaagcttccactttggaaaactagaaaaagaagagcaaattaaatccaaagtaacctggaaaaaaattagagtaaaaatcagtgaaattgaaaagagaaaatcaataaaacccaaaactgttctttgaaaaggtgggtaaaattgataaacctctagctagattaagaaaaaacagaagacaaatactgctaataccaaaagtgaaagaggccatcatagctgatcctatggtcaccaaaaggattagaaagaaatatggacaactctgtccataaatttgataacttagctaaaatggatcaattccttgcaagatgcattctctcaaagctcataaaaggtagatctcagtaggcatatatatctattaaataaattgaagcagtaattaataaccttccaagaccaggcgcggtggctaaaaatacaaaaagttagccgggcgtggtggcatgcgtgtatagtccaagctactcaggaggctgaggcagaagaatcacttgaacctgggaggtggaggttgcagtgagccaagattgtgccactgtactccagcctgggtgacagagtgagactccatctcaataaaattaataataataaaaccttccaaaaaaagtgccgggaccaaatggattcactgatgtgcatttttcgagatacttaaggtagaaatgataccaagtctgtactgtctctttcagaaaataaaagcagggataacacttcccaaatcattttgtgaggccaggattaccctaataccaaagccaggcaaaaacattacaagaaaggaaaactacagatcaatatttccagtgaacacagatgcagaaatccttaaaatgttagcaaatcaggaatgcaagccttgttcaacatttgatattcagtgcaatccattgcatgcattagcagttcaaagattaaatatgatcatatcaataggtacagaaaaagcatttgacaaaatccaatatccattcatgataaaacctctcaacacagaaggaatacaggagaacttactcaatttgataaagaactactacaaaaaaccctacatctagcatcatccttgatgtttccaactaaatgctttcctactaagatcaggaacatggcaaggaacaccactgcttttcagcattgtactggaagtgctatctaatgcagtgataccaaaaaaaaaggaaataaaatgcacataaatttggaaggaggaaatacaactgtctttgttctcaaataacatgattgtctttgtagaaaattctaaataacaaaaacctgctgacattaataagcaattatagcagggttgtagaatgtagtcctcaggtatatgataaaaaagaattagacatcaagtcattaaaagacatataggaaccctaaatgcttattgttaagtgaaaaccaatctgaaaaggctttctatgttgtatgattgcaattatatgacattctgggagaggcaaaactatcgagcgagtcaaaggaccagtggttgctgagagttgaggggaaaggagggatggcaggtaggtgatttttaggacagtgaaagtactctgtagggtactgtaatttgtcaaaatgcagagaatggaaaacagtgaacggaaaacacagagtaaaccctagtgtcaactctggacttcagttaataacagtgtaccactattggctcatcaattgtaacaaatgaaccataatgatgcaagatgttaataattggggagcctgtggaggatgggagggttaaaggtttatatgagaattctctgtactttttgctcaatttttctgtaaccctaaagctgctctaaaaaatgaagtgtattaagtaaataaataagtaaataacc

SEQ ID NO: 35135 - DNA, 2446 bp, Homo sapiens
  source 1..2446: mol_type = unassigned DNA
ccttttgtttgtctcacgttttgcgtgggaggcggtcccgggatttcaggggtctaccggctctcttatggcgaatgcaacccgaagagagagtgagctgtatcttcagagttgtctccgtctttccaagaacagaacaaaatgaacaaggtagatcagaagttccaggggtcagtatcatttaaagatgtgactgtgggcttcacccaggaggagtggcagcacctggaccctagtcagagggctctgtatagagatgtgatgctggagaactacagcaaccttgtctcagtggggacagctgatcacctgaaagagaggagccaagaaaatcaatctaaacatttgtgggaagttgtattcatcaataatgaaatgctgactaaggaacaaggtaatgtaataggaataccatttaacatggacgtaagttcttttccttccagaaaaatgttctgtcagtatgactcacgtggaatgagtttcaacactgtttcagaattggttatcagtaagataaactatttaggaaaaaagtctgacgaatttaatgcatgtgggaaattgttactcaatattaagcatgatgaaactcatactcgagagaaaaatgaagttttgaaaaataggaacactctgagtcatcgtgagaacactttgcagcatgagaagattcaaactttagaccacaattttgaatacagtatatgtcaggaaaccctccttgaaaaggcagtattcaatacacggaagagagagaatgcagaagagaataactgtgactataatgaatttgggagaactttctgtgatagttcatccctcttgttccatcagatacctccatcaaaggacagtcactatgaatttagtgattgtgagaagttcttatgtgtgaagtccaccctttctaaacatgatggggtacctgtgaaacactatgattgtggtgaaagtgggaataatttcaggaggaaattgtgtctgtcacagcttcagaaaggtgataaaggagagaaacactttgaatgtaatgaatgtgggaaagctttctgggagaagtcacatctcactcgacatcagagggtgcacacaggagagaaacactttcaatgtaatcaatgtggaaaaactttctgggagaagtcaaacctcactaaacatcagagatcacacacaggggagaaaccttttgaatgcaatgaatgtgggaaagcctttagccataagtcagccctcacattacaccagagaacacatacaggggagaaaccctatcagtgtaatgcatgtgggaaaactttttaccagaaatctgacctcactaaacatcagagaacacacacagggcagaaaccctatgaatgttatgaatgtggaaaatccttctgtatgaattcacaccttacagtacaccagagaactcacacaggtgagaaaccttttgaatgtcttgagtgtgggaaatccttttgtcaaaagtcacatcttacacagcatcagagaactcacataggagataaaccttatgaatgtaatgcatgtgggaaaactttctaccacaagtcagtactcaccaggcatcagataattcatacagggttgaaaccttatgaatgttatgaatgtgggaaaaccttctgcttgaagtcagacctcacaatacatcagagaacgcacacaggggagaaaccctttgcatgtcctgaatgtgggaaattctttagccataagtcaaccctctctcaacattatagaacacacacgggggagaaaccctatgaatgtcatgaatgtggaaaaatcttttacaataaatcatacctaacaaaacataatagaacacatacaggggagaaaccctatgaatgtaatgaatgtggaaaaaccttctgccagaagtcacaactcactcagcatcagagaattcacataggggagaaaccctatgaatgtaatgagtgtggaaaagctttctgccataagtcagctctaattgtacatcagagaacccatacacaagaaaagccttataaatgtaacgaatgtggaaaatctttctgtgtgaagtcaggacttattttacatgagagaaagcacacgggggagaaaccctatgaatgcaatgaatgtgggaaatccttcagtcacaaatcatcactcacagtacatcacagggctcacacaggagagaaatcttgtcagtgtaatgaatgtggaaaaatcttttaccgtaaatcagaccttgctaaacatcagagatcacatacaggggaaaagccctatgaatgtaacacatgcaggaaaaccttctctcaaaagtcaaatctcattgtacatcagagaacacacataggagaaaaaccttatgaatgaattggatattagaaatttccagccacaagtcagcctccataatgcctcagagtcttcacactgtggagaa

SEQ ID NO: 35136 - DNA, 1901 bp, Homo sapiens
  source 1..1901: mol_type = unassigned DNA
ctgccgtgctgctcggcggcgctgaggccaaatagttgcatcacatgtatctaatccgagagtctcatgcttctgctcctcagtgaccagctcctgctcactgccctcagaaagcccaaccctcaggcaatggcggccttgttcctgtctgccccaccccaggccgaggtgaccttcgaggacgtggctgtgtacctctcccgggaggaatggggccgcctgggccctgctcagaggggcctctacagggacgtgatgctggagacctacgggaacctagtctcactgggagtaggacctgcaggccccaagcctggagtgatctcgcagttggagcgaggggatgagccctgggtcctggatgttcagggcacctctgggaaagagcacctgagagtcaacagcccagctcttgggaccagaactgagtacaaggagttgacttcacaggagacatttggtgaggaagatccccagggatctgagccagtagaagcctgtgaccacatcagtaagtcagaggggagcctggaaaagctagtggagcagagaggccccagggcagtcacactgaccaacggggagagcagcagggagtctgggggaaacctcaggttgctgtcaagacctgttcctgatcagagacctcacaaatgtgatatatgtgagcaaagttttgaacagagatcatatctcaacaaccataagcgtgtacacaggtcaaaaaaaacaaatacagttcgtaactctggggaaatcttcagtgcaaacttagttgttaaagaagatcagaaaattcctactgggaaaaaattgcattattgcagttactgtgggaaaacattcaggtacagtgccaaccttgtcaagcatcagcggcttcacactgaagagaagccctacaaatgtgatgagtgtgggaaagccttcagccagagctgcgagttcatcaatcaccgaaggatgcactcaggagagattccctaccggtgtgacgagtgtgggaagacattcacccggaggcccaacctcatgaagcaccagaggattcacactggggagaaaccctacaagtgtggggagtgtgggaagcactttagcgcctactcttccctgatttatcaccagagaatccacaccggagagaaaccctataaatgtaatgactgcgggaaagccttcagtgatggctcaatccttatccgacatcgtcggactcacaccggagagaagccatttgagtgcaaggaatgtggcaaaggctttacacaaagttctaaccttatccaacatcagagaattcacactggagagaaaccctataaatgtaatgaatgtgagaaagctttcattcaaaaaaccaaactcgtggaacatcagagaagccacactggagagaagccctatgaatgcaatgactgtggcaaagttttcagccaaagcacacacctcatccagcaccagagaatccacacaggagagaagccctacaagtgcagcgagtgtgggaaggccttccacaacagttccagactcatccaccaccagaggctgcaccacggagagaaaccctacagatgcagcgattgcaagaaagccttcagccagagcacgtacttgattcagcaccggaggatccacaccggggagaagccctacaagtgcagcgagtgtgggaaggccttccggcacagttccaacatgtgtcagcatcagcggattcacctccgggaggacttctccatgtaacagtggcgcggtgtccgagggcagagtccagctgagcacttcctgcatgcgcccccggcacctgactctgccctttatgtattatccacacgatgttttcacagagtgaaaggacgtttctcattaaacaaacctcttttcttaaatcaaaa

SEQ ID NO: 35137 - DNA, 1926 bp, Homo sapiens
  source 1..1926: mol_type = unassigned DNA
ggccgaacgggcgaggttgggctgccgtgctgctcggcggcgctgaggccaaatagttgcatcacatgtatctaatccgagagtctcatgcttctggtagctcctcagtgaccagctcctgctcactgccctcagaaagcccaaccctcaggcaatggcggccttgttcctgtctgccccaccccaggccgaggtgaccttcgaggacgtggctgtgtacctctcccgggaggaatggggccgcctgggccctgctcagaggggcctctacagggacgtgatgctggagacctacgggaacctagtctcactgggagtaggacctgcaggccccaagcctggagtgatctcgcagttggagcgaggggatgagccctgggtcctggatgttcagggcacctctgggaaagagcacctgagagtcaacagcccagctcttgggaccagaactgagtacaaggagttgacttcacaggagacatttggtgaggaagatccccagggatctgagccagtagaagcctgtgaccacatcagtaagtcagaggggagcctggaaaagctagtggagcagagaggccccagggcagtcacactgaccaacggggagagcagcagggagtctgggggaaacctcaggttgctgtcaagacctgttcctgatcagagacctcacaaatgtgatatatgtgagcaaagttttgaacagagatcatatctcaacaaccataagcgtgtacacaggtcaaaaaaaacaaatacagttcgtaactctggggaaatcttcagtgcaaacttagttgttaaagaagatcagaaaattcctactgggaaaaaattgcattattgcagttactgtgggaaaacattcaggtacagtgccaaccttgtcaagcatcagcggcttcacactgaagagaagccctacaaatgtgatgagtgtgggaaagccttcagccagagctgcgagttcatcaatcaccgaaggatgcactcaggagagattccctaccggtgtgacgagtgtgggaagacattcacccggaggcccaacctcatgaagcaccagaggattcacactggggagaaaccctacaagtgtggggagtgtgggaagcactttagcgcctactcttccctgatttatcaccagagaatccacaccggagagaaaccctataaatgtaatgactgcgggaaagccttcagtgatggctcaatccttatccgacatcgtcggactcacaccggagagaagccatttgagtgcaaggaatgtggcaaaggctttacacaaagttctaaccttatccaacatcagagaattcacactggagagaaaccctataaatgtaatgaatgtgagaaagctttcattcaaaaaaccaaactcgtggaacatcagagaagccacactggagagaagccctatgaatgcaatgactgtggcaaagttttcagccaaagcacacacctcatccagcaccagagaatccacacaggagagaagccctacaagtgcagcgagtgtgggaaggccttccacaacagttccagactcatccaccaccagaggctgcaccacggagagaaaccctacagatgcagcgattgcaagaaagccttcagccagagcacgtacttgattcagcaccggaggatccacaccggggagaagccctacaagtgcagcgagtgtgggaaggccttccggcacagttccaacatgtgtcagcatcagcggattcacctccgggaggacttctccatgtaacagtggcgcggtgtccgagggcagagtccagctgagcacttcctgcatgcgcccccggcacctgactctgccctttatgtattatccacacgatgttttcacagagtgaaaggacgtttctcattaaacaaacctcttttcttaaatcaaaa

SEQ ID NO: 35138 - DNA, 2680 bp, Homo sapiens
  source 1..2680: mol_type = unassigned DNA
ttggcggggagggagggccgaacgggcgaggttgggctgccgtgctgctcggcggcgctgaggccaaatagttgcatcacatgtatctaatccgagagtctcatgcttctggtagctcctcagtgaccagctcctgctcactgccctcagaaagcccaaccctcaggcaatggcggccttgttcctgtctgccccaccccaggcctggagtgatctcgcagttggagcgaggggatgagccctgggtcctggatgttcagggcacctctgggaaagagcacctgagagtcaacagcccagctcttgggaccagaactgagtacaaggagttgacttcacaggagacatttggtgaggaagatccccagggatctgagccagtagaagcctgtgaccacatcagtaagtcagaggggagcctggaaaagctagtggagcagagaggccccagggcagtcacactgaccaacggggagagcagcagggagtctgggggaaacctcaggttgctgtcaagacctgttcctgatcagagacctcacaaatgtgatatatgtgagcaaagttttgaacagagatcatatctcaacaaccataagcgtgtacacaggtcaaaaaaaacaaatacagttcgtaactctggggaaatcttcagtgcaaacttagttgttaaagaagatcagaaaattcctactgggaaaaaattgcattattgcagttactgtgggaaaacattcaggtacagtgccaaccttgtcaagcatcagcggcttcacactgaagagaagccctacaaatgtgatgagtgtgggaaagccttcagccagagctgcgagttcatcaatcaccgaaggatgcactcaggagagattccctaccggtgtgacgagtgtgggaagacattcacccggaggcccaacctcatgaagcaccagaggattcacactggggagaaaccctacaagtgtggggagtgtgggaagcactttagcgcctactcttccctgatttatcaccagagaatccacaccggagagaaaccctataaatgtaatgactgcgggaaagccttcagtgatggctcaatccttatccgacatcgtcggactcacaccggagagaagccatttgagtgcaaggaatgtggcaaaggctttacacaaagttctaaccttatccaacatcagagaattcacactggagagaaaccctataaatgtaatgaatgtgagaaagctttcattcaaaaaaccaaactcgtggaacatcagagaagccacactggagagaagccctatgaatgcaatgactgtggcaaagttttcagccaaagcacacacctcatccagcaccagagaatccacacaggagagaagccctacaagtgcagcgagtgtgggaaggccttccacaacagttccagactcatccaccaccagaggctgcaccacggagagaaaccctacagatgcagcgattgcaagaaagccttcagccagagcacgtacttgattcagcaccggaggatccacaccggggagaagccctacaagtgcagcgagtgtgggaaggccttccggcacagttccaacatgtgtcagcatcagcggattcacctccgggaggacttctccatgtaacagtggcgcggtgtccgagggcagagtccagctgagcacttcctgcatgcgcccccggcacctgactctgccctttatgtattatccacacgatgttttcacagagtgaaaggacgtttctcattaaacaaacctcttttcttaaatcaaaagcagtgcatgttcattttagagaaattgagacagaaaagtgggcaaaaaagaagcttctgtgatctctcccacttagaaaaaaaattcattgctgctgatttacgaatattttcgagacatactggagagcattttaaaaagaaaataccgtaatgcttgtcattgcagcacctaggatcttcacttttgctatttcctcaatatcagaaaattcacactgaagagagcaccatatattttaacatttttacatattgtaaatttaaaagcatcggccaggtgtggtggctcatgcctgtaataccagcattttgagaggccaaggtgggtggatcacttgaggtcaggagtttgagaccagcctggccaacatggtgaaaccccgtctctactaaaaatacaaaaattagccaggtgtggtggtgggtgcctgtaatcccagctactcgggaggctgaggcaggagcattgcttgaacctgggaggcggaggttgcagtgagccaagactgtgccactgtactccagcctgggtgacagagcgagacgctgtctcaaaaaataaatgaaacaaacttaacattcatactttttatgtcaatagagttgaagttgcctttaactgtggtgaaataacataatatgaaatttacaattttaaccatttttaagtgtacaattcagtggcattaagtacattcatggtgttgtgtaaccatcatcactgtgtatttccagaactgttttattactccaaacagaaaccctgtacctattaaataataactcttcatttcccccttctccctactgctggtaacctcaattctattttctgtctctttgaatttgcctattctaggaacataaatatgtgtggaatcatgc

SEQ ID NO: 35139 - DNA, 2661 bp, Homo sapiens
  source 1..2661: mol_type = unassigned DNA
acttcctgtccggtcattgttctcgtgccggtagaagctgaagtaccggtcagccagcctcctgctgcagagccagtgaactcaggtcgggcttctcagctgcgcacataggcagtactcatcttggccctgggaagaaactcaagaagaagcttttgaaacataaagcttggatggggtttgacctctgcagggcagcgcccagctataggagttcccctgctgagcagagaagatgactgcagaattgagagaagccatggccctagccccatggggcccagtgaaggtgaaaaaggaggaggaagaagaagaaaacttcccaggtcaggcatccagccaacaagtgcactccgagaacatcaaagtctgggccccagtgcagggtcttcagacaggccttgatggatcagaagaggaagaaaagggtcagaacatatcctgggatatggcggtagtcctgaaagcaactcaggaggcacctgctgcttcaacccttggcagctactcattaccagggactctggccaagagtgagatactggagactcatgggaccatgaactttctaggtgctgaaaccaagaacctacagttactggttccaaaaactgagatatgtgaggaagctgaaaaacccctcatcatatcagaaagaatccagaaagctgatcctcaaggacctgagttaggagaagcttgtgaaaagggaaacatgttaaagaggcagagaataaagagagaaaagaaagatttcagacaagtgatagtgaatgactgtcacttacctgaaagcttcaaagaagaggaaaaccagaaatgtaagaaatctggaggaaaatatagccttaattctggcgctgttaaaaatccaaaaacccagcttggacaaaagccttttacgtgtagcgtgtgtgggaaaggatttagtcagagtgcaaacctcgttgtgcatcagcgaatccacactggagagaaaccctttgaatgtcatgagtgtgggaaggccttcattcagagtgcaaacctcgttgtgcatcagagaatccacactggacagaaaccttatgtttgctcaaaatgtgggaaagccttcactcagagttcaaatctgactgtacatcaaaaaatccactccttagaaaaaacttttaagtgcaatgaatgtgagaaagcctttagttacagctcacaacttgctcggcaccagaaagtccacattacggaaaaatgctatgaatgtaatgaatgtgggaaaacatttactaggagctcaaacctcattgtccaccagaggatccacactggggagaagccctttgcctgtaacgactgtggcaaagcctttacccagagtgcaaatcttattgtacatcagcgaagccatactggtgagaagccatatgagtgtaaagagtgtgggaaagcctttagttgtttttcacaccttattgtgcaccagagaattcacactgcagagaaaccttacgactgcagcgaatgtgggaaagccttcagtcagctctcttgccttattgtccaccagagaattcacagtggagatcttccttacgtgtgtaatgaatgtgggaaggccttcacatgtagctcatacctacttattcatcagagaattcataatggagaaaaaccttacacatgtaatgagtgtgggaaggccttcagacagaggtcgagcctcaccgtgcaccagagaacccacactggggagaagccctatgaatgtgagaagtgtggtgcagctttcatttccaactcacacctcatgcgacaccatagaacccatcttgttgaataacaagtaaggaagaggaagacctccagcattggtcataaccttctgcctccctaatgagacacctctttgctgttttcttcctcctctataaaagtgagggctgtgtccttaaaagttatagttttcaggaatgcagcagaagacacaagaaaagcatttcagaggctaatttaaaacaaaaagtaagcacctaaaggcaaggactttgttttaactgtaccttaagcggtcatgttctctgaagtggaatgtggctttcctaggaatgggtcgtacaaagctaagtggtaatgatgctatttggggaaaggtcttttttgcttaattttgttttttaaaactctgatgattgcttgagcaacaggcaggttatctgcctggttgaattctggttgaaccgtgtattctaatatttctggttaagtggtgactgggtaaggaaaccacttggggtagcagttcaacaattcacttacgaatgtttataagctttccatttcctaggtaattttttaaaagccagtcaaaacaaaaactttactgaaaatggacagaaataggaaatggactttttccttactgtctatacctcctgaaccttggtattgtaaagatctggggacctctgggtctgttctgaccattccctagtctccatggccaagcactcaaggattgatggacaccacacaccagctatattcatttgccaagatcaacagctccttctccaaacaactcaagcccccaattcccatcgcattccatttgggtgagatgcaactaacagccccttcctggatgaaggagtcaaagaataaagcttgcctagaggcatgccc

SEQ ID NO: 35140 - DNA, 620 bp, Homo sapiens
  source 1..620: mol_type = unassigned DNA
cattgttctcgtgccggtagaagctgaagtaccggtcagccagcctcctgctgcagagccagtgaactcaggtcgggcttctcagctgcgcacagcagtactcatcttggccctgggaagaaactcaagaagaagcttttgaaacataaagcttggatggggtttgacctctgcagggcagcgcccagctataggagttcccctgctgagcagagaagatgactgcagaattgagagaagccatggccctagccccatggggcccagtgaaggtgaaaaaggaggaggaagaagaagaaaacttcccaggtcaggcatccagccaacaagtgcactccgagaacatcaaagtctgggccccagtgcagggtcttcagacaggccttgatggatcagaagaggaagaaaagggtcagaacatatcctgggatatggcggtagtcctgaaagcaactcaggaggcacctgctgcttcaacccttggcagctactcattaccagggactctggccaagagtgagatactggagactcatgggaccatgaactttctaggtgctgaaaccaagaacctacagttactggttccaaaaactgagatatgtgaggaagctgaaaaa

SEQ ID NO: 35141 - DNA, 532 bp, Homo sapiens
  source 1..532: mol_type = unassigned DNA
cattgttctcgtgccggtagaagctgaagtaccggtcagccagcctcctgctgcagagccagtgaactcaggcagtactcatcttggccctgggaagaaactcaagaagaagcttttgaaacataaagcttggatggggtttgacctctgcagggcagcgcccagctataggagttcccctgctgagcagagaagatgactgcagaattgagagaagccatggccctagccccatggggcccagtgaaggtgaaaaaggaggaggaagaagaagaaaacttcccaggtcaggcatccagccaacaagtgcactccgagaacatcaaagtctgggccccagtgcagggtcttcagacaggccttgatggatcagaagaggaagaaaagggtcagaacatatcctgggatatggcggtagtcctgaaagcaactcaggaggcacctgctgcttcaacccttggcagctactcattaccagggactctggccaagagtgagatactggagactcatgggaccatgaactttctag

SEQ ID NO: 35142 - DNA, 1790 bp, Homo sapiens
  source 1..1790: mol_type = unassigned DNA
attgttctcgtgccggtagaagctgaagtaccggtcagccagcctcctgctgcagagccagtgaactcaggtcgggcttctcagctgcgcacataggcagtactcatcttggccctgggaagaaactcaagaagaagcttttgaaacataaagcttggatggggtttgacctctgcagggcagcgcccagctataggagttcccctgctgagcagagaagatgactgcagaattgagagaagccatggccctagccccatggggcccagtgaaggtgaaaaaggaggaggaagaagaagaaaacttcccaggtcaggcatccagccaacaagtgcactccgagaacatcaaagtctgggccccagtgcagggtcttcagacaggccttgatggatcagaagaggaagaaaaggtgctgaaaccaagaacctacagttactggttccaaaaactgagatatgtgaggaagctgaaaaacccctcatcatatcagaaagaatccagaaagctgatcctcaaggacctgagttaggagaagcttgtgaaaagggaaacatgttaaagaggcagagaataaagagagaaaagaaagatttcagacaagtgatagtgaatgactgtcacttacctgaaagcttcaaagaagaggaaaaccagaaatgtaagaaatctggaggaaaatatagccttaattctggcgctgttaaaaatccaaaaacccagcttggacaaaagccttttacgtgtagcgtgtgtgggaaaggatttagtcagagtgcaaacctcgttgtgcatcagcgaatccacactggagagaaaccctttgaatgtcatgagtgtgggaaggccttcattcagagtgcaaacctcgttgtgcatcagagaatccacactggacagaaaccttatgtttgctcaaaatgtgggaaagccttcactcagagttcaaatctgactgtacatcaaaaaatccactccttagaaaaaacttttaagtgcaatgaatgtgagaaagcctttagttacagctcacaacttgctcggcaccagaaagtccacattacggaaaaatgctatgaatgtaatgaatgtgggaaaacatttactaggagctcaaacctcattgtccaccagaggatccacactggggagaagccctttgcctgtaacgactgtggcaaagcctttacccagagtgcaaatcttattgtacatcagcgaagccatactggtgagaagccatatgagtgtaaagagtgtgggaaagcctttagttgtttttcacaccttattgtgcaccagagaattcacactgcagagaaaccttacgactgcagcgaatgtgggaaagccttcagtcagctctcttgccttattgtccaccagagaattcacagtggagatcttccttacgtgtgtaatgaatgtgggaaggccttcacatgtagctcatacctacttattcatcagagaattcataatggagaaaaaccttacacatgtaatgagtgtgggaaggccttcagacagaggtcgagcctcaccgtgcaccagagaacccacactggggagaagccctatgaatgtgagaagtgtggtgcagctttcatttccaactcacacctcatgcgacaccatagaacccatcttgttgaataacaagtaaggaagaggaagacctccagcattggtcataaccttctgcctccctaatgagacacctctttgctgttttcttcctcctctataaaagtgagggctgtgtccttaaaagttatagttttcaggaa

SEQ ID NO: 35143 - DNA, 1745 bp, Homo sapiens
  source 1..1745: mol_type = unassigned DNA
agcctgacttcagcgctcccactctcggccgacacccctcatggccaaccgttacaccatggatctgactgccatctacgagagcctcctgtcgctgagccctgacgtgcccgtgccatccgaccatggagggactgagtccagcccaggctggggctcctcgggaccctggagcctgagcccctccgactccagcccgtctggggtcacctcccgcctgcctggccgctccaccagcctagtggagggccgcagctgtggctgggtgcccccaccccctggcttcgcaccgctggctccccgcctgggccctgagctgtcaccctcacccacttcgcccactgcaacctccaccaccccctcgcgctacaagactgagctatgtcggaccttctcagagagtgggcgctgccgctacggggccaagtgccagtttgcccatggcctgggcgagctgcgccaggccaatcgccaccccaaatacaagacggaactctgtcacaagttctacctccagggccgctgcccctacggctctcgctgccacttcatccacaaccctagcgaagacctggcggccccgggccaccctcctgtgcttcgccagagcatcagcttctccggcctgccctctggccgccggacctcaccaccaccaccaggcctggccggcccttccctgtcctccagctccttctcgccctccagctccccaccaccacctggggaccttccactgtcaccctctgccttctctgctgcccctggcacccccctggctcgaagagaccccaccccagtctgttgcccctcctgccgaagggccactcctatcagcgtctgggggcccttgggtggcctggttcggaccccctctgtacagtccctgggatccgaccctgatgaatatgccagcagcggcagcagcctggggggctctgactctcccgtcttcgaggcgggagtttttgcaccaccccagcccgtggcagccccccggcgactccccatcttcaatcgcatctctgtttctgagtgacaaagtgactgcccggtcagatcagctggatctcagcggggagccacgtctcttgcactgtggtctctgcatggaccccagggctgtggggacttgggggacagtaatcaagtaatccccttttccagaatgcattaacccactcccctgacctcacgctggggcaggtccccaagtgtgcaagctcagtattcatgatggtgggggatggagtgtcttccgaggttcttgggggaaaaaaaattgtagcatatttaagggaggcaatgaaccctctcccccacctcttccctgcccaaatctgtctcctagaatcttatgtgctgtgaataataggccttcactgcccctccagtttttatagacctgaggttccagtgtctcctggtaactggaacctctcctgagggggaatcctggtgctcaaattaccctccaaaagcaagtagccaaagccgttgccaaaccccacccataaatcaatgggccctttatttatgacgactttatttattctaatatgattttatagtatttatatatattgggtcgtctgcttcccttgtatttttcttcctttttttgtaatattgaaaacgacgatataattattataagtagactataatatatttagtaatatatattattaccttaaaagtctatttttgtgttttgggcatttttaaataaacaatctgagtgt

SEQ ID NO: 35144 - DNA, 3026 bp, Homo sapiens
  source 1..3026: mol_type = unassigned DNA
gtgtgttgggggtggtgagaatgcgctctcttcggcccgccccgtcctttccaaagaaacgtgctcataatggggtgacctaattacatcgcaatggaactcaatcttagccactccgcagcaccgggtttcataacagactcggcggcctcgagtgctgggaagaaacgtgcgagggccgaggggggcggcggagcccgcgtggaaatcggaaagaagcgcagccctgcgacttccgcctgggtcatcacgccagcagtcgggccaaggcgcagggggcgggtgggggactcgttaactttttatttgggtgggcggcatccaaacctaacagtatatattttatcattttcaagggagtcatgctccattgcgggcccttcggtttcgtggctcccatgtccccctctccacctcccgccaaaacggcgcagcgtgacaagccatatgttccactccggtgggggcgagagagaagcaacaataagttaaaagtgccgcctccctccacctctttaccttcattcttaccaaagtaaccttttttcattgttctagagtcttgaggtgtgtgtggggaggatggaggaggagggagggttgtggcgccgcccagaattcggagcgcgcgtggaaagtagtgagttgctcggtgggctttttctgggaggaaggggcattcaggaaggattagggttttcttgactaaaaagtttaaagattggatgcgtgaaaagaaacggcacgcctaggcctggtaaaacaaacaatcgtcccgggttgtggtctttttttgcggcgccccccacccgcccacacccggagagcgccggctgcaaagcgagcgcgagtgtcgacgcgtgcggcgcactaaattgtgccgcgctcgcccccgccagaccatgtcctcctggggaaaaagtttccctagtccccccagcagcgcgccccaccctacgccccgctggaaaaaaaacagcaacataaaatcctaggcttgaacattctgtgcgtcccaaatttctaatgtcctcggcctgcccggtttgccgaagggagccgagtgtcgaagagaagtcgggaaaaggtaagttgtgcagacacttggggaagtttcaaggagaccgccagctcaagatggaaaccgcggcccgggcgctaaggacgggcttcagctcccgctggcaaaaagagaaagtcgagcccgccttcctgcccaacaaaaaacaacaacatgacaacaagaaccccggagggagtggaatgagtgacgtcacagccgcgctctgaggctgacaaaggagggggcgcgcccctcccgctctgcgcccgcgcggccccggagagggggcgcctgaagcgccgggtagggaagtcagccgacttgaaacttttcctcttaaagaaaaaaaaaaaaaagttgtgcgcggctcacagtggggttttttttttccgccttcttttctcgtctcccctcccccttcttccttttgaaagtttcttctcctccccctgccccccctccccgcctgaccgcatggctgattcaactccagtgtcaatcaacttctttttcctcctcttcctcatttaaataagtttaaagctcctcctccccccggcccaccaaatctgaactttataaattgggctttgcgcgccccagcccggagtcagaaaggcgaggggcgccgggaactggcgtgtgggactccagacaggagaggctgcgccttccccgcaccgggaccttcgcgacacaccagatcctcgcccctggctcgcgcgaacgcacaggatgaccaccaccctcgtgtctgccaccatcttcgacttgagcgaagttttatgcaagggtaacaagatgctcaactatagtgctcccagtgcagggggttgcctgctggacagaaaggcagtgggcacccctgctggtgggggcttccctcggaggcactcagtcaccctgcccagctccaagttccaccagaaccagctcctcagcagcctcaagggtgagccagcccccgctctgagctcgcgagacagccgcttccgagaccgctccttctcggaagggggcgagcggctgctgcccacccagaagcagcccgggggcggccaggtcaactccagccgctacaagacggagctgtgccgcccctttgaggaaaacggtgcctgtaagtacggggacaagtgccagttcgcacacggcatccacgagctccgcagcctgacccgccaccccaagtacaagacggagctgtgccgcaccttccacaccatcggcttttgcccctacgggccccgctgccacttcatccacaacgctgaagagcgccgtgccctggccggggcccgggacctctccgctgaccgtccccgcctccagcatagctttagctttgctgggtttcccagtgccgctgccaccgccgctgccaccgggctgctggacagccccacgtccatcaccccaccccctattctgagcgccgatgacctcctgggctcacctaccctgcccgatggcaccaataacccttttgccttctccagccaggagctggcaagcctctttgcccctagcatggggctgcccgggggtggctccccgaccaccttcctcttccggcccatgtccgagtcccctcacatgtttgactctccccccagccctcaggattctctctcggaccaggagggctacctgagcagctccagcagcagccacagtggctcagactccccgaccttggacaactcaagacgcctgcccatcttcagcagactttccatctcagatgactaagccagggtctgcaggaaggaaggctgaaaaagcggacgaagattttgacttaagtgggactttgtgatttaattttttcttttttttaagtggggaggaaggggaagctagatggactaggagagacttgattttggtgctaaagttccccagttcatatgtgacatctttttaaaaaaaataacaacaaaaaaaaaatgagagaaaagct

SEQ ID NO: 35145 - DNA, 1727 bp, Homo sapiens
  source 1..1727: mol_type = unassigned DNA
gaagaatttgggggattttgcaaatgacctgaagcctgagaggaagtgcaacactgcagggctctcaggagggggtaccctgctgacgcctgtgactaggcctaaccttctggggtcctgcggcccagtgctgcacactgtcatctgccttgaggtgcgcctggggtccagattggccgatgaatacgtacacccgcagcgcctccttcactccgaagactttcactttcccccttgcacaaaaccgaacatcccaccccaccaccacctccaagctaaaatacctgggccgcccctccccacgaagggacgcgctccaggcgaatggggagggcccggaagtcgggcctgggacagaggagccggcccaccgcctcccggtcggaagcggcagtgcaggtgaggcggcggccagcctggggactgcgcgggtaaggagcgggagggcggaatgcaccgcgaagttggcgggggacggccacgcacgcctcgcctcggccttcctgcaccgtagggccgccctcccgccacccctgggcacctgtcgaccacgtctgggcgagggcgggtcggctcccgccctcgggccctcaccgcggcggggacgccgggtcagcgaagggttaagggactcgctccctcctctcggctccctcacccttggaaagtccccgaaatgacgtttcaacccgacaatttaaaaaagagtttaattatagagacaggctctgggagctggaacaaacccttggtcggcggggccggtaaacaactcgggagcgagcgggctaggccagtcgcagccttgcggagcccgcgcccccggggagagggggaggggagggcctccgggagttggaaaagccgaggaaattcgaggaatcagctttctttggaaaaatccactttgtagccattctggggcgcctgatggtgctcctggccggtcccgcagccttggagggaaagcggcgccgcccgaagcaggggcatagccggtgccccgcggggacaggccctgggccgggaagggggccccgcccgctcccagtccccttcccctttgcttttttccagcccctcctccggtccccccagctgagcttcgcgaaccctcgggagttaaagaccagccggcctcttttttggggggggtggggggtgggggagcgggaatgggtggaggccgggggaataaaaaaccgaaatagcttcacatcagaactcagactaaccttgtggtttcaacgcgcactctgctctgtcctgaaatctggaactcattacctcatcaccaagaaactgcacgaaatctctcccccaccgccccaacacccacttgggaaaggaacgagcaaacatccctctaagaaagaaacctacacttgaatgatttaaattaaggtggatggaagttatttccctttctggcgcttgccagatttcaagaaaagctgaaaaatgggagcgggggagggaagcaacagacggctggagggcagcagcagaacaagcgaggggcagcagccgagttaaagtgggggccatccatttcgggcagaggagacaaatgaaagccgaccccgctgggatcacgtaggttcgtggctgcagcaaaagttgggtttcacaaagttgaaaaacagccggtttctcaaacaattgtgatttggaaggtttcgctgggtttgcccagatgtttacgaataaataagaaatgcagtttt

SEQ ID NO: 35146 - DNA, 1236 bp, Homo sapiens
  source 1..1236: mol_type = unassigned DNA
ggagtcagaaaggcgaggggcgccgggaactggcgtgtgggactccagacaggagaggctgcgccttccccgcaccgggaccttcgcgacacaccagatcctcgcccctggctcgcgcgaacgcacaggatgaccaccaccctcgtgtctgccaccatcttcgacttgagcgaagttttatgcaagggtaacaagatgctcaactatagtgctcccagtgcagggggttgcctgctggacagaaaggcagtgggcacccctgctggtgggggcttccctcggaggcactcagtcaccctgcccagctccaagttccaccagaaccagctcctcagcagcctcaagggtgagccagcccccgctctgagctcgcgagacagccgcttccgagaccgctccttctcggaagggggcgagcggctgctgcccacccagaagcagccctttgaggaaaacggtgcctgtaagtacggggacaagtgccagttcgcacacggcatccacgagctccgcagcctgacccgccaccccaagtacaagacggagctgtgccgcaccttccacaccatcggcttttgcccctacgggccccgctgccacttcatccacaacgctgaagagcgccgtgccctggccggggcccgggacctctccgctgaccgtccccgcctccagcatagctttagctttgctgggtttcccagtgccgctgccaccgccgctgccaccgggctgctggacagccccacgtccatcaccccaccccctattctgagcgccgatgacctcctgggctcacctaccctgcccgatggcaccaataacccttttgccttctccagccaggagctggcaagcctctttgcccctagcatggggctgcccgggggtggctccccgaccaccttcctcttccggcccatgtccgagtcccctcacatgtttgactctccccccagccctcaggattctctctcggaccaggagggctacctgagcagctccagcagcagccacagtggctcagactccccgaccttggacaactcaagacgcctgcccatcttcagcagactttccatctcagatgactaagccagggtagggagggacctcctgcctactccagcccctaccctgcacccacatcccataccctcttctccctacccatcccattccccacaggccctacattaacaaggttaagctcaacccctttcccccagcacctca

SEQ ID NO: 35147 - DNA, 3190 bp, Homo sapiens
  source 1..3190: mol_type = unassigned DNA
gtttcttctcctccccctgccccccctccccgcctgaccgcatggctgattcaactccagtgtcaatcaacttctttttcctcctcttcctcatttaaataagtttaaagctcctcctccccccggcccaccaaatctgaactttataaattgggctttgcgcgccccagcccggagtcagaaaggcgaggggcgccgggaactggcgtgtgggactccagacaggagaggctgcgccttccccgcaccgggaccttcgcgacacaccagatcctcgcccctggctcgcgcgaacgcacaggatgaccaccaccctcgtgtctgccaccatcttcgacttgagcgaagttttatgcaagggtaacaagatgctcaactatagtgctcccagtgcagggggttgcctgctggacagaaaggcagtgggcacccctgctggtgggggcttccctcggaggcactcagtcaccctgcccagctccaagttccaccagaaccagctcctcagcagcctcaagggtgagccagcccccgctctgagctcgcgagacagccgcttccgagaccgctccttctcggaagggggcgagcggctgctgcccacccagaagcagcccgggggcggccaggtcaactccagccgctacaagacggagctgtgccgcccctttgaggaaaacggtgcctgtaagtacggggacaagtgccagttcgcacacggcatccacgagctccgcagcctgacccgccaccccaagtacaagacggagctgtgccgcaccttccacaccatcggcttttgcccctacgggccccgctgccacttcatccacaacgctgaagagcgccgtgccctggccggggcccgggacctctccgctgaccgtccccgcctccagcatagctttagctttgctgggtttcccagtgccgctgccaccgccgctgccaccgggctgctggacagccccacgtccatcaccccaccccctattctgagcgccgatgacctcctgggctcacctaccctgcccgatggcaccaataacccttttgccttctccagccaggagctggcaagcctctttgcccctagcatggggctgcccgggggtggctccccgaccaccttcctcttccggcccatgtccgagtcccctcacatgtttgactctccccccagccctcaggattctctctcggaccaggagggctacctgagcagctccagcagcagccacagtggctcagactccccgaccttggacaactcaagacgcctgcccatcttcagcagactttccatctcagatgactaagccagggtagggagggacctcctgcctactccagcccctaccctgcacccacatcccataccctcttctccctacccatcccattccccacaggccctacattaacaaggttaagctcaacccctttcccccagcacctcagaatgtgccctccctctccccctcataaccccacctaacataaggacaagtcaatttgtcagtagcttcttctggcttgaaaccccctccctggattttatagcccacttaccatgcataacagacaagtcccatattttgtcagtagatgcctttttttttccggcttaagccttaagtgccaaatcacaagagaaaaagcagtaacagtttacagaagcaacttagtgccttgtaatctaactttgtcactgtgactacattacctcttcagcgccagagggcacccgtgggcctcccggagcctctgcccatggcggggtggagacccggaaccagcagccccctccactggcgacacaactgcaccttccctcatttcagtctcccgcacacttattcctcctcccctcttcccggtggcacctctccacctgtacccgcccccccaccccccccacccctgccccttggaagagttgttgccagaccagggttttgggggaaacctgtcttgacattcaaaacctttttcttcccgatctgaacccctgttgactaatcttgcctgggtttgtgtaggtctgcaggaaggaaggctgaaaaagcggacgaagattttgacttaagtgggactttgtgatttaattttttcttttttttaagtggggaggaaggggaagctagatggactaggagagacttgattttggtgctaaagttccccagttcatatgtgacatctttttaaaaaaaataacaacaaaaaaaaaatgagagaaaagctaaaaaaaaaaaagtaaggggtgagcagttaatggtattcattccacatacaatatctgtgtaaaacgatttcctgtagaagtagctttaatggtttttgctctagaataccgtaggtctatccttagagcactcacgccatgctttcttccctgggttttaaacttcatataactttcagaaattggagagcaaaaattttgcttgtcactgcacatcaatataaaaaagcttatttaacttatcaaaacgtatttattgccaaactatgcttttttttgttaattttgttcatatttatcgggatgacaaatccatagaatatattcttttatgttaaattatgatcttcatattaatcttaaaattttgtgacgtgtctttttcctttttttccacagttttaatatattattcttcaacgacattttttgtaactttacacttttttggttattttattttaaaaaaatgaaaaattaatttaaaaaaatgcaaaaaactgttggattatttattttagaaattcccccctttgtgttggactgcaaattgagtttctttctctttaggcctttcacaactaggactgagaatgtatgtaaaagttctgtgacagtacagaaggaaaacaactttttatgtatagcttctaaaaggggaaaaaaaaaaaaagagaaaccctttgacttccacgtgcccatctcaagacattccactcacagatttgaggttctggattccaggtctggagttttccaatgttaatgtaaacagaactggcacacacacattaagatgaatgtaattattattcctcttgctggtcactaccgtcgctttctatttctctttctttgtgtgaatttatttaaaagaaaaaaaaactttttgtaacgactatttgcagtttaaaaatcaataaaccccgttttttcaagaaa

SEQ ID NO: 35148 - DNA, 3696 bp, Homo sapiens
  source 1..3696: mol_type = unassigned DNA
gccgagttccagcagtccgcgagctgccgtcggctccgcggggggggcgggccgggcaccccggggcgcggaggagcgctcctcgcttctctccttcccccctgccgcactccgccggaccctcccgccggcccgcgccgctgcactcgccctctcctctcgccccccggcaaactttcggcccctccccgcccctcgcccgttattcgtcgtggctcaagcccggccacgccgccccaagggctcctcccgacctcccggcctgccgctccggccactgcgggatccagaaacatgtcgaccacacttctgtccgccttctacgatgtcgacttcttgtgcaagacagagaaatccctggccaacctcaacctgaacaacatgctggacaagaaggcggtggggacgcctgtggccgccgcccccagctcgggcttcgcgccgggattcctccgacggcactcggccagcaacctgcatgcactcgcccaccccgcgcccagccccggcagctgctcgcccaagttcccgggcgccgctaacggcagcagctgcggcagcgcggcggccggcggtccgacctcctacggcacccttaaggagccgtcggggggcggcggcacagccctgctcaacaaggagaacaaattccgggaccgctcgtttagcgagaacggcgatcgcagccagcacctcctgcacctgcagcagcagcagaaggggggcggcggctcccagatcaactccacgcgctacaagaccgagctgtgccggcccttcgaggagagcggcacgtgcaagtacggcgaaaagtgccagttcgcgcatggcttccacgagctgcgcagcctgactcgccatccgaagtacaagaccgagctgtgccgcacctttcataccatcggcttctgcccctatgggccgcgctgccacttcatccacaacgcggacgagcggcggcccgcgccgtcggggggcgcctccggggacctgcgtgcctttggcacgcgcgatgcgttgcacctgggcttcccgcgggagccgcggcccaagttgcaccacagcctcagcttctcgggcttcccgtcgggccaccatcagcccccgggcggcctcgagtcgccgctgctgctcgacagccccacgtcgcgcacgccgccgccgccctcctgctcttcggcctcgtcctgctcctcctccgcctcctcctgttcctcggcctccgcggcctccacgccctcgggcgccccgacatgctgcgcctccgcggcggccgcggctgcggccgctctgctgtacggcaccgggggcgccgaggacctgctggcgccgggggccccgtgcgcggcctgctcgtcggcctcgtgcgccaacaacgccttcgccttcggtccggagctcagcagcctcatcacgccgctcgccatccagacccacaactttgccgccgtggccgccgccgcctactaccgcagtcagcagcagcagcagcagcagggcctggcgccccccgcgcagccgccggcgccgcccagcgcgaccctccccgccggggccgccgcacctccctcgccgcccttcagcttccagctgccgcgccgcctgtccgactcgcccgtgttcgacgcgccccccagccccccggactcgctgtcggaccgcgacagctacctaagcggctccctgagctccggcagcctcagcggctctgagtctcccagcctcgaccctggccgccgcctgccaatcttcagccgcctctccatctccgacgactgaggcaagagggcgccagtgaggaggaagggaaggcggttcagagatgttggaggacacccctcgccatctcgcccttgctgggggcacgggagtggggggggtgacatgggccctaggcagactgcaagcccgaccgagcacttggactcgaactctgtgccgggaggggcccccacccctcctttttcggtttcctcttgtctttttttttttatttttattacgaagtttcattctttttgagcaaaaaagtcgaactttttctgttgaacaaaatattcacaacagggcagttgtgatacgaatagaacaaaaaaaaaaaaaaaacacttaaactttgttaggactccgatgagtttgggacttcaggaaaaatcaacccagcaccagcagctaccaaccaccattccatctcttcacttgaacagcattagttaagtccagatgtgggaacccttctcttggaagaagttcctaattgtgtctcagaccggtgtaaacaaaccagccagccgccaccttgctaaacctataagctttttaaaatccaatatattctgccaagaatatgccttgatagttagccctcagcccataggtgttttttgttttttaacagaattatatatgtctgggggtgaaaaaacccttgcattccaaaggtccatactggttacttggtttcattgccaccacttagtggatgttcagtttagaaccattttgtctgctccctctggaagccttgcgcagagcttactttgtaattgttggagaataactgctgaatttttagctgttttgagttgattcgcaccactgcaccacaactcaatatgaaaactatttaacttatttattatcttgtgaaaagtatacaatgaaaattttgttcatactgtatttatcaagtatgatgaaaagcaatagatatatattcttttattatgttaaattatgattgccattattaatcggcaaaatgtggagtgtatgttcttttcacagtaatatatgccttttgtaacttcacttggttattttattgtaaatgagtacaaaattcttaatttaagagattgtatgtaatatttatttcattaatttctttccttgtttacgtaaattttgaaagattgcatgatttcttgacagaaatcgatcttgatgctgtggaagtagtttgaggaacatcctatgagttttcttagaatgtataaaggttgtagcccatccaacttcaaagaaaaaaatgaccacatactttgcaatcaggctgaaatgtggcatgcttttctaattccaactttataaactagcaaaaaagtgtttgcttattccaccagttctactgtgacatactcgagtataaagacatgtagcaataacggggagtggggggggagtctcacagtgcctttggaagggcccgaacttgccttaaatcttcctcaaccaaataagtattttattagtgcttgagagaatctgaatgtaggatgggttcaactgcacaaaaggaaaagatttttaccactttttttatatagatataaagtgaagcaaccgccttagtgctgaaatatgtagtacatgaatatgccttgtttaattacagaaaattccaaaacttgtactatttttttttccatgtagaaaggcaggaatgtctcctaagctttcctggacagcagatgaatgagcggtagctttagtttgtacgtaggtacagttggagcactatatgtactctctggactactttggacagaagtaggtttttgaatgtaacaagataagtcaacttgagttgtaatatattttggggaatcagctcactacaaattgtgactgtaaacattgtactgtaaatgttttgtagttttcccccaataaaatttttgggaaaaaaaggta

SEQ ID NO: 35149 - DNA, 2695 bp, Homo sapiens
  source 1..2695: mol_type = unassigned DNA
gaagaggaagagagacccgagctagcacactcagtccccttgctatgtgatgttctttaccatctcaggactctgcacagagtccccaacagcaagaaggccctcaccagatacagccccttgacctgggacttctcagcctccataaccgaattggcccctacaagtcaagttgcaaaccctgggtcaaagggtgaagtagaaggaagctggaaacacatagtattttagaagtttttcagagaaatcacaaggcaggaacttctgctcagtttggaagaaagagcattccatcatgacccttggactgggtgagagcatcatcctttaattaatgtctgcgctgggtcagataaccatcactgtctccaggtgctggaatacagagaggaaccaaacagataaaaatccttgcctgcacggagcttaccttcagctaagggagacagtcaaaaacaagtcaacacatctaaagaagccactgatgaaacaggctcccccttggaaagaccatctcaccttccaacctctccatcctgcagagaggaaaacccaagtttggcgttggcagtcaggtaattcatcagatctggaaaccacctcatcagcatccccctggccaactggaagcaaccgtgacgttgtgctgaatacacttgcagagtcgtgctgtggtctctccgagctcatcacggcacctccctatgcaggagtttcaattcaaggatttagccaaatttgggtgctatttcccttttgtggagggacttttcatcacaatgagaaggacgtcttaggactccaggactttgagagagaaagtgtctctacaagtcaaagcaggaatatcagccttcttacactaggacaactccaaaattgtgtgattggcaaattgacaatcatcgatttgttgactgaacacctgttaggtgtaaggcacggtgtcatatgctttccttggggcttgccttcaagcagctaacagaaataagaagaaaacaggtgaaaaagacagtgtgataaggccatggtggtggattgtggatgccctgccctgtatccacttgggagagagcctctacaacatgctggcaacttccccctcactgattcaaatgttaatctcctttggcaacaccctcacagacacacccaggatcaatacgttgtatcctttgatccaatcaagttgccactcagtattaaccatgacaccttctaagccatcatctcctcctaatcctcccataacaatgggtataagttatgaaggtgggttagaaactagtgcctatccctcactaagttgccagatggatttaacagcacctcaaagtcaacatgccccaagtcaaagtcttctttacccatggaataagctggcttgctacttccctacatctctgaagggctccaccattcctctagcaaccatgctctcaaagctcagagggaggaaaaggaaatggatctaaatggaattccaggtcccacgctggatattttcacaccttacctcatttaatacaacaagcaaggaggtagacaatattgtctacctttgcaaatgaggaaacagaggcttagagaagttaaataatttgcctgagaataaagctaaaagtagctttaaaatactagagctgggattgcaagtttgatgcaaagtttgtgctctcttcatccttcaccaagatctttcattttccctttaaatatctcttatgtctgcatttcccttccattcccatcactagcactgtcctctaatgccccacccagtggggaagtctccaataggtccccctgcttataacagccaagagggtagctataaactaggtccaataacatgcttcatgtgagggaactgatggacagctgtctaattcataacctctggcctcaacggaatttacagttcagagtccaaaatagcaaggaagtggtgggaagaaggtgagagaaaagggtgggagggtgagagaggggagggaggggaataaggtgtgggcagtagagggaatctgtcagtctcatggtttgccctaggaaaccttctgctcagccccagcctgcttctgggcactcctcctcacccctccttgctgtccatatgggttcaatgtgagtaaccacaattgtagagtgtggccatcttcttctgacatggtcctaaataaacctaactgagtagccagaagaatcacttctaaggtaaacatctgtaaacattggttatatttattttcaatattactggttaacattgtggagctattactgatgggccagactctgtgctaggcacagactttctagggattatttcatttaattctcatggcaaccaccatgcatttgcagataggcaagtcaggctcacaaaaatgtatgcagagcttcagggttgtgatgggtagagccaaacccatctgcccaacccaagggcccgtgcgctccaaccctgcatcgaactgccaacatagtacaccttttagaaaaagattcttgttgcaaaagtaccataggcagtgtgtgtgtaaggtcattgtaaaagtgtagataagcaagaaagtgttataccaccactcagaagtaaccactgttaacatgttggcttatctgctctcaggtgtttctgtgcctgtacatactattcttcttgaataaaaacaggattacacagtgt

SEQ ID NO: 35150 - DNA, 4173 bp, Homo sapiens
  source 1..4173: mol_type = unassigned DNA
gttccccgcggaggtggcagccctgggccgcggcgttccggaacccccgcacccacggcgcggtgccccacggtgcccgcgagcgccgcccccgctggctagccgcgcctcgctccgccctggacgccgccggtcccggcgcggaggtgcggcggggagtgggagccggcccggctcagtctgatttacggctctgctgaaaaccgcttcgctcccgcagcatcagcaccggaggcggcggctgcagcagcagcagcaacaagtcgggacttttagagtaatgcaacagaaggcttttgaggaaagcagatatccctggcaggagtcctttgagaatgttgctgtgtgcctgccattacgctgcccgaggtgtggagaccataccagatttagaagcttgtcatccttgagggcccatctggagttcagtcacagctacgaagaaagaaccctcttgacaaaatgcagtctctttccatccctcaaagacacagacctagtcacttcctcagaactcctgaaaccgggaaaattgcagagcagtggcaacgtggtaaagcagaaaccgagctatgttaacttgtacagcatttcacatgaacattccaaggacaggaagccatttgaggtggtggcagagaggcctgtgtcctatgtgcagacctacactgccatggacctccatgcagactcgctggatgggacacggtcgggtcctggactgcccacctcagacaccaaagcttctttcgaggcacatgtcagagaaaaattcaatcgaatggttgaggctgtggataggaccattgagaagagaattgataaactcaccaaagagttggcccagaaaactgcggaactgttggaagttcgggcagcttttgtgcagctgactcagaaaaagcaggaagttcagagacgagagcgggccttaaacagacaggtggacgtggccgtggaaatgatagctgtactgaggcaacgcctgacggaatctgaggaggagcttcttaggaaagaagaagaagttgtcacattcaaccatttcctggaagcggcagctgagaaggaggttcaagggaaagcccggctccaggactttattgagaatctgttacagcgggtagaactggcggagaagcagcttgagtactatcagagccagcaggcctctggctttgtccgtgatctcagcgggcacgtgcttacagacatctcctcaaataggaagcccaaatgcctaagccgagggcacccgcattcggtatgtaaccaccctgatctcaaggcccatttccacccaaagggaaggaaccacctgaaaaaggccaaggatgacagagccagcatgcagcctgccaaggccattcacgaacaggctgagtcctcaagagacctctgcagacctccaaagaaaggggagctcctggggtttggccgcaaaggcaacatcaggcccaaaatggctaaaaaaaagccaacagccattgtgaacatcatctaaaagggtgggtggtgctggaccaatcatcgctgggctttggggaacgttgttccaggagccaacagtaatgtctttctggaaacattccatagtaagacacattggaaaagccaagggcataacacaggcaagcacctcaattaaccagagcttagcaaatgggaatcttagtgaaccagaattttattataacccccttttagaagcttgcaaattacagaaagaataaaaaaattaaatcaatcttaaagctctaacttctaaagtaactggcccagtctccagtaatcttggcatctgggcttctatgcagtggtcactaattttcaggaccaaggccacacaaaatgtcaggcctagggagaaaattcatctgtgcccactgctctccaaagtgcgaggcaaggaatggcagtgtaaagttctgttaatagcagtaaaatgaaaatatttgtgtttgtgtataaccttcccctcagctaatttgaaagcctccaaaataaggattcccattccccgagtattctggttaatcaagatttcaatttctgggttgctcaagggactcgttcagtcagacttcagttctcattccgacagggtgtctttcagttcgtttgtttgattgaggttttttggtggcctagatgcatgtttattcagattttggtacacctctgccgtcttctttggctgagtattctgcacccacagaccatgctgccagcctctatcttaatagctgcttctgtggatatggctggggagcgaagtaaaatcctcttttgattagcacccagcatgggctgggtggctaggtggttggaatgacagtggactgcacgcttggtgcatcgtgcatcgtgaccatcctggaagcactgcgggtgtcgccaagccctttcctaagacctgcttcccggccagtgtcagtggccctctctctctctgctatgggcatgactttctcttcgctggcttaacttttccactgggtggttcactttgcctcctgctgcttctgtgccctgttaagggcttcaggtatctttcaaccaagtatctggagtgttcactctatgttgcattctaaagtaatttctgaaataaacaatgcatgtaggagccagaatctgacactgtcttcccctccttccctccctaaaatggctttagtttccacaaagagctgttaagaatttcctgctgtatgattttcctcaagaatgaatttccatgttattttttccttaaatttagcaatatcatcaggtctcttgcagagtttacaagtgctgacattcttctgaaaacaggaataattttgtccacaaatatatacatatatacatatatataacacatacaaaatatatatgttaagtatattaataatttatttttaaatactcatggagaaagtgtgtgtttgtggtgggtggtttttaaactatatatgtttgttcatgtaaactgaattctcttatttaaaaaatcaaaactgtaacgtaattaacattggcagaattatgattgttactgcaataagcatcaaattagcagcgcattaaaaataggaaataaagcagttgcttaaaatgccagtcaattgaaaagtgtaacttatcattatacaaacattctgaacctaccataatgaaaatgttcttgaatcttcactttgactttcagtttatggggggggtagatcattcatgtgatatataagcagctatcaagtgggcaaaaacattgctgtgaatagcactgtttaggctaacattgtaaaaattgtaatgttataattattatttatttggagaattaacttccccctctaaagttatttattattgatgcttataccatgattgcaccttagccttttacatactaaaaacatgacttgttagttgtattgcatgctctttgtcctgtaatgtgtgtgcaatgacaacttgtttctgttttatttaaagtaactgacattttggattttcatctaacatagagggcatggcaactctctttgacagtggtaccccatgatcttcagaaagtaccataatgtcatcctactctacatttcacaagacgaattattttgagatttgtttattatattaaaatgtttttttacgttcccactaaattttgaccccatataaagaaatgtgttatgtatgttgtgcctccttagagacataaatttagtgtcaaaacatgggagatggcttactcagaagcatactccacttaacataccatggcctgagctaagtaccatgtcctgtttgtgtcttatttttaaatattttctttgtccacatgggccgttgaccttagagttaaggcggttgcttttttgaagaaatcaccaaagtttctgggaaactatgttcaaggttgaaatggagagtagatttaattttatttgtcttgtagggaagaaatcttcctttgaaccgcttttcttgctttttccctttttcccaaactaggttacaggttcttatctgcaaggttcaagttgcttagacattgttttccagtattctgcagggccagtcagttgtacagaagttggaatattctgttccagaattaaagaagtttttagattatgaaatattatgataataaagctatatttctgactaatgtgttga

SEQ ID NO: 35151 - DNA, 1674 bp, Homo sapiens
  source 1..1674: mol_type = unassigned DNA
gttccccgcggaggtggcagccctgggccgcggcgttccggaacccccgcacccacggcgcggtgccccacggtgcccgcgagcgccgcccccgctggctagccgcgcctcgctccgccctggacgccgccggtcccggcgcggaggtgcggcggggagtgggagccggcccggctcagtctgatttacggctctgctgaaaaccgcttcgctcccgcagcatcagcaccggaggcggcggctgcagcagcagcagcaacaagtcgggacttttagagtaatgcaacagaaggcttttgaggaaagcagatatccctggcaggagtcctttgagaatgttgctgtgtgcctgccattacgctgcccgaggtgtggagaccataccagatttagaagcttgtcatccttgagggcccatctggagttcagtcacagctacgaagaaagaaccctcttgacaaaatgcagtctctttccatccctcaaagacacagacctagtcacttcctcagaactcctgaaaccgggaaaattgcagagcagtggcaacgtggtaaagcagaaaccgagctatgttaacttgtacagcatttcacatgaacattccaaggacaggaagccatttgaggtggtggcagagaggcctgtgtcctatgtgcagacctacactgccatggacctccatgcagactcgctggatgggacacggtcgggtcctggactgcccacctcagacaccaaagcttctttcgaggcacatgtcagagaaaaattcaatcgaatggttgaggctgtggataggaccattgagaagagaattgataaactcaccaaagagttggcccagaaaactgcggaactgttggaagttcgggcagcttttgtgcagctgactcagaaaaagcaggaagttcagagacgagagcgggccttaaacagacaggtggacgtggccgtggaaatgatagctgtactgaggcaacgcctgacggaatctgaggaggagcttcttaggaaagaagaagaagttgtcacattcaaccatttcctggaagcggcagctgagaaggaggttcaagggaaagcccggctccaggactttattgagaatctgttacagcgggtagaactggcggagaagcagcttgagtactatcagagccagcaggcctctggctttgtccgtgatctcagcgggcacgtgagctggaaaggtgctggcgaagctcgcctggtgtgccaaaatgacctggaattggaggagtctgcgattgtggaataatgaacttcgaatgatgtgattctggatgaggacttggatcaagagaatcgcaaattaattgtgccagagaagctttcattcattcaacaaatatttattaagcatgttttacactccaggaactttacaagaaacttgggctacttggtgactttactcaccaggagtgggttcagactcctgatggatgagctccaggtcctccctaacaagactgcagacttcctgagggcacagcccacccctcatgctttgagtttctcatataacccatcatagcaagtagaagatgcttcagaacatttgtccctatgagatagagtcatattctatttagcttgggacatggcaggtactcagttgttaaataaaaaatagttattgagtaattt

SEQ ID NO: 35152 - DNA, 3379 bp, Homo sapiens
  source 1..3379: mol_type = unassigned DNA
gttccccgcggaggtggcagccctgggccgcggcgttccggaacccccgcacccacggcgcggtgccccacggtgcccgcgagcgccgcccccgctggctagccgcgcctcgctccgccctggacgccgccggtcccggcgcggaggtgcggcggggagtgggagccggcccggctcagtctgatttacggctctgctgaaaaccgcttcgctcccgcagcatcagcaccggaggcggcggctgcagcagcagcagcaacaagtcgggacttttagagtaatgcaacagaaggcttttgaggaaagcagatatccctggcaggagtcctttgagaatgttgctgtgtgcctgccattacgctgcccgaggtgtggagaccataccagatttagaagcttgtcatccttgagggcccatctggagttcagtcacagctacgaagaaagaaccctcttgacaaaatgcagtctctttccatccctcaaagacacagacctagtcacttcctcagaactcctgaaaccgggaaaattgcagagcagtggcaacgtggtaaagcagaaaccgagctatgttaacttgtacagcatttcacatgaacattccaaggacaggaagccatttgaggtggtggcagagaggcctgtgtcctatgtgcagacctacactgccatggacctccatgcagactcgctggatgggacacggtcgggtcctggactgcccacctcagacaccaaagcttctttcgaggcacatgtcagagaaaaattcaatcgaatggttgaggctgtggataggaccattgagaagagaattgataaactcaccaaagagttggcccagaaaactgcggaactgttggaagttcgggcagcttttgtgcagctgactcagaaaaagcaggaagttcagagacgagagcgggccttaaacagacaggtggacgtggccgtggaaatgatagctgtactgaggcaacgcctgacggaatctgaggaggagcttcttaggaaagaagaagaagttgtcacattcaaccatttcctggaagcggcagctgagaaggaggttcaagggaaagcccggctccaggactttattgagaatctgttacagcgggtagaactggcggagaagcagcttgagtactatcagagccagcaggcctctggctttgtccgtgatctcagcgggcacgtgagctggaaaggtgctggcgaagctcgcctggtgtgccaaaatgacctggaattggagatttttggccatataaaccaccatctttcggggttgaaagattctcattgtctagtttttctgcaagccccacctgtgccctggatcattttagccagctttctctggattctcggaaatccctggacgtcttccacggctactgcaggatttagccaaatttgggtgctatttcccttttgtggagggacttttcatcacaatgagaaggacgtcttaggactccaggactttgagagagaaagtgtctctacaagtcaaagcaggaatatcagccttcttacactaggacaactccaaaattgtgtgattggcaaattgacaatcatcgatttgttgactgaacacctgttaggtgtaaggcacggtgtcatatgctttccttggggcttgccttcaagcagctaacagaaataagaagaaaacaggtgaaaaagacagtgtgataaggccatggtggtggattgtggatgccctgccctgtatccacttgggagagagcctctacaacatgctggcaacttccccctcactgattcaaatgttaatctcctttggcaacaccctcacagacacacccaggatcaatacgttgtatcctttgatccaatcaagttgccactcagtattaaccatgacaccttctaagccatcatctcctcctaatcctcccataacaatgggtataagttatgaaggtgggttagaaactagtgcctatccctcactaagttgccagatggatttaacagcacctcaaagtcaacatgccccaagtcaaagtcttctttacccatggaataagctggcttgctacttccctacatctctgaagggctccaccattcctctagcaaccatgctctcaaagctcagagggaggaaaaggaaatggatctaaatggaattccaggtcccacgctggatattttcacaccttacctcatttaatacaacaagcaaggaggtagacaatattgtctacctttgcaaatgaggaaacagaggcttagagaagttaaataatttgcctgagaataaagctaaaagtagctttaaaatactagagctgggattgcaagtttgatgcaaagtttgtgctctcttcatccttcaccaagatctttcattttccctttaaatatctcttatgtctgcatttcccttccattcccatcactagcactgtcctctaatgccccacccagtggggaagtctccaataggtccccctgcttataacagccaagagggtagctataaactaggtccaataacatgcttcatgtgagggaactgatggacagctgtctaattcataacctctggcctcaacggaatttacagttcagagtccaaaatagcaaggaagtggtgggaagaaggtgagagaaaagggtgggagggtgagagaggggagggaggggaataaggtgtgggcagtagagggaatctgtcagtctcatggtttgccctaggaaaccttctgctcagccccagcctgcttctgggcactcctcctcacccctccttgctgtccatatgggttcaatgtgagtaaccacaattgtagagtgtggccatcttcttctgacatggtcctaaataaacctaactgagtagccagaagaatcacttctaaggtaaacatctgtaaacattggttatatttattttcaatattactggttaacattgtggagctattactgatgggccagactctgtgctaggcacagactttctagggattatttcatttaattctcatggcaaccaccatgcatttgcagataggcaagtcaggctcacaaaaatgtatgcagagcttcagggttgtgatgggtagagccaaacccatctgcccaacccaagggcccgtgcgctccaaccctgcatcgaactgccaacatagtacaccttttagaaaaagattcttgttgcaaaagtaccataggcagtgtgtgtgtaaggtcattgtaaaagtgtagataagcaagaaagtgttataccaccactcagaagtaaccactgttaacatgttggcttatctgctctcaggtgtttctgtgcctgtacatactattcttcttgaataaaaacaggattacacagtgt

SEQ ID NO: 35153 - DNA, 489 bp, Homo sapiens
  source 1..489: mol_type = unassigned DNA
ttgcaggcttaatgccactgtgcatagcttgagtaatctttcctgtacttgaggataggtcctgagcttgctgtcttaggacccattttgacaattcatgtgagttttcatatgttcttgtgttcacgcatctcggattgtatccttaaaatggggcacggttttgcatttagtgtgccaaattcaggaggggaggaaacttgaattccacttctggatctaccactttccatctgaccttggattaatggctttacttccttgcttcagtgttctcttctgtggagagggaatgttacccacctttttgattctaggacttttagagtaatgcaacagaaggcttttgaggaaagcagatatccctggcaggagtcctttgagaatgttgctgtgtgcctgccattacgctgcccgaggtgtggagaccataccagatttagaagcttgtcatccttgagggcccatctggagttcagtcacagctac

SEQ ID NO: 35154 - DNA, 6266 bp, Homo sapiens
  source 1..6266: mol_type = unassigned DNA
cgctaaggccgccctccgggtagccgccatgtcggtctccagcggcgtccagattctgacaaagccagagaccgtggaccggaggagaagtgcggaaacgaccaaagaggccgggcgaccactggagatggctgtgtccgagcccgaggccagcgccgcggaatggaagcaactggatcctgctcagagcaacctgtataatgatgtgatgctggagaactactgcaaccaagcctcaatggggtgtcaagctcccaaaccagacatgatctccaagttggaaaaaggagaagcaccatggttggggaaggggaaaagacccagtcaaggttgtccaagtaaaatagcaagacccaagcaaaaagaaactgatggaaaagtccagaaagatgatgaccagcttgaaaatatccagaaatctcaaaacaaactcctcagggaagttgcagtcaagaagaaaactcaagctaagaagaatggcagtgactgtggttcactggggaaaaaaaataatttgcataaaaaacatgttccttcaaagaaaaggcttcttaaatttgagtcatgtggaaaaattttgaaacagaatttagatttacctgatcactcaagaaactgtgtaaaaaggaaatctgatgcagctaaagaacacaagaagtcattcaaccatagcttatctgatacaaggaaaggcaaaaagcaaactggaaagaaacatgagaaattatccagccatagctcatctgataagtgtaacaaaactggcaaaaaacatgacaaattatgctgtcatagttcatcccatattaaacaggacaaaattcaaactggagagaaacatgagaaatcacccagccttagctcatctactaagcatgaaaaacctcaagcttgtgtgaaaccctatgaatgtaatcaatgtggaaaggttctcagccataaacaaggactcattgaccatcagagagttcatactggggagaaaccatatgaatgtaatgaatgtgggatagcctttagccaaaagtcacaccttgttgtacatcagagaactcacaccggagaaaaaccatatgaatgtattcagtgtggcaaagcccatggtcataaacatgcactcactgaccatctaagaattcatactggagaaaagccctatgaatgtgctgaatgtgggaaaaccttcagacacagctcaaaccttattcaacatgtgagatctcacacaggtgagaagccatatgaatgtaaggaatgtgggaagtcttttaggtataactcatctcttaccgaacatgtgagaacacatacaggtgaaataccatatgaatgcaatgaatgtggaaaagcctttaagtatagctcatcccttactaaacacatgagaattcatacaggtgagaaaccctttgaatgtaatgaatgtgggaaagctttcagcaagaagtcacacctcattatacatcaaagaactcatactaaggagaaaccttataaatgtaatgagtgtggaaaagcctttggacatagctcatctcttacttaccatatgagaactcatacaggtgaaagtccctttgaatgtaatcaatgtgggaaaggctttaaacaaattgaaggccttactcaacatcagagagttcatactggagagaaaccgtatgagtgtaatgaatgtgggaaagcctttagccaaaagtctcacctcattgtacatcagagaactcatactggggagaaaccttatgaatgtaacgaatgtgaaaaagcctttaatgcaaaatcacagcttgttatacatcagcgatcccacactggagaaaaaccctatgaatgtaatgaatgtgggaaaactttcaaacaaaatgcatccctaaccaaacatgtgaaaactcattcagaagataaatctcatgagtgaagttaatgtgggaaatttgttaactaaatttaaggttttgttgaaccttggaaatatgctgattttaaagagtgttagaaagcctttagcaagatgtcacaccttgttgtacatgagaaactttgaaaatggatcttcatatagaatcagtggatggaaacaagggtttaaacttgatacaaaaccttttataaaaaatattgttttaactactcaattattataaatgatctacatgttcagattgaaattgaaagctttaaaaattgtgaattatttgaatattcaaagcaatggagaaacaagttatatatgctgacagttcctgtgtttcttcttgttttgtacttaagcaccatatattagagttgaatttgcatatctgtttattgccttatgtaaatgagtgtggccatctgtataagcctctttgacattttcacccagctctttcttaatgtctgtgttggcttctgcatcagcagaaatctttttaaaagggttgttatatatgtaaaaaatgttaacaggaaaatgagagaaaataaagcagctgaggatacaaatgtgctggtagggagcgatattcaagatatattgtgaagtgtgaaaaagtaggttgctgaaccatgtatatagtatgttcccctttgtgtacaaaagggtatgtttgtttaacctctgtctcttatctctgtatgtgtatgtatctttgtatgcatatatacatgtatctgtatgtgaatagactttgaaaaaatacagaataaacttcatggtggttgccattgggcagaggagtataggactggggtctaggataggagcaagacttccttgtatatttggatttttaaatcatgcacatgtattatttttataattaaaatattttaatatgcataaatcaacattatttaaggttgtcactgagcccctccacaacatgtgagatcaacatgtgagatctcagattttgacagagttaaaatctttgtatgcttattcatgaatgatgatgaatctaaagtatatagtatgaaacttgatgttgaattcataaagactttttctatcacacacaagttctttcattaacatagtgaattataacagcactgtttctacatttgccattttttgatgttgaattgtgattgcaggtgatgatgaattgtgattgcaggtgaatgaaagtgattttatgaataatcaccctgttttatctcatattcaaagaactaacacacaaacacctcaatcagggaattcgaatgaaacaaatgtcacccctccctgttctcgctcaatattgggcattatttactggatcactgtactctttctgagtgaacccagagttggcctcagaatcattgtgcagcgtgcattccagaaggtactatgcatcaacttggactgtcacaggagacctatttgccattgcacacctggattttttttactcttgagccatagattaaaaatacttctggctgggcatggtgggtgcctgtaatctccagcactgtgggaggccaaggtgggtggatcacttgaggccaggagtttgagatcagactagccaacacaatgaaaccccatctctactaaaaatacaaaaaattatctgggcatgctgtaatccctgtaatcccagccactcaggaggctgaggcaagagagttgcttgcacccaggagatggaggttacagtgcactccagcctgggcagcagagtgaggctctgtctcaaaaaaaagaaatacaaaaaatgcacaaaacttctgaactattttgaaatctaagttgttacactaaaagcagagacataagtacagaaatggttttcaaaaacatcatacctttattttaatacaatattaatttacataatataaaatattataatttggcatgttatcttttatattttttaaagcacaatccctacattatttcatttattcctcagaactaacatatgagcagtaatcgggacttgtctagtcatgttcaatcctgttgagtaaatatttcacctagacagtaatttagcataataatgggccccaaagaaatatgtgcttaaatgccatctttacaaatatttatcattcaagctccttccttcctgacctcatttcagagaattataatgtgttaatataatatattgagaatggaatatgtgttcgtgtatgtgcatgtgcacacatgcatacacatgcacgggttgaaagctcaactcatgaatatatcccctcatttccaagtaacttatttatcacatgggaagaaaatgcaatatgaaagccatttctaccagtaatttcttaacaagtggaaatatagcactatgcacagaatgagtcatcactgtctagagctgtagaaagcctgcactttttagatggatgaaacagttgcaggttatggctatgttgaatttccacatgtcttggggaacccatagtattgccacatctgagacagtgagaattataggtatgcctgaatgatataaatgaatgctgaaagccactttgtgcagtaataaaatgaattaaaagttagcattgatgaatgaggaaaggatgtctaaatacaattggaggttagtataggaaaacagacacacagtggtaagtctgaatcgatacgtaaactctagtgtgcataaaaattgcctgaatgatttgttaaaacacagacttgagaatgcaaattcttgggcctcgtcacagacatattggatcagaaaccctgtgggtgggccttgagaatttgcattttaataagtttccagtggattcctgtgctgctggtctggggaccaccctttgagaaccactaatctaaatcatggtgtaagtaagtttaaaaaattatttttaaactgtttttcagatcctctttaagaaaatgaaggggcataaaagtaaattattattaacagttttgaaacatttatttattcaagtgatatgatcatctaagtgcctgagatacagcagtctacaaaacaaaaagaaagcaaacaaacaaaacaaaaccctgttctcatagaccttaattctagaggaggacataggtaataaataaacaactacaatataaagtataacagatcactggatggcaaaaagcaaaccaaggaaggggagggaagtgttggggaatgtaattttaaatatagtgatgggaagcaggcagtaagcttacttagatggtgacaaaagcaaagacccagagagggtaaaagagcaaaccatgtatatatatatgacggaagagcattccagggatatatcttttagaatctgagggtgtgggaagagaaagatgttaaactcctctgacataaagaagaggaaaaaaagtggaaacatttttttaaatcaagatttaaaaaaaaattacatttgtgataggtagaaaacaatctgtcacacactgcttttggtagttgtgtaagtttgtacaacctaccaaaatgtaaatctgacagtatacatcaaagccttatgatggtcggcagtccatcgaggaatctattctatgttgtacaatcaaggcgtactatgatatttattgcagaacagagagaaatagcatatacattgctagttaattgattaaataaagcatgattccttcaaaaattgagtaatatgacattaaaaaccacaatttcaaactatatttaagaagatacaaataattctttattattacttttactctcaggaatgtgtttgagtgatgcatctccaggcatcaagtgagtaatccaatattgaagaaaattaaaattttccacaaagtcccccttctagaagaatgtgctcatatcttttgaccagaaatgagtcacatgaccacacctagtttcaggtggcttgaggaaattgaatctttctttttttgttttattttgttttgagacaaagtctctgtcacccagactggagtgtgcagtagtgcaatcttggctcattacaatctctacctcccaggcttaagcactcctcccaccttagccttcctagtagctgggactacaggtgcatgccaccaagctaattttttttttttttttttggtggaaacagagttttgccatgttactcaggctggtctcaaacttctgggctcaagtgatctgcccaccttggcctcccaaagtgctgtgattaaaagtgtgagctaccacatttggccaaatctttaatttcttaaccttcatagtaaaggaaataaagagacatgggcattgaaaaatggatgttgtacaaaccaacctgtagcatctaaaatactaaataaaaaacagtttacaaaa

SEQ ID NO: 35155 - DNA, 1969 bp, Homo sapiens
  source 1..1969: mol_type = unassigned DNA
atgtcggtctccagcggcgtccagattctgacaaagccagagaccgtggaccggaggagaagtgcggaaacgaccaaagaggccgggcgaccactggagatggctgtgtccgagcccgaggccagcgccgcggtatcagtaacattcaaacatgtgactatggcctttacccagaaggaatggaagcaactggatcctgctcagagcaacctgtataatgatgtgatgctggagaactactgcaaccaagcctcaatggggtgtcaagctcccaaaccagacatgatctccaagttggaaaaaggagaagcaccatggttggggaaggggaaaagacccagtcaaggttgtccaagtaaaatagcaagacccaagcaaaaagaaactgatggaaaagtccagaaagatgatgaccagcttgaaaatatccagaaatctcaaaacaaactcctcagggaagttgcagtcaagaagaaaactcaagctaagaagaatggcagtgactgtggttcactggggaaaaaaaataatttgcataaaaaacatgttccttcaaagaaaaggcttcttaaatttgagtcatgtggaaaaattttgaaacagaatttagatttacctgatcactcaagaaactgtgtaaaaaggaaatctgatgcagctaaagaacacaagaagtcattcaaccatagcttatctgatacaaggaaaggcaaaaagcaaactggaaagaaacatgagaaattatccagccatagctcatctgataagtgtaacaaaactggcaaaaaacatgacaaattatgctgtcatagttcatcccatattaaacaggacaaaattcaaactggagagaaacatgagaaatcacccagccttagctcatctactaagcatgaaaaacctcaagcttgtgtgaaaccctatgaatgtaatcaatgtggaaaggttctcagccataaacaaggactcattgaccatcagagagttcatactggggagaaaccatatgaatgtaatgaatgtgggatagcctttagccaaaagtcacaccttgttgtacatcagagaactcacaccggagaaaaaccatatgaatgtattcagtgtggcaaagcccatggtcataaacatgcactcactgaccatctaagaattcatactggagaaaagccctatgaatgtgctgaatgtgggaaaaccttcagacacagctcaaaccttattcaacatgtgagatctcacacaggtgagaagccatatgaatgtaaggaatgtgggaagtcttttaggtataactcatctcttaccgaacatgtgagaacacatacaggtgaaataccatatgaatgcaatgaatgtggaaaagcctttaagtatagctcatcccttactaaacacatgagaattcatacaggtgagaaaccctttgaatgtaatgaatgtgggaaagctttcagcaagaagtcacacctcattatacatcaaagaactcatactaaggagaaaccttataaatgtaatgagtgtggaaaagcctttggacatagctcatctcttacttaccatatgagaactcatacaggtgaaagtccctttgaatgtaatcaatgtgggaaaggctttaaacaaattgaaggccttactcaacatcagagagttcatactggagagaaaccgtatgagtgtaatgaatgtgggaaagcctttagccaaaagtctcacctcattgtacatcagagaactcatactggggagaaaccttatgaatgtaacgaatgtgaaaaagcctttaatgcaaaatcacagcttgttatacatcagcgatcccacactggagaaaaaccctatgaatgtaatgaatgtgggaaaactttcaaacaaaatgcatccctaaccaaacatgtgaaaactcattcagaagataaatctcatgagtgaagttaatgtgggaaatttgttaactaaattt

SEQ ID NO: 35156 - DNA, 2451 bp, Homo sapiens
  source 1..2451: mol_type = unassigned DNA
gtgcgctattaccgaagggcgccgccatcgcggctgccggacccgctaaggccgccctccgggtagccgccatgtcggtctccagcggcgtccagattctgacaaagccagagaccgtggaccggaggagaagtgcggaaacgaccaaagaggccgggcgaccactggagatggctgtgtccgagcccgaggccagcgccgcgaaggaatggaagcaactggatcctgctcagagcaacctgtataatgatgtgatgctggagaactactgcaaccaagcctcaatggggtgtcaagctcccaaaccagacatgatctccaagttggaaaaaggagaagcaccatggttggggaaggggaaaagacccagtcaaggttgtccaagtaaaatagcaagacccaagcaaaaagaaactgatggaaaagtccagaaagatgatgaccagcttgaaaatatccagaaatctcaaaacaaactcctcagggaagttgcagtcaagaagaaaactcaagctaagaagaatggcagtgactgtggttcactggggaaaaaaaataatttgcataaaaaacatgttccttcaaagaaaaggcttcttaaatttgagtcatgtggaaaaattttgaaacagaatttagatttacctgatcactcaagaaactgtgtaaaaaggaaatctgatgcagctaaagaacacaagaagtcattcaaccatagcttatctgatacaaggaaaggcaaaaagcaaactggaaagaaacatgagaaattatccagccatagctcatctgataagtgtaacaaaactggcaaaaaacatgacaaattatgctgtcatagttcatcccatattaaacaggacaaaattcaaactggagagaaacatgagaaatcacccagccttagctcatctactaagcatgaaaaacctcaagcttgtgtgaaaccctatgaatgtaatcaatgtggaaaggttctcagccataaacaaggactcattgaccatcagagagttcatactggggagaaaccatatgaatgtaatgaatgtgggatagcctttagccaaaagtcacaccttgttgtacatcagagaactcacaccggagaaaaaccatatgaatgtattcagtgtggcaaagcccatggtcataaacatgcactcactgaccatctaagaattcatactggagaaaagccctatgaatgtgctgaatgtgggaaaaccttcagacacagctcaaaccttattcaacatgtgagatctcacacaggtgagaagccatatgaatgtaaggaatgtgggaagtcttttaggtataactcatctcttaccgaacatgtgagaacacatacaggtgaaataccatatgaatgcaatgaatgtggaaaagcctttaagtatagctcatcccttactaaacacatgagaattcatacaggtgagaaaccctttgaatgtaatgaatgtgggaaagctttcagcaagaagtcacacctcattatacatcaaagaactcatactaaggagaaaccttataaatgtaatgagtgtggaaaagcctttggacatagctcatctcttacttaccatatgagaactcatacaggtgaaagtccctttgaatgtaatcaatgtgggaaaggctttaaacaaattgaaggccttactcaacatcagagagttcatactggagagaaaccgtatgagtgtaatgaatgtgggaaagcctttagccaaaagtctcacctcattgtacatcagagaactcatactggggagaaaccttatgaatgtaacgaatgtgaaaaagcctttaatgcaaaatcacagcttgttatacatcagcgatcccacactggagaaaaaccctatgaatgtaatgaatgtgggaaaactttcaaacaaaatgcatccctaaccaaacatgtgaaaactcattcagaagataaatctcatgagtgaagttaatgtgggaaatttgttaactaaatttaaggttttgttgaaccttggaaatatgctgattttaaagagtgttagaaagcctttagcaagatgtcacaccttgttgtacatgagaaactttgaaaatggatcttcatatagaatcagtggatggaaacaagggtttaaacttgatacaaaaccttttataaaaaatattgttttaactactcaattattataaatgatctacatgttcagattgaaattgaaagctttaaaaattgtgaattatttgaatattcaaagcaatggagaaacaagttatatatgctgacagttcctgtgtttcttcttgttttgtacttaagcaccatatattagagttgaatttgcatatctgtttattgccttatgtaaatgagtgtggccatctgtataagcctctttgacattttcacccagctctttcttaatgtctgtgttggcttctgcatcagca

SEQ ID NO: 35157 - DNA, 2813 bp, Homo sapiens
  source 1..2813: mol_type = unassigned DNA
gactcaccctgggccgggggtgaggcttggactgtttctttttccaaaagaggagctcaaaagagaaagttcatctagaaatctcaaagccatgtctcaggatgaactagagtatgcccttacagggatcagtgtcattcaaggatgtgactgtggacttcacccaggaggagtggcagcaactagaccctgctcagaaggcgctttacagggatgtgatgttggaaaactattgccacttcgtatctgtggggtttcacatggctaagcctgatatgatccgcaagttggaacaaggagaagagctatggacacagagaatttttccaagttacagctacctagaagaagatgggaaaactgaagatgtcttagtgaagttcaaagaataccaagacaggcattctagacccctcatattcatcaaccacaaaaaactaattaaggagagaagtaatatttatggtaaaacatttactctaggcaagaaccgtatttcaaaaacaatactatgtgaatataaacctgatggaaaagttttgaaaaatatttcagaactagtcattagaaatataagccccataaaagagaagtttggtgacagtactggatgggagaaatcactcctcaataccaagcatgagaaaattcatcctgcagtgaatctccataaacaaacagaaagagttctcagtggtaaacaggagcttattcagcatcagaaggttcaagctccagagcaaccatttgaccataatgaatgtgaaaaatccttcctgatgaaaggaatgctatttacacatactagagctcacagaggagaaagaacctttgaatacaataaagatggaattgccttcatagaaaagtcaagcctcagtgtccatccaagtaatcttatggaaaagaagccctctgcctacaacaaatatgggaaattcctctgcagaaagcctgtttttattatgcctcagagacctcaaacagaagagaaaccctttcactgtccttactgtgggaataactttagaaggaagtcatacctcattgaacatcagcgaattcacacaggtgaaaaaccttatgtttgcaatcaatgtggaaaggccttccgtcagaagacagccctcacccttcatgagaaaacacatatagaggggaaaccctttatttgtatcgattgtgggaagtccttccgccagaaggccaccctcactagacatcacaaaacacatacgggggagaaagcctatgaatgtcctcagtgtggaagtgcctttaggaagaagtcatacctcattgatcaccagagaactcacacaggagagaaaccgtatcagtgtaatgagtgtgggaaggcatttatccagaagacaaccctcactgttcatcagagaactcacacaggagagaaaccctatatttgcaatgaatgtgggaagtccttctgccaaaagacaaccctcactctccaccagagaattcacacgggggaaaaaccctatatttgtaatgaatgtgggaagtccttccgccagaaggcaatcctcactgttcatcacagaatacatacaggagaaaaatccaatgggtgtcctcagtgtgggaaagccttcagtaggaaatcaaacctcattcgccatcagaaaactcacacaggcgagaaaccatatgaatgtaaacagtgtgggaagttcttcagttgtaagtcaaacctcattgtccatcagaaaactcacaaggtagaaaccacgggaattcagtaagtaatgtggctttttttgtaaaaaaatgttaagtcatagtaaaccctgtagatgatgttgcttgcaagcgtaatatccaacagtttaaggtactataccacatggtaacctactgtttgccagcctgtaaaacacacacacacacacacacacacacacaaatattattagacaaattagatgacaaaaatcattaagaagtccaaactttttttttattactagcttcagcagacaaaaacttcctctgtcaaggtgttataaacatttaaaatcacattttccatttccatacatatctttttgttcatcagtaataactagttggccaactgactgtggtccatggactacacagtgagtagaggttctttaaaagaaggaggtatgaactgtatttctcattgcaaatacaaaataaaaattagttgttacctcctcacagttgaccatgattctgacttctaacattacaaattagtttttactattataaacctttctataaattggattatatatcatgtattctttcatatacagcttattaccttcatcatgtccgtgagtctaatcattagtacgtgtggcagaagtttatttatttttatccagtatagaattcaattatatgattatatcacaatttatccattctgctgttgatggacttttacattgtttacagcttagggtcataataaatcatgcttctgagaacatacttgtcttggtgtacatacatgtatttctcttgtgtatatacttaggagtggaatcgctgggtcttagagcatgtgtgtattcagtcagatactggcagacaattcagaactttcaccacatgagataattgacactgaagggaaacagctataaattttatcaatatggtgctggttcaaaccagagaattcatgctgcagggaaactcaatcaatgttattgtgaaaactgggaatgtgaatgtaatatatgtagaaaaacatttagccacagcccaaatcttccaggcaaatgtaataaacgtgacattgccgttagcca

SEQ ID NO: 35158 - DNA, 2742 bp, Homo sapiens
  source 1..2742: mol_type = unassigned DNA
ggggtgaggcttggactgtttctttttccaaaagaggagctcaaaagagaaagttcatctagaaatctcaaagccatgtctcagggatcagtgtcattcaaggatgtgactgtggacttcacccaggaggagtggcagcaactagaccctgctcagaaggcgctttacagggatgtgatgttggaaaactattgccacttcgtatctgtggggtttcacatggctaagcctgatatgatccgcaagttggaacaaggagaagagctatggacacagagaatttttccaagttacagctacctagaagaagatgggaaaactgaagatgtcttagtgaagttcaaagaataccaagacaggcattctagacccctcatattcatcaaccacaaaaaactaattaaggagagaagtaatatttatggtaaaacatttactctaggcaagaaccgtatttcaaaaacaatactatgtgaatataaacctgatggaaaagttttgaaaaatatttcagaactagtcattagaaatataagccccataaaagagaagtttggtgacagtactggatgggagaaatcactcctcaataccaagcatgagaaaattcatcctgcagtgaatctccataaacaaacagaaagagttctcagtggtaaacaggagcttattcagcatcagaaggttcaagctccagagcaaccatttgaccataatgaatgtgaaaaatccttcctgatgaaaggaatgctatttacacatactagagctcacagaggagaaagaacctttgaatacaataaagatggaattgccttcatagaaaagtcaagcctcagtgtccatccaagtaatcttatggaaaagaagccctctgcctacaacaaatatgggaaattcctctgcagaaagcctgtttttattatgcctcagagacctcaaacagaagagaaaccctttcactgtccttactgtgggaataactttagaaggaagtcatacctcattgaacatcagcgaattcacacaggtgaaaaaccttatgtttgcaatcaatgtggaaaggccttccgtcagaagacagccctcacccttcatgagaaaacacatatagaggggaaaccctttatttgtatcgattgtgggaagtccttccgccagaaggccaccctcactagacatcacaaaacacatacgggggagaaagcctatgaatgtcctcagtgtggaagtgcctttaggaagaagtcatacctcattgatcaccagagaactcacacaggagagaaaccgtatcagtgtaatgagtgtgggaaggcatttatccagaagacaaccctcactgttcatcagagaactcacacaggagagaaaccctatatttgcaatgaatgtgggaagtccttctgccaaaagacaaccctcactctccaccagagaattcacacgggggaaaaaccctatatttgtaatgaatgtgggaagtccttccgccagaaggcaatcctcactgttcatcacagaatacatacaggagaaaaatccaatgggtgtcctcagtgtgggaaagccttcagtaggaaatcaaacctcattcgccatcagaaaactcacacaggcgagaaaccatatgaatgtaaacagtgtgggaagttcttcagttgtaagtcaaacctcattgtccatcagaaaactcacaaggtagaaaccacgggaattcagtaagtaatgtggctttttttgtaaaaaaatgttaagtcatagtaaaccctgtagatgatgttgcttgcaagcgtaatatccaacagtttaaggtactataccacatggtaacctactgtttgccagcctgtaaaacacacacacacacacacacacacacacaaatattattagacaaattagatgacaaaaatcattaagaagtccaaactttttttttattactagcttcagcagacaaaaacttcctctgtcaaggtgttataaacatttaaaatcacattttccatttccatacatatctttttgttcatcagtaataactagttggccaactgactgtggtccatggactacacagtgagtagaggttctttaaaagaaggaggtatgaactgtatttctcattgcaaatacaaaataaaaattagttgttacctcctcacagttgaccatgattctgacttctaacattacaaattagtttttactattataaacctttctataaattggattatatatcatgtattctttcatatacagcttattaccttcatcatgtccgtgagtctaatcattagtacgtgtggcagaagtttatttatttttatccagtatagaattcaattatatgattatatcacaatttatccattctgctgttgatggacttttacattgtttacagcttagggtcataataaatcatgcttctgagaacatacttgtcttggtgtacatacatgtatttctcttgtgtatatacttaggagtggaatcgctgggtcttagagcatgtgtgtattcagtcagatactggcagacaattcagaactttcaccacatgagataattgacactgaagggaaacagctataaattttatcaatatggtgctggttcaaaccagagaattcatgctgcagggaaactcaatcaatgttattgtgaaaactgggaatgtgaatgtaatatatgtagaaaaacatttagccacagcccaaatcttccaggcaa

SEQ ID NO: 35159 - DNA, 3069 bp, Homo sapiens
  source 1..3069: mol_type = unassigned DNA
gcaaggggagggcagcaaggagggggggccacccactacctcgcgcccccgccctgcgggtgtctcgcgcgcgttccgtgcgtgtgagtgtgtgggtctgtctcgctccagaagtgcgtgcccgcgcgctgcgccttgcgctttttcccctccctcgccccttcctggtcctcccaccctcctcggctccctcctttcccagcaaacgccgcccctcccgcgccctggctcaggctctggcgccgccgcagccgtcgccgcccgaaagttcaggagccctggaaaggagaaggaataagacggcaggaggaagagagagagagggtagaatggaagaatctcacttcaattctaacccgtacttctggccttctatccccacagtctcaggtcagatcgagaacacaatgttcatcaacaagatgaaggatcagctgttgccagagaagggctgtggtctggccccacctcactaccccaccttgctgacagtgcctgcctcagtgtccctgccctcaggcatcagtatggacacagagtccaagtcagaccagctgaccccacacagccaagcgtccgttacccagaatatcacggtggtccctgtgccgtctacaggactgatgactgctggtccgggtttggtaatcacgtccccctcaggctctcttgtgaccacagcatcatcagctcagaccttccccatttcggctcccatgattgtctcagctcttccccctggctcacaagccctgcaggttgtccctgacctctccaagaaggtagcatcgaccctaaccgaggaaggaggcggaggtggtggtggaggtggcagtgtggctcctaagccaccccggggccggaagaagaagcggatgctggaatcagggctgcccgagatgaatgacccttatgtcctctcccctgaggatgatgatgaccatcagaaagacggcaagacctacaggtgccggatgtgctcactgacattctactccaagtcggagatgcagatccactccaagtcacacaccgagaccaagccccacaagtgcccacattgctccaagaccttcgccaacagctcctacctggcccagcacatccgtatacactcaggggctaagccctacagttgtaacttctgtgagaaatccttccgccagctctcccaccttcagcagcacacccgaatccacactggtgatagaccatacaaatgtgcacacccaggctgtgagaaagccttcacacaactctccaatctgcagtcccacagacggcaacacaacaaagataaacccttcaagtgccacaactgtcatcgggcgtacacggatgcagcctcactagaggtgcacctgtctacgcacacagtgaagcatgccaaggtgtacacctgcactatctgcagtcgggcatacacatcagaaacataccttatgaaacatatgcgcaaacacaacccgcctgatcttcagcaacaggtgcaggcagcagcagcagcggcagcagtggcccaggcccaggctcaagctcaagcccaggctcaggctcaggctcaagcccaggcccaggcccaggcctcccaggcatcacagcagcagcagcagcagcagcagcagcagcagcagcagcagcaacagccaccaccacacttccagtctcctggggcagccccccagggtgggggtggtggggacagcaatcccaaccctccaccccagtgttcctttgacctgaccccgtataagacggcggagcatcataaggacatctgcctcactgtcaccaccagcaccatccaggtggagcacctggccagctcttagagatccgtgctgccacccactgggaagaggaagaagtagtcctggtgtcttctttctccaactcttggtgggaaaagtccttttcttccttgacaggccttggctccatctccttgggcctctgtcacggctttccttcacaggataccatcctttttctgaactcttcttcaaaaggaacatcagccctcctgattgcaaaggaatactgagctgatggtgtcatccagcagcctcccctcccaagcaaagcttctaaaactgggggtcggtgctcaagggaaggatttgctatgacctcatagaaccttgtccagtgtggccacttaccctatccttaccctccttatcctcaaagtttgggctgatgtaagactagaggctggccctcccagataacagagaaaagggagccccaaatgcaaccagcctcttgttctattcttgcctgcaaaagaacagaggtttctcaaatgcctcagtccctgagagccatttcttcccctacatcgtctcactttgcttcctattgactgctggtagaaggagatttggggtaggggctagacctccttttatttgaagggggcaagggctgagatgtggtccccaaggggccagaaattcccaagttggtcacaggtggcttagaagtgtgtgttatggttttacggatttccttgaagcctctctccttctctgcctacaaagaccctatactctcagtctccccaacccacccccaaggagctgtgggaggctttgtgttatctgtgaaactccaaaacaggggtgttgcggagaagggagagttcaaggcaaacgcaaggactggacttagctccctaggtgccacagtcagatgccggacacggatttatatataaatatatatatataaatatattatactcactcatcacggccatctttgttgtaaccatttctgtgtttataaatgcattatctctgagaattttcatatttgatgttttgtttatttttgtcctttttttccctctctccacccctgtcctctagccacagcatttttctttttgtcttttttttttttttttaaatcatggcagatttcagaggaaaggaaattaaaaaaaaaatcaggaaaccagttgttataaagtaatttaaaaatgaagaaaaaaagaaaaaaacttatgtacaaaccaaggggtgtttttagaacattgtatagaaataaattcatgtaaaagga

SEQ ID NO: 35160 - DNA, 2978 bp, Homo sapiens
  source 1..2978: mol_type = unassigned DNA
cgcgttccgtgcgtgtgagtgtgtgggtctgtctcgctccagaagtgcgtgcccgcgcgctgcgccttgcgctttttcccctccctcgccccttcctggtcctcccaccctcctcggctccctcctttcccagcaaacgccgcccctcccgcgccctggctcaggctctggcgccgccgcagccgtcgccgcccgaaagttcaggagccctggaaaggagaaggaataagacggcaggaggaagagagagagagggtagaatggaagaatctcacttcaattctaacccgtacttctggccttctatccccacagtctcaggtcagatcgagaacacaatgttcatcaacaagatgaaggatcagctgttgccagagaagggctgtggtctggccccacctcactaccccaccttgctgacagtgcctgcctcagtgtccctgccctcaggcatcagtatggacacagagtccaagtcagaccagctgaccccacacagccaagcgtccgttacccagaatatcacggtggtccctgtgccgtctacaggactgatgactgctggagtctcctgttctcagaggtggagaagagaagggagtcaatcaaggggtccgggtttggtaatcacgtccccctcaggctctcttgtgaccacagcatcatcagctcagaccttccccatttcggctcccatgattgtctcagctcttccccctggctcacaagccctgcaggttgtccctgacctctccaagaaggtagcatcgaccctaaccgaggaaggaggcggaggtggtggtggaggtggcagtgtggctcctaagccaccccggggccggaagaagaagcggatgctggaatcagggctgcccgagatgaatgacccttatgtcctctcccctgaggatgatgatgaccatcagaaagacggcaagacctacaggtgccggatgtgctcactgacattctactccaagtcggagatgcagatccactccaagtcacacaccgagaccaagccccacaagtgcccacattgctccaagaccttcgccaacagctcctacctggcccagcacatccgtatacactcaggggctaagccctacagttgtaacttctgtgagaaatccttccgccagctctcccaccttcagcagcacacccggatccactccaagatgcacacggagaccatcaagccccacaagtgcccgcactgctccaagaccttcgccaacacctcctacctggcccagcacctccgtatccactcgggggccaagccctacaactgttcctactgccagaaggccttccgccagctctcccacctccagcagcacacacgaatccacactggtgatagaccatacaaatgtgcacacccaggctgtgagaaagccttcacacaactctccaatctgcagtcccacagacggcaacacaacaaagataaacccttcaagtgccacaactgtcatcgggcgtacacggatgcagcctcactagaggtgcacctgtctacgcacacagtgaagcatgccaaggtgtacacctgcactatctgcagtcgggcatacacatcagaaacataccttatgaaacatatgcgcaaacacaacccgcctgatcttcagcaacaggtgcaggcagcagcagcagcggcagcagtggcccaggcccaggctcaagctcaagcccaggctcaggctcaggctcaagcccaggcccaggcccaggcctcccaggcatcacagcagcagcagcagcagcagcagcagcagcagcagcagcagcaacagccaccaccacacttccagtctcctggggcagccccccagggtgggggtggtggggacagcaatcccaaccctccaccccagtgttcctttgacctgaccccgtataagacggcggagcatcataaggacatctgcctcactgtcaccaccagcaccatccaggtggagcacctggccagctcttagagatccgtgctgccacccactgggaagaggaagaagtagtcctggtgtcttctttctccaactcttggtgggaaaagtccttttcttccttgacaggccttggctccatctccttgggcctctgtcacggctttccttcacaggataccatcctttttctgaactcttcttcaaaaggaacatcagccctcctgattgcaaaggaatactgagctgatggtgtcatccagcagcctcccctcccaagcaaagcttctaaaactgggggtcggtgctcaagggaaggatttgctatgacctcatagaaccttgtccagtgtggccacttaccctatccttaccctccttatcctcaaagtttgggctgatgtaagactagaggctggccctcccagataacagagaaaagggagccccaaatgcaaccagcctcttgttctattcttgcctgcaaaagaacagaggtttctcaaatgcctcagtccctgagagccatttcttcccctacatcgtctcactttgcttcctattgactgctggtagaaggagatttggggtaggggctagacctccttttatttgaagggggcaagggctgagatgtggtccccaaggggccagaaattcccaagttggtcacaggtggcttagaagtgtgtgttatggttttacggatttccttgaagcctctctccttctctgcctacaaagaccctatactctcagtctccccaacccacccccaaggagctgtgggaggctttgtgttatctgtgaaactccaaaacaggggtgttgcggagaagggagagttcaaggcaaacgcaaggactggacttagctccctaggtgccacagtcagatgccggacacggatttatatataaatatatatatataaatatattatactcactcatcacggccatctttgttgtaaccatttctgtgtttataaatgcattatctctgagaattttcata

SEQ ID NO: 35161 - DNA, 3286 bp, Homo sapiens
  source 1..3286: mol_type = unassigned DNA
gaggaagtggctgggcctgaactggcactgtgcctgccacaaggtcttgtgcatcccccagccctcagctttgccttctgaagccactcctcaggggcacagaccctcctcctcctccatctctaatgttctctgacccctggttacctgtggcctgggaacgaacaaggaccagtctctgagcctaggagtgaaacccaaacgctggtgatagaattcgtcttagtttctgggaattggatttatttctcttgtatccacgtagagggtagcactagactgctgttattatatccacccgtctttggattgctggctggggggtctgcctgccttccagactgactgctgacaaataattcctgaggttctccacagttctctggtggctgcaccctgcctggcccctgtaacctagacaatttgtttacagaaagttcaggagccctggaaaggagaaggaataagacggcaggaggaagagagagagagggtagaatggaagaatctcacttcaattctaacccgtacttctggccttctatccccacagtctcaggtcagatcgagaacacaatgttcatcaacaagatgaaggatcagctgttgccagagaagggctgtggtctggccccacctcactaccccaccttgctgacagtgcctgcctcagtgtccctgccctcaggcatcagtatggacacagagtccaagtcagaccagctgaccccacacagccaagcgtccgttacccagaatatcacggtggtccctgtgccgtctacaggactgatgactgctggagtctcctgttctcagaggtggagaagagaagggagtcaatcaaggggtccgggtttggtaatcacgtccccctcaggctctcttgtgaccacagcatcatcagctcagaccttccccatttcggctcccatgattgtctcagctcttccccctggctcacaagccctgcaggttgtccctgacctctccaagaaggtagcatcgaccctaaccgaggaaggaggcggaggtggtggtggaggtggcagtgtggctcctaagccaccccggggccggaagaagaagcggatgctggaatcagggctgcccgagatgaatgacccttatgtcctctcccctgaggatgatgatgaccatcagaaagacggcaagacctacaggtgccggatgtgctcactgacattctactccaagtcggagatgcagatccactccaagtcacacaccgagaccaagccccacaagtgcccacattgctccaagaccttcgccaacagctcctacctggcccagcacatccgtatacactcaggggctaagccctacagttgtaacttctgtgagaaatccttccgccagctctcccaccttcagcagcacacccgaatccacactggtgatagaccatacaaatgtgcacacccaggctgtgagaaagccttcacacaactctccaatctgcagtcccacagacggcaacacaacaaagataaacccttcaagtgccacaactgtcatcgggcgtacacggatgcagcctcactagaggtgcacctgtctacgcacacagtgaagcatgccaaggtgtacacctgcactatctgcagtcgggcatacacatcagaaacataccttatgaaacatatgcgcaaacacaacccgcctgatcttcagcaacaggtgcaggcagcagcagcagcggcagcagtggcccaggcccaggctcaagctcaagcccaggctcaggctcaggctcaagcccaggcccaggcccaggcctcccaggcatcacagcagcagcagcagcagcagcagcagcagcagcagcagcagcaacagccaccaccacacttccagtctcctggggcagccccccagggtgggggtggtggggacagcaatcccaaccctccaccccagtgttcctttgacctgaccccgtataagacggcggagcatcataaggacatctgcctcactgtcaccaccagcaccatccaggtggagcacctggccagctcttagagatccgtgctgccacccactgggaagaggaagaagtagtcctggtgtcttctttctccaactcttggtgggaaaagtccttttcttccttgacaggccttggctccatctccttgggcctctgtcacggctttccttcacaggataccatcctttttctgaactcttcttcaaaaggaacatcagccctcctgattgcaaaggaatactgagctgatggtgtcatccagcagcctcccctcccaagcaaagcttctaaaactgggggtcggtgctcaagggaaggatttgctatgacctcatagaaccttgtccagtgtggccacttaccctatccttaccctccttatcctcaaagtttgggctgatgtaagactagaggctggccctcccagataacagagaaaagggagccccaaatgcaaccagcctcttgttctattcttgcctgcaaaagaacagaggtttctcaaatgcctcagtccctgagagccatttcttcccctacatcgtctcactttgcttcctattgactgctggtagaaggagatttggggtaggggctagacctccttttatttgaagggggcaagggctgagatgtggtccccaaggggccagaaattcccaagttggtcacaggtggcttagaagtgtgtgttatggttttacggatttccttgaagcctctctccttctctgcctacaaagaccctatactctcagtctccccaacccacccccaaggagctgtgggaggctttgtgttatctgtgaaactccaaaacaggggtgttgcggagaagggagagttcaaggcaaacgcaaggactggacttagctccctaggtgccacagtcagatgccggacacggatttatatataaatatatatatataaatatattatactcactcatcacggccatctttgttgtaaccatttctgtgtttataaatgcattatctctgagaattttcatatttgatgttttgtttatttttgtcctttttttccctctctccacccctgtcctctagccacagcatttttctttttgtcttttttttttttttttaaatcatggcagatttcagaggaaaggaaattaaaaaaaaaatcaggaaaccagttgttataaagtaatttaaaaatgaagaaaaaaagaaaaaaacttatgtacaaaccaaggggtgtttttagaacattgtatagaaataaattcatgtaaaagga

SEQ ID NO: 35162 - DNA, 2509 bp, Homo sapiens
  source 1..2509: mol_type = unassigned DNA
gctatttccctccctccccccttttcgtttccggcgctcccgccttctctccgcagagctcttctctgagcctgttggggggagggaggggggcgtggaggaactggggttcgcgggagcacgagctgcagcaccacttccgggtgagtgcaaggggagggcagcaaggagggggggccacccactacctcgcgcccccgccctgcgggtgtctcgcgcgcgttccgtgcgtgtgagtgtgtgggtctgtctcgctccagaagtgcgtgcccgcgcgctgcgccttgcgctttttcccctccctcgccccttcctggtcctcccaccctcctcggctccctcctttcccagcaaacgccgcccctcccgcgccctggctcaggctctggcgccgccgcagccgtcgccgcccgaaagttcaggagccctggaaaggagaaggaataagacggcaggaggaagagagagagagggtagaatggaagaatctcacttcaattctaacccgtacttctggccttctatccccacagtctcaggtcagatcgagaacacaatgttcatcaacaagatgaaggatcagctgttgccagagaagggctgtggtctggccccacctcactaccccaccttgctgacagtgcctgcctcagtgtccctgccctcaggcatcagtatggacacagagtccaagtcagaccagctgaccccacacagccaagcgtccgttacccagaatatcacggtggtccctgtgccgtctacaggactgatgactgctggagtctcctgttctcagaggtggagaagagaagggagtcaatcaaggggtccgggtttggtaatcacgtccccctcaggctctcttgtgaccacagcatcatcagctcagaccttccccatttcggctcccatgattgtctcagctcttccccctggctcacaagccctgcaggttgtccctgacctctccaagaaggtagcatcgaccctaaccgaggaaggaggcggaggtggtggtggaggtggcagtgtggctcctaagccaccccggggccggaagaagaagcggatgctggaatcagggctgcccgagatgaatgacccttatgtcctctcccctgaggatgatgatgaccatcagaaagacggcaagacctacaggtgccggatgtgctcactgacattctactccaagtcggagatgcagatccactccaagtcacacaccgagaccaagccccacaagtgcccacattgctccaagaccttcgccaacagctcctacctggcccagcacatccgtatacactcaggggctaagccctacagttgtaacttctgtgagaaatccttccgccagctctcccaccttcagcagcacacccgaatccacactggtgatagaccatacaaatgtgcacacccaggctgtgagaaagccttcacacaactctccaatctgcagtcccacagacggcaacacaacaaagataaacccttcaagtgccacaactgtcatcgggcgtacacggatgcagcctcactagaggtgcacctgtctacgcacacagtgaagcatgccaaggtgtacacctgcactatctgcagtcgggcatacacatcagaaacataccttatgaaacatatgcgcaaacacaacccgcctgatcttcagcaacaggtgcaggcagcagcagcagcggcagcagtggcccaggcccaggctcaagctcaagcccaggctcaggctcaggctcaagcccaggcccaggcccaggcctcccaggcatcacagcagcagcagcagcagcagcagcagcagcagcagcagcagcaacagccaccaccacacttccagtctcctggggcagccccccagggtgggggtggtggggacagcaatcccaaccctccaccccagtgttcctttgacctgaccccgtataagacggcggagcatcataaggacatctgcctcactgtcaccaccagcaccatccaggtggagcacctggccagctcttagagatccgtgctgccacccactgggaagaggaagaagtagtcctggtgtcttctttctccaactcttggtgggaaaagtccttttcttccttgacaggccttggctccatctccttgggcctctgtcacggctttccttcacaggataccatcctttttctgaactcttcttcaaaaggaacatcagccctcctgattgcaaaggaatactgagctgatggtgtcatccagcagcctcccctcccaagcaaagcttctaaaactgggggtcggtgctcaagggaaggatttgctatgacctcatagaaccttgtccagtgtggccacttaccctatccttaccctccttatcctcaaagtttgggctgatgtaagactagaggctggccctcccagataacagagaaaagggagccccaaatgcaaccagcctcttgttctattcttgcctgcaaaagaacagaggtttctcaaatgcctc

SEQ ID NO: 35163 - DNA, 3008 bp, Homo sapiens
  source 1..3008: mol_type = unassigned DNA
gctatttccctccctccccccttttcgtttccggcgctcccgccttctctccgcagagctcttctctgagcctgttggggggagggaggggggcgtggaggaactggggttcgcgggagcacgagctgcagcaccacttccggaaagttcaggagccctggaaaggagaaggaataagacggcaggaggaagagagagagagggtagaatggaagaatctcacttcaattctaacccgtacttctggccttctatccccacagtctcaggtcagatcgagaacacaatgttcatcaacaagatgaaggatcagctgttgccagagaagggctgtggtctggccccacctcactaccccaccttgctgacagtgcctgcctcagtgtccctgccctcaggcatcagtatggacacagagtccaagtcagaccagctgaccccacacagccaagcgtccgttacccagaatatcacggtggtccctgtgccgtctacaggactgatgactgctggagtctcctgttctcagaggtggagaagagaagggagtcaatcaaggggtccgggtttggtaatcacgtccccctcaggctctcttgtgaccacagcatcatcagctcagaccttccccatttcggctcccatgattgtctcagctcttccccctggctcacaagccctgcaggttgtccctgacctctccaagaaggtagcatcgaccctaaccgaggaaggaggcggaggtggtggtggaggtggcagtgtggctcctaagccaccccggggccggaagaagaagcggatgctggaatcagggctgcccgagatgaatgacccttatgtcctctcccctgaggatgatgatgaccatcagaaagacggcaagacctacaggtgccggatgtgctcactgacattctactccaagtcggagatgcagatccactccaagtcacacaccgagaccaagccccacaagtgcccacattgctccaagaccttcgccaacagctcctacctggcccagcacatccgtatacactcaggggctaagccctacagttgtaacttctgtgagaaatccttccgccagctctcccaccttcagcagcacacccggatccactccaagatgcacacggagaccatcaagccccacaagtgcccgcactgctccaagaccttcgccaacacctcctacctggcccagcacctccgtatccactcgggggccaagccctacaactgttcctactgccagaaggccttccgccagctctcccacctccagcagcacacacgaatccacactggtgatagaccatacaaatgtgcacacccaggctgtgagaaagccttcacacaactctccaatctgcagtcccacagacggcaacacaacaaagataaacccttcaagtgccacaactgtcatcgggcgtacacggatgcagcctcactagaggtgcacctgtctacgcacacagtgaagcatgccaaggtgtacacctgcactatctgcagtcgggcatacacatcagaaacataccttatgaaacatatgcgcaaacacaacccgcctgatcttcagcaacaggtgcaggcagcagcagcagcggcagcagtggcccaggcccaggctcaagctcaagcccaggctcaggctcaggctcaagcccaggcccaggcccaggcctcccaggcatcacagcagcagcagcagcagcagcagcagcagcagcagcagcagcaacagccaccaccacacttccagtctcctggggcagccccccagggtgggggtggtggggacagcaatcccaaccctccaccccagtgttcctttgacctgaccccgtataagacggcggagcatcataaggacatctgcctcactgtcaccaccagcaccatccaggtggagcacctggccagctcttagagatccgtgctgccacccactgggaagaggaagaagtagtcctggtgtcttctttctccaactcttggtgggaaaagtccttttcttccttgacaggccttggctccatctccttgggcctctgtcacggctttccttcacaggataccatcctttttctgaactcttcttcaaaaggaacatcagccctcctgattgcaaaggaatactgagctgatggtgtcatccagcagcctcccctcccaagcaaagcttctaaaactgggggtcggtgctcaagggaaggatttgctatgacctcatagaaccttgtccagtgtggccacttaccctatccttaccctccttatcctcaaagtttgggctgatgtaagactagaggctggccctcccagataacagagaaaagggagccccaaatgcaaccagcctcttgttctattcttgcctgcaaaagaacagaggtttctcaaatgcctcagtccctgagagccatttcttcccctacatcgtctcactttgcttcctattgactgctggtagaaggagatttggggtaggggctagacctccttttatttgaagggggcaagggctgagatgtggtccccaaggggccagaaattcccaagttggtcacaggtggcttagaagtgtgtgttatggttttacggatttccttgaagcctctctccttctctgcctacaaagaccctatactctcagtctccccaacccacccccaaggagctgtgggaggctttgtgttatctgtgaaactccaaaacaggggtgttgcggagaagggagagttcaaggcaaacgcaaggactggacttagctccctaggtgccacagtcagatgccggacacggatttatatataaatatatatatataaatatattatactcactcatcacggccatctttgttgtaaccatttctgtgtttataaatgcattatctctgagaattttcatatttgatgttttgtttatttttgtcctttttttccctctctccacccctgtcctctagccacagcatttttctttttgtcttt

SEQ ID NO: 35164 - DNA, 1067 bp, Homo sapiens
  source 1..1067: mol_type = unassigned DNA
agttcagctccctggaggggaaggagggacgtcccaaggaagggtctttgagaaaggggtagaatggaagaatctcacttcaattctaacccgtacttctggccttctatccccacagtctcaggtcagatcgagaacacaatgttcatcaacaagatgaaggatcagctgttgccagagaagggctgtggtctggccccacctcactaccccaccttgctgacagtgcctgcctcagtgtccctgccctcaggcatcagtatggacacagagtccaagtcagaccagctgaccccacacagccaagcgtccgttacccagaatatcacggtggtccctgtgccgtctacaggactgatgactgctggagtctcctgttctcagaggtggagaagagaagggagtcaatcaaggggtccgggtttggtaatcacgtccccctcaggctctcttgtgaccacagcatcatcagctcagaccttccccatttcggctcccatgattgtctcagctcttccccctggctcacaagccctgcaggttgtccctgacctctccaagaaggtagcatcgaccctaaccgaggaaggaggcggaggtggtggtggaggtggcagtgtggctcctaagccaccccggggccggaagaagaagcggatgctggaatcagggctgcccgagatgaatgacccttatgtcctctcccctgaggatgatgatgaccatcagaaagacggcaagacctacaggagcgaagggaactgcggcacaggaaatggacagagccttgggctcatggattcagttcccggctccaccacgaatttgctgtgtgaccctgggtgccggatgtgctcactgacattctactccaagtcggagatgcagatccactccaagtcacacaccgagaccaagccccacaagtgcccacattgctccaagaccttcgccaacagctcctacctggcccagcacatccgtatacactcaggggctaagccctacagttgtaacttctgtgagaaatccttccgccagctctcccaccttcagcagcacacccg

SEQ ID NO: 35165 - DNA, 1096 bp, Homo sapiens
  source 1..1096: mol_type = unassigned DNA
tcgcgcgcgttccgtgcgtgtgagtgtgtgggtctgtctcgctccagaagtgcgtgcccgcgcgctgcgccttgcgctttttcccctccctcgccccttcctggtcctcccaccctcctcggctccctcctttcccagcaaacgccgcccctcccgcgccctggctcaggctctggcgccgccgcagccgtcgccgcccgaaagttcaggagccctggaaaggagaaggaataagacggcaggaggaagagagagagagggtagaatggaagaatctcacttcaattctaacccgtacttctggccttctatccccacagtctcaggtcagatcgagaacacaatgttcatcaacaagatgaaggatcagctgttgccagagaagggctgtggtctggccccacctcactaccccaccttgctgacagtgcctgcctcagtgtccctgccctcaggcatcagtatggacacagagtccaagtcagaccagctgaccccacacagccaagcgtccgttacccagaatatcacggtggtccctgtgccgtctacaggactgatgactgctggtccgggtttggtaatcacgtccccctcaggctctcttgtgaccacagcatcatcagctcagaccttccccatttcggctcccatgattgtctcagctcttccccctggctcacaagccctgcaggttgtccctgacctctccaagaaggtagcatcgaccctaaccgaggaaggaggcggaggtggtggtggaggtggcagtgtggctcctaagccaccccggggccggaagaagaagcggatgctggaatcagggctgcccgagatgaatgacccttatgtcctctcccctgaggatgatgatgaccatcagaaagacggcaagacctacaggtgccggatgtgctcactgacattctactccaagtcggagatgcagatccactccaagtcacacaccgagaccaagccccacaagtgcccacattgctccaagaccttcgccaacagctcctacctggcccagcacatccgtatacactcaggggctaagccctacagttgtaacttctgtgagaaatccttc

SEQ ID NO: 35166 - DNA, 2514 bp, Homo sapiens
  source 1..2514: mol_type = unassigned DNA
agctcttctctgagcctgttggggggagggaggggggcgtggaggaactggggttcgcgggagcacgagctgcagcaccacttccggaaagttcaggagccctggaaaggagaaggaataagacggcaggaggaagagagagagagggtagaatggaagaatctcacttcaattctaacccgtacttctggccttctatccccacagtctcaggtcagatcgagaacacaatgttcatcaacaagatgaaggatcagctgttgccagagaagggctgtggtctggccccacctcactaccccaccttgctgacagtgcctgcctcagtgtccctgccctcaggcatcagtatggacacagagtccaagtcagaccagctgaccccacacagccaagcgtccgttacccagaatatcacggtggtccctgtgccgtctacaggactgatgactgctgccctgcaggttgtccctgacctctccaagaaggtagcatcgaccctaaccgaggaaggaggcggaggtggtggtggaggtggcagtgtggctcctaagccaccccggggccggaagaagaagcggatgctggaatcagggctgcccgagatgaatgacccttatgtcctctcccctgaggatgatgatgaccatcagaaagacggcaagacctacaggtgccggatgtgctcactgacattctactccaagtcggagatgcagatccactccaagtcacacaccgagaccaagccccacaagtgcccacattgctccaagaccttcgccaacagctcctacctggcccagcacatccgtatacactcaggggctaagccctacagttgtaacttctgtgagaaatccttccgccagctctcccaccttcagcagcacacccgaatccacactggtgatagaccatacaaatgtgcacacccaggctgtgagaaagccttcacacaactctccaatctgcagtcccacagacggcaacacaacaaagataaacccttcaagtgccacaactgtcatcgggcgtacacggatgcagcctcactagaggtgcacctgtctacgcacacagtgaagcatgccaaggtgtacacctgcactatctgcagtcgggcatacacatcagaaacataccttatgaaacatatgcgcaaacacaacccgcctgatcttcagcaacaggtgcaggcagcagcagcagcggcagcagtggcccaggcccaggctcaagctcaagcccaggctcaggctcaggctcaagcccaggcccaggcccaggcctcccaggcatcacagcagcagcagcagcagcagcagcagcagcagcagcagcagcaacagccaccaccacacttccagtctcctggggcagccccccagggtgggggtggtggggacagcaatcccaaccctccaccccagtgttcctttgacctgaccccgtataagacggcggagcatcataaggacatctgcctcactgtcaccaccagcaccatccaggtggagcacctggccagctcttagagatccgtgctgccacccactgggaagaggaagaagtagtcctggtgtcttctttctccaactcttggtgggaaaagtccttttcttccttgacaggccttggctccatctccttgggcctctgtcacggctttccttcacaggataccatcctttttctgaactcttcttcaaaaggaacatcagccctcctgattgcaaaggaatactgagctgatggtgtcatccagcagcctcccctcccaagcaaagcttctaaaactgggggtcggtgctcaagggaaggatttgctatgacctcatagaaccttgtccagtgtggccacttaccctatccttaccctccttatcctcaaagtttgggctgatgtaagactagaggctggccctcccagataacagagaaaagggagccccaaatgcaaccagcctcttgttctattcttgcctgcaaaagaacagaggtttctcaaatgcctcagtccctgagagccatttcttcccctacatcgtctcactttgcttcctattgactgctggtagaaggagatttggggtaggggctagacctccttttatttgaagggggcaagggctgagatgtggtccccaaggggccagaaattcccaagttggtcacaggtggcttagaagtgtgtgttatggttttacggatttccttgaagcctctctccttctctgcctacaaagaccctatactctcagtctccccaacccacccccaaggagctgtgggaggctttgtgttatctgtgaaactccaaaacaggggtgttgcggagaagggagagttcaaggcaaacgcaaggactggacttagctccctaggtgccacagtcagatgccggacacggatttatatataaatatatatatataaatatattatactcactcatcacggccatctttgttgtaaccatttctgtgtttataaatgcattatctctgagaa

SEQ ID NO: 35167 - DNA, 2331 bp, Homo sapiens
  source 1..2331: mol_type = unassigned DNA
agaacggcccccgggacagagcgacgcggaaccccgggcgcctgggtccccagcatgatcctcggcagcctgagccgggcagggcccctgcctctgctacggcagcccccgatcatgcagcccccactggacctcaagcagatcctgcccttcccactcgagccagcccctacccttggcctcttcagcaactacagcaccatggaccctgtgcagaaggctgtgctctcccacacttttgggggacccttgctcaagaccaagcggcccgtcatttcctgtaatatctgtcaaatccgcttcaattctcagagccaggctgaggcgcactacaaaggtaatcgccacgcccgacgagtcaaaggcattgaggctgccaagaccagaggcagggagcctggcgtccgagaacctggagacccagctcccccaggcagcaccccaacaaatggggatggtgtagcaccccgtccagtttccatggagaatggactggggccagccccaggatccccagagaaacagcctggctccccatcccctcccagcattccggagactggtcagggtgtaaccaagggtgaaggggggactccagccccggcttccttgcctgggggtagcaaggaagaggaggagaaagccaagcggctgctctactgtgctctgtgcaaggtggctgtgaactccctgtcccagcttgaggcacataacaaaggtactaagcacaagacaattctggaggcccgaagtgggctcgggcccatcaaagcttaccctcggctggggcctcccaccccgggggaaccagaggctcctgcccaggaccgaactttccactgtgagatctgcaatgtcaaggtcaactcggaggtccaactgaaacagcacatctccagccggcggcaccgagacggcgtggccgggaagcccaacccactactgagccgtcacaagaagtctaggggcgccggggagctggcgggcacgctgactttctccaaggagctgcccaagtccctggcgggcggcctgctccccagccccctggcggtggctgcagtgatggcagcggcagcaggctcgccgctgtccctgcgcccggctccagccgcacctcttctccagggaccgccgatcactcaccctctgcttcacccggcccccggacccatccgaactgcgcacggacccatcctcttctccccgtactgacctcaaccctgaacccctcccattcaactccccacctccagccgggacccaggcgtccgggctcccagcccgcccctcctcccggcactccctaaatgatctctccttccccccccccaccccgagatacggggttccaggaaaggggaggggtagcgggggaggggggcttcagaagggggggaacaccccagatctcagggaaccccgccccctgcctttccctctcccctagaaaagggggggccgtctcacccccgagcccccttggagacaccccccctcccaaaagccatgtccatccagcccttccccccaaacctagcacaaaacggggttcacaagccatggtcggggtccgggggggacagaaatggattttcttggcaataagcggactctgggactccggctccctaccccaaactgaagcgcttccgtgaacacccccgtcctccgtagggggaggggagcaggcgggatcctgggtccctcataagcactttggttttaccgcctgcaacctcactgtgcccgccccgcaccatgccctagccccaggtctagccgggcccattgcagggggcagcacttgggggcatctccggcacttgggtgggaccaaggagatgccaccatagacctttccctcgccttcttcctccctagtccgggttccattcttttcaccagcacccatcgcccaaggggtaccgaggggggcaaggggtgtccagtccaagcccacccccgcctcgccttccgcaaaactgtgagcaaaaagcaatagaagcctcgcccccgcccttccccttcgcaggattcgccgagtctgtagcctccccgatccaagttcctagacctcatggctgtcccctcccaccagtcacctccactgcacaactcgggcgggggtgtgacacctctcccccacccccgactccgtggtttccgtatcgtcaacccttcagccgccgacccgggaggggtctggcctacactggtcttccccttcccatcaactctttctgcttgacaatgtagcaacccaggccccccacccacggtcctcccctttttcctctccctgacaataaagtctgaatttgttctgcc

SEQ ID NO: 35168 - DNA, 2076 bp, Homo sapiens
  source 1..2076: mol_type = unassigned DNA
agagcgacgcggaaccccgggcgcctgggtccccagcatgatcctcggcagcctgagccgggcagggcccctgcctctgctacggcagcccccgatcatgcagcccccactggacctcaagcagatcctgcccttcccactcgagccagcccctacccttggcctcttcagcaactacagcaccatggaccctgtgcagaaggctgtgctctcccacacttttgggggacccttgctcaagaccaagcggcccgtcatttcctgtaatatctgtcaaatccgcttcaattctcagagccaggctgaggcgcactacaaaggtaatcgccacgcccgacgagtcaaaggcattgaggctgccaagaccagaggcagggagcctggcgtccgagaacctggagacccagctcccccaggcagcaccccaacaaatggggatggtgtagcaccccgtccaggtactaagcacaagacaattctggaggcccgaagtgggctcgggcccatcaaagcttaccctcggctggggcctcccaccccgggggaaccagaggctcctgcccaggaccgaactttccactgtgagatctgcaatgtcaaggtcaactcggaggtccaactgaaacagcacatctccagccggcggcaccgagacggcgtggccgggaagcccaacccactactgagccgtcacaagaagtctaggggcgccggggagctggcgggcacgctgactttctccaaggagctgcccaagtccctggcgggcggcctgctccccagccccctggcggtggctgcagtgatggcagcggcagcaggctcgccgctgtccctgcgcccggctccagccgcacctcttctccagggaccgccgatcactcaccctctgcttcacccggcccccggacccatccgaactgcgcacggacccatcctcttctccccgtactgacctcaaccctgaacccctcccattcaactccccacctccagccgggacccaggcgtccgggctcccagcccgcccctcctcccggcactccctaaatgatctctccttccccccccccaccccgagatacggggttccaggaaaggggaggggtagcgggggaggggggcttcagaagggggggaacaccccagatctcagggaaccccgccccctgcctttccctctcccctagaaaagggggggccgtctcacccccgagcccccttggagacaccccccctcccaaaagccatgtccatccagcccttccccccaaacctagcacaaaacggggttcacaagccatggtcggggtccgggggggacagaaatggattttcttggcaataagcggactctgggactccggctccctaccccaaactgaagcgcttccgtgaacacccccgtcctccgtagggggaggggagcaggcgggatcctgggtccctcataagcactttggttttaccgcctgcaacctcactgtgcccgccccgcaccatgccctagccccaggtctagccgggcccattgcagggggcagcacttgggggcatctccggcacttgggtgggaccaaggagatgccaccatagacctttccctcgccttcttcctccctagtccgggttccattcttttcaccagcacccatcgcccaaggggtaccgaggggggcaaggggtgtccagtccaagcccacccccgcctcgccttccgcaaaactgtgagcaaaaagcaatagaagcctcgcccccgcccttccccttcgcaggattcgccgagtctgtagcctccccgatccaagttcctagacctcatggctgtcccctcccaccagtcacctccactgcacaactcgggcgggggtgtgacacctctcccccacccccgactccgtggtttccgtatcgtcaacccttcagccgccgacccgggaggggtctggcctacactggtcttccccttcccatcaactctttctgcttgacaatgtagcaacccaggccccccacccacggtcctcccctttttcctctccctgacaataaagtctgaatttgttctgccctccg

SEQ ID NO: 35169 - DNA, 2430 bp, Homo sapiens
  source 1..2430: mol_type = unassigned DNA
attgctctggagccagcaggggaagtgtgtacactatgtgcactgagggtgacacttctgagtgtgggggccctggctagggagtgggactggcaggcttgggtggggttcccaagctttaatcttcctaccccacagaatgttttctctgcccttcaggcagcctgagccgggcagggcccctgcctctgctacggcagcccccgatcatgcagcccccactggacctcaagcagatcctgcccttcccactcgagccagcccctacccttggcctcttcagcaactacagcaccatggaccctgtgcagaaggctgtgctctcccacacttttgggggacccttgctcaagaccaagcggcccgtcatttcctgtaatatctgtcaaatccgcttcaattctcagagccaggctgaggcgcactacaaaggtaatcgccacgcccgacgagtcaaaggcattgaggctgccaagaccagaggcagggagcctggcgtccgagaacctggagacccagctcccccaggcagcaccccaacaaatggggatggtgtagcaccccgtccagtttccatggagaatggactggggccagccccaggatccccagagaaacagcctggctccccatcccctcccagcattccggagactggtcagggtgtaaccaagggtgaaggggggactccagccccggcttccttgcctgggggtagcaaggaagaggaggagaaagccaagcggctgctctactgtgctctgtgcaaggtggctgtgaactccctgtcccagcttgaggcacataacaaaggtactaagcacaagacaattctggaggcccgaagtgggctcgggcccatcaaagcttaccctcggctggggcctcccaccccgggggaaccagaggctcctgcccaggaccgaactttccactgtgagatctgcaatgtcaaggtcaactcggaggtccaactgaaacagcacatctccagccggcggcaccgagacggcgtggccgggaagcccaacccactactgagccgtcacaagaagtctaggggcgccggggagctggcgggcacgctgactttctccaaggagctgcccaagtccctggcgggcggcctgctccccagccccctggcggtggctgcagtgatggcagcggcagcaggctcgccgctgtccctgcgcccggctccagccgcacctcttctccagggaccgccgatcactcaccctctgcttcacccggcccccggacccatccgaactgcgcacggacccatcctcttctccccgtactgacctcaaccctgaacccctcccattcaactccccacctccagccgggacccaggcgtccgggctcccagcccgcccctcctcccggcactccctaaatgatctctccttccccccccccaccccgagatacggggttccaggaaaggggaggggtagcgggggaggggggcttcagaagggggggaacaccccagatctcagggaaccccgccccctgcctttccctctcccctagaaaagggggggccgtctcacccccgagcccccttggagacaccccccctcccaaaagccatgtccatccagcccttccccccaaacctagcacaaaacggggttcacaagccatggtcggggtccgggggggacagaaatggattttcttggcaataagcggactctgggactccggctccctaccccaaactgaagcgcttccgtgaacacccccgtcctccgtagggggaggggagcaggcgggatcctgggtccctcataagcactttggttttaccgcctgcaacctcactgtgcccgccccgcaccatgccctagccccaggtctagccgggcccattgcagggggcagcacttgggggcatctccggcacttgggtgggaccaaggagatgccaccatagacctttccctcgccttcttcctccctagtccgggttccattcttttcaccagcacccatcgcccaaggggtaccgaggggggcaaggggtgtccagtccaagcccacccccgcctcgccttccgcaaaactgtgagcaaaaagcaatagaagcctcgcccccgcccttccccttcgcaggattcgccgagtctgtagcctccccgatccaagttcctagacctcatggctgtcccctcccaccagtcacctccactgcacaactcgggcgggggtgtgacacctctcccccacccccgactccgtggtttccgtatcgtcaacccttcagccgccgacccgggaggggtctggcctacactggtcttccccttcccatcaactctttctgcttgacaatgtagcaacccaggccccccacccacggtcctcccctttttcctctccctgacaataaagtctgaatttgttctgccctcc

SEQ ID NO: 35170 - DNA, 775 bp, Homo sapiens
  source 1..775: mol_type = unassigned DNA
cagaactggacctgtagctgagcattcctggcagcctgagccgggcagggcccctgcctctgctacggcagcccccgatcatgcagcccccactggacctcaagcagatcctgcccttcccactcgagccagcccctacccttggcctcttcagcaactacagcaccatggaccctgtgcagaaggctgtgctctcccacacttttgggggacccttgctcaagaccaagcggcccgtcatttcctgtaatatctgtcaaatccgcttcaattctcagagccaggctgaggcgcactacaaaggtaatcgccacgcccgacgagtcaaaggcattgaggctgccaagaccagaggcagggagcctggcgtccgagaacctggagacccagctcccccaggcagcaccccaacaaatggggatggtgtagcaccccgtccagtttccatggagaatggactggggccagccccaggatccccagagaaacagcctggctccccatcccctcccagcattccggagactggtcagggtgtaaccaagggtgaaggggggactccagccccggcttccttgcctgggggtagcaaggaagaggaggagaaagccaagcggctgctctactgtgctctgtgcaaggtggctgtgaactccctgtcccagcttgaggcacataacaaaggtactaagcacaagacaattctggaggcccgaagtgggctcgggcccatcaaagcttaccctcggctggggcctcccaccccgggggaacc

SEQ ID NO: 35171 - DNA, 2494 bp, Homo sapiens
  source 1..2494: mol_type = unassigned DNA
gggcagaaccaagggaaggggacgctgtcaggcccaggcccctggggggccagggccaggccactgcctgggggcagcaggcatcagaaactaaaggatgaatcacccacttgactctcttcttcctggggcgataccaagctttaggatcccctgggggaaagcaaaaccagaagaagagggtggccaggggcttgaggctgggagtcctgctggttcagcaggcagcctgcagaaaaggcagcctgagccgggcagggcccctgcctctgctacggcagcccccgatcatgcagcccccactggacctcaagcagatcctgcccttcccactcgagccagcccctacccttggcctcttcagcaactacagcaccatggaccctgtgcagaaggctgtgctctcccacacttttgggggacccttgctcaagaccaagcggcccgtcatttcctgtaatatctgtcaaatccgcttcaattctcagagccaggctgaggcgcactacaaaggtaatcgccacgcccgacgagtcaaaggcattgaggctgccaagaccagaggcagggagcctggcgtccgagaacctggagacccagctcccccaggcagcaccccaacaaatggggatggtgtagcaccccgtccagtttccatggagaatggactggggccagccccaggatccccagagaaacagcctggctccccatcccctcccagcattccggagactggtcagggtgtaaccaagggtgaaggggggactccagccccggcttccttgcctgggggtagcaaggaagaggaggagaaagccaagcggctgctctactgtgctctgtgcaaggtggctgtgaactccctgtcccagcttgaggcacataacaaaggtactaagcacaagacaattctggaggcccgaagtgggctcgggcccatcaaagcttaccctcggctggggcctcccaccccgggggaaccagaggctcctgcccaggaccgaactttccactgtgagatctgcaatgtcaaggtcaactcggaggtccaactgaaacagcacatctccagccggcggcaccgagacggcgtggccgggaagcccaacccactactgagccgtcacaagaagtctaggggcgccggggagctggcgggcacgctgactttctccaaggagctgcccaagtccctggcgggcggcctgctccccagccccctggcggtggctgcagtgatggcagcggcagcaggctcgccgctgtccctgcgcccggctccagccgcacctcttctccagggaccgccgatcactcaccctctgcttcacccggcccccggacccatccgaactgcgcacggacccatcctcttctccccgtactgacctcaaccctgaacccctcccattcaactccccacctccagccgggacccaggcgtccgggctcccagcccgcccctcctcccggcactccctaaatgatctctccttccccccccccaccccgagatacggggttccaggaaaggggaggggtagcgggggaggggggcttcagaagggggggaacaccccagatctcagggaaccccgccccctgcctttccctctcccctagaaaagggggggccgtctcacccccgagcccccttggagacaccccccctcccaaaagccatgtccatccagcccttccccccaaacctagcacaaaacggggttcacaagccatggtcggggtccgggggggacagaaatggattttcttggcaataagcggactctgggactccggctccctaccccaaactgaagcgcttccgtgaacacccccgtcctccgtagggggaggggagcaggcgggatcctgggtccctcataagcactttggttttaccgcctgcaacctcactgtgcccgccccgcaccatgccctagccccaggtctagccgggcccattgcagggggcagcacttgggggcatctccggcacttgggtgggaccaaggagatgccaccatagacctttccctcgccttcttcctccctagtccgggttccattcttttcaccagcacccatcgcccaaggggtaccgaggggggcaaggggtgtccagtccaagcccacccccgcctcgccttccgcaaaactgtgagcaaaaagcaatagaagcctcgcccccgcccttccccttcgcaggattcgccgagtctgtagcctccccgatccaagttcctagacctcatggctgtcccctcccaccagtcacctccactgcacaactcgggcgggggtgtgacacctctcccccacccccgactccgtggtttccgtatcgtcaacccttcagccgccgacccgggaggggtctggcctacactggtcttccccttcccatcaactctttctgcttgacaatgtagcaacccaggccccccacccacggtcctcccctttttcctctccctgacaataaagtctg

SEQ ID NO: 35172 - DNA, 568 bp, Homo sapiens
  source 1..568: mol_type = unassigned DNA
attgctctggagccagcaggggaagcagcctgagccgggcagggcccctgcctctgctacggcagcccccgatcatgcagcccccactggacctcaagcagatcctgcccttcccactcgagccagcccctacccttggcctcttcagcaactacagcaccatggaccctgtgcagaaggctgtgctctcccacacttttgggggacccttgctcaagaccaagcggcccgtcatttcctgtaatatctgtcaaatccgcttcaattctcagagccaggctgaggcgcactacaaaggtaatcgccacgcccgacgagtcaaaggcattgaggctgccaagaccagaggcagggagcctggcgtccgagaacctggagacccagctcccccaggcagcaccccaacaaatggggatggtgtagcaccccgtccagtttccatggagaatggactggggccagccccaggatccccagagaaacagcctggctccccatcccctcccagcattccggagactggtcagggtgtaaccaagggtgaaggggggactccagccccggcttc

SEQ ID NO: 35173 - DNA, 545 bp, Homo sapiens
  source 1..545: mol_type = unassigned DNA
agaacggcccccgggacagagcgacgcggaaccccgggcgcctgggtccccagcatgatcctcgcctgagccgggcagggcccctgcctctgctacggcagcccccgatcatgcagcccccactggacctcaagcagatcctgcccttcccactcgagccagcccctacccttggcctcttcagcaactacagcaccatggaccctgtgcagaaggctgtgctctcccacacttttgggggacccttgctcaagaccaagcggcccgtcatttcctgtaatatctgtcaaatccgcttcaattctcagagccaggctgaggcgcactacaaaggtaatcgccacgcccgacgagtcaaaggcattgaggctgccaagaccagaggcagggagcctggcgtccgagaacctggagacccagctcccccaggcagcaccccaacaaatggggatggtgtagcaccccgtccagtttccatggagaatggactggggccagccccaggatccccagagaaacagcctggctccccatcccctcccagc

SEQ ID NO: 35174 - DNA, 2369 bp, Homo sapiens
  source 1..2369: mol_type = unassigned DNA
ggcagaaccaagggaaggggacgctgtcaggcccaggcccctggggggccagggccaggccactgcctgggggcagcaggcatcagaaactaaaggcagcctgagccgggcagggcccctgcctctgctacggcagcccccgatcatgcagcccccactggacctcaagcagatcctgcccttcccactcgagccagcccctacccttggcctcttcagcaactacagcaccatggaccctgtgcagaaggctgtgctctcccacacttttgggggacccttgctcaagaccaagcggcccgtcatttcctgtaatatctgtcaaatccgcttcaattctcagagccaggctgaggcgcactacaaaggtaatcgccacgcccgacgagtcaaaggcattgaggctgccaagaccagaggcagggagcctggcgtccgagaacctggagacccagctcccccaggcagcaccccaacaaatggggatggtgtagcaccccgtccagtttccatggagaatggactggggccagccccaggatccccagagaaacagcctggctccccatcccctcccagcattccggagactggtcagggtgtaaccaagggtgaaggggggactccagccccggcttccttgcctgggggtagcaaggaagaggaggagaaagccaagcggctgctctactgtgctctgtgcaaggtggctgtgaactccctgtcccagcttgaggcacataacaaaggtactaagcacaagacaattctggaggcccgaagtgggctcgggcccatcaaagcttaccctcggctggggcctcccaccccgggggaaccagaggctcctgcccaggaccgaactttccactgtgagatctgcaatgtcaaggtcaactcggaggtccaactgaaacagcacatctccagccggcggcaccgagacggcgtggccgggaagcccaacccactactgagccgtcacaagaagtctaggggcgccggggagctggcgggcacgctgactttctccaaggagctgcccaagtccctggcgggcggcctgctccccagccccctggcggtggctgcagtgatggcagcggcagcaggctcgccgctgtccctgcgcccggctccagccgcacctcttctccagggaccgccgatcactcaccctctgcttcacccggcccccggacccatccgaactgcgcacggacccatcctcttctccccgtactgacctcaaccctgaacccctcccattcaactccccacctccagccgggacccaggcgtccgggctcccagcccgcccctcctcccggcactccctaaatgatctctccttccccccccccaccccgagatacggggttccaggaaaggggaggggtagcgggggaggggggcttcagaagggggggaacaccccagatctcagggaaccccgccccctgcctttccctctcccctagaaaagggggggccgtctcacccccgagcccccttggagacaccccccctcccaaaagccatgtccatccagcccttccccccaaacctagcacaaaacggggttcacaagccatggtcggggtccgggggggacagaaatggattttcttggcaataagcggactctgggactccggctccctaccccaaactgaagcgcttccgtgaacacccccgtcctccgtagggggaggggagcaggcgggatcctgggtccctcataagcactttggttttaccgcctgcaacctcactgtgcccgccccgcaccatgccctagccccaggtctagccgggcccattgcagggggcagcacttgggggcatctccggcacttgggtgggaccaaggagatgccaccatagacctttccctcgccttcttcctccctagtccgggttccattcttttcaccagcacccatcgcccaaggggtaccgaggggggcaaggggtgtccagtccaagcccacccccgcctcgccttccgcaaaactgtgagcaaaaagcaatagaagcctcgcccccgcccttccccttcgcaggattcgccgagtctgtagcctccccgatccaagttcctagacctcatggctgtcccctcccaccagtcacctccactgcacaactcgggcgggggtgtgacacctctcccccacccccgactccgtggtttccgtatcgtcaacccttcagccgccgacccgggaggggtctggcctacactggtcttccccttcccatcaactctttctgcttgacaatgtagcaacccaggccccccacccacggtcctcccctttttcctctccctgacaataaagtctgaatttgttctgccctccgcc

SEQ ID NO: 35175 - DNA, 1111 bp, Homo sapiens
  source 1..1111: mol_type = unassigned DNA
gacacttctgagtgtgggggccctggctagggagtgggactggcaggcttgggtggggttcccaagctttaatcttcctaccccacagaatgttttctctgcccttcaggcagcctgagccgggcagggcccctgcctctgctacggcagcccccgatcatgcagcccccactggacctcaagcagatcctgcccttcccactcgagccagcccctacccttggcctcttcagcaactacagcaccatggaccctgtgcagaaggctgtgctctcccacacttttgggggacccttgctcaagaccaagcggcccgtcatttcctgtaatatctgtcaaatccgcttcaattctcagagccaggctgaggcgcactacaaaggtaatcgccacgcccgacgagtcaaaggcattgaggctgccaagaccagaggcagggagcctggcgtccgagaacctggagacccagctcccccaggcagcaccccaacaaatggggatggtgtagcaccccgtccaggtactaagcacaagacaattctggaggcccgaagtgggctcgggcccatcaaagcttaccctcggctggggcctcccaccccgggggaaccagaggctcctgcccaggaccgaactttccactgtgagatctgcaatgtcaaggtcaactcggaggtccaactgaaacagcacatctccagccggcggcaccgagacggcgtggccgggaagcccaacccactactgagccgtcacaagaagtctaggggcgccggggagctggcgggcacgctgactttctccaaggagctgcccaagtccctggcgggcggcctgctccccagccccctggcggtggctgcagtgatggcagcggcagcaggctcgccgctgtccctgcgcccggctccagccgcacctcttctccagggaccgccgatcactcaccctctgcttcacccggcccccggacccatccgaactgcgcacggacccatcctcttctccccgtactgacctcaaccctgaacccctcccattcaactccccacctccagccgggacccaggcgtccgggctcccagcccgcccctcctcccggcactcccta

SEQ ID NO: 35176 - DNA, 2610 bp, Homo sapiens
  source 1..2610: mol_type = unassigned DNA
agtaattagagctaagcggcaattacaggacgtatgatttgttcagaagcactgcctgccggctgtttcctagcaccacatttcacgggagcaccaggttgagatgatggaattatttacttttaaatgtaacatctcgtacagtgctcaaatgcagacgtgaacgtggactgtaaccttaaaaacaaaggcagtacatgccacactactacccttcctgctcttgtgcgcacacctaccctgatgatgcagccttcactggatatcaaaccatttatgtcttttccagtggacagtagttctgctgttgggctctttccaaattttaacacaatggatcctgtgcaaaaagcggttattaaccatacatttggagtatccattcccccaaagaagaaacaagttatttcttgtaatgtctgtcagcttcgctttaactcagatagccaggccgaggcccactacaaaggaagtaaacatgccaagaaggtcaaagcactagacgcaacgaaaaataaacccaaaatggttccttccaaggacagcgcaaaggctaatcccagctgctccatcactccaatcacaggcaacaactctgacaaatcagaagataaagggaagttaaaagccagcagttccagtcagccatcaagctctgaaagtggctcatttctcctcaaatctggcacaacacccctgccacctggagcagccacttctccctccaagagcacaaatggagctcccggtactgttgttgaatcagaagaagaaaaagccaaaaaattactttattgttcactatgcaaagtggctgtgaactccctgtcacagctagaggcacacaacacaggatctaaacacaagaccatggttgaagctcgtaatggggctggtccaattaaatcctatcctagacctggatcaagattaaagatgcagaatggcagtaaggggtcaggactacagaacaagacatttcattgtgaaatctgtgatgttcatgttaattcagaaattcaactcaaacagcacatttctagccgaaggcataaagatcgagttgcagggaaaccactgaagccaaaatacagcccttacaacaaactccagcggagcccgagtattctagcagcaaaacttgcattccagaaagatatgatgaagcctttggccccagccttcctgtcctcacctctcgcagcggcggcagccgtgtcctcagcgctgtcactcccaccccggccctctgcctcgctcttccaggctccagccattcctccagctcttctgaggcctgggcatgggcccatccgcgccactcctgcctccatcctctttgctccgtactaacgtctgcaaaccccaagacgtttgaggccagtaggaagttgagaaagaaagccacaaggattcagcaatttaagcagtttgtgttgcagtaccccccattcacccacaaaatgcagcccaccacccagtcccccaattccagagagaaacacatcactagattgacgagggcttttagagactgctcctataattgaggaatcagcagcataggctttatctccctacttcctcccccaccctaccgcgttcaatttgtgtatctcagatatttgatttcttgagcatgtattggtcagaaagaaaaagaaagaaaaccattctctatttttccatgggtatgatctggcttaaaacaatatggaatattttcctgacagacttgaaaactaggatcttcctcagatgtctgtaaataactctggtatccaactgggtgtattctagtgtggaacaaaaaacagtgaacacaagtgcttacttgtggatactatcttaccaacggatcacaaagttctctttttggtgtactgttgttgacagggattgtgtactgtttcgacccaagtactgctgtatcctgtgtagtactagatctgtatctcttgtctgaattaaacatttttagttgctgtgtaaatgttaggaagcaaagtagctttgaattttctctgtaagagaataaaagataaaataatgtattttctttatttcacattttatttggagatatttaaatgaaatagaaagccatataacatagctataattactacctgtttgctatttttgtttaacttattttgtagcttcctcactggtttgtgttgctaagcaaacgtatacaaacagaaaaagagcttcctaaattgcacatttttgcacctcttgtgcattctgcaagaagacaatgaatccatgtatttctatataagtatcttcttcatttttaacctgttttcatttgtaatgatgctacataattttgtggctccctaatgcaataatgtacagaagataaaaaaatttataattgaacaatttgtctttctgttcgctgaatatattgcaggtcatgctcccatgcccccctttctaagccgatatcaacaagactggaatgtttgtgatatcaggggcaagagttatcatagaacaacaaaatagagtggactcttttagagcatctatatctgcaacctgtaaatggtaaaatgtctgtgtatttttttaaatgtaccttttcaataaaagtac

SEQ ID NO: 35177 - DNA, 2750 bp, Homo sapiens
  source 1..2750: mol_type = unassigned DNA
agtgcttctggtttcagcacacatggagatatagaattgaaattgctctgctttctttacaaatgactcagagtgtgcttgtccttccctaaaatgttgccagcatgtaaaggattttcaatgagcagtgcaataagccagcaactgggaaggcttggagcggcactgatataacgtggtgctgtcacacagataatcagggctggagccaagtctcggtagcgctgtgcattatcctggtcacatactggaagttttgtttatccaacttggttgctcttgaagctggtgagagccctgccaggatgtggagtggacttcctagcagaggcagtacatgccacactactacccttcctgctcttgtgcgcacacctaccctgatgatgcagccttcactggatatcaaaccatttatgtcttttccagtggacagtagttctgctgttgggctctttccaaattttaacacaatggatcctgtgcaaaaagcggttattaaccatacatttggagtatccattcccccaaagaagaaacaagttatttcttgtaatgtctgtcagcttcgctttaactcagatagccaggccgaggcccactacaaaggaagtaaacatgccaagaaggtcaaagcactagacgcaacgaaaaataaacccaaaatggttccttccaaggacagcgcaaaggctaatcccagctgctccatcactccaatcacaggcaacaactctgacaaatcagaagataaagggaagttaaaagccagcagttccagtcagccatcaagctctgaaagtggctcatttctcctcaaatctggcacaacacccctgccacctggagcagccacttctccctccaagagcacaaatggagctcccggtactgttgttgaatcagaagaagaaaaagccaaaaaattactttattgttcactatgcaaagtggctgtgaactccctgtcacagctagaggcacacaacacaggatctaaacacaagaccatggttgaagctcgtaatggggctggtccaattaaatcctatcctagacctggatcaagattaaagatgcagaatggcagtaaggggtcaggactacagaacaagacatttcattgtgaaatctgtgatgttcatgttaattcagaaattcaactcaaacagcacatttctagccgaaggcataaagatcgagttgcagggaaaccactgaagccaaaatacagcccttacaacaaactccagcggagcccgagtattctagcagcaaaacttgcattccagaaagatatgatgaagcctttggccccagccttcctgtcctcacctctcgcagcggcggcagccgtgtcctcagcgctgtcactcccaccccggccctctgcctcgctcttccaggctccagccattcctccagctcttctgaggcctgggcatgggcccatccgcgccactcctgcctccatcctctttgctccgtactaacgtctgcaaaccccaagacgtttgaggccagtaggaagttgagaaagaaagccacaaggattcagcaatttaagcagtttgtgttgcagtaccccccattcacccacaaaatgcagcccaccacccagtcccccaattccagagagaaacacatcactagattgacgagggcttttagagactgctcctataattgaggaatcagcagcataggctttatctccctacttcctcccccaccctaccgcgttcaatttgtgtatctcagatatttgatttcttgagcatgtattggtcagaaagaaaaagaaagaaaaccattctctatttttccatgggtatgatctggcttaaaacaatatggaatattttcctgacagacttgaaaactaggatcttcctcagatgtctgtaaataactctggtatccaactgggtgtattctagtgtggaacaaaaaacagtgaacacaagtgcttacttgtggatactatcttaccaacggatcacaaagttctctttttggtgtactgttgttgacagggattgtgtactgtttcgacccaagtactgctgtatcctgtgtagtactagatctgtatctcttgtctgaattaaacatttttagttgctgtgtaaatgttaggaagcaaagtagctttgaattttctctgtaagagaataaaagataaaataatgtattttctttatttcacattttatttggagatatttaaatgaaatagaaagccatataacatagctataattactacctgtttgctatttttgtttaacttattttgtagcttcctcactggtttgtgttgctaagcaaacgtatacaaacagaaaaagagcttcctaaattgcacatttttgcacctcttgtgcattctgcaagaagacaatgaatccatgtatttctatataagtatcttcttcatttttaacctgttttcatttgtaatgatgctacataattttgtggctccctaatgcaataatgtacagaagataaaaaaatttataattgaacaatttgtctttctgttcgctgaatatattgcaggtcatgctcccatgcccccctttctaagccgatatcaacaagactggaatgtttgtgatatcaggggcaagagttatcatagaacaacaaaatagagtggactcttttagagcatctatatctgcaacctgtaaatggtaaaatgtctgtgtatttttttaaatgtaccttttcaataaaagtac

SEQ ID NO: 35178 - DNA, 2109 bp, Homo sapiens
  source 1..2109: mol_type = unassigned DNA
agtagactataagcttttggaaaacagggactatgtcttcttcaacaatgtgtacacaacaagtagcaggttgtttggcacatggcagatgctcgatacgttgatctggcagcggcatgggagatggatccaaagagattaaaactggagtgaaggagtccagtaatgatgtgaagagatgagggtctgaactaggacagaagtcagtcacagggatggatttgagacgttttggagggttacacatgcagtacatgccacactactacccttcctgctcttgtgcgcacacctaccctgatgatgcagccttcactggatatcaaaccatttatgtcttttccagtggacagtagttctgctgttgggctctttccaaattttaacacaatggatcctgtgcaaaaagcggttattaaccatacatttggagtatccattcccccaaagaagaaacaagttatttcttgtaatgtctgtcagcttcgctttaactcagatagccaggccgaggcccactacaaaggaagtaaacatgccaagaaggtcaaagcactagacgcaacgaaaaataaacccaaaatggttccttccaaggacagcgcaaaggctaatcccagctgctccatcactccaatcacaggcaacaactctgacaaatcagaagataaagggaagttaaaagccagcagttccagtcagccatcaagctctgaaagtggctcatttctcctcaaatctggcacaacacccctgccacctggagcagccacttctccctccaagagcacaaatggagctcccggtactgttgttgaatcagaagaagaaaaagccaaaaaattactttattgttcactatgcaaagtggctgtgaactccctgtcacagctagaggcacacaacacaggatctaaacacaagaccatggttgaagctcgtaatggggctggtccaattaaatcctatcctagacctggatcaagattaaagatgcagaatggcagtaaggggtcaggactacagaacaagacatttcattgtgaaatctgtgatgttcatgttaattcagaaattcaactcaaacagcacatttctagccgaaggcataaagatcgagttgcagggaaaccactgaagccaaaatacagcccttacaacaaactccagcggagcccgagtattctagcagcaaaacttgcattccagaaagatatgatgaagcctttggccccagccttcctgtcctcacctctcgcagcggcggcagccgtgtcctcagcgctgtcactcccaccccggccctctgcctcgctcttccaggctccagccattcctccagctcttctgaggcctgggcatgggcccatccgcgccactcctgcctccatcctctttgctccgtactaacgtctgcaaaccccaagacgtttgaggccagtaggaagttgagaaagaaagccacaaggattcagcaatttaagcagtttgtgttgcagtaccccccattcacccacaaaatgcagcccaccacccagtcccccaattccagagagaaacacatcactagattgacgagggcttttagagactgctcctataattgaggaatcagcagcataggctttatctccctacttcctcccccaccctaccgcgttcaatttgtgtatctcagatatttgatttcttgagcatgtattggtcagaaagaaaaagaaagaaaaccattctctatttttccatgggtatgatctggcttaaaacaatatggaatattttcctgacagacttgaaaactaggatcttcctcagatgtctgtaaataactctggtatccaactgggtgtattctagtgtggaacaaaaaacagtgaacacaagtgcttacttgtggatactatcttaccaacggatcacaaagttctctttttggtgtactgttgttgacagggattgtgtactgtttcgacccaagtactgctgtatcctgtgtagtactagatctgtatctcttgtctgaattaaacatttttagttgctgtgtaaatgttaggaagcaaagtagctttgaattttctctgtaagagaataaaagataaaataatg

SEQ ID NO: 35179 - DNA, 3288 bp, Homo sapiens
  source 1..3288: mol_type = unassigned DNA
gcacgtccaaaccccggggtcctcggccaggccaggggggcgggcgtgcggcggggccgggccgggccgggcgcgcccagcgggctccgggcacacgcccctcacctgggcgaggcccggtgcgcaggcgctcagcgcgggggcagcggccgggcgcttaagcccggcgcgggcaagagttggacagttcaggggccgcgccgggccgagctgtcgcccgcgccacctccaccgccgccgctgctaccgccaccgccaccgcctgggctgcagcagatcgcgggagaacgtctgcgcgaagccccggtgcagccctggcgggaccgcagcaaccaccggagcgtgagcaacagcttcccggctggaggagccactgccccacgcgcccgcggcccgcgcgccgagatgttctacatttcaactccatcaaatattaaattgatgtttatgggctaacctggaaaccgaaaaacagtttgtttcactacaagaataagaaaatatgtccaaattcctgtcagctgacttataaagggacttttagaacacaacccaatgcatgaggtactccttaagccctgacaaccatcttgaagatggaatcatgaatatggcaaattttctacggggctttgaagaaaaggggataaagaacgacaggcctgaggaccagttgagcaaagagaaaaagaaaattcttttctccttctgtgaggtgtgcaacatccagctgaactctgcagcccaggctcaggtgcattccaacggcaaatcccaccgcaaacgagtgaagcagctgagtgatgggcagcccccaccacccgcccaggccagccccagcagcaacagcagcacaggcagtacatgccacactactacccttcctgctcttgtgcgcacacctaccctgatgatgcagccttcactggatatcaaaccatttatgtcttttccagtggacagtagttctgctgttgggctctttccaaattttaacacaatggatcctgtgcaaaaagcggttattaaccatacatttggagtatccattcccccaaagaagaaacaagttatttcttgtaatgtctgtcagcttcgctttaactcagatagccaggccgaggcccactacaaaggaagtaaacatgccaagaaggtcaaagcactagacgcaacgaaaaataaacccaaaatggttccttccaaggacagcgcaaaggctaatcccagctgctccatcactccaatcacaggcaacaactctgacaaatcagaagataaagggaagttaaaagccagcagttccagtcagccatcaagctctgaaagtggctcatttctcctcaaatctggcacaacacccctgccacctggagcagccacttctccctccaagagcacaaatggagctcccggtactgttgttgaatcagaagaagaaaaagccaaaaaattactttattgttcactatgcaaagtggctgtgaactccctgtcacagctagaggcacacaacacaggatctaaacacaagaccatggttgaagctcgtaatggggctggtccaattaaatcctatcctagacctggatcaagattaaagatgcagaatggcagtaaggggtcaggactacagaacaagacatttcattgtgaaatctgtgatgttcatgttaattcagaaattcaactcaaacagcacatttctagccgaaggcataaagatcgagttgcagggaaaccactgaagccaaaatacagcccttacaacaaactccagcggagcccgagtattctagcagcaaaacttgcattccagaaagatatgatgaagcctttggccccagccttcctgtcctcacctctcgcagcggcggcagccgtgtcctcagcgctgtcactcccaccccggccctctgcctcgctcttccaggctccagccattcctccagctcttctgaggcctgggcatgggcccatccgcgccactcctgcctccatcctctttgctccgtactaacgtctgcaaaccccaagacgtttgaggccagtaggaagttgagaaagaaagccacaaggattcagcaatttaagcagtttgtgttgcagtaccccccattcacccacaaaatgcagcccaccacccagtcccccaattccagagagaaacacatcactagattgacgagggcttttagagactgctcctataattgaggaatcagcagcataggctttatctccctacttcctcccccaccctaccgcgttcaatttgtgtatctcagatatttgatttcttgagcatgtattggtcagaaagaaaaagaaagaaaaccattctctatttttccatgggtatgatctggcttaaaacaatatggaatattttcctgacagacttgaaaactaggatcttcctcagatgtctgtaaataactctggtatccaactgggtgtattctagtgtggaacaaaaaacagtgaacacaagtgcttacttgtggatactatcttaccaacggatcacaaagttctctttttggtgtactgttgttgacagggattgtgtactgtttcgacccaagtactgctgtatcctgtgtagtactagatctgtatctcttgtctgaattaaacatttttagttgctgtgtaaatgttaggaagcaaagtagctttgaattttctctgtaagagaataaaagataaaataatgtattttctttatttcacattttatttggagatatttaaatgaaatagaaagccatataacatagctataattactacctgtttgctatttttgtttaacttattttgtagcttcctcactggtttgtgttgctaagcaaacgtatacaaacagaaaaagagcttcctaaattgcacatttttgcacctcttgtgcattctgcaagaagacaatgaatccatgtatttctatataagtatcttcttcatttttaacctgttttcatttgtaatgatgctacataattttgtggctccctaatgcaataatgtacagaagataaaaaaatttataattgaacaatttgtctttctgttcgctgaatatattgcaggtcatgctcccatgcccccctttctaagccgatatcaacaagactggaatgtttgtgatatcaggggcaagagttatcatagaacaacaaaatagagtggactcttttagagcatctatatctgcaacctgtaaatggtaaaatgtctgtgtatttttttaaatgtaccttttcaataaaagtacaaaaaataaaa

SEQ ID NO: 35180 - DNA, 404 bp, Homo sapiens
  source 1..404: mol_type = unassigned DNA
agggggatagctccctcatcttggatctaggggagcttataacatcttttaaaaggcgaaaattcaagttatctgtggactgtcagaacattttgcataagtcatccccagatgttctacatttcaactccatcaaatattaaattgatgtttatgggctaacctggaaaccgaaaaacagtttgtttcactacaagaataagaaaatatgtccaaattcctgtcagctgacttataaagggacttttagaacacaacccaatgcatgaggtactccttaagccctgacaaccatcttgaagatggaatcatgaatatggcaaattttctacggggctttgaagaaaaggggataaagaacgacaggcctgaggaccagttgagcaaagagaaaaagaaaattc

SEQ ID NO: 35181 - DNA, 501 bp, Homo sapiens
  source 1..501: mol_type = unassigned DNA
tagactataagcttttggaaaacagggactatgtcttcttcaacaatgtgtacacaacaagtagcaggttgtttggcacatggcagatgctcggcagtacatgccacactactacccttcctgctcttgtgcgcacacctaccctgatgatgcagccttcactggatatcaaaccatttatgtcttttccagtggacagtagttctgctgttgggctctttccaaattttaacacaaaaagaagaggcttatttgagaccaataaattttgccagatggatcctgtgcaaaaagcggttattaaccatacatttggagtatccattcccccaaagaagaaacaagttatttcttgtaatgtctgtcagcttcgctttaactcagatagccaggccgaggcccactacaaaggaagtaaacatgccaagaaggtcaaagcactagacgcaacgaaaaataaacccaaaatggttccttccaaggacagcgcaaaggctaatc

SEQ ID NO: 35182 - DNA, 565 bp, Homo sapiens
  source 1..565: mol_type = unassigned DNA
agggtgacataatggtagaacacagaacacttgtagaaatacttgaggaatgagtctgtgaggtttaatttgtgctaaaaattcatcaacacatctagagcaacgcaaatcttcccaagacagatggagactgttttaagatgttctacatttcaactccatcaaatattaaattgatgtttatgggctaacctggaaaccgaaaaacagtttgtttcactacaagaataagaaaatatgtccaaattcctgtcagctgacttataaagggacttttagaacacaacccaatgcatgaggtactccttaagccctgacaaccatcttgaagatggaatcatgaatatggcaaattttctacggggctttgaagaaaaggggataaagaacgacaggcctgaggaccagttgagcaaagagaaaaagaaaattcttttctccttctgtgaggtgtgcaacatccagctgaactctgcagcccaggctcaggtgcattccaacggcaaatcccaccgcaaacgagtgaagcagctgagtgatgggcagcccccaccacccgcccagg

SEQ ID NO: 35183 - DNA, 956 bp, Homo sapiens
  source 1..956: mol_type = unassigned DNA
cccagtcagttgctgctgctggtcctagggcaggctatctgtgtcgggatgccgagcattactgccactataatcactgaggcatctgccagagatctcatggctgaaaactaggcagtacatgccacactactacccttcctgctcttgtgcgcacacctaccctgatgatgcagccttcactggatatcaaaccatttatgtcttttccagtggacagtagttctgctgttgggctctttccaaattttaacacaatggatcctgtgcaaaaagcggttattaaccatacatttggagtatccattcccccaaagaagaaacaagttatttcttgtaatgtctgtcagcttcgctttaactcagatagccaggccgaggcccactacaaaggaagtaaacatgccaagaaggtcaaagcactagacgcaacgaaaaataaacccaaaatggttccttccaaggacagcgcaaaggctaatcccagctgctccatcactccaatcacaggcaacaactctgacaaatcagaagataaagggaagttaaaagccagcagttccagtcagccatcaagctctgaaagtggctcatttctcctcaaatctggcacaacacccctgccacctggagcagccacttctccctccaagagcacaaatggagctcccggtactgttgttgaatcagaagaagaaaaagccaaaaaattactttattgttcactatgcaaagtggctgtgaactccctgtcacagctagaggcacacaacacaggatctaaacacaagaccatggttgaagctcgtaatggggctggtccaattaaatcctatcctagacctggatcaagattaaagatgcagaatggcagtaaggggtcaggactacagaacaagacatttcattgtgaaatctgtgatgttcatgttaattcagaaattcaactcaaacag

SEQ ID NO: 35184 - DNA, 2788 bp, Homo sapiens
  source 1..2788: mol_type = unassigned DNA
agaaccggaagttgttgcgcagctggcagttccccggtttctccccgacggcgtcgggaggagtgtccatcaggacagcttcacctccttgaggattaaagcctaacagtactgagctatttgtctgtcaaaatgtctgcaaaattgggaaagtcatcatcactcctaacacaaacttcagaggagtgtaatgggattctgacagagaagatggaagaggaagagcagacctgtgatccagactctagcctccactggagcagcagctacagcccagagaccttccgccagcaattcaggcagtttggctaccaggattcacctgggccccatgaggctctgagccggctctgggaactttgtcatctctggctgaggccggaagtgcacaccaaggagcagatcctggagctgctggtgctggagcagttcctggccatcctcccaaaagagcttcaggcctgggtgcagaagcatcatccagagaatggagaggaaactgtgactatgctggaggatgtggagagagagcttgatggaccaaagcagatcttttttggacgaaggaaggacatgattgcagagaagctagcaccttcagaaatcactgaggaattgccaagtagccagctcatgcccgtgaagaagcagctccagggagcatcatgggagcttcagtccttaagaccacatgatgaagacatcaaaactacaaatgtgaaatctgcttcaaggcaaaagacttctttaggcatagaactgcattgcaatgtttccaatatccttcatatgaatggctcccagagttccacatatagaggaacctatgaacaagatggtaggtttgaaaagagacaaggaaacccttcttggaaaaaacaacagaaatgtgatgaatgtggcaaaatctttagtcagagctcagcccttattttacatcagagaatccacagtggaaagaaaccttatgcatgtgacgagtgtgcaaaggcattcagccgaagcgcaattctgattcagcatcgacgaacccatactgattcaaaatatgaacatgcgattgcagaggcccaaaagaatatgtacttcaagactaggctgaagtgccccaggtcactttcaggaggcagataaataaaggccttatcttatgaaagcacacaagagcctccatactattaatatcaagttaatttcccgtgttggaaaaaaataatctcctttgcaatgtaatttggaaataagtcaatggaaacatgaaaatgactgcttgtctacaaggagtcagctaaacataaggaatgttttcataacaatattaatctatgggtgcttctgtaagatggatgatcatcttaatataaagaaaaaagggagatgaacaaaattgtcaaacaagactgatgtaccacaagtgttgtcaagtacagtgtgtgtcggagagatgtaccacagcttaactggaagaggaagcccgtaactgctgatgacaatactttcagtgtccccttttctggcataaatcaactatgaatatgtttcaagcatcacaagacaaccttttcagagtcttctgtattcttagtaagatgagtttctagacacgctgtcatgaaatgagaccctggattttgatgctcttgtacatatggacaaatcactgaagttcaatttaaagggtccactgcagtcccttataaacaattgttgaacctaaccattatagtttataagttttaagacatttatgggatatcttatttggcttatctatgggatatgagtaactatgttttacctgcatttaattcagccagattccctgtttaaaattactgaatcgtacattattaaaattattctgacagtatacaaacaacaaaattatctattttccagagattcttgataaaactctgtaatgttactacaataatacatgtattgtgttttccatggtgctacagttacacaatatggaggcaaacatcagaaatcaaagtccttggaataagggaagagactcatagtaaacttctttgtctggttgggttcctcataaagtataaaacatttcattctcagaaaatccaaccatatcttagagtatctccagaaactggcttagaggagctccaaatatgtggaattaccacactctgcttagttagtatgctgataaatgtaagattagtaggaggagaagtgaatgtaaattttattatagaattttctgatagtgattatgatttgtagctctagtgaatatgaattttatattgagttgtgtgtatcttgagtcactaaaaatgtaggatactttttatttggggctcattgtctttgtaattacggagaggaacaaaccatctattgaaacaacaagtgcctcagagatgtatatattgtgaattactgcttaattacggaaagagtttcttaggttctatgtgaataagatggcagaatctaaatcaagtattttgaaggaagcacccatcttcacttggtgctgccatcaactttgtaagattgcattctatttattgtgaataatttgagtgtttccacaggaaagtggtatgaatcatatcgtctaagtatatgatgaatctttaaagggtgtctctgtgtactttgaattattttgcagttatgtaggtatcctaatgagtgaatggtactagtttatataaaaggagaattcattgagctaaccttggttttaaaaattagcattagcacccccattatattaattttcagggatagtaaatactccaaaatg

SEQ ID NO: 35185 - DNA, 1884 bp, Homo sapiens
  source 1..1884: mol_type = unassigned DNA
agaaccggaagttgttgcgcagctggcagttccccggtttctccccgacggcgtcgggaggagtgtccatcaggacagcttcacctccttgaggattaaagcctaacagtactgagctatttgtctgtcaaaatgtctgcaaaattgggaaagtcatcatcactcctaacacaaacttcagaggagtgtaatgggattctgacagagaagatggaagaggaagagcagacctgtgatccagactctagcctccactggagcagcagctacagcccagagaccttccgccagcaattcaggcagtttggctaccaggattcacctgggccccatgaggctctgagccggctctgggaactttgtcatctctggctgaggccggaagtgcacaccaaggagcagatcctggagctgctggtgctggagcagttcctggccatcctcccaaaagagcttcaggcctgggtgcagaagcatcatccagagaatggagaggaaactgtgactatgctggaggatgtggagagagagcttgatggaccaaagcagatcttttttggacgaaggaaggacatgattgcagagaagctagcaccttcagaaatcactgaggaattgccaagtagccagctcatgcccgtgaagaagcagctccagggagcatcatgggagcttcagtccttaagaccacatgatgaagacatcaaaactacaaatgtgaaatctgcttcaaggcaaaagacttctttaggcatagaactgcattgcaatgtttccaatatccttcatatgaatggctcccagagttccacatatagaggaacctatgaacaagatggtaggtttgaaaagagacaaggaaacccttcttggaaaaaacaacagaaatgtgatgaatgtggcaaaatctttagtcagagctcagcccttattttacatcagagaatccacagtggaaagaaaccttatgcatgtgacgagtgtgcaaaggcattcagccgaagcgcaattctgattcagcatcgacgaacccatactggtgagaagccctacaagtgtcatgactgtggcaaagcctttagtcagagctcaaatctttttagacataggaaaagacacattagaaaaaaagtcccataagtatcatgagggaatcaaagcatttactcagagctatttcagcacaagggaagacaccagatgcaaacgctccttagtacaaatcagtggtcttagtaagcaccagtctcctttcaagactcatgaaagccacaggagagaaggttgaagatctcaggtcagcattatttgcttttctgcttatcaatgcagtctcaattctgacgtttgcaattccaaagcttaattcagatttccatccctatgcaggccttgaaaaggcattctcagacatgttctactattttcattattaacacatataatgaattagtatatatctttttagacaagtatgttttttccctcattgagaaggaatgtgtgagttactcagtgtaaaaatagacattctcctccatttcataacttgagcactagaattctaaagaccaaaaattaaagcactcaaaaagaattcctggctgggtgcggttggctcatgcctgtaatcctagcactttgggaggccgaggcaggcagattgcctgaactcaggagttcaagaccagcctggacaacacggcgaaaccccgtctctactaaaattcaaaaaattagccaggcatggcaacgtgtacctgtaatcccagctactagggaggctgaggcaggaaaattgcttgaaccgctcagacagagcaagactccgtctttaaaataaataaataaataaataaataaataaataaaaataaaaataaa

SEQ ID NO: 35186 - DNA, 1480 bp, Homo sapiens
  source 1..1480: mol_type = unassigned DNA
ctgcgtacgcgcacttccggtctttgtggcttgcagctcggggtgggtggctcatttcctggccgctcctgggcttcgcggaaagaagagattactcacactccttcgcaagcacagaaccagttgtactgagctttttgctaagctgtttcagccaagaatggctgtggaatctggagtgatttcaaccctgatacctcaggatcctccggaacaagaactaatactagtgaaagtagaagataacttttcctgggatgagaaatttaagcagaatgggagtactcaatcctgccaagaattgtttcgtcagcaattcagaaaattttgctaccaggagacacctgggccccgggaggctctgagccgactccaggaactttgctatcagtggctaatgccagagttgcacacaaaggagcagatcttagaactgctggtactggagcagttcctgagcattctgcctgaggagctgcagatctgggttcagcaacataatccagaaagcggcgaggaagctgtgaccctgttggaggatttagagagggagtttgatgacccagggcagcaggtcccagctagtccacagggaccagcagtgccatggaaggatttaacatgtctcagagcatcccaagagtcaacagacatccacctccagcccttaaagacacagctgaaatcctggaaaccatgcctttcccctaaaagtgattgtgagaacagtgaaacagcaacaaaagagggcatctcagaagaaaaatcacagggactccctcaggaaccttcatttcgaggaattaagttgtccagacctcccaaagcttcttcagctatccgttgggaatgtgtttctccaggaagttttcccggcgatatcatagctgctgaggctacacattcaacaatttcttgctttgccatcaacactttgccagccaccatcctgccatctaaaaatgtgaatagaaagtatttttcctgaagaacacatcgtcaataaatcacctgcacccaaatctccatctcaggcgctacttctggcaaggcatatcatgaggctagtgaagcacctacaagaaacttataactcaaggttgtaaaaatggcatggtgactcttacaatcatatcacagtgggcctctccaacaatttaaacctcatgacctaggtgaaagctgtgaaaggatccacattaattcttcagaggcagggctaagactttcaagactgaaaagagactagcataaggagacttaacaggaacccagtcaaggccattcatggccatgggaccacgcataaatggagaacgagtaaattttgctaagtccaaggacattggagagatagagtcactattactgatatggtgactgagtcaacaacatactgccactatgaagtaataagaaaataaaaagttaaaaaatgtaacagataacagttggagggtgaatatattttaaatcaatc

SEQ ID NO: 35187 - DNA, 2644 bp, Homo sapiens
  source 1..2644: mol_type = unassigned DNA
ctgcgtacgcgcacttccggtctttgtggcttgcagctcggggtgggtggctcatttcctggccgctcctgggcttcgcggaaagaagagattactcacactccttcgcaagcacagaaccagttgtactgagctttttgctaagctgtttcagccaagaatggctgtggaatctggagtgatttcaaccctgatacctcaggatcctccggaacaagaactaatactagtgaaagtagaagataacttttcctgggatgagaaatttaagcagaatgggagtactcaatcctgccaagaattgtttcgtcagcaattcagaaaattttgctaccaggagacacctgggccccgggaggctctgagccgactccaggaactttgctatcagtggctaatgccagagttgcacacaaaggagcagatcttagaactgctggtactggagcagttcctgagcattctgcctgaggagctgcagatctgggttcagcaacataatccagaaagcggcgaggaagctgtgaccctgttggaggatttagagagggagtttgatgacccagggcagcaggtcccagctagtccacagggaccagcagtgccatggaaggatttaacatgtctcagagcatcccaagagtcaacagacatccacctccagcccttaaagacacagctgaaatcctggaaaccatgcctttcccctaaaagtgattgtgagaacagtgaaacagcaacaaaagagggcatctcagaagaaaaatcacagggactccctcaggaaccttcatttcgaggaattagtgagcatgaaagcaatttagtgtggaagcaaggaagtgctacaggggagaaactaagatctccttcccaagggggcagttttagtcaagtgatcttcacaaacaaatctctaggaaagagagacctttatgatgaggctgaaagatgcttgattctaactacagactctataatgtgtcagaaagttcctccagaagagagaccttatagatgtgatgtatgtgggcacagcttcaagcagcattcctctctaacacaacatcagagaatccatactggagaaaagccctataaatgtaaccagtgtgggaaggcctttagtttgaggtcctatcttattattcatcagagaattcatagtggtgagaaagcatatgaatgtagtgaatgtgggaaagctttcaatcagagctcagccctcattagacatcggaaaatccatactggtgagaaagcttgtaaatgtaatgagtgtggcaaagcattcagtcaaagttcatatctcattatacatcaaagaattcacactggtgagaaaccttatgagtgtaatgaatgtgggaaaacctttagccagagctcaaaactcattagacatcagcgaattcacacaggagagagaccctatgaatgtaatgaatgtggaaaagctttcaggcagagctcagagctgattactcatcagagaatacatagtggagagaaaccctatgaatgtagtgaatgtggaaaagctttcagtttgagctcaaaccttatcagacatcagagaattcatagtggggaggaaccttatcagtgtaatgaatgtggcaaaactttcaaaaggagctcagcccttgttcagcatcagagaattcattctggggatgaagcttatatatgtaatgaatgtgggaaggctttcaggcacagatcggtccttatgcgccatcaaagagtccacactataaagtaatttgtgaatactgtgaatagtgtaaatacttcagtcagatttttaagtttgttagtcaaaagagtttactttggagcaaaactccataaaggttataaaatactaggtcttgagtctagcttgctttgtgcagcatttcccagtgctaatgtaaagtgtcccttgaaagcttttcctgtgactaatcagaacagaatacagaagaatcattacttccagctcttctcttattaggaatactcaggaaatacgaaaagtgggaatgtaacattgaaacctcattttgtatgaaagtgtcatgaatatagcaacccaggctctgtcactgcatctgattgttagtgtgccaggttatggggctggtgtggactgtgtgaggcacttcgtctcaggaactaaaaaaaaaaaaaaaactgacccaataaagaacagtgacagagcagcaggaaaggtggggaaatggcttcatcaatgatttgttgagcccagggcaggccaggaattagataggcatgagaagaaagaatataatttacccaaaggttattttttgagtacctactttgtcccaggaactaggaatacagtggaaaacaagactgtagtctctacagtctaatgggcaaggcagccagacaggcagtgaaagtggaatgctcctatgtgaccttaaggagcacctgactcagccttggataaggaaatgggggaaatggcctgaaggatgaggaggagttagccaaggtggtactctagggaagtggtaccccagtaaagaacagtagccaaaggccagaaacaaagtgtggagcattccttgagttcctgttgtagtgaggtcttgtctgtcagagaagtctgggtctggccagactctta

SEQ ID NO: 35188 - DNA, 2162 bp, Homo sapiens
  source 1..2162: mol_type = unassigned DNA
gtggcttgcagctcggggtgggtggctcatttcctggccgctcctgggcttcgcggaaagaagagattactcacactccttcgcaagcacagaaccagttgtactgagctttttgctaagctgtttcagccaagaatggctgtggaatctggagtgatttcaaccctgatacctcaggatcctccggaacaagaactaatactagtgaaagtagaagataacttttcctgggatgagaaatttaagcagaatgggagtactcaatcctgccaagaattgtttcgtcagcaattcagaaaattttgctaccaggagacacctgggccccgggaggctctgagccgactccaggaactttgctatcagtggctaatgccagagttgcacacaaaggagcagatcttagaactgctggtactggagcagttcctgagcattctgcctgaggagctgcagatctgggttcagcaacataatccagaaagcggcgaggaagctgtgaccctgttggaggatttagagagggagtttgatgacccagggcagcaggtcccagctagtccacagggaccagcagtgccatggaaggatttaacatgtctcagagcatcccaagagtcaacagacatccacctccagcccttaaagacacagctgaaatcctggaaaccatgcctttcccctaaaagtgagttgtccagacctcccaaagcttcttcagctatccgttgggaatgtgtttctccaggaagttttcccggcgatatcatagctgctgaggctacacattcaacaatttcttgctttgccatcaacactttgccagccaccatcctgccatctaaaaatgtgaatagaaagtatttttcctgaagaacacatcgtcaataaatcacctgcacccaaatctccatctcaggcgctacttctggcaaggcatatcatgaggctagtgaagcacctacaagaaacttataactcaaggttgtaaaaatggcatggtgactcttacaatcatatcacagtgggcctctccaacaatttaaacctcatgacctaggtgaaagctgtgaaaggatccacattaattcttcagaggcagggctaagactttcaagactgaaaagagactagcataaggagacttaacaggaacccagtcaaggccattcatggccatgggaccacgcataaatggagaacgagtaaattttgctaagtccaaggacattggagagatagagtcactattactgatatggtgactgagtcaacaacatactgccactatgaagtaataagaaaataaaaagttaaaaaatgtaacagataacagttggagggtgaatatattttaaatcaatcagattctcattagagtattttattttgtcttgatccccaaacttcagatgaatgtggagaaactgaagcatgtccagagaaaagtggcaagatatccaaacagacagaacacagatgggatcagagggagtgagaggcttagttaaaacaaggtcaggaggctgggcacggtggctcatgcctgtaattccagcactttgggaggccgaggcgggtggataacaaggtcaggagtttgagaacagcctggccaatatggtgaaaccccatctctactaaaaatacaaaaattagccaggcgtggtggcgggtgcctgtagtcccagctactcgggaggctgaggcaggagaatcacttgaacccaggagttggaggttgtagtgagccaagatcacaccactgcactctagcttgggcgacagagccagactccatctcaaaaaaaaaaaaaaaaaaaaaaaaaaaaaaaaggtcaaagtgcagtgtactcactgcattcaagtatagattgtgttttatgaggactctgtaaactaaagaaagtggattatgaataaattaaagttgggagtatttcatatggacataaggaagaattttaatatagtatgtttactagggtttccacaacaaaataccacagaatgggtggtaaacaacagaaatctcttttctcacaattctagagactagaagtccaagatcaatgtgtcagcaggtttggtttcttctctctccttggcttgcagatgatggccaccttcttttcttgttgttgttgagatagtctcactct

SEQ ID NO: 35189 - DNA, 4297 bp, Homo sapiens
  source 1..4297: mol_type = unassigned DNA
gtaagggcacccaccaggtgtaattgtgggcgagcggccgcttcggagctgacactaagcatgtgcagatcaagtccagaagcgccggggttcctcgaagcagttttcaggacttaaggctctgggacatccagcacagtgagcggcccctgggcaccaccagaaaacatttgtgagtgaacgtggagtgatgaccatgtggacactgtctttccagggtttcttggagcctctgcagagtctgggggccaggcttcttagtggaaactgcaggatcttccttctgacccctgcttgcctcgccccagcagctccggttgagtccacagatgccagctcagcttccagcttggggaagagtggggttgtcagcaggagagcctgagggctgaggcccagcgtgaacatggcagctaatggggactctcccccatggtccccggccctggctgcagagggacgtggcagctcatgtgaggcttcagtgtcatttgaggacgtgactgtggacttcagcaaggaggagtggcagcacttggaccctgcccagagacgcctgtactgggatgtgacactagagaactacagccacctgctctcagtggggtaccaaattcccaagtcagaggctgccttcaagttggagcaaggagaggggccatggatgctggagggggaagccccacatcagagctgttcaggtgaggctattgggaaaatgcagcaacagggaattcctggaggaattttcttccactgtgagagatttgatcaacccataggagaagattcattatgttctattttagaagaactgtggcaagataatgaccagctagagcaacgtcaggaaaaccagaataaccttttaagtcatgtgaaagtattgattaaggagaggggctatgaacataaaaacattgaaaaaataattcatgtgactaccaagcttgttccttcaattaaaagactccataactgtgacacaattttgaagcatactttaaactcacataatcataatagaaacagtgcaacaaagaaccttggcaagatttttggaaatggtaacaatttcccccatagcccttcctctactaagaatgagaatgctaaaacaggagcaaattcctgtgaacatgaccactatgaaaaacatctcagccacaaacaagctcccacccaccatcagaaaattcatcctgaggagaagctttatgtgtgtactgaatgtgtaatgggcttcactcagaagtcacatctgtttgagcatcagagaattcatgctggagaaaagtcccgtgaatgtgacaaaagcaacaaagtcttcccccagaaaccccaggttgatgtacatccaagtgtttatacaggagaaaaaccctatctgtgtactcaatgtgggaaagtctttaccctcaaatcaaacctcattacacatcaaaaaattcataccgggcagaaaccctacaaatgcagtgaatgtggaaaagcctttttccagagatcagacctctttagacatctgagaattcatacaggagaaaaaccttatgaatgcagtgaatgtggaaaaggcttctcccagaactcagacctcagtatacatcagaaaactcataccggagagaaacactatgaatgcaatgaatgtgggaaggctttcacaagaaaatcagcactcaggatgcatcagagaatccacacgggagagaaaccttatgtatgcgctgactgtgggaaggccttcatccagaaatcacatttcaacacacatcagagaattcatactggagaaaagccgtatgaatgcagtgactgtgggaaatccttcactaagaagtcacaactccatgtgcatcaaagaattcacaccggagagaaaccctatatatgtacagaatgtggaaaggtcttcactcacaggacaaacctcaccacacatcagaaaactcatactggggaaaaaccctatatgtgtgctgaatgtggaaaggcttttactgaccagtcaaatctcattaaacaccagaaaactcacactggagagaaaccctataagtgcaatggctgtggaaaagccttcatatggaagtcgcgcctcaaaatacatcagaaatctcatattggagagagacactatgaatgcaaggactgcgggaaagccttcatccagaaatcaacactaagcgtgcatcagagaatccatacaggagagaaaccgtacgtttgtcctgaatgcgggaaggcctttatccagaaatcgcacttcattgcgcatcatagaatccatactggagagaagccttatgaatgcagcgactgtgggaaatgcttcactaagaagtcacaactccgtgtgcatcagaaaatccacacaggtgagaagcccaatatatgtgctgaatgtggaaaggccttcactgaccgatcaaatctcataacacatcagaaaatccacactagggagaaaccctatgaatgtggtgactgcgggaaaaccttcacctggaagtcacgcctcaatatacatcagaagtctcatactggagaaagacactatgaatgtagtaaatgtgggaaagctttcatccagaaagccacactaagtatgcatcagataattcatacaggaaagaaaccttatgcttgtacagaatgtcagaaggcctttactgacagatcgaatctcattaaacaccagaaaatgcatagtggagaaaaacgctataaagccagtgactgagaaagtcttcacctggaaatcacaactgggtatgcatcaggtatctaatagcagggaggaggaaggcctgttgctgcaatcattgtacagggggaaatgggtatgagagactgaggcttgagtgaactgaaggcaaacagagccaagtatccttcagtccactggaaagacaagttcctgcatcaccacagtgtatatgcaattctatgcataggaagagcctttagagaaagcatttgagcgaaagtcatgtttggtgacatgattcatacagacctcttgagctcctggaaatagtagaattaagacctgaggagatgactcgtcatctcttatgcttcactttttggataaagaactttttaaattcagtactgattggttcagcatatcctgggacataaaaatactcactactgggaaaaactttttcaaatttctaggttgaggagaagagttttcattgtccaaacactggcagggcactgacatcaaggcagaaaacctacttgggaatgcagatatctgtttttgtgatcattggcacttaagacatagaaaagatttccatgaaaaacttttttcttttcccttgggaagtcctcatggtatatatattttaagtgcaatggaatttttaaatttaaagatataactttatgaattgagaaattaggcctagctctaggctatgttacagaaatatagtcattgaatgatacagacatataaaggtagtagttgtctcattattaattccctgctgggagagcagatgagtcataccctataagaagtatgcatgccttctaacctatgtccccaaagctgtcatttgcataagctgcaggccatagattcctgattccctcagtaactgaccctacgacaatggaactgatccacggcactctagattttcaggctaacccaccaacacccctgctttccttgggatttcctgaaaaagaatggttgaaaaattgagtttcacttcctaatattttgtttttcttcctatttggttaaggtatattcatttcctacatgcacattaagggtagttttgtgtagactgctatgtgataaagtcatgttgcattgcaattagttattctaagacataattacagtttatcatagttgaataactggaagacttctcaagaaagagcactgctcttttttaacactgatatatagacacgttctcattttcccttaaacattttttacaatactcataaaaaggaactttctttctagcatgcaattgtatttttattttattttaaaatctttttattaaactataatgtatacagaaaatgcatatatcataaacatacagctcagtgcattctcaaaaactgaacatactcagatcaagaaacagaacatgaccagcaccccagaagccttccccactttcccttccaggcaagcccccaagggtatacattatcctggcttctcacagcatagattcattttgcctgttttgtattttatataaattgagtcaattatatatcatataattgagccata

SEQ ID NO: 35190 - DNA, 4531 bp, Homo sapiens
  source 1..4531: mol_type = unassigned DNA
cggaggctccccggtagggacggcctgaggccgagggcaccctgagggcggaagaggcaaagcgcctcgcccgccggggcctcggaggtgactaactcctagaggctgcggcggaggggagaagcctggtggtacattccatggcccagtgcctcggccactggaaaatcccacaggggtatatcgagtaggggaccgcgggctccgcggcagaaatgaccgcccttccaagatggcggctcccgtagagacactcccaaggagacagccatgttccttgcctgagagtcactgaaggaaattggaaagcccgcctctccttcgacgcacacgcgcacgcgcacgcacgcaccggcgcggtcatccagcacagtgagcggcccctgggcaccaccagaaaacatttgtgagtgaacgtggagtgatgaccatgtggacactgtctttccagggtttcttggagcctctgcagagtctgggggccaggcttcttagtggaaactgcaggatcttccttctgacccctgcttgcctcgccccagcagctccggttgagtccacagatgccagctcagcttccagcttggggaagagtggggttgtcagcaggagagcctgagggctgaggcccagcgtgaacatggcagctaatggggactctcccccatggtccccggccctggctgcagagggacgtggcagctcatgtgaggcttcagtgtcatttgaggacgtgactgtggacttcagcaaggaggagtggcagcacttggaccctgcccagagacgcctgtactgggatgtgacactagagaactacagccacctgctctcagtggggtaccaaattcccaagtcagaggctgccttcaagttggagcaaggagaggggccatggatgctggagggggaagccccacatcagagctgttcaggtgaggctattgggaaaatgcagcaacagggaattcctggaggaattttcttccactgtgagagatttgatcaacccataggagaagattcattatgttctattttagaagaactgtggcaagataatgaccagctagagcaacgtcaggaaaaccagaataaccttttaagtcatgtgaaagtattgattaaggagaggggctatgaacataaaaacattgaaaaaataattcatgtgactaccaagcttgttccttcaattaaaagactccataactgtgacacaattttgaagcatactttaaactcacataatcataatagaaacagtgcaacaaagaaccttggcaagatttttggaaatggtaacaatttcccccatagcccttcctctactaagaatgagaatgctaaaacaggagcaaattcctgtgaacatgaccactatgaaaaacatctcagccacaaacaagctcccacccaccatcagaaaattcatcctgaggagaagctttatgtgtgtactgaatgtgtaatgggcttcactcagaagtcacatctgtttgagcatcagagaattcatgctggagaaaagtcccgtgaatgtgacaaaagcaacaaagtcttcccccagaaaccccaggttgatgtacatccaagtgtttatacaggagaaaaaccctatctgtgtactcaatgtgggaaagtctttaccctcaaatcaaacctcattacacatcaaaaaattcataccgggcagaaaccctacaaatgcagtgaatgtggaaaagcctttttccagagatcagacctctttagacatctgagaattcatacaggagaaaaaccttatgaatgcagtgaatgtggaaaaggcttctcccagaactcagacctcagtatacatcagaaaactcataccggagagaaacactatgaatgcaatgaatgtgggaaggctttcacaagaaaatcagcactcaggatgcatcagagaatccacacgggagagaaaccttatgtatgcgctgactgtgggaaggccttcatccagaaatcacatttcaacacacatcagagaattcatactggagaaaagccgtatgaatgcagtgactgtgggaaatccttcactaagaagtcacaactccatgtgcatcaaagaattcacaccggagagaaaccctatatatgtacagaatgtggaaaggtcttcactcacaggacaaacctcaccacacatcagaaaactcatactggggaaaaaccctatatgtgtgctgaatgtggaaaggcttttactgaccagtcaaatctcattaaacaccagaaaactcacactggagagaaaccctataagtgcaatggctgtggaaaagccttcatatggaagtcgcgcctcaaaatacatcagaaatctcatattggagagagacactatgaatgcaaggactgcgggaaagccttcatccagaaatcaacactaagcgtgcatcagagaatccatacaggagagaaaccgtacgtttgtcctgaatgcgggaaggcctttatccagaaatcgcacttcattgcgcatcatagaatccatactggagagaagccttatgaatgcagcgactgtgggaaatgcttcactaagaagtcacaactccgtgtgcatcagaaaatccacacaggtgagaagcccaatatatgtgctgaatgtggaaaggccttcactgaccgatcaaatctcataacacatcagaaaatccacactagggagaaaccctatgaatgtggtgactgcgggaaaaccttcacctggaagtcacgcctcaatatacatcagaagtctcatactggagaaagacactatgaatgtagtaaatgtgggaaagctttcatccagaaagccacactaagtatgcatcagataattcatacaggaaagaaaccttatgcttgtacagaatgtcagaaggcctttactgacagatcgaatctcattaaacaccagaaaatgcatagtggagaaaaacgctataaagccagtgactgagaaagtcttcacctggaaatcacaactgggtatgcatcaggtatctaatagcagggaggaggaaggcctgttgctgcaatcattgtacagggggaaatgggtatgagagactgaggcttgagtgaactgaaggcaaacagagccaagtatccttcagtccactggaaagacaagttcctgcatcaccacagtgtatatgcaattctatgcataggaagagcctttagagaaagcatttgagcgaaagtcatgtttggtgacatgattcatacagacctcttgagctcctggaaatagtagaattaagacctgaggagatgactcgtcatctcttatgcttcactttttggataaagaactttttaaattcagtactgattggttcagcatatcctgggacataaaaatactcactactgggaaaaactttttcaaatttctaggttgaggagaagagttttcattgtccaaacactggcagggcactgacatcaaggcagaaaacctacttgggaatgcagatatctgtttttgtgatcattggcacttaagacatagaaaagatttccatgaaaaacttttttcttttcccttgggaagtcctcatggtatatatattttaagtgcaatggaatttttaaatttaaagatataactttatgaattgagaaattaggcctagctctaggctatgttacagaaatatagtcattgaatgatacagacatataaaggtagtagttgtctcattattaattccctgctgggagagcagatgagtcataccctataagaagtatgcatgccttctaacctatgtccccaaagctgtcatttgcataagctgcaggccatagattcctgattccctcagtaactgaccctacgacaatggaactgatccacggcactctagattttcaggctaacccaccaacacccctgctttccttgggatttcctgaaaaagaatggttgaaaaattgagtttcacttcctaatattttgtttttcttcctatttggttaaggtatattcatttcctacatgcacattaagggtagttttgtgtagactgctatgtgataaagtcatgttgcattgcaattagttattctaagacataattacagtttatcatagttgaataactggaagacttctcaagaaagagcactgctcttttttaacactgatatatagacacgttctcattttcccttaaacattttttacaatactcataaaaaggaactttctttctagcatgcaattgtatttttattttattttaaaatctttttattaaactataatgtatacagaaaatgcatatatcataaacatacagctcagtgcattctcaaaaactgaacatactcagatcaagaaacagaacatgaccagcaccccagaagccttccccactttcccttccaggcaagcccccaagggtatacattatcctggcttctcacagcatagattcattttgcctgttttgtattttatataaattgagtcaattatatatcatataattgagccata

SEQ ID NO: 35191 - DNA, 4415 bp, Homo sapiens
  source 1..4415: mol_type = unassigned DNA
cggaggctccccggtagggacggcctgaggccgagggcaccctgagggcggaagaggcaaagcgcctcgcccgccggggcctcggaggtgactaactcctagaggctgcggcggaggggagaagcctggtggtacattccatggcccagtgcctcggccactggaaaatcccacaggggtatatcgagtaggggaccgcgggctccgcggcagaaatgaccgcccttccaagatggcggctcccgtagagacactcccaaggagacagccatgttccttgcctgagagtcactgaaggaaattggaaagcccgcctctccttcgacgcacacgcgcacgcgcacgcacgcaccggcgcggtgtaagggcacccaccaggtgtaattgtgggcgagcggccgcttcggagctgacactaagcatgtgcagatcaagtccagaagcgccggggttcctcgaagcagttttcaggacttaaggctctgggacatccagcacagtgagcggcccctgggcaccaccagaaaacatttgtgagtgaacgtggagtgatgaccatgtggacactgtctttccagggtttcttggagcctctgcagagtctgggggccaggcttcttagtggaaactgcaggatcttccttctgacccctgcttgcctcgccccagcagctccggttgagtccacagatgccagctcagcttccagcttggggaagagtggggttgtcagcaggagagcctgagggctgaggcccagcgtgaacatggcagctaatggggactctcccccatggtccccggccctggctgcagagggacgtggcagctcatgtgagtgctgaccatgctgccttgaacagcattgtgtcgttacaggcttcagtgtcatttgaggacgtgactgtggacttcagcaaggaggagtggcagcacttggaccctgcccagagacgcctgtactgggatgtgacactagagaactacagccacctgctctcagtggggtaccaaattcccaagtcagaggctgccttcaagttggagcaaggagaggggccatggatgctggagggggaagccccacatcagagctgttcaggtgaggctattgggaaaatgcagcaacagggaattcctggaggaattttcttccactgtgagagatttgatcaacccataggagaagattcattatgttctattttagaagaactgtggcaagataatgaccagctagagcaacgtcaggaaaaccagaataaccttttaagtcatgtgaaagtattgattaaggagaggggctatgaacataaaaacattgaaaaaataattcatgtgactaccaagcttgttccttcaattaaaagactccataactgtgacacaattttgaagcatactttaaactcacataatcataatagaaacagtgcaacaaagaaccttggcaagatttttggaaatggtaacaatttcccccatagcccttcctctactaagaatgagaatgctaaaacaggagcaaattcctgtgaacatgaccactatgaaaaacatctcagccacaaacaagctcccacccaccatcagaaaattcatcctgaggagaagctttatgtgtgtactgaatgtgtaatgggcttcactcagaagtcacatctgtttgagcatcagagaattcatgctggagaaaagtcccgtgaatgtgacaaaagcaacaaagtcttcccccagaaaccccaggttgatgtacatccaagtgtttatacaggagaaaaaccctatctgtgtactcaatgtgggaaagtctttaccctcaaatcaaacctcattacacatcaaaaaattcataccgggcagaaaccctacaaatgcagtgaatgtggaaaagcctttttccagagatcagacctctttagacatctgagaattcatacaggagaaaaaccttatgaatgcagtgaatgtggaaaaggcttctcccagaactcagacctcagtatacatcagaaaactcataccggagagaaacactatgaatgcaatgaatgtgggaaggctttcacaagaaaatcagcactcaggatgcatcagagaatccacacgggagagaaaccttatgtatgcgctgactgtgggaaggccttcatccagaaatcacatttcaacacacatcagagaattcatactggagaaaagccgtatgaatgcagtgactgtgggaaatccttcactaagaagtcacaactccatgtgcatcaaagaattcacaccggagagaaaccctatatatgtacagaatgtggaaaggtcttcactcacaggacaaacctcaccacacatcagaaaactcatactggggaaaaaccctatatgtgtgctgaatgtggaaaggcttttactgaccagtcaaatctcattaaacaccagaaaactcacactggagagaaaccctataagtgcaatggctgtggaaaagccttcatatggaagtcgcgcctcaaaatacatcagaaatctcatattggagagagacactatgaatgcaaggactgcgggaaagccttcatccagaaatcaacactaagcgtgcatcagagaatccatacaggagagaaaccgtacgtttgtcctgaatgcgggaaggcctttatccagaaatcgcacttcattgcgcatcatagaatccatactggagagaagccttatgaatgcagcgactgtgggaaatgcttcactaagaagtcacaactccgtgtgcatcagaaaatccacacaggtgagaagcccaatatatgtgctgaatgtggaaaggccttcactgaccgatcaaatctcataacacatcagaaaatccacactagggagaaaccctatgaatgtggtgactgcgggaaaaccttcacctggaagtcacgcctcaatatacatcagaagtctcatactggagaaagacactatgaatgtagtaaatgtgggaaagctttcatccagaaagccacactaagtatgcatcagataattcatacaggaaagaaaccttatgcttgtacagaatgtcagaaggcctttactgacagatcgaatctcattaaacaccagaaaatgcatagtggagaaaaacgctataaagccagtgactgagaaagtcttcacctggaaatcacaactgggtatgcatcaggtatctaatagcagggaggaggaaggcctgttgctgcaatcattgtacagggggaaatgggtatgagagactgaggcttgagtgaactgaaggcaaacagagccaagtatccttcagtccactggaaagacaagttcctgcatcaccacagtgtatatgcaattctatgcataggaagagcctttagagaaagcatttgagcgaaagtcatgtttggtgacatgattcatacagacctcttgagctcctggaaatagtagaattaagacctgaggagatgactcgtcatctcttatgcttcactttttggataaagaactttttaaattcagtactgattggttcagcatatcctgggacataaaaatactcactactgggaaaaactttttcaaatttctaggttgaggagaagagttttcattgtccaaacactggcagggcactgacatcaaggcagaaaacctacttgggaatgcagatatctgtttttgtgatcattggcacttaagacatagaaaagatttccatgaaaaacttttttcttttcccttgggaagtcctcatggtatatatattttaagtgcaatggaatttttaaatttaaagatataactttatgaattgagaaattaggcctagctctaggctatgttacagaaatatagtcattgaatgatacagacatataaaggtagtagttgtctcattattaattccctgctgggagagcagatgagtcataccctataagaagtatgcatgccttctaacctatgtccccaaagctgtcatttgcataagctgcaggccatagattcctgattccctcagtaactgaccctacgacaatggaactgatccacggcactctagattttcaggctaacccaccaacacccctgctttccttgggatttcctgaaaaagaatggttgaaaaattgagtttcacttcctaatattttgtttttcttcctatttggttaaggtatattcatttcctacatgcacattaagggtagttttgtgtagactgctatgtgataaagtcatgttgcattgcaattagttattctaagacataattacagtttatcatagttgaataactggaagacttctcaagaaagagcactgctcttttttaacactgatatatagacacgttctcattttcccttaaacattttttacaatactcataaaaaggaactttctttctagca

SEQ ID NO: 35192 - DNA, 613 bp, Homo sapiens
  source 1..613: mol_type = unassigned DNA
agcttccagcttggggaagagtggggttgtcagcaggagagcctgagggctgaggcccagcgtgaacatggcagctaatggggactctcccccatggtccccggccctggctgcagagggacgtggcagctcatgtgagtgctgaccatgctgccttgaacagcattgtgtcgttacaggcttcagtgtcatttgaggacgtgactgtggacttcagcaaggaggagtggcagcacttggaccctgcccagagacgcctgtactgggatgtgacactagagaactacagccacctgctctcagtggggtaccaaattcccaagtcagaggctgccttcaagttggagcaaggagaggggccatggatgctggagggggaagccccacatcagagctgttcaggtgaggctattgggaaaatgcagcaacagggaattcctggaggaattttcttccactgtgagagatttgatcaacccataggagaagattcattatgttctattttagaagaactgtggcaagataatgaccagctagagcaacgtcaggaaaaccagaataaccttttaagtcatgtgaaagtattgattaaggagaggggctatgaaca

SEQ ID NO: 35193 - DNA, 4817 bp, Homo sapiens
  source 1..4817: mol_type = unassigned DNA
gaaaatcaaaccctccggaatgtccccctgaagaggaccactgttgcagcggggaccctcctttcaggcatcctcattttatcatgtccctttgctttcttccccagtggccttttcaaaggtcagagagaaatgcttagtcaaacccctacttgagtatcacaggtgactaattttgggatcgaagattaaggaggttttgttgcgtccttaaagaacttggaattggagtccaggtagttttggaaaacttcctggagaaggatggattttaccctgtaaaagaagaaagacatggatgcataagaagagggttgaagagggggaggcctcagacttctcgctggcctgggattcctccgtgacagcagcaggaggcctagaaggagagccagagtgcgatcagaaaaccagccgtgcgctggaagacaggaacagcgtgacaagtcaagaggagagaaatgaggatgatgaagacatggaggatgaatcaatttacacctgcgatcactgtcagcaggacttcgagtctctggcagacctgacggaccaccgggcccaccgctgtcctggagatggtgatgacgacccacaactctcctgggtggcctcgtctccctccagcaaggatgttgcgtcacccacgcagatgatcggagatggttgtgacctcggcctcggcgaggaggaagggggcacgggcctgccatacccttgccagttctgcgacaagtccttcatccgcttgagctacttgaagaggcacgagcagatccacagcgacaagctgccgttcaagtgcacctactgcagccgcctcttcaagcacaagaggagccgtgaccggcacatcaagctgcatacgggcgacaagaagtatcactgccacgagtgcgaggcagccttctcccgcagcgaccacctcaagatccacctgaagacccacagctccagcaagcccttcaagtgcactgtgtgcaagcgcggcttctcctccaccagctcgctgcagagccacatgcaggcccacaaaaagaacaaggagcatctggccaagtcggagaaggaagccaagaaggacgacttcatgtgcgactactgcgaggacaccttcagccagacggaggagctggagaagcacgtgctcacccgccacccgcagctgtccgagaaggcggacctgcagtgcattcactgccctgaggtcttcgtcgacgagaacacactgctcgcccatatccaccaagcccacgccaaccagaaacacaagtgccccatgtgccctgagcagttctcctcagtggaaggtgtctactgccacctggacagccaccggcagcccgactccagcaaccacagtgtcagtcccgaccctgtactgggcagcgtggcctccatgagcagcgccacacccgactccagcgcctctgtggagcgtggctccaccccggactccaccttgaagccgctgcgggggcagaagaagatgcgggatgacgggcagggctggaccaaggtggtctatagctgcccctattgttccaagcgggactttaacagcctggccgtgctggagatccacctgaagaccatccacgcggacaagccccagcagagccacacatgtcagatctgcctggactccatgcccaccctctacaacctcaacgagcacgttcgcaagctgcacaagaaccatgcctaccctgtgatgcagtttggcaacatctctgccttccactgcaactactgccccgagatgttcgccgacatcaatagcctgcaggagcacatccgcgtctcccactgcggccccaacgccaacccctctgacggtaataatgctttcttctgcaaccagtgctccatgggtttccttactgagtcctccctcaccgagcacatccagcaggcccactgcagtgtgggcagtgccaaactagagtctccggtggtgcagcccacgcagtccttcatggaggtctattcctgcccctactgcaccaactcccccatctttggctccatcctgaaactcaccaagcacatcaaggagaaccacaagaacattccactggcccacagcaagaagtccaaggccgagcagagcccagtctcgtccgatgtggaggtgtcttccccgaagcggcagcggctctcagcaagcgccaactccatctccaatggggagtatccttgcaatcaatgcgacctcaagttctccaactttgagagcttccagacccacctgaagctgcacctggagctgctgctgcggaagcaagcgtgcccccagtgcaaagaggactttgactcccaggagtccctcctgcagcacctgacagtgcattacatgaccacgtcgacccactatgtgtgcgagagctgcgacaagcaattttcctcggtggatgacctgcagaagcacctgctggacatgcacacctttgtgttgtaccactgcaccctgtgtcaggaggtcttcgactccaaggtgtccatccaggtgcacctggcggtgaagcacagcaatgagaagaagatgtaccgctgcacggcctgcaactgggacttccgcaaggaggctgacctgcaggtgcacgtcaaacacagccacctgggcaacccggccaaggctcacaagtgcatcttctgtggggagaccttcagcaccgaggtggagctgcagtgccacatcaccacacacagcaagaagtataactgtaagttctgcagcaaggccttccacgccatcatcctgctggagaagcacctgcgggagaagcactgtgtgtttgatgctgcgaccgagaacggcacggccaatggggtacccccaatggccaccaagaaagctgagcctgctgacctgcagggcatgctgcttaagaaccctgaggcacctaacagccatgaggccagcgaggatgacgtggacgcgtcggagcccatgtacggctgtgacatctgtggggcggcctacaccatggaggtgctgctgcagaatcaccggctgcgggaccacaatatccggccgggcgaggatgatggctcacgcaagaaggctgagtttatcaagggcagtcacaagtgcaacgtttgttcacggactttcttctcggagaacgggctacgggagcacctgcagacgcaccggggccctgccaagcactacatgtgtcccatctgtggtgagcgcttcccttcgctgctgacgctcaccgaacacaaggtgacccacagcaagagcctggacacgggcacctgtcgcatctgcaagatgcccctgcagagcgaggaggagtttattgagcactgccagatgcaccctgacctgcgcaactcactcacgggcttccgctgtgtggtctgcatgcagacagtcacttccacgcttgagctcaagatccatggcaccttccacatgcagaagctggcgggcagctcagcggcgtcctcccccaatggccaggggctgcagaagctctacaagtgcgccctgtgcctcaaggagttccgcagcaagcaggacctggtgaagcttgacgtcaatgggctgccctacggcctctgcgccggctgcatggcccgcagcgccaacggacaggtgggtggcctggccccgcccgagcccgccgaccggccctgtgccggcctccgttgccccgagtgcagtgtcaagtttgagagtgccgaagacctggagagccacatgcaggtggaccaccgtgacctcacgccggagaccagtgggccccggaaaggcacccagacatcgccagtgccccggaaaaagacataccagtgcatcaagtgccagatgaccttcgagaacgagagagagatccaaatccacgttgccaaccacatgattgaggaaggcatcaaccacgagtgtaagctgtgcaaccagatgttcgactccccggccaagctcctctgtcacctcattgagcacagcttcgagggcatgggcggcaccttcaaatgccccgtgtgtttcacagtcttcgtccaggccaacaagttgcagcagcacatctttgccgtgcacgggcaggaggacaagatctacgactgctcacagtgccctcagaagttcttcttccagaccgagctgcagaaccacacgatgagccagcacgcacagtgagggatcgctcaacaggacacctctccgcagaaggcttgccggagacgccgtggggagggccatttgaacattacatccaatcaaagtgtcatttgcaacccagatgtaaaactctaatgatttggccatgaggcgctgctattataagcagctggaaatgaatattaatggcagagattaaaagtattccatgctcagtattttttattgtcctgctacagctagtgtgcttttagactttccgccgcagactacatttctagagttagagaaacctgctttttaaggctattgtcctttgttccttcatgtattatattgatagtttttaaaaaagaattagtgtgattttttttctttgcttcttttttttctttcttgtttttcttcccccccaccccccacccccttcggttaactactttttaattgcaattctaggtaattgtgcatcgtgatgtgattgcttggctattgtctgaatatttccttttaattttttaattaaagactaatgctttgattggatttgccagttcaccggacagtgattaaaactatgtaatgaatataatcggtttcagtgcaactggatggtctgcttttaaatgtgacttaatctgactgcagtaactagtacagttcaataaagggaatccatgcg

SEQ ID NO: 35194 - DNA, 4201 bp, Homo sapiens
  source 1..4201: mol_type = unassigned DNA
accagtgggccggtgggaagcgcctctccagccctcgcctgccctgccgccgggtgctgggaacccgggctcaggttctggccctcttggcatcggccagtttgccctgggacgccctggtgagcagggggaaagatggtgatgacgacccacaactctcctgggtggcctcgtctccctccagcaaggatgttgcgtcacccacgcagatgatcggagatggttgtgacctcggcctcggcgaggaggaagggggcacgggcctgccatacccttgccagttctgcgacaagtccttcatccgcttgagctacttgaagaggcacgagcagatccacagcgacaagctgccgttcaagtgcacctactgcagccgcctcttcaagcacaagaggagccgtgaccggcacatcaagctgcatacgggcgacaagaagtatcactgccacgagtgcgaggcagccttctcccgcagcgaccacctcaagatccacctgaagacccacagctccagcaagcccttcaagtgcactgtgtgcaagcgcggcttctcctccaccagctcgctgcagagccacatgcaggcccacaaaaagaacaaggagcatctggccaagtcggagaaggaagccaagaaggacgacttcatgtgcgactactgcgaggacaccttcagccagacggaggagctggagaagcacgtgctcacccgccacccgcagctgtccgagaaggcggacctgcagtgcattcactgccctgaggtcttcgtcgacgagaacacactgctcgcccatatccaccaagcccacgccaaccagaaacacaagtgccccatgtgccctgagcagttctcctcagtggaaggtgtctactgccacctggacagccaccggcagcccgactccagcaaccacagtgtcagtcccgaccctgtactgggcagcgtggcctccatgagcagcgccacacccgactccagcgcctctgtggagcgtggctccaccccggactccaccttgaagccgctgcgggggcagaagaagatgcgggatgacgggcagggctggaccaaggtggtctatagctgcccctattgttccaagcgggactttaacagcctggccgtgctggagatccacctgaagaccatccacgcggacaagccccagcagagccacacatgtcagatctgcctggactccatgcccaccctctacaacctcaacgagcacgttcgcaagctgcacaagaaccatgcctaccctgtgatgcagtttggcaacatctctgccttccactgcaactactgccccgagatgttcgccgacatcaatagcctgcaggagcacatccgcgtctcccactgcggccccaacgccaacccctctgacggtaataatgctttcttctgcaaccagtgctccatgggtttccttactgagtcctccctcaccgagcacatccagcaggcccactgcagtgtgggcagtgccaaactagagtctccggtggtgcagcccacgcagtccttcatggaggtctattcctgcccctactgcaccaactcccccatctttggctccatcctgaaactcaccaagcacatcaaggagaaccacaagaacattccactggcccacagcaagaagtccaaggccgagcagagcccagtctcgtccgatgtggaggtgtcttccccgaagcggcagcggctctcagcaagcgccaactccatctccaatggggagtatccttgcaatcaatgcgacctcaagttctccaactttgagagcttccagacccacctgaagctgcacctggagctgctgctgcggaagcaagcgtgcccccagtgcaaagaggactttgactcccaggagtccctcctgcagcacctgacagtgcattacatgaccacgtcgacccactatgtgtgcgagagctgcgacaagcaattttcctcggtggatgacctgcagaagcacctgctggacatgcacacctttgtgttgtaccactgcaccctgtgtcaggaggtcttcgactccaaggtgtccatccaggtgcacctggcggtgaagcacagcaatgagaagaagatgtaccgctgcacggcctgcaactgggacttccgcaaggaggctgacctgcaggtgcacgtcaaacacagccacctgggcaacccggccaaggctcacaagtgcatcttctgtggggagaccttcagcaccgaggtggagctgcagtgccacatcaccacacacagcaagaagtataactgtaagttctgcagcaaggccttccacgccatcatcctgctggagaagcacctgcgggagaagcactgtgtgtttgatgctgcgaccgagaacggcacggccaatggggtacccccaatggccaccaagaaagctgagcctgctgacctgcagggcatgctgcttaagaaccctgaggcacctaacagccatgaggccagcgaggatgacgtggacgcgtcggagcccatgtacggctgtgacatctgtggggcggcctacaccatggaggtgctgctgcagaatcaccggctgcgggaccacaatatccggccgggcgaggatgatggctcacgcaagaaggctgagtttatcaagggcagtcacaagtgcaacgtttgttcacggactttcttctcggagaacgggctacgggagcacctgcagacgcaccggggccctgccaagcactacatgtgtcccatctgtggtgagcgcttcccttcgctgctgacgctcaccgaacacaaggtgacccacagcaagagcctggacacgggcacctgtcgcatctgcaagatgcccctgcagagcgaggaggagtttattgagcactgccagatgcaccctgacctgcgcaactcactcacgggcttccgctgtgtggtctgcatgcagacagtcacttccacgcttgagctcaagatccatggcaccttccacatgcagaagctggcgggcagctcagcggcgtcctcccccaatggccaggggctgcagaagctctacaagtgcgccctgtgcctcaaggagttccgcagcaagcaggacctggtgaagcttgacgtcaatgggctgccctacggcctctgcgccggctgcatggcccgcagcgccaacggacaggtgggtggcctggccccgcccgagcccgccgaccggccctgtgccggcctccgttgccccgagtgcagtgtcaagtttgagagtgccgaagacctggagagccacatgcaggtggaccaccgtgacctcacgccggagaccagtgggccccggaaaggcacccagacatcgccagtgccccggaaaaagacataccagtgcatcaagtgccagatgaccttcgagaacgagagagagatccaaatccacgttgccaaccacatgattgaggaaggcatcaaccacgagtgtaagctgtgcaaccagatgttcgactccccggccaagctcctctgtcacctcattgagcacagcttcgagggcatgggcggcaccttcaaatgccccgtgtgtttcacagtcttcgtccaggccaacaagttgcagcagcacatctttgccgtgcacgggcaggaggacaagatctacgactgctcacagtgccctcagaagttcttcttccagaccgagctgcagaaccacacgatgagccagcacgcacagtgagggatcgctcaacaggacacctctccgcagaaggcttgccggagacgccgtggggagggccatttgaacattacatccaatcaaagtgtcatttgcaacccagatgtaaaactctaatgatttggccatgaggcgctgctattataagcagctggaaatgaatattaatggcagagattaaaagtattccatgctcagtattttttattgtcctgctacagctagtgtgcttttagactttccgccgcagactacatttctagagttagagaaacctgctttttaaggctattgtcctttgttccttcatgtattatattgatagtttttaaaaaagaattagtgtgattttttttctttgcttcttttttttctttcttgtttttcttcccccccaccccccacccccttcggttaactactttttaattgcaattctaggtaattgtgcatcgtgatgtgattgcttggctattgtctgaatattt

SEQ ID NO: 35195 - DNA, 7660 bp, Homo sapiens
  source 1..7660: mol_type = unassigned DNA
ggaaaacttcctggagaaggatggattttaccctgtaaaagaagaaagacatggatgcataagaagagggttgaagagggggaggcctcagacttctcgctggcctgggattcctccgtgacagcagcaggaggcctagaaggagagccagagtgcgatcagaaaaccagccgtgcgctggaagacaggaacagcgtgacaagtcaagaggagagaaatgaggatgatgaagacatggaggatgaatcaatttacacctgcgatcactgtcagcaggacttcgagtctctggcagacctgacggaccaccgggcccaccgctgtcctggagatggtgatgacgacccacaactctcctgggtggcctcgtctccctccagcaaggatgttgcgtcacccacgcagatgatcggagatggttgtgacctcggcctcggcgaggaggaagggggcacgggcctgccatacccttgccagttctgcgacaagtccttcatccgcttgagctacttgaagaggcacgagcagatccacagcgacaagctgccgttcaagtgcacctactgcagccgcctcttcaagcacaagaggagccgtgaccggcacatcaagctgcatacgggcgacaagaagtatcactgccacgagtgcgaggcagccttctcccgcagcgaccacctcaagatccacctgaagacccacagctccagcaagcccttcaagtgcactgtgtgcaagcgcggcttctcctccaccagctcgctgcagagccacatgcaggcccacaaaaagaacaaggagcatctggccaagtcggagaaggaagccaagaaggacgacttcatgtgcgactactgcgaggacaccttcagccagacggaggagctggagaagcacgtgctcacccgccacccgcagctgtccgagaaggcggacctgcagtgcattcactgccctgaggtcttcgtcgacgagaacacactgctcgcccatatccaccaagcccacgccaaccagaaacacaagtgccccatgtgccctgagcagttctcctcagtggaaggtgtctactgccacctggacagccaccggcagcccgactccagcaaccacagtgtcagtcccgaccctgtactgggcagcgtggcctccatgagcagcgccacacccgactccagcgcctctgtggagcgtggctccaccccggactccaccttgaagccgctgcgggggcagaagaagatgcgggatgacgggcagggctggaccaaggtggtctatagctgcccctattgttccaagcgggactttaacagcctggccgtgctggagatccacctgaagaccatccacgcggacaagccccagcagagccacacatgtcagatctgcctggactccatgcccaccctctacaacctcaacgagcacgttcgcaagctgcacaagaaccatgcctaccctgtgatgcagtttggcaacatctctgccttccactgcaactactgccccgagatgttcgccgacatcaatagcctgcaggagcacatccgcgtctcccactgcggccccaacgccaacccctctgacggtaataatgctttcttctgcaaccagtgctccatgggtttccttactgagtcctccctcaccgagcacatccagcaggcccactgcagtgtgggcagtgccaaactagagtctccggtggtgcagcccacgcagtccttcatggaggtctattcctgcccctactgcaccaactcccccatctttggctccatcctgaaactcaccaagcacatcaaggagaaccacaagaacattccactggcccacagcaagaagtccaaggccgagcagagcccagtctcgtccgatgtggaggtgtcttccccgaagcggcagcggctctcagcaagcgccaactccatctccaatggggagtatccttgcaatcaatgcgacctcaagttctccaactttgagagcttccagacccacctgaagctgcacctggagctgctgctgcggaagcaagcgtgcccccagtgcaaagaggactttgactcccaggagtccctcctgcagcacctgacagtgcattacatgaccacgtcgacccactatgtgtgcgagagctgcgacaagcaattttcctcggtggatgacctgcagaagcacctgctggacatgcacacctttgtgttgtaccactgcaccctgtgtcaggaggtcttcgactccaaggtgtccatccaggtgcacctggcggtgaagcacagcaatgagaagaagatgtaccgctgcacggcctgcaactgggacttccgcaaggaggctgacctgcaggtgcacgtcaaacacagccacctgggcaacccggccaaggctcacaagtgcatcttctgtggggagaccttcagcaccgaggtggagctgcagtgccacatcaccacacacagcaagaagtataactgtaagttctgcagcaaggccttccacgccatcatcctgctggagaagcacctgcgggagaagcactgtgtgtttgatgctgcgaccgagaacggcacggccaatggggtacccccaatggccaccaagaaagctgagcctgctgacctgcagggcatgctgcttaagaaccctgaggcacctaacagccatgaggccagcgaggatgacgtggacgcgtcggagcccatgtacggctgtgacatctgtggggcggcctacaccatggaggtgctgctgcagaatcaccggctgcgggaccacaatatccggccgggcgaggatgatggctcacgcaagaaggctgagtttatcaagggcagtcacaagtgcaacgtttgttcacggactttcttctcggagaacgggctacgggagcacctgcagacgcaccggggccctgccaagcactacatgtgtcccatctgtggtgagcgcttcccttcgctgctgacgctcaccgaacacaaggtgacccacagcaagagcctggacacgggcacctgtcgcatctgcaagatgcccctgcagagcgaggaggagtttattgagcactgccagatgcaccctgacctgcgcaactcactcacgggcttccgctgtgtggtctgcatgcagacagtcacttccacgcttgagctcaagatccatggcaccttccacatgcagaagctggcgggcagctcagcggcgtcctcccccaatggccaggggctgcagaagctctacaagtgcgccctgtgcctcaaggagttccgcagcaagcaggacctggtgaagcttgacgtcaatgggctgccctacggcctctgcgccggctgcatggcccgcagcgccaacggacaggtgggtggcctggccccgcccgagcccgccgaccggccctgtgccggcctccgttgccccgagtgcagtgtcaagtttgagagtgccgaagacctggagagccacatgcaggtggaccaccgtgacctcacgccggagaccagtgggccccggaaaggcacccagacatcgccagtgccccggaaaaagacataccagtgcatcaagtgccagatgaccttcgagaacgagagagagatccaaatccacgttgccaaccacatgattgaggaaggcatcaaccacgagtgtaagctgtgcaaccagatgttcgactccccggccaagctcctctgtcacctcattgagcacagcttcgagggcatgggcggcaccttcaaatgccccgtgtgtttcacagtcttcgtccaggccaacaagttgcagcagcacatctttgccgtgcacgggcaggaggacaagatctacgactgctcacagtgccctcagaagttcttcttccagaccgagctgcagaaccacacgatgagccagcacgcacagtgagggatcgctcaacaggacacctctccgcagaaggcttgccggagacgccgtggggagggccatttgaacattacatccaatcaaagtgtcatttgcaacccagatgtaaaactctaatgatttggccatgaggcgctgctattataagcagctggaaatgaatattaatggcagagattaaaagtattccatgctcagtattttttattgtcctgctacagctagtgtgcttttagactttccgccgcagactacatttctagagttagagaaacctgctttttaaggctattgtcctttgttccttcatgtattatattgatagtttttaaaaaagaattagtgtgattttttttctttgcttcttttttttctttcttgtttttcttcccccccaccccccacccccttcggttaactactttttaattgcaattctaggtaattgtgcatcgtgatgtgattgcttggctattgtctgaatatttccttttaattttttaattaaagactaatgctttgattggatttgccagttcaccggacagtgattaaaactatgtaatgaatataatcggtttcagtgcaactggatggtctgcttttaaatgtgacttaatctgactgcagtaactagtacagttcaataaagggaatccatgcgattagcatccggctgcctggttctctcctccccagcctagggccgcgtggggggctgtcagctcctgtaaggtgtgttcccctacaagttcctgtgggcttgcacacgcccttggggacctgcacacaatagaccctgctccccttggaaaagaatcgtagtaacctaatgcatgcagactggacaggctggcagtggccacaggagtcaaagcagaagaccccttaatgatggaataccctgatcttcccactcttggatggggaaacagaggcccaagggtaacgtgcagctttcccaaggccacgcagcaggttggtcaccatgctgattgtgaagtcttcttggctttcccttcagggttggctttcccctttgttggatacaggcaggcaagtgggtagcccttcccttgccaggactccaggtggcacttgggttctgaggcacggagatgtgtgactggggactgcagagcagagccaggtaggagccgcaggttcccagtcatagagatcagtaggatgtgagagcattgagactggtggcgggggccaggtctggagtgaggcaggcaggggcctggggtacattatttcagggggcactcgctctcagggcccccctacacctgcaagtgctgggaatgggtgtcctcttgcattttacactctaggcaccttgcttatttcacctactcctggccctgctggcctcccagggcccacccagcagccttggtctccaggcctcctccatgttacctcccacacctccatcatgctggtgctcagctgacttgccaatcagaggccagaacttgcacggggaaacccttccttgctaacttttcacaaggggcaaggaaattggttattaccctctgcagagcggaaatgaaacaggcagacagattgcacctaattataatgtaatactaagtcacgggtgtggaatttggagcaattatacccatcatcttctagaagactcccatatcaaggggcttctggtgacctataagagttcccctttctttctgtcacctcatgtaatgttctcacgcgggtggggctttcagtttttcaaaaggcatcttacatatgtgaatcatagagcagaccctgccagtagtgggctgttgcctcctggaaactgaaggctgtgaatgccaattttcagcctcctggagacctggcagttttgggggaagaccccagggtagacaccagtgttcctctaagtgtgcccacccgtggactggggcttggggcctggggctggggctatgtctgagtgaggctgccacacatccacagccaggcctaccttttgggcagtgctgggactgtcgatgggaccagtatgtcccggggcctgccacatctccgtctcagggccctctccagctctggatttatcccaaaccccatggagcccaggtgagccctcagtaactaccaatagaagattcgatttgacggttggtggcgtagggctaaattagtcactgcccccattaaaaatacagcggggggtttaagagcttttcacgccatgtgggaatcagcagcgaagccggctgatgccttgggtaaggagagaggcggcctaggggaccgtgaggtaatgaggtttatggcggtgacaaggcagccagggaaccccaccgactcccccctcaccccggccgcattgttctccggctggctctgtccctgctgctacggctgagagcccctcgtgactttgtgtggggagggggctggcagtggggaccctgaggcccttcctgggactggcattctttaccatcaggtggtattagggttggggagcagtgtagggttataaacctgtgcctcggagaactcactaaccccttccagaggaaaggtctggagctgggatgagacacttgcctttcaactgtgaggggccttagagggtctctgggaggcttgtatgaagtgatgcctgacaaagggctgcacacagagacctgtaagcagcatggtcatcaatgatggtgccaggcatcctgcaggagggcaccttttcagccaggagggcgcgatggaatcagcctctcatttggatttggctttggggagtgggcgaggtgactgaaagcctaaggttcattgctgctgtatttagatgtacaaattgtcagtttctagcggctctctgggcagaggaattttgcccaggctgggaaatggaccaggacccttgggccacaggcccctgtcatggaacacctgcccagagtgcccagaagcaggcaggtaagggtttcagtctcagtggagaaactgtcatgggagaaatcttctcgagttccccagccttaaagaacgctccttttaaattcacagttgtgtaatattgaacttttcacctgtttttcttccctcctaaggtgtgtgttcctagggatggaacctgtacctataaatattcagtaaataggaccaaaactcaaatccatcccttcctctactcatccattcagcaagtatttactgagctgcccccaggtgccaggcactgcacagggcactggggataaggagatgaccagcagatgtggtccctggcctcatggaggccacagtggcacaggcaagcatgccagtaaatgcatagccacacctggtcatgagtgccgtgatggcaaagccagaagctgccagggattaatggagggacccgtgtatgagacacaggggtgcattaaggaaggccttgctgaggcaggggcttgagacctgaagaaataagggaggtgggcagtccaagagcagtgggaagagaacactgcaaatgcagaagccgtgagctggaaacgagccagaagtacccttagagagctgtattcctatggagtttcaattctaggtggcttaaaacaatcccagagaagttcagaatcttgtccaagatcataccattcaggatagacttgcgactataacttgggtgcctcaccttccagcctggggtgtctgactccattgttaattttattataacaatcatgatgacaacgatgaataaagtgaaattgtactgtacaggaaa

SEQ ID NO: 35196 - DNA, 2848 bp, Homo sapiens
  source 1..2848: mol_type = unassigned DNA
gctgcagttggagctctgcgtctcgtcttcgttcttctgtgtcctctgctgctagaggtccagcctctgtggctctgtgacctgcgggtattgggggatccacagctaagacgccaggaccccccggaagcctagaaatgggaccattgacatttatggatgtggccatagaattctgtctggaggagtggcaatgcctggacattgcacagcagaatttatataggaatgtgatgttagagaactacagaaacctggtcttcctgggtattgctgtctctaagccagacctgatcacctgtctggagcaagaaaaagagccttgggagcctatgaggagacatgaaatggtagccaaacccccagttatgtgttctcattttacccaagacttttggccagagcagcatataaaagatcctttccaaaaagcgacactgagaagatataaaaactgtgaacataaaaatgtacatttaaaaaaagaccataaaagtgtggatgagtgtaaggtgcacagaggaggttataatggatttaaccaatgtttgccagctacccagagcaaaatatttctatttgataaatgtgtgaaagcctttcataaattttcaaattcaaacagacataagataagccatactgaaaaaaaacttttcaaatgcaaagaatgtggcaaatcattttgcatgcttccacatctagctcaacataaaataattcataccagagtgaatttctgcaaatgtgaaaaatgtggaaaagcttttaactgcccttcaatcatcactaaacataagagaattaatactggagagaaaccctacacatgtgaagaatgtggcaaagtctttaattggtcctcacgccttactacacataaaaaaaattatactagatacaaactctacaaatgtgaagaatgtggcaaagcttttaacaagtcctcaatccttactacccataagataattcgcactggagagaaattctacaaatgtaaagaatgtgccaaagcttttaaccaatcctcaaaccttactgaacataagaaaattcatcctggagagaaaccttacaaatgtgaagaatgtggcaaagcctttaactggccctcaactcttactaaacataagagaattcatactggagagaaaccctacacatgtgaagaatgtggcaaagcctttaaccagttctcaaaccttactacacataagagaatccatactgcagagaaattctataaatgtacagaatgtggtgaagcttttagccggtcctcaaaccttactaaacataagaaaattcatactgaaaagaaaccctacaaatgtgaagaatgtggcaaagcttttaagtggtcctcaaagcttactgaacataagttaactcatactggagagaaaccctacaaatgtgaagaatgtggcaaagcctttaactggccctcaacccttactaaacataacagaattcatactggagagaaaccctacaaatgtgaagtatgtggcaaagcctttaaccagttctcaaaccttactacacataagagaattcatactgcagaaaaaccgtacaaatgtgaagaatgtggcaaagcttttagccggtcctcaaaccttactaaacataagaaaattcacattgaaaagaaaccctacaaatgtgaagaatgtggcaaagcttttaagtggtcctcaaagcttactgaacataagataactcatactggagagaaaccctacaaatgtgaagaatgtggcaaagcttttaaccatttctcaatccttaccaaacataagaggattcatactggagagaaaccctacaagtgtgaagaatgtggcaaagcttttacccaatcctcaaaccttactacacataagaaaattcatactggagagaaattctacaaatgtgaagaatgtggcaaagcttttacccaatcttcaaaccttactacacataaaaaaattcatactggaggaaaaccctacaaatgtgaagaatgtggcaaagcttttaaccagttctcaactcttactaaacataagataattcacactgaggagaaaccctacaaatgtgaagaatgtggcaaagcctttaagtggtcctcaacccttactaaacataagataattcatactggagagaaaccctacaaatgtgaagaatgtggcaaagcttttaaactgtcctcaaccctttctacacataagattattcatactggagagaaaccctacaaatgtgaaaaatgtggcaaagcttttaaccgatcctcaaaccttattgaacataagaaaattcatactggagagcaaccctacaaatgtgaagaatgtggcaaagcatttaactattcctcacaccttaatacacataagagaattcatactaaagagcaaccctacaaatgtaaagaatgtggcaaagctttcaaccaatattcaaaccttactacacataacaaaattcatactggagagaaactctacaaacctgaagatgtgacagtgattttgacaacacctcaaactttttcaaacataaaataaattatactggtgagaaattctagaaatgtaaagaatgtgataaaggctttacatggttgtcacacttgattgtaggtaagataatttacattggagtaaacttctacaagtgtgaagaatgtggcaaaacttttaattaatgctcgtaccttattgcacaggaaagaatttttacttggaaaaaggtatatacacaaagaatgtggaaaagccattaatatgtgctcatatcttactcaacatcagagagtctgtacttaataaaaccattatagatgcaa

SEQ ID NO: 35197 - DNA, 3397 bp, Homo sapiens
  source 1..3397: mol_type = unassigned DNA
cttttccgcgttctccaactcgggaatccccggtgactttgtcgcagcctccgttaccctgtgatctgcaagtcctgggagacgcacagctaagatgcccggacatcctggaagctgggaaatggtgggttggttactctcagaccaagattcagtacacatgtgaggctgtgactgcactgaaaagcacagtccgcagacaaaattgtggctctcttgcaataccgtcaaccattgagattgtgactcacgtacttagacagacccaacatacaggaggtgttgaccctcatacctggaacctggacatgtgtggaatttctaatctcattcctggactttcctgcaggtgatgtgactcttcttcagcctgcaccctgccaaaagaggattgtgatgtatcactggacccagcacctagatgacgtaactctcatcttttgcctggaccttgcatattttgggtgtgattgtgacacatacctctgctcagaatgtgagcgatttgactctcctgcctgggcccagtacacagatgggattgtgacatatcgctggacccagcatgtagatcatgtgaccctatactcttgccttggtgctgtcgcagagggcattgtgacatatcactggtccctgcacccagggaccattgacatttatggatgtggccatagaattctgtctggaggagtggcaatgcctggacattgcacagcagaatttatataggaatgtgatgttagagaactacagaaacctggtcttcctgggtattgctgtctctaagccagacctgatcacctgtctggagcaagaaaaagagccttgggagcctatgaggagacatgaaatggtagccaaacccccagttatgtgttctcattttacccaagacttttggccagagcagcatataaaagatcctttccaaaaagcgacactgagaagatataaaaactgtgaacataaaaatgtacatttaaaaaaagaccataaaagtgtggatgagtgtaaggtgcacagaggaggttataatggatttaaccaatgtttgccagctacccagagcaaaatatttctatttgataaatgtgtgaaagcctttcataaattttcaaattcaaacagacataagataagccatactgaaaaaaaacttttcaaatgcaaagaatgtggcaaatcattttgcatgcttccacatctagctcaacataaaataattcataccagagtgaatttctgcaaatgtgaaaaatgtggaaaagcttttaactgcccttcaatcatcactaaacataagagaattaatactggagagaaaccctacacatgtgaagaatgtggcaaagtctttaattggtcctcacgccttactacacataaaaaaaattatactagatacaaactctacaaatgtgaagaatgtggcaaagcttttaacaagtcctcaatccttactacccataagataattcgcactggagagaaattctacaaatgtaaagaatgtgccaaagcttttaaccaatcctcaaaccttactgaacataagaaaattcatcctggagagaaaccttacaaatgtgaagaatgtggcaaagcctttaactggccctcaactcttactaaacataagagaattcatactggagagaaaccctacacatgtgaagaatgtggcaaagcctttaaccagttctcaaaccttactacacataagagaatccatactgcagagaaattctataaatgtacagaatgtggtgaagcttttagccggtcctcaaaccttactaaacataagaaaattcatactgaaaagaaaccctacaaatgtgaagaatgtggcaaagcttttaagtggtcctcaaagcttactgaacataagttaactcatactggagagaaaccctacaaatgtgaagaatgtggcaaagcctttaactggccctcaacccttactaaacataacagaattcatactggagagaaaccctacaaatgtgaagtatgtggcaaagcctttaaccagttctcaaaccttactacacataagagaattcatactgcagaaaaaccgtacaaatgtgaagaatgtggcaaagcttttagccggtcctcaaaccttactaaacataagaaaattcacattgaaaagaaaccctacaaatgtgaagaatgtggcaaagcttttaagtggtcctcaaagcttactgaacataagataactcatactggagagaaaccctacaaatgtgaagaatgtggcaaagcttttaaccatttctcaatccttaccaaacataagaggattcatactggagagaaaccctacaagtgtgaagaatgtggcaaagcttttacccaatcctcaaaccttactacacataagaaaattcatactggagagaaattctacaaatgtgaagaatgtggcaaagcttttacccaatcttcaaaccttactacacataaaaaaattcatactggaggaaaaccctacaaatgtgaagaatgtggcaaagcttttaaccagttctcaactcttactaaacataagataattcacactgaggagaaaccctacaaatgtgaagaatgtggcaaagcctttaagtggtcctcaacccttactaaacataagataattcatactggagagaaaccctacaaatgtgaagaatgtggcaaagcttttaaactgtcctcaaccctttctacacataagattattcatactggagagaaaccctacaaatgtgaaaaatgtggcaaagcttttaaccgatcctcaaaccttattgaacataagaaaattcatactggagagcaaccctacaaatgtgaagaatgtggcaaagcatttaactattcctcacaccttaatacacataagagaattcatactaaagagcaaccctacaaatgtaaagaatgtggcaaagctttcaaccaatattcaaaccttactacacataacaaaattcatactggagagaaactctacaaacctgaagatgtgacagtgattttgacaacacctcaaactttttcaaacataaaataaattatactggtgagaaattctagaaatgtaaagaatgtgataaaggctttacatggttgtcacacttgattgtaggtaagataatttacattggagtaaacttctacaagtgtgaagaatgtggcaaaacttttaattaatgctcgtaccttattgcacaggaaagaatttttacttggaaaaaggtatatacacaaagaatgtggaaaagccattaatatgtgctcatatcttactcaacatcagagagtctgtacttaataaaaccattatagatgcaactagtgtcaaaagatctttcagaaaataaaagcctttaaagtg

SEQ ID NO: 35198 - DNA, 5584 bp, Homo sapiens
  source 1..5584: mol_type = unassigned DNA
tctccaactcgggaatccccggtgactttgtcgcagcctccgttaccctgtgatctgcaagtcctgggagacgcacagctaagatgcccggacatcctggaagctgggaaatgacagacccaacatacaggaggtgttgaccctcatacctggaacctggacatgtgtggaatttctaatctcattcctggactttcctgcaggtgatgtgactcttcttcagcctgcaccctgccaaaagaggattgtgatgtatcactggacccagcacctagatgacgtaactctcatcttttgcctggaccttgcatattttgggtgtgattgtgacacatacctctgctcagaatgtgagcgatttgactctcctgcctgggcccagtacacagatgggattgtgacatatcgctggacccagcatgtagatcatgtgaccctatactcttgccttggtgctgtcgcagagggcattgtgacatatcactggtccctgcacccagggaccattgacatttatggatgtggccatagaattctgtctggaggagtggcaatgcctggacattgcacagcagaatttatataggaatgtgatgttagagaactacagaaacctggtcttcctgggtattgctgtctctaagccagacctgatcacctgtctggagcaagaaaaagagccttgggagcctatgaggagacatgaaatggtagccaaacccccagttatgtgttctcattttacccaagacttttggccagagcagcatataaaagatcctttccaaaaagcgacactgagaagatataaaaactgtgaacataaaaatgtacatttaaaaaaagaccataaaagtgtggatgagtgtaaggtgcacagaggaggttataatggatttaaccaatgtttgccagctacccagagcaaaatatttctatttgataaatgtgtgaaagcctttcataaattttcaaattcaaacagacataagataagccatactgaaaaaaaacttttcaaatgcaaagaatgtggcaaatcattttgcatgcttccacatctagctcaacataaaataattcataccagagtgaatttctgcaaatgtgaaaaatgtggaaaagcttttaactgcccttcaatcatcactaaacataagagaattaatactggagagaaaccctacacatgtgaagaatgtggcaaagtctttaattggtcctcacgccttactacacataaaaaaaattatactagatacaaactctacaaatgtgaagaatgtggcaaagcttttaacaagtcctcaatccttactacccataagataattcgcactggagagaaattctacaaatgtaaagaatgtgccaaagcttttaaccaatcctcaaaccttactgaacataagaaaattcatcctggagagaaaccttacaaatgtgaagaatgtggcaaagcctttaactggccctcaactcttactaaacataagagaattcatactggagagaaaccctacacatgtgaagaatgtggcaaagcctttaaccagttctcaaaccttactacacataagagaatccatactgcagagaaattctataaatgtacagaatgtggtgaagcttttagccggtcctcaaaccttactaaacataagaaaattcatactgaaaagaaaccctacaaatgtgaagaatgtggcaaagcttttaagtggtcctcaaagcttactgaacataagttaactcatactggagagaaaccctacaaatgtgaagaatgtggcaaagcctttaactggccctcaacccttactaaacataacagaattcatactggagagaaaccctacaaatgtgaagtatgtggcaaagcctttaaccagttctcaaaccttactacacataagagaattcatactgcagaaaaaccgtacaaatgtgaagaatgtggcaaagcttttagccggtcctcaaaccttactaaacataagaaaattcacattgaaaagaaaccctacaaatgtgaagaatgtggcaaagcttttaagtggtcctcaaagcttactgaacataagataactcatactggagagaaaccctacaaatgtgaagaatgtggcaaagcttttaaccatttctcaatccttaccaaacataagaggattcatactggagagaaaccctacaagtgtgaagaatgtggcaaagcttttacccaatcctcaaaccttactacacataagaaaattcatactggagagaaattctacaaatgtgaagaatgtggcaaagcttttacccaatcttcaaaccttactacacataaaaaaattcatactggaggaaaaccctacaaatgtgaagaatgtggcaaagcttttaaccagttctcaactcttactaaacataagataattcacactgaggagaaaccctacaaatgtgaagaatgtggcaaagcctttaagtggtcctcaacccttactaaacataagataattcatactggagagaaaccctacaaatgtgaagaatgtggcaaagcttttaaactgtcctcaaccctttctacacataagattattcatactggagagaaaccctacaaatgtgaaaaatgtggcaaagcttttaaccgatcctcaaaccttattgaacataagaaaattcatactggagagcaaccctacaaatgtgaagaatgtggcaaagcatttaactattcctcacaccttaatacacataagagaattcatactaaagagcaaccctacaaatgtaaagaatgtggcaaagctttcaaccaatattcaaaccttactacacataacaaaattcatactggagagaaactctacaaacctgaagatgtgacagtgattttgacaacacctcaaactttttcaaacataaaataaattatactggtgagaaattctagaaatgtaaagaatgtgataaaggctttacatggttgtcacacttgattgtaggtaagataatttacattggagtaaacttctacaagtgtgaagaatgtggcaaaacttttaattaatgctcgtaccttattgcacaggaaagaatttttacttggaaaaaggtatatacacaaagaatgtggaaaagccattaatatgtgctcatatcttactcaacatcagagagtctgtacttaataaaaccattatagatgcaactagtgtcaaaagatctttcagaaaataaaagcctttaaagtgaagaagataattcattctgaagacaaacattacaaatattaagagggttgtagtaccattacttgcatcacagatcttattgtacacattttgtactaaagaaaaccctgaagcagttgctcaaatactgttcaacatcagaaaatttatattggaaaaaacccctggaaaatgtaataaatttgtaaaaacagttttgaaaaactacagcttataaaacatgagggtctataatgcttggttgatagtacaaagtttattcaacatcagggaatttatattggagaaaaaccctacaaatgtaatcagtttggaaaaacatttttaaaaaaaccacagcatagaaaacaccacagggttcatactaaaatatgtttttgcagatgcagtaaaaatgaaaaaaatttaatccgaaattaagtttatgtaaatatctgagaattcacagtagaaatatctaaggcgcggacacttcagacattacactaaatcagtgctaagtacagaaaacaacacaaaataaaacttggtggataaattatttgtatataacattaaaagaagtagaagattttcagttataattacaattaaagtatacttttatcttgaaaaaattactgatttttaaattagtgaataatgatgtaattaaactctcaaataactttatgctcttttttcattcctgctatattcacatgtgaaagcatgtgaccaattgttgctgcaccaaagatatgagagattcttttattaggtgggcattatttaaaacattttttatggaacagtaaggatattaaagtgtaagatgcagccaggcatggtggctcatgcctataatcccagcactttgggaggctgaggccggtggatcacctgaggtcaggagtttgagaccagcctgaccaacatggtgaaaccctgtctttactaaaaatacaaaaatttaccaggcacctataatcccagctacttcaaaggctgaagcaggagaatcacttgaacctggaaagtggaggtctcagtgagccgaaatcataccattgcactccaacctgggcaacaaaagtcaaactccatctcaaaaagaaaaaaaaaaaaaaaaaagatgcgtgatgaaaatgtaactggagaggctctttgtggttaacttataaaggagtgatgcaggagataggttttcagagtaatattcttctgcattatagtgacaaaagttttttattttagttaaaattggttaaattagtaagtcattttacttattgtaattttatgtaattaaatgtacatttttaaatttttagattacatgtaaatataacttttaaaaaaatgtgttaagaccattgtacattcaatgaagcattattatgcttctaactttaacctatttcaccttactcaagagtgtatgtaaaagatggtaacaatatactatttggtaacataatggactaacatttctattaatctatttcaccagtggctttcaactgcaaataagttaaagaatatttttctataggttaaatattcttttttgtcttatttaaacttactgttcttaatttctgtgggtacatagtatgattttaattaccttattttattctttgtgctattcataattttttttgtttgtttggtttttttttttgagacagagtcttgctctcgcccaggctggagtgcagtggcgcgatcttggctcactgcaagctccgcctcccaggttcactccattctcctgcctcagcctcccaagtagctgggaccacaggcgcccactacttgtttgggtttttttttggagatggagtctcgctctgtcacccaggctggagtacagtggcatgatcttggctcactgcaacccccacctccccggttcaagtgattctcctgcctcagcctcccgaatagctgggattacaggcgtccaccatcacaccaggctaatttttgtatttttagtagagatggagtttcaccatgttggccaggatggtctcgatcttctgacctcatgatctgcctgcctcggcctcccagagttctgggaccacaggcatgagccactgcacctggccaaatgtgtatatatttatgcaatatataacatgttttgatacaggcatataatatgtattagtcacatcaggataaagtatctattaccttcagcatttatcctttgtattacaagccaattctacacttcattattttaatgtacaattaaattgttattgactacagggtcattttaattataaaaattatatagaagtataaataaagtccatacattcctgagtcatgaa

SEQ ID NO: 35199 - DNA, 3919 bp, Homo sapiens
  source 1..3919: mol_type = unassigned DNA
agcggacagggcggcttccgggtttggcggggcctttgtccctcgctgtggcctgagctccaggtctcgtcttcagcgctctgtgtcctctgctcctagaggtccaggctctgtggccctgtgacccgcaggtattgggagatctacagctaagacgccaggaacccctggaagcctagaaatggagaacctgaagtctggagtgtatcctctcaaggaagcaagtggatgccctggggctgacaggaatcttctggtgtactctttttatgaaaaggggccattgacatttagggatgtggccatagaattttctctggaggagtggcaatgcctggacactgctcagcaggatttgtatagaaaagtgatgttagagaactacagaaacctggtcttcttggcaggtattgctgtttctaagccagacctgatcacctgtctagagcaaggaaaagagccctggaatatgaagagacatgcgatggtagatcaacccccagttacatattctcattttgcccaagacctttggccagagcagggcataaaagattctttccaagaagtcatattgagaagatatggaaaatgtggacatgaagatttacagttaagaacaggctgtaaaagtgtggatgagtgtaatctgcacaaagaatgttatgatgaactaaaccagtgtttgacaactacccagagtgaaatatttcaatatgataaatatgtgaatgtcttttataaattttcaaatccaaatatacaaaagataagacatactggaaagaagcctttcaaatgtaaaaaatgtgacaaatcgttttgcatgcttttacacctaactcaacataaaagaattcatattagggaaaattcttaccaatgtgaagaatgtggtaaagtctttaactggttctcaacccttactagacacagaagaattcatactggagagaaaccctacaaatgtgaacaatgtggcaaagcttttaagcagtcctcaacccttactacacataagataattcatactggagagaaaccctacagatgtgaagaatgtggcaaaacctttaaccggtcctcacaccttactacacataaaagaattcatactggagagaaaccctacagatgtgaagaatgtggcagagcttttaaccggtcctcacaccttactacacataagattattcatactggagagaaaccctacaaatgtgaagaatgtggcaaagcttttaaccaatcctcaacccttactacacataagataattcatgctggagagaaaccttacaaatgtgaagaatgtggcaaagctttttaccgattctcataccttactaaacataagataattcatactggagagaaattctacaaatgtgaagaatgtggcaaaggctttaattggtcctcgacccttactaaacataaaagaattcatactggagagaaaccctacaaatgtgaacaatgtggcaaagcttttaatgagtcctcaaaccttactgcacataagataattcatactggagagaaaccctacaaatgtgaagaatgtggcaaagcctttaaccggtccccaaaacttactgcacataaggtaattcattctggagagaaaccctacaaatgtgaagaatgtggcaaagcttttaaccaattctcaaaccttactaaacataagataactcatattggagatacatcttacaaatacctagaatgtgataaagcctttagccagtcttcaactcttactaaacataaggtaattcatactggagagaaaccctacaactgtgaagaatacggcaaagctttcaaccagtcctcaaaccttattgaacaaagtaattcatactggagagaaaccctacaaatgtgaagattgtggcaaagcctctaacccgtcctgaattcttactaaacataagaacattcatactgaagaggaaccctatgagtgtgaagaatatggcaaagccttcaacaagtcctcaattcttaccagacataagataattctggctgggtgcggtggctcacacctgtaatcccagcactttgggaggctgagacgggtgaattacatgaggttgggagttcgagaccagcctgaccaacatggtgaaatcctgtctctactaaaaatacaaaattagccatgcgtagtggtgcatgcctgtaatcccagctactcgggaggctgaggcaggagaattgcttgaacccgggaggcagaggttgaagtgagctgagatcgcgccattgcactccagcctgggcaacaagagtggcactccatctcagaaaaaaaaaaaaaagataattcatactgaaaagaaactctacaaacttgaaagatgtgacagtgcttttgacaacacctaaaacttttaaacataaaaaatcatactggtgagaaatcctagaaatgtaaagaatgtgacaaggcctttaaatggttgtcacacttcattataggtaagatagttcatactgaagaaaacttctacaagtgtgaacagtgtggcaaaacttttaatgaatgctcacaccttattgcacaggagagcatttatacttgaaaaaaattgtacaaatataaagaccatgaaaaagccattaatatctattcacatcttaccactggagagttcatacttaataaaaggaatataagtgcaattactgtcaaaagatctttcagaaaatataaacctttaaagcgaagaaggtatttattttgaagatgaacactacaaatgtgaagagggttgtagtacctttatttgtatcacagattttattgtacacattttgtactagaagaaaactctgaagtagttgctcaaactttgttcaacatcagggaatttatattgaagaaaaactttgcaaatttaataaattttaaaaaacactttttcaaaaagtacagcttagaagacaccagagttcatactaaaatatatttttgcagatgcagtaaaaatgaaaatatttaatccaaaattaagtctatgtaaatatcagagaatttactgtagaaatatataaggcactgagacttcagatattatactaaatcagagtgctgagtatagaaaataaaactgaagttggggccaggtgcagtggctcacacctgtaatccagcactttgggaggccgagaagggtggatcacctgaggtcaggagtttgagaccagcctgactaacatggagaaaacacggctctactaaaaatacaaaattagccagctgtggtggtgtatgcctgtaatcacagctactcgagaggctgaggcaggagaattgcttgaacccgggaggtggagagtgcagtgaactgaaattgcgccattgcactccagcctgggcaacaagagtgaaactccatttcaaaaaaaaaaaaaaaaaaacaactaaagttggtagaaaaattatttgtatataactttaaaaggagtagaagggctttttgcagagttattacgtttgaagtatactttatttcttgaaaaaattacagattttttgtaaataatgatgtaattcaactctcaaaatatttcctactgtttctttattccagttgtattcacatgtgaaagcatgtgatcagttattgctgcattaaaaacatgagtcttttttattaggtggccattatttatgatcttttctatgaaagagtaaggacattaaaatgtaagatgcatgatgaaaaattaagtgaagaggctctttatggttaatttatattgaataatgcattaggtaggtgttcagagtaatattttgcgttgtgagaacatttttaattttatttaaaattaaatgaaaataaattagtatattattgtactaattgtacttttgtataataaaatccagtgtatttta

SEQ ID NO: 35200 - DNA, 4071 bp, Homo sapiens
  source 1..4071: mol_type = unassigned DNA
gctgcggctctggaacccgttcgcggtctctcaggttttggagacgacgatctagtggatcttttgcgggacaggagcgctgtctgctagctgcttttcctgctctctctccctggaggcgaacccttgtgctcgagatggcagccaccctgctcatggctgggtcccaggcacctgtgacgtttgaagatatggccatgtatctcacccgggaagaatggagacctctggacgctgcacagagggacctttaccgggatgttatgcaggagaattatggaaatgttgtctcactagattttgagatcaggagtgagaacgaggtaaatcccaagcaagagattagtgaagatgtacaatttgggactacatctgaaagacctgctgagaatgctgaggaaaatcctgaaagtgaagagggctttgaaagcggagataggtcagaaagacaatggggagatttaacagcagaagagtgggtaagctatcctctccaaccagtcactgatctacttgtccacaaagaagtccacacaggcatccgctatcatatatgttctcattgtggaaaggccttcagtcagatctcagaccttaatcgacatcagaagacccacactggagacagaccctataaatgttatgaatgtggaaaaggcttcagtcgcagctcacaccttattcagcatcaaagaacacatactggggagaggccttatgactgtaacgagtgtgggaaaagttttggaagaagttctcacctgattcagcatcagacaatccacactggagagaagcctcacaaatgtaatgagtgtggaaaaagtttctgccgtctctctcacctaatccaacaccaaaggacccacagtggtgagaaaccctatgagtgtgaggagtgtgggaaaagcttcagccggagctctcacctagctcagcaccagaggacccacacgggtgagaaaccttatgaatgtaacgaatgtggccgaggcttcagtgagagatctgatctcatcaaacactatcgagtccacacaggggagaggccctacaagtgtgatgagtgtgggaagaatttcagtcagaactccgaccttgtgcgtcatcgcagagcccacacgggagagaagccataccactgtaacgaatgtggggaaaatttcagccgcatctcacacttggttcagcaccagagaactcacactggagagaagccatatgaatgcaatgcttgtgggaaaagcttcagccggagctctcatctcatcacacaccagaaaattcacactggagagaagccttatgagtgtaatgagtgttggcgaagctttggtgaaaggtcagatctaattaaacatcagagaacccacacaggggagaagccctacgagtgtgtgcagtgtgggaaaggtttcacccagagctccaacctcatcacacatcaaagagttcacacgggagagaaaccttatgaatgtaccgaatgtgagaagagtttcagcaggagctcagctcttattaaacataagagagttcatacggactaagctgtaattatgatggctgagaaatgattcatttgaagatacaattttatttgatatcaatgaacgccctcaagactgagctgcttttatcatactctcctagttgtgggccacgatttaaaccatcagagatgacaagccatttgaaattctgaccctcagctttgggaatgttatctcctccaaaatggtgatttttattcactcaatgggttacttcattaaaagcagccccacaagtaactggaaatctgaagaccaggggacaaatgctggtgaatgcttaggcctggaaatggagtaaatctttcaatgttattttctcccatccttggcccaaggaactatgctaagtgaaacgtgggactgtaatagggtggtaatggctgctttggaaaaaggcaactagagactctgcctaaattgccacacctattcacacaccatagtagttgggcacacacatcttcccttccaaagggctttttccttgagttgctcatgcatttgtatcttttccatcttcctgagggcaagattttgcacgatgaaggcaatgattgtaacttttctccttctcattgtttctaattagctcctttaaagcttgcatctttgtgaaggctaactgaagatacggttggaaaggaaaaatgagacacaggtttggggaccaaggacccatcaatgatggtgactttagcagaagatgcccacagttattactgccattaatcagatttatgaattttctttggggatcactatagggaatattgtatagaaaatatcttcaagaaaagataggaccatcagtgacagttaagtgtaaggagcaagtggaattgagtccttcagggaaggaaccacagagtcccttcccaaggaatgtaggtcgtttctgtgttctttcccttctaatctttaagatcaactcttcctatcctgctaactctaagatttgataagggccacatcccagtgtttatcttagcttgcatcagggcatgtgtatgtacagtaatgtgtattcctgtggtttttctaatagaaactgaatttacagagacttagcatgttcttgggtgatgtgagtcatgtgacagaagtacagacataactccaatgtgagaaatgtccttttttcattatggaaaataatttaaacactagtgctttagtgtgcactctcctgtaaggtctgtctttgtacagagctaagcacttgtttgtatgtgtttgtcaattgtggaagataatgaccagacaaataggtcgattgtcctattctcagaatgaattatcttctatggtaatgaagaactctttggcttagtcagaaggaattaacgaacctcggtaggaatgtatttccatcctcccaccctacagatataagaggttaaaataacagttcgcccaatttaagcccagtagtgtcagttttcctaatctcagtccaggtaggaattaagaaatatctcaagtgttgatgctatccaagcatgttggggtggaagggaattggtgcccagaaaatgggactggagtgaggaatatcttttcttttgagagtacccccagtttatttctactgtgctttattgctactgttctttattgtgaatgttgtaacattttaaaaatgttttgccatagctttttaggacttggtgttaaaggagccagtggtctctctgggtgggtactataatgagttattgtgacccacagctgtgtgggaccacatcacttgttaataacacaacctttaaagtaacccatcttccaggggggttccttcatgttgccactcctttttaaggacaaactcaggcaaggagcatgtttttttgttatttacaaaatctagcagactgtgggtatccatattttaattgtcgggtgacacatgttcttggtaactaaactcaaatatgtcttttctcatatatgttgctgatggttttaataaatgtcaaagttctcctgttgcttctgtgagccactatgggtatcagcttgggagtggccatagatgaccgcatttccatgacctaactgtatttcacccccttttccttccctactgttcttgccccaccccaaccagttcctgctgctgcttttggcttcttggaggtgaagggcttaaaacaaggcttctaagcacccagctatctccatacatgaacaatctagctgggaaacttaagggacaagggccacaccagctgtctcctctttctgccaattgttgcccgtttgctgtgttgaactttgtatagaactcatgcatcagactcccttcactaatgctttttgcatgccttctgctcccaagtccctggctgcctctgcacatcccgtgaacactttgtgcctgttttctatggttgtggagaattaatgaacaaatcaatatgtagaacagttttccttatggtattggtcacagttatcctagtgtttgtattattctaacaatattctataattaaaaatataatttttaaagtca

SEQ ID NO: 35201 - DNA, 3788 bp, Homo sapiens
  source 1..3788: mol_type = unassigned DNA
gccggaaaggacccggcctcgagatggcagagcggaggcgttccctgggctgagctgagcacctcctccctgagacagcagcggtctaacccccggcgcgggagggacccagccagggggctgtcctagtagattccggcattgcctccaccccgctgtggcggagacgcagagggcgggtcgcgctcgagggtcagggaggagagtgacccggccctggtccagggccctccctgcccgccttggggccagaactccagccctggggagtgggcagggcctgttttccgtgcctcacgccctgcttttcgcctccttcagcgctgtctgctagctgcttttcctgctctctctccctggaggcgaacccttgtgctcgagatggcagccaccctgctcatggctgggtcccaggcacctgtgacgtttgaagatatggccatgtatctcacccgggaagaatggagacctctggacgctgcacagagggacctttaccgggatgttatgcaggagaattatggaaatgttgtctcactagattttgagatcaggagtgagaacgaggtaaatcccaagcaagagattagtgaagatgtacaatttgggactacatctgaaagacctgctgagaatgctgaggaaaatcctgaaagtgaagagggctttgaaagcggagataggtcagaaagacaatggggagatttaacagcagaagagtgggtaagctatcctctccaaccagtcactgatctacttgtccacaaagaagtccacacaggcatccgctatcatatatgttctcattgtggaaaggccttcagtcagatctcagaccttaatcgacatcagaagacccacactggagacagaccctataaatgttatgaatgtggaaaaggcttcagtcgcagctcacaccttattcagcatcaaagaacacatactggggagaggccttatgactgtaacgagtgtgggaaaagttttggaagaagttctcacctgattcagcatcagacaatccacactggagagaagcctcacaaatgtaatgagtgtggaaaaagtttctgccgtctctctcacctaatccaacaccaaaggacccacagtggtgagaaaccctatgagtgtgaggagtgtgggaaaagcttcagccggagctctcacctagctcagcaccagaggacccacacgggtgagaaaccttatgaatgtaacgaatgtggccgaggcttcagtgagagatctgatctcatcaaacactatcgagtccacacaggggagaggccctacaagtgtgatgagtgtgggaagaatttcagtcagaactccgaccttgtgcgtcatcgcagagcccacacgggagagaagccataccactgtaacgaatgtggggaaaatttcagccgcatctcacacttggttcagcaccagagaactcacactggagagaagccatatgaatgcaatgcttgtgggaaaagcttcagccggagctctcatctcatcacacaccagaaaattcacactggagagaagccttatgagtgtaatgagtgttggcgaagctttggtgaaaggtcagatctaattaaacatcagagaacccacacaggggagaagccctacgagtgtgtgcagtgtgggaaaggtttcacccagagctccaacctcatcacacatcaaagagttcacacgggagagaaaccttatgaatgtaccgaatgtgagaagagtttcagcaggagctcagctcttattaaacataagagagttcatacggactaagctgtaattatgatggctgagaaatgattcatttgaagatacaattttatttgatatcaatgaacgccctcaagactgagctgcttttatcatactctcctagttgtgggccacgatttaaaccatcagagatgacaagccatttgaaattctgaccctcagctttgggaatgttatctcctccaaaatggtgatttttattcactcaatgggttacttcattaaaagcagccccacaagtaactggaaatctgaagaccaggggacaaatgctggtgaatgcttaggcctggaaatggagtaaatctttcaatgttattttctcccatccttggcccaaggaactatgctaagtgaaacgtgggactgtaatagggtggtaatggctgctttggaaaaaggcaactagagactctgcctaaattgccacacctattcacacaccatagtagttgggcacacacatcttcccttccaaagggctttttccttgagttgctcatgcatttgtatcttttccatcttcctgagggcaagattttgcacgatgaaggcaatgattgtaacttttctccttctcattgtttctaattagctcctttaaagcttgcatctttgtgaaggctaactgaagatacggttggaaaggaaaaatgagacacaggtttggggaccaaggacccatcaatgatggtgactttagcagaagatgcccacagttattactgccattaatcagatttatgaattttctttggggatcactatagggaatattgtatagaaaatatcttcaagaaaagataggaccatcagtgacagttaagtgtaaggagcaagtggaattgagtccttcagggaaggaaccacagagtcccttcccaaggaatgtaggtcgtttctgtgttctttcccttctaatctttaagatcaactcttcctatcctgctaactctaagatttgataagggccacatcccagtgtttatcttagcttgcatcagggcatgtgtatgtacagtaatgtgtattcctgtggtttttctaatagaaactgaatttacagagacttagcatgttcttgggtgatgtgagtcatgtgacagaagtacagacataactccaatgtgagaaatgtccttttttcattatggaaaataatttaaacactagtgctttagtgtgcactctcctgtaaggtctgtctttgtacagagctaagcacttgtttgtatgtgtttgtcaattgtggaagataatgaccagacaaataggtcgattgtcctattctcagaatgaattatcttctatggtaatgaagaactctttggcttagtcagaaggaattaacgaacctcggtaggaatgtatttccatcctcccaccctacagatataagaggttaaaataacagttcgcccaatttaagcccagtagtgtcagttttcctaatctcagtccaggtaggaattaagaaatatctcaagtgttgatgctatccaagcatgttggggtggaagggaattggtgcccagaaaatgggactggagtgaggaatatcttttcttttgagagtacccccagtttatttctactgtgctttattgctactgttctttattgtgaatgttgtaacattttaaaaatgttttgccatagctttttaggacttggtgttaaaggagccagtggtctctctgggtgggtactataatgagttattgtgacccacagctgtgtgggaccacatcacttgttaataacacaacctttaaagtaacccatcttccaggggggttccttcatgttgccactcctttttaaggacaaactcaggcaaggagcatgtttttttgttatttacaaaatctagcagactgtgggtatccatattttaattgtcgggtgacacatgttcttggtaactaaactcaaatatgtcttttctcatatatgttgctgatggttttaataaatgtcaaagttctcctgtt

SEQ ID NO: 35202 - DNA, 3237 bp, Homo sapiens
  source 1..3237: mol_type = unassigned DNA
gctgagctgagcacctcctccctgagacagcagcggtctaacccccggcgcgggagggacccagccagggggctgtcctagtagattccggcattgcctccaccccgctgtggcggagacgcagagggcgggtcgcgctcgagggtcagggaggagagtgacccggccctggtccagggccctccctgcccgccttggggccagaactccagccctggggagtgggcagggcctgttttccgtgcctcacgccctgcttttcgcctccttcagcgctgtctgctagctgcttttcctgctctctctccctggaggcgaacccttgtgctcgagatggcagccaccctgctcatggctgggtcccaggcacctgtgacgtttgaagatatggccatgtatctcacccgggaagaatggagacctctggacgctgcacagagggacctttaccgggatgttatgcaggagaattatggaaatgttgtctcactagattttgagatcaggagtgagaacgaggtaaatcccaagcaagagattagtgaagatgtacaatttgggactacatctgaaagacctgctgagaatgctgaggaaaatcctgaaagtgaagagggctttgaaagcggagataggtcagaaagacaatggggagatttaacagcagaagagtgggtaagctatcctctccaaccagtcactgatctacttgtccacaaagaagtccacacaggcatccgctatcatatatgttctcattgtggaaaggccttcagtcagatctcagaccttaatcgacatcagaagacccacactggagacagaccctataaatgttatgaatgtggaaaaggcttcagtcgcagctcacaccttattcagcatcaaagaacacatactggggagaggccttatgactgtaacgagtgtgggaaaagttttggaagaagttctcacctgattcagcatcagacaatccacactggagagaagcctcacaaatgtaatgagtgtggaaaaagtttctgccgtctctctcacctaatccaacaccaaaggacccacagtggtgagaaaccctatgagtgtgaggagtgtgggaaaagcttcagccggagctctcacctagctcagcaccagaggacccacacgggtgagaaaccttatgaatgtaccgaatgtgagaagagtttcagcaggagctcagctcttattaaacataagagagttcatacggactaagctgtaattatgatggctgagaaatgattcatttgaagatacaattttatttgatatcaatgaacgccctcaagactgagctgcttttatcatactctcctagttgtgggccacgatttaaaccatcagagatgacaagccatttgaaattctgaccctcagctttgggaatgttatctcctccaaaatggtgatttttattcactcaatgggttacttcattaaaagcagccccacaagtaactggaaatctgaagaccaggggacaaatgctggtgaatgcttaggcctggaaatggagtaaatctttcaatgttattttctcccatccttggcccaaggaactatgctaagtgaaacgtgggactgtaatagggtggtaatggctgctttggaaaaaggcaactagagactctgcctaaattgccacacctattcacacaccatagtagttgggcacacacatcttcccttccaaagggctttttccttgagttgctcatgcatttgtatcttttccatcttcctgagggcaagattttgcacgatgaaggcaatgattgtaacttttctccttctcattgtttctaattagctcctttaaagcttgcatctttgtgaaggctaactgaagatacggttggaaaggaaaaatgagacacaggtttggggaccaaggacccatcaatgatggtgactttagcagaagatgcccacagttattactgccattaatcagatttatgaattttctttggggatcactatagggaatattgtatagaaaatatcttcaagaaaagataggaccatcagtgacagttaagtgtaaggagcaagtggaattgagtccttcagggaaggaaccacagagtcccttcccaaggaatgtaggtcgtttctgtgttctttcccttctaatctttaagatcaactcttcctatcctgctaactctaagatttgataagggccacatcccagtgtttatcttagcttgcatcagggcatgtgtatgtacagtaatgtgtattcctgtggtttttctaatagaaactgaatttacagagacttagcatgttcttgggtgatgtgagtcatgtgacagaagtacagacataactccaatgtgagaaatgtccttttttcattatggaaaataatttaaacactagtgctttagtgtgcactctcctgtaaggtctgtctttgtacagagctaagcacttgtttgtatgtgtttgtcaattgtggaagataatgaccagacaaataggtcgattgtcctattctcagaatgaattatcttctatggtaatgaagaactctttggcttagtcagaaggaattaacgaacctcggtaggaatgtatttccatcctcccaccctacagatataagaggttaaaataacagttcgcccaatttaagcccagtagtgtcagttttcctaatctcagtccaggtaggaattaagaaatatctcaagtgttgatgctatccaagcatgttggggtggaagggaattggtgcccagaaaatgggactggagtgaggaatatcttttcttttgagagtacccccagtttatttctactgtgctttattgctactgttctttattgtgaatgttgtaacattttaaaaatgttttgccatagctttttaggacttggtgttaaaggagccagtggtctctctgggtgggtactataatgagttattgtgacccacagctgtgtgggaccacatcacttgttaataacacaacctttaaagtaacccatcttccaggggggttccttcatgttgccactcctttttaaggacaaactcaggcaaggagcatgtttttttgttatttacaaaatctagcagactgtgggtatccatattttaattgtcgggtgacacatgttcttggtaactaaactcaaatatgtcttttctcatatatgttgctgatggttttaataaatgtcaaagttctcctgttg

SEQ ID NO: 35203 - DNA, 2119 bp, Homo sapiens
  source 1..2119: mol_type = unassigned DNA
aattgtcaatcaggcgcgaggcagagaggagggtgtgacgttccaggagctagtggcctcttcaccctggtgacctctgttccgtattctgtcactgagagacgccctgggacatctgtggtggcttttgtcgcgctgggacctaccctgactacgggagttgggaggacccgggacaccgcacagccgggaaatggactcagtggcctttgaggatgtggctgtgaacttcacccatgaggagtgggctttgctgggtccatcacagaagaatctctacagagatgtgatgcgagaaaccattaggaacctgaactgtataggaatgaaatgggaaaaccagaacattgatgatcagcaccaaaatctcaggagaaatccaaggtgtgatgtggtagagagatttggtaaaagtaaagatggtagtcagtgtggagaaaccttaagccagattcgaaatagtattgtaaacaagaacactcccgccagagtagatgcatgtggaagcagtgtgaatggagaagtcataatgggtcattcatccctgaattgctacatcagagttgatactggacacaaacaccgggagtgtcatgaatatgcagagaagtcatatacacataagcagtgtgggaaaggcttaagttatcgccactcctttcaaacatgtgaaaggcctcacactggaaagaaaccctatgattgtaaggaatgtggaaaaaccttcagttctcctggaaaccttcgaagacatatggtagtaaaaggtggagatggaccttataaatgtgaattgtgtgggaaagcctttttttggcccagtttattacgtatgcatgaaagaactcacactggagagaaaccatatgaatgtaagcagtgttctaaagccttccctgtttacagttcctatctaagacatgaaaaaatacacactggggagaaaccgtatgaatgtaagcagtgttctaaagccttccctgattacagttcatatctaagacatgaaagaactcacactggagagaaaccctacaaatgtaaacaatgtgggaaagccttcagtgtttccggttcccttcgagtacatgaaagaattcacactggagagaaaccctatacatgtaaacagtgtgggaaagcgttttgtcatcttggaagctttcaaagacacatgataatgcacagtggagatggacctcataaatgtaagatatgtgggaaaggctttgattttcctggttcagcacgaattcatgaaggaactcacactctagagaaaccctatgaatgtaagcaatgtgggaaattgttatctcatcgctcaagctttcgaagacacatgatggcacacactggagatggccctcataaatgcacagtatgtgggaaagcctttgattctcctagtgtatttcaaagacatgaaaggactcacactggagagaaaccctatgaatgcaagcaatgtgggaaagccttccgtacttccagttcccttcgaaaacatgaaacaacacacactggagagcaaccctataaatgtaaatgtggaaaagcttttagtgatttattttcctttcaaagtcatgaaacaacacacagtgaagaggagccttatgaatgtaaggagtgtgggaaagcatttagttcttttaaatacttttgtcgccatgaaaggactcacagtgaagaaaaatcttatgagtgtcaaatttgtggcaaagccttcagtcgtttcagttacttaaaaactcatgaaaggactcacacggcagagaagccatatgaatgtaagcaatgcaggaaagcattcttttggccctctttccttctaagacatgaaaggactcacactggagaaagaccctatgaatgtaaacactgtggtaaagccttcagtcgttccagtttctgtcgagaacatgaaagaactcacactggagagaagccctatgaatgtaaggaatgtgggaaagccttcagttctctcagttcctttaatagacataaaaggacacactggaaggatattctataagtgtatggaatgtgggaaagcattcattggttttatcacattcagatacttgaaagaaataaatcctgtgaatgtaaa

SEQ ID NO: 35204 - DNA, 2706 bp, Homo sapiens
  source 1..2706: mol_type = unassigned DNA
ctctgttccgtattctgtcactgagagacgccctgggacatctgtggtggcttttgtcgcgctgggacctaccctgactacgggagttgggaggacccgggacaccgcacagccgggaaatggccctgtgttatggaactttctggggctaccctaagatgctggaagctgccaatctcatggagggcctagtggatatcggcccttgggtcactcttcccagaggacagcctgaggtgttggagtggggcctcccaaaggatcaggactcagtggcctttgaggatgtggctgtgaacttcacccatgaggagtgggctttgctgggtccatcacagaagaatctctacagagatgtgatgcgagaaaccattaggaacctgaactgtataggaatgaaatgggaaaaccagaacattgatgatcagcaccaaaatctcaggagaaatccaaggtgtgatgtggtagagagatttggtaaaagtaaagatggtagtcagtgtggagaaaccttaagccagattcgaaatagtattgtaaacaagaacactcccgccagagtagatgcatgtggaagcagtgtgaatggagaagtcataatgggtcattcatccctgaattgctacatcagagttgatactggacacaaacaccgggagtgtcatgaatatgcagagaagtcatatacacataagcagtgtgggaaaggcttaagttatcgccactcctttcaaacatgtgaaaggcctcacactggaaagaaaccctatgattgtaaggaatgtggaaaaaccttcagttctcctggaaaccttcgaagacatatggtagtaaaaggtggagatggaccttataaatgtgaattgtgtgggaaagcctttttttggcccagtttattacgtatgcatgaaagaactcacactggagagaaaccatatgaatgtaagcagtgttctaaagccttccctgtttacagttcctatctaagacatgaaaaaatacacactggggagaaaccgtatgaatgtaagcagtgttctaaagccttccctgattacagttcatatctaagacatgaaagaactcacactggagagaaaccctacaaatgtaaacaatgtgggaaagccttcagtgtttccggttcccttcgagtacatgaaagaattcacactggagagaaaccctatacatgtaaacagtgtgggaaagcgttttgtcatcttggaagctttcaaagacacatgataatgcacagtggagatggacctcataaatgtaagatatgtgggaaaggctttgattttcctggttcagcacgaattcatgaaggaactcacactctagagaaaccctatgaatgtaagcaatgtgggaaattgttatctcatcgctcaagctttcgaagacacatgatggcacacactggagatggccctcataaatgcacagtatgtgggaaagcctttgattctcctagtgtatttcaaagacatgaaaggactcacactggagagaaaccctatgaatgcaagcaatgtgggaaagccttccgtacttccagttcccttcgaaaacatgaaacaacacacactggagagcaaccctataaatgtaaatgtggaaaagcttttagtgatttattttcctttcaaagtcatgaaacaacacacagtgaagaggagccttatgaatgtaaggagtgtgggaaagcatttagttcttttaaatacttttgtcgccatgaaaggactcacagtgaagaaaaatcttatgagtgtcaaatttgtggcaaagccttcagtcgtttcagttacttaaaaactcatgaaaggactcacacggcagagaagccatatgaatgtaagcaatgcaggaaagcattcttttggccctctttccttctaagacatgaaaggactcacactggagaaagaccctatgaatgtaaacactgtggtaaagccttcagtcgttccagtttctgtcgagaacatgaaagaactcacactggagagaagccctatgaatgtaaggaatgtgggaaagccttcagttctctcagttcctttaatagacataaaaggacacactggaaggatattctataagtgtatggaatgtgggaaagcattcattggttttatcacattcagatacttgaaagaaataaatcctgtgaatgtaaacgtggtaaagccttaagaagtttccaggctgggcgcagcggctcacacctgtaatcccagcactttgagaggccgaggagggcagatcacgaggccaggagatcgagaccagcctggctaacatgggaaaccctgtctctactaaaaatacggaaaaaaaaaaaaatagccaggcatagttgctcacacctgtagtcctagctactcaggaggctgaggcaggagaatcccttgaacccgggaggtggaggttgcagtgagccgagattgcactactgcactccagcttgggtgctagagcgagactccatctcaaaaaaaaaaaaaaaagtttccatttctttcaaatagagttgctgcctgctatatgcaagaagattggttccagtacaccctgagtatacctaaatccacagatgccagctcttttataaaatggaatattcgcatgtacctacccacattctcctgtatactctataaatgtctagattaattaaaatatctcatgcattgt

SEQ ID NO: 35205 - DNA, 3236 bp, Homo sapiens
  source 1..3236: mol_type = unassigned DNA
actgagagacgccctgggacatctgtggtggcttttgtcgcgctgggacctaccctgactacgggagttgggaggacccgggacaccgcacagccgggaaatggccctgtgttatggaactttctggggctaccctaagatgctggaagctgccaatctcatggagggcctagtggatatcggcccttgggtcactcttcccagaggacagcctgaggtgttggagtggggcctcccaaaggatcaggactcagtggcctttgaggatgtggctgtgaacttcacccatgaggagtgggctttgctgggtccatcacagaagaatctctacagagatgtgatgcgagaaaccattaggaacctgaactgtataggaatgaaatgggaaaaccagaacattgatgatcagcaccaaaatctcaggagaaatccaaggtgtgatgtggtagagagatttggtaaaagtaaagatggtagtcagtgtggagaaaccttaagccagattcgaaatagtattgtaaacaagaacactcccgccagagtagatgcatgtggaagcagtgtgaatggagaagtcataatgggtcattcatccctgaattgctacatcagagttgatactggacacaaacaccgggagtgtcatgaatatgcagagaagtcatatacacataagcagtgtgggaaaggcttaagttatcgccactcctttcaaacatgtgaaaggcctcacactggaaagaaaccctatgattgtaaggaatgtggaaaaaccttcagttctcctggaaaccttcgaagacatatggtagtaaaaggtggagatggaccttataaatgtgaattgtgtgggaaagcctttttttggcccagtttattacgtatgcatgaaagaactcacactggagagaaaccatatgaatgtaagcagtgttctaaagccttccctgtttacagttcctatctaagacatgaaaaaatacacactggggagaaaccgtatgaatgtaagcagtgttctaaagccttccctgattacagttcatatctaagacatgaaagaactcacactggagagaaaccctacaaatgtaaacaatgtgggaaagccttcagtgtttccggttcccttcgagtacatgaaagaattcacactggagagaaaccctatacatgtaaacagtgtgggaaagcgttttgtcatcttggaagctttcaaagacacatgataatgcacagtggagatggacctcataaatgtaagatatgtgggaaaggctttgattttcctggttcagcacgaattcatgaaggaactcacactctagagaaaccctatgaatgtaagcaatgtgggaaattgttatctcatcgctcaagctttcgaagacacatgatggcacacactggagatggccctcataaatgcacagtatgtgggaaagcctttgattctcctagtgtatttcaaagacatgaaaggactcacactggagagaaaccctatgaatgcaagcaatgtgggaaagccttccgtacttccagttcccttcgaaaacatgaaacaacacacactggagagcaaccctataaatgtaaatgtggaaaagcttttagtgatttattttcctttcaaagtcatgaaacaacacacagtgaagaggagccttatgaatgtaaggagtgtgggaaagcatttagttcttttaaatacttttgtcgccatgaaaggactcacagtgaagaaaaatcttatgagtgtcaaatttgtggcaaagccttcagtcgtttcagttacttaaaaactcatgaaaggactcacacggcagagaagccatatgaatgtaagcaatgcaggaaagcattcttttggccctctttccttctaagacatgaaaggactcacactggagaaagaccctatgaatgtaaacactgtggtaaagccttcagtcgttccagtttctgtcgagaacatgaaagaactcacactggagagaagccctatgaatgactcagtgacctttgaagatgtggctgtgaacttcacccaggaggaatggactttgctggatccttcacagaaaaaactctacagagacgtgatgtgggaaaccttcaggaacctggccactataggaacaaaacaaaaagaatggaacattgaagagcagtacaaaaaccaggggagaaatctcagaaatcatatggtagagagactctgtgaaagtaaagaaggtagtcatggcggagaaggtttcagccagattgcaaatctcagtctgaacaagaaaactccttctggaggaaagctttgggaaagcagtgtatgtggaaaagtcttgagccatcattcatcccttaacaggcacattagatcttacaccagacacaaactgtataagtgtcaggaatatggagagaagccatataaatgtaagaaatgtgggaaacccttcagttatctgcagtcttttaaaaaacataaaagaacacacagtgcagggatagtctacaaatgtaaggcctgtgggaaagccttcagttgtcaacgttctttccaaatacatggaaggactcacactggagataaaccctttaagtgtaaagaatgtggaaaagcattccgataccaccaatctgctcaaaaacatgaaaaggctcatactggagagaaaccctacaaatgtaaggaatgtgggaaacccttcatttaccgccattctgctcgagcacatgaaaggaatcacactgtacagaaacgctatgaatgtaaacaatgtggaaaaacctacatatcttctgtaggttttcaagcacatgaaagaactcacactggagaaaaaccctatgaatgtaaaaaatgtgggaaagtgttcgtatatcacaactctgctcaaagacatgaaaagactcatactggagagaaaccctacaaatgcaaggaatgtgggaaagccttcagttaccactgtactgctcaaaaacatgagaggaatcacactgcacagaaacactatgaatgtaaactgtgtgggaaaacttacttgtctcctttaggttttcaagcacatgaaagtactcacactggagataaaccctttgagtgtaaaaaatgtggaaaagcatttagatactactactcagctcaaagacatgaaaggactcatactggagagaaaccctacaaatgtaaggaatgtgggaaagccttttattgttgcagttctgcccga

SEQ ID NO: 35206 - DNA, 2372 bp, Homo sapiens
  source 1..2372: mol_type = unassigned DNA
tggcctcttcaccctggtgacctctgttccgtattctgtcactgagagacgccctgggacatctgtggtggcttttgtcgcgctgggacctaccctgactacgggagttgggaggacccgggacaccgcacagccgggaaatggactcagtggcctttgaggatgtggctgtgaacttcacccatgaggagtgggctttgctgggtccatcacagaagaatctctacagagatgtgatgcgagaaaccattaggaacctgaactgtataggaatgaaatgggaaaaccagaacattgatgatcagcaccaaaatctcaggagaaatccaaggtgtgatgtggtagagagatttggtaaaagtaaagatggtagtcagtgtggagaaaccttaagccagattcgaaatagtattgtaaacaagaacactcccgccagagtagatgcatgtggaagcagtgtgaatggagaagtcataatgggtcattcatccctgaattgctacatcagagttgatactggacacaaacaccgggagtgtcatgaatatgcagagaagtcatatacacataagcagtgtgggaaaggcttaagttatcgccactcctttcaaacatgtgaaaggcctcacactggaaagaaaccctatgattgtaaggaatgtggaaaaaccttcagttctcctggaaaccttcgaagacatatggtagtaaaaggtggagatggaccttataaatgtgaattgtgtgggaaagcctttttttggcccagtttattacgtatgcatgaaagaactcacactggagagaaaccatatgaatgtaagcagtgttctaaagccttccctgtttacagttcctatctaagacatgaaaaaatacacactggggagaaaccgtatgaatgtaagcagtgttctaaagccttccctgattacagttcatatctaagacatgaaagaactcacactggagagaaaccctacaaatgtaaacaatgtgggaaagccttcagtgtttccggttcccttcgagtacatgaaagaattcacactggagagaaaccctatacatgtaaacagtgtgggaaagcgttttgtcatcttggaagctttcaaagacacatgataatgcacagtggagatggacctcataaatgtaagatatgtgggaaaggctttgattttcctggttcagcacgaattcatgaaggaactcacactctagagaaaccctatgaatgtaagcaatgtgggaaattgttatctcatcgctcaagctttcgaagacacatgatggcacacactggagatggccctcataaatgcacagtatgtgggaaagcctttgattctcctagtgtatttcaaagacatgaaaggactcacactggagagaaaccctatgaatgcaagcaatgtgggaaagccttccgtacttccagttcccttcgaaaacatgaaacaacacacactggagagcaaccctataaatgtaaatgtggaaaagcttttagtgatttattttcctttcaaagtcatgaaacaacacacagtgaagaggagccttatgaatgtaaggagtgtgggaaagcatttagttcttttaaatacttttgtcgccatgaaaggactcacagtgaagaaaaatcttatgagtgtcaaatttgtggcaaagccttcagtcgtttcagttacttaaaaactcatgaaaggactcacacggcagagaagccatatgaatgtaagcaatgcaggaaagcattcttttggccctctttccttctaagacatgaaaggactcacactggagaaagaccctatgaatgtaaacactgtggtaaagccttcagtcgttccagtttctgtcgagaacatgaaagaactcacactggagagaagccctatgaatgactcagtgacctttgaagatgtggctgtgaacttcacccaggaggaatggactttgctggatccttcacagaaaaaactctacagagacgtgatgtgggaaaccttcaggaacctggccactataggaacaaaacaaaaagaatggaacattgaagagcagtacaaaaaccaggggagaaatctcagaaatcatatggtagagagactctgtgaaagtaaagaaggtagtcatggcggagaaggtttcagccagattgcaaatctcagtctgaacaagaaaactccttctggaggaaagctttgggaaagcagtgtatgtggaaaagtcttgagccatcattcatcccttaacaggcacattagatcttacaccagacacaaactgtataagtgtcaggaatatggagagaagccatataaatgtaagaaatgtgggaaacccttcagttatctgcagtcttt

SEQ ID NO: 35207 - DNA, 1623 bp, Homo sapiens
  source 1..1623: mol_type = unassigned DNA
atgggaatagtagaaaaagcttctagttcttcagactcagtgacctttgaagatgtggctgtgaacttcacccaggaggaatggactttgctggatccttcacagaaaaaactctacagagacgtgatgtgggaaaccttcaggaacctggccactataggaacaaaacaaaaagaatggaacattgaagagcagtacaaaaaccaggggagaaatctcagaaatcatatggtagagagactctgtgaaagtaaagaaggtagtcatggcggagaaggtttcagccagattgcaaatctcagtctgaacaagaaaactccttctggaggaaagctttgggaaagcagtgtatgtggaaaagtcttgagccatcattcatcccttaacaggcacattagatcttacaccagacacaaactgtataagtgtcaggaatatggagagaagccatataaatgtaagaaatgtgggaaacccttcagttatctgcagtcttttaaaaaacataaaagaacacacagtgcagggatagtctacaaatgtaaggcctgtgggaaagccttcagttgtcaacgttctttccaaatacatggaaggactcacactggagataaaccctttaagtgtaaagaatgtggaaaagcattccgataccaccaatctgctcaaaaacatgaaaaggctcatactggagagaaaccctacaaatgtaaggaatgtgggaaacccttcatttaccgccattctgctcgagcacatgaaaggaatcacactgtacagaaacgctatgaatgtaaacaatgtggaaaaacctacatatcttctgtaggttttcaagcacatgaaagaactcacactggagaaaaaccctatgaatgtaaaaaatgtgggaaagtgttcgtatatcacaactctgctcaaagacatgaaaagactcatactggagagaaaccctacaaatgcaaggaatgtgggaaagccttcagttaccactgtactgctcaaaaacatgagaggaatcacactgcacagaaacactatgaatgtaaactgtgtgggaaaacttacttgtctcctttaggttttcaagcacatgaaagtactcacactggagataaaccctttgagtgtaaaaaatgtggaaaagcatttagatactactactcagctcaaagacatgaaaggactcatactggagagaaaccctacaaatgtaaggaatgtgggaaagccttttattgttgcagttctgcccgaagacatgaaaggatgcacactgcaaagaaacagtatgaatgtaaaaaatgtgggaaaacatacattactcttgcaggtttccagatacatgaaagaacccacactggagagaaaccttatgaatgtaaacagtgtggtaaagccttcagtagttccagttatattcatatacatgaacgaattcatactggagagaaaccctatgaatgtaaagaatgtggaaaacccttcagtttccttacaggctttcgagtgcacatgagaatgcacactggagagaaaccttataaatgtaaggattgtggcaacgccttcatttggcgtgcatccttacaataccatgtgaagaaagtgcacgctgaatag

SEQ ID NO: 35208 - DNA, 2443 bp, Homo sapiens
  source 1..2443: mol_type = unassigned DNA
atggactcagtggcctttgaggatgtggctgtgaacttcacccatgaggagtgggctttgctgggtccatcacagaagaatctctacagagatgtgatgcgagaaaccattaggaacctgaactgtataggaatgaaatgggaaaaccagaacattgatgatcagcaccaaaatctcaggagaaatccaaggtgtgatgtggtagagagatttggtaaaagtaaagatggtagtcagtgtggagaaaccttaagccagattcgaaatagtattgtaaacaagaacactcccgccagagtagatgcatgtggaagcagtgtgaatggagaagtcataatgggtcattcatccctgaattgctacatcagagttgatactggacacaaacaccgggagtgtcatgaatatgcagagaagtcatatacacataagcagtgtgggaaaggcttaagttatcgccactcctttcaaacatgtgaaaggcctcacactggaaagaaaccctatgattgtaaggaatgtggaaaaaccttcagttctcctggaaaccttcgaagacatatggtagtaaaaggtggagatggaccttataaatgtgaattgtgtgggaaagcctttttttggcccagtttattacgtatgcatgaaagaactcacactggagagaaaccatatgaatgtaagcagtgttctaaagccttccctgtttacagttcctatctaagacatgaaaaaatacacactggggagaaaccgtatgaatgtaagcagtgttctaaagccttccctgattacagttcatatctaagacatgaaagaactcacactggagagaaaccctacaaatgtaaacaatgtgggaaagccttcagtgtttccggttcccttcgagtacatgaaagaattcacactggagagaaaccctatacatgtaaacagtgtgggaaagcgttttgtcatcttggaagctttcaaagacacatgataatgcacagtggagatggacctcataaatgtaagatatgtgggaaaggctttgattttcctggttcagcacgaattcatgaaggaactcacactctagagaaaccctatgaatgtaagcaatgtgggaaattgttatctcatcgctcaagctttcgaagacacatgatggcacacactggagatggccctcataaatgcacagtatgtgggaaagcctttgattctcctagtgtatttcaaagacatgaaaggactcacactggagagaaaccctatgaatgcaagcaatgtgggaaagccttccgtacttccagttcccttcgaaaacatgaaacaacacacactggagagcaaccctataaatgtaaatgtggaaaagcttttagtgatttattttcctttcaaagtcatgaaacaacacacagtgaagaggagccttatgaatgtaaggagtgtgggaaagcatttagttcttttaaatacttttgtcgccatgaaaggactcacagtgaagaaaaatcttatgagtgtcaaatttgtggcaaagccttcagtcgtttcagttacttaaaaactcatgaaaggactcacacggcagagaagccatatgaatgtaagcaatgcaggaaagcattcttttggccctctttccttctaagacatgaaaggactcacactggagaaagaccctatgaatgtaaacactgtggtaaagccttcagtcgttccagtttctgtcgagaacatgaaagaactcacactggagagaagccctatgaatgtaaggaatgtgggaaagccttcagttctctcagttcctttaatagacataaaaggacacactggaaggatattctataagtgtatggaatgtgggaaagcattcattggttttatcacattcagatacttgaaagaaataaatcctgtgaatgtaaacgtggtaaagccttaagaagtttccaggctgggcgcagcggctcacacctgtaatcccagcactttgagaggccgaggagggcagatcacgaggccaggagatcgagaccagcctggctaacatgggaaaccctgtctctactaaaaatacggaaaaaaaaaaaaatagccaggcatagttgctcacacctgtagtcctagctactcaggaggctgaggcaggagaatcccttgaacccgggaggtggaggttgcagtgagccgagattgcactactgcactccagcttgggtgctagagcgagactccatctcaaaaaaaaaaaaaaaagtttccatttctttcaaatagagttgctgcctgctatatgcaagaagattggttccagtacaccctgagtatacctaaatccacagatgccagctcttttataaaatggaatattcgcatgtacctacccacattctcctgtatactctataaatgtctagattaattaaaatatctcatgcattgt

SEQ ID NO: 35209 - DNA, 2042 bp, Homo sapiens
  source 1..2042: mol_type = unassigned DNA
cggggcttcatggggagttgttgggctgaacgagcggctcggagtatgggattgggggagggggacgggggagtttggcgcaaagcctgctggggcatggagtcccggcgagctttgtgcgcatgtgcggggaggtgagggggcttggggggcctcgcctgagagagtgaggacaggctgcgggaggagctgcaggactgaggtacagaggccaggggcccagggcaggacccagcctggacttgactccctgggatcccaggaagggcacaccctttcctcaccacccgagtgagcgctgccccctcacagagacctctttgccccctgggccaggcagagcaggcgctgcggtccgggaggccccatggaggtggcggtgcccgtgaagcaggaggccgagggcctggcgctggactccccgtggcaccgcttccgccgcttccacctgggcgacgcgccgggcccgcgggaggcgctggggctgctccgcgccctgtgccgggactggctgcggcccgaggtgcacaccaaggagcagatgttggagctgctggtgctggaacagttcctgagcgcgctgcccgccgacacgcaggcctgggtgtgcagccggcagccgcagagcggggaggaggcggtggccctgctggaggagctctgggggccagcagcctcccccgatgggtcgtcagcaacgagggtgcctcaggatgtgacgcagggccctggggccacaggtggaaaggaggacagtgggatgattcccttagcaggcaccgcccctggggctgaggggccggcgcctggggactcccaggctgtgcgcccctacaagcaggagcccagcagccccccgctggcgcctggcctgcccgccttcctagcggccccgggcaccacgtcctgccccgagtgcggcaaaacgtccctgaaaccagctcacctgctgcgccaccggcagagccactcgggcgagaagccgcacgcctgccctgagtgcgggaaggcctttcggcgcaaggagcacctgcggcgccaccgcgacacgcaccccggcagccccggcagccccgggcccgcgctgcgccctctgcccgcccgtgagaagccccacgcgtgctgcgagtgtggcaagaccttctactggcgcgagcacctggtgcgccaccgcaagacgcactcgggagcgcggccctttgcctgctgggagtgtggcaagggcttcgggcgccgcgagcacgtgctgcgccaccagcgcatccacggccgggcagcggccagcgcgcagggggcggtagctccgggcccggatggtggaggccccttcccgccctggcccttgggttagccgcctcccggccagcgccatctcccgcccttggtgctgcccccgggcggtacctgctctctcccagcgccacttggcctcttcctctcctccttccctcccatcgtcctcctccacctgcgcctcccttgtctgaacttcccaacgccttcctattcctttccaactccttttcccccaaatttcactttccttctcaggtctcacctcagccccccccttctccctgatttctcggcctctctctctgtgtgaaggggcctctccctaatgtctcctccttcccccctcttctctctcctgcggcccagcctccctctccctcctccattcctctctccctgcccttttcctgcctgaagagcagaggtgaggacctgggacccctgaggggcaggccaggaggagctcgggcgcaggccaggcccccttggtgaagcagaggctgaaggaaaggggtctgggtcttgtccctaggaattctcctccctcaggagattgggggttgggggaggcagcgggtgatggctctgaagctgaacccagggcctggctgtggtcttcttggtcttgctgccccctgtgacccaaaggcatgggatggacagagatgcctgcccccgtgaagctggttggggagggcagttcaccagcatccatagagtaataaagtcactgtgtgtagacccgg

SEQ ID NO: 35210 - DNA, 3773 bp, Homo sapiens
  source 1..3773: mol_type = unassigned DNA
agttgccggtgagcttgggagaaccgtgggcgctgaggcgctgtaggtggctccctcccaccccaacgatttcagagagaaacaagtcggaatctgagaagtgaggctccagataaactgtaaactgctggaagggggcgatggctgtggccctgggttgtgcaatccaggcatccttgaatcaaggctctgtgtttcaagaatatgatactgactgtgaagttttccgtcagcgcttcaggcagttccagtacagagaagcagctgggcctcatgaagcatttaacaaactctgggagctttgctgtcaatggctgaagccaaagatgcgctctaaggaacaaatcctggagctgctagtgttggagcaattcctaactatcctgcccacagagatagagacctgggtgagggagcactgcccagagaatagagaaagagttgtgtcactgatagaagacttacagagagaacttgagataccagagcagcaggttgatatgcatgacatgctcttggaagaactggcaccagtgggaacggcacacataccaccaaccatgcacctagagtcacctgcactccaggtaatgggacctgcccaggaggccccagtagcagaggcatggatcccacaggcagggccaccggagctgaactatggtgctactggagaatgtcagaactttctggaccctggatatccattaccaaaacttgacatgaacttctcattggagaatagagaagagccatgggtgaaggaattacaggattctaaagaaatgaaacaattacttgattccaagataggttttgagatcgggatagaaaatgaagaagatacttcaaaacagaaaaaaatggagactatgtatccatttattgtaactttagaggggaatgctctccagggtcccattttgcaaaaagactatgtacagttagaaaatcaatgggaaacccccccagaggatttacagacagatttagcaaaactggtagatcagcagaaccccactctgggagagacacctgagaactccaacttggaagaacctctcaaccctaaaccccacaagaaaaagagtccaggagagaaacctcaccgatgtcctcagtgtggaaaatgttttgctcggaagtcacaacttactgggcatcagagaattcattcaggagaagaacctcacaaatgccctgaatgtgggaaaagattccttcgtagttcagacctttatagacaccaacgacttcatacaggggagagaccctatgaatgcactgtatgtaaaaagcgattcactcggcggtcacatcttatagggcaccagagaacccattctgaagaagaaacatataaatgtcttgagtgtgggaaaagtttttgtcatggatcaagtcttaaaagacatctgaaaactcatacaggtgaaaaacctcatagatgtcataattgtgggaaaagttttagtcgactgacagctcttactttgcaccagagaacgcatactgaagagagaccttttaaatgtaattattgtgggaaaagttttagacagagaccaagcctcgttattcatttaagaatccacacaggggagaagccatacaagtgtactcattgttctaaaagcttcagacagagagccggccttattatgcaccaggtcactcactttagaggacttatttaagaattgctaagggaaacaggtcttacacaaattgacactaactcaaaaaaaatcttaacctgcagcaggctgtttgtcttggaagcttttgtttgagcttataagaacatagacagcttttttttttactagttttaaaacccatcttccaaggtatatgaattctagagtatttatctactcctgtgattttcttagatttgatttcttctgtctgcacaactcttctttttttaattacaatgaaaaattttgtgttccaaggcaactgtatcataggtgtaaacataaagcatataaattatgacaatccttttagaggtagggtcaatatagtggataaacctgtctatcagacgtattgattatagcagtactatagttattctgctgtcattattaaagatgattatattcattcaaagctttagatgtgtcccatgtggcaagaaaggagacagtgaattttgtcaaacaataaaaatgtgtcaggaacacaaggatgaaggggatgtcatttgcctggtaagaactgggttatttccactgaaatttgttatgtttaaggaaattaagattttaagcttgaaattatacaagcagaatctaatttaattttgattgactgaagaaccagggtcttttgctctcctttggtatttcactctcctttggtattcaatcatgtgtcttttagtgctttttaaaattttacccattctttaattcagcatctccctatgtatgtgtcatagaatacttagttctgctagatattctgcaaatatatttgggaattacttcctgctgtttcgccttcttaggttcatagtacacatcagcatatgagaatctctgagaggtcctctagaaaggagagaaaaagcacctcttttggctcaatgttttccaaacttatttgaccccaaaacctttttcatatacccaataataagctacagaactaatattctgcaaatgtctcttggaacacactgccttaaacagatatttctatagctgtcagtatagttatgttgctcccaagcctagttatctccagttgttttaagggtgttatgaaaaattcttaaaatatatatgaatttgtgtaacacacacagagacacacacacatactactttaagggggtgaggatcattaattcagataatttttaagtttcctagtgattctcaatctctttgaattttacttacatttacacacacacgcacacacatatgtatatacacatatcattttaagaagctgaggatcactaattcagataatgtataagtttcccagtgattctcaacctctttgaattttacttataattacatacacacacacactgctacttatataaatgttctcatgtaatcatggtaacagctcaaattcccaaagcaagggaagacttctcattgtcagttaaacctgttaaaacatgaaaatattcattgagcctagttccttgttataaaatacaagaaataagacattcaggcattttccctttatgaagatgttcagtcatcctttccttgaactacaattaggaaaagtatatgtctttattccattgaagttctcgagagtgatataaatactttggggggtatctactatgtgcctaactagtcctgttctaggcttagtggaagctagtaaagaaatataattcatggatcaggctcataaagattttataatatttttagttaaacaagagttgggaaacaggtggagaataatgcaagagagtttgtaattaagtgccaattataccaattgctagacccaggatgtatctttaattcttgtcatccaggtcaacatatgatgctgctataagtctggggctcaaattgatatcccagtagcaataaacatataatataggaggagtctgaatgtagagatgaaaaatacagaatgtaatggcttctcttttctctcttgtggaattgcattcaaaccagaacagtgccttagaatggatgtgcccaactgctctgtatttatgcaatatttgaataaagcggaaatgtatgtgctcttcctgc

SEQ ID NO: 35211 - DNA, 524 bp, Homo sapiens
  source 1..524: mol_type = unassigned DNA
agttgccggtgagcttgggagaaccgtgggcgctgaggcgctgtaggtggctccctcccaccccaacgatttcagagagaaacaagtcggaatctgagaagtgaggctccagataaactgtaaactgctggaagggggcgatggctgtggccctgggttgtgcaatccaggcatccttgaatcaaggctctgtgtttcaagaatatgatactgactgtgaagttttccgtcagcgcttcaggcagttccagtacagagaagcagctgggcctcatgaagcatttaacaaactctgggagctttgctgtcaatggctgaagccaaagatgcgctctaaggaacaaatcctggagctgctagtgttggagcaattcctaactatcctgcccacagagatagagacctgggtgagggagcactgcccagagaatagagaaagagttgtgtcactgatagaagacttacagagagaacttgagataccagagcagcagacatttgctgctgaatacagtcactactag

SEQ ID NO: 35212 - DNA, 2051 bp, Homo sapiens
  source 1..2051: mol_type = unassigned DNA
agttgccggtgagcttgggagaaccgtgggcgctgaggcgctgtaggtggctccctcccaccccaacgatttcagagagaaacaagtcggaatctgagaagtgaggctccagataaactgtaaactgctggaagggggcgatggctgtggccctgggttgtgcaatccaggcatccttgaatcaaggctctgtgtttcaagaatatgatactgactgtgaagttttccgtcagcgcttcaggcagttccagtacagagaagcagctgggcctcatgaagcatttaacaaactctgggagctttgctgtcaatggctgaagccaaagatgcgctctaaggaacaaatcctggagctgctagtgttggagcaattcctaactatcctgcccacagagatagagacctgggtgagggagcactgcccagagaatagagaaagagttgtgtcactgatagaagacttacagagagaacttgagataccagagcagcaggtaagaaaagaatgtgggatctttgtgattggtccaaaggaagtagctgaggcagctgggactagaccacacatttgtctctatgtcattccccagcctcaagatttctccagagtcctcttcctttttctcttctgctgaactcagcaaatgagtcagtgcttttaactctatcagactcaattccccttctataacaaatagtttataatgtccactttactatgcacaaatgaaattgatagacaacataatctacccacatacatcaacccaaagcatcagtaaattgctccatggcctgaaggccaattctagccataccctgtttatctgtatactctgtatgtaatggtttttttatcttgttgaaaggtcattgaaaaaaagaggaaggagaagaactgacagtgaatgtgccccacagtgcctaaaatatttactatttggctctttataaagtttgccaaccctgaatcaagtctagaaggaatataaaggaaaagaaacatagtttgttataaattgatagggatttgtacatatatgtgcttgggcctgaccgaatgtcatgaagttgtcagatgtttgcatctatgcttagaatcattgtgaatgggacagccagaaattcagactgataaagctcaagtactacgaacagtgttgctcctcgtcatgtgattttccaaaatggcatacgactctaggtaaatctgaacaataagcagtgtagtctttgcttttcacattagtgcattcctagaaaatttcatttgtgctgaaactatgcaaaacaaaacaaacaattgtacttatttgaccaacaaggtggggttcttgacaggttctttttactcacatgaatgtttgagtgggacattccacacttggtagggacctagaacaattctgcattgtaaattatgttccattaaattctgatagccaccacctgtcagcatatccaaaactccccatggggacagtggcactgtctgccattcagaatgactgtgtaaagcctcttttcagaagtgccgtgactgagagagggcagtatctttgggaaaagggagcaggagcttccagatgggcatcagggatactccagtcttgtctatgggggttctctgcaggagctgttagcttcagggctcctgaacaggagtcttctgaagttttctgtctccctagggtacttgggttggtggttgcccttcctttctctgtctccttggttttgtttactatataagattttatcttcatgtggtctagacatttgctgctgaatacagtcactactagtcatgtacagctcttgagcccttgaaatatggccaatacaaattgagatctgctgtaagtatgaaatacacaccacatgcagaagacttggtatgaaaaaagtaggtgaaatatctcactaataattgttcatattgattacatgttgaaatcctgattgtttgcactggattaagtaacacgtactattaagattggccttactttttaaaaaatttattcatatggccactagaaaatttaaaa

SEQ ID NO: 35213 - DNA, 3903 bp, Homo sapiens
  source 1..3903: mol_type = unassigned DNA
gagagcgcggccttcattcctctcgtggaagtgagtgagtcctgggaccccgcgacctgttttaacttttatggtttggtcgtaggatcagcagggctcgcacttcggtcagcaggaaaagacgctgcggcgagcagcggagggcggagttgaatggctgggcagctgattgccttactgtatccggagctgctgcgttcggggcggttcgggagtcccctggttggaagtggacctgaatggggaggcgtctgaggatctcctgggctctcagcggcccgacccgccttcccccacctcccacagctctgtagcttcctagcggtgtaacgttgggaaaggaggctgttcttggactatgcctgacccgttttttaagaaagagtgcatcactcaacaggtggcgtctggagttatcctctgtggattttccaggatctcagacaagatcgtgcaatctcccagcctcctttccttcccctgccctgacttctgaaagaatgctgcgggagaggaggaaggagagcatcctggcttctggcagcagagccccactgtgacaggacctagcattcaccttcctcttctgttccgagtgcgagaagacttcagggacctctgtttcatggacattatcatattcttctcaagagtacccagcaagaggtttgcaaagaggagttattcagtgaaatcagaatcataccctgagagctacaagaactccatttttcactgtgcagaggctctctgctgaagggtcaagtggaatctggaatccagcccatgtttccccatcatcaagccatgtgaagctgcagactccaagcaacagagagacaagatttagaatactggctctggtatgaaagctggattcaggtactgttcctgcctcttgacctcaccaagcctcagcttcctcgcctgttaaatggatacaattgtcgtcattatcatctgttgagaactccctaaaatgccagctgagcataggcacagaagtttaggtgtttggaccaaggtcacacaactgatacaacagtagcttcttcacagacttggcacttctccagaaggaggaggacaaaatgacgaagtctaaggaggcagtgacattcaaggacgtggctgtggtcttctctgaggaggagctgcaactgctggaccttgcccagaggaagctgtaccgagatgtgatgctggagaacttcaggaatgtggtctcagtggggcatcagtccacaccagatggcctaccacagttagagagagaagaaaagctgtggatgatgaagatggcaacccagagagataactcctcaggagccaagaatctaaaagagatggagactcttcaagaagtaggattaaggtacctgcctcatgaagagcttttctgctcccagatctggcaacagattacaagagagttaatcaagtatcaagattctgtggtaaatattcaaagaacaggctgccagttggaaaaacgagatgatttgcactataaagatgagggattcagtaatcagagttcccatcttcaagttcacagagtccacactggtgaaaaaccctacaaaggagaacattgtgtgaaaagtttcagctggagctctcatcttcaaattaaccaaagggctcatgcaggagagaagccctacaaatgtgaaaaatgtgataatgccttccgtcggttttcaagtcttcaagcccatcagagagtccacagtagagcaaaatcatacacaaatgatgcaagttacaggagttttagtcagaggtcacatcttccccatcatcagagagttcccactggagagaatccatacaaatatgaagagtgtgggaggaatgttgggaaaagctcacattgtcaagctcctctgatagttcatacgggagagaaaccctataaatgtgaggagtgtggggtgggcttcagtcagagatcatatcttcaagttcatctgaaagttcacactggaaagaaaccatataagtgtgaagagtgtgggaagagcttcagttggcgttcacgactgcaggctcatgagcgaatccacactggcgagaaaccatacaaatgcaatgcatgtggcaagagctttagttacagctcacaccttaatattcattgtagaatccacacaggagagaaaccctataagtgtgaggagtgtgggaaaggtttcagtgtgggttcacaccttcaggcccatcagataagccacactggagagaagccatacaaatgtgaggagtgtgggaaaggcttctgccgggcctcaaatctgctggaccatcaaagaggccatactggagagaaaccgtatcagtgtgatgcatgtggtaagggcttcagtcgtagctcagattttaacattcattttagagtccatacaggggaaaaaccctataaatgtgaggagtgtggcaagggcttcagccaggcctcaaatcttctggcccatcaaagaggccacactggagagaaaccctacaaatgtggtacatgtgggaagggcttcagtcggagctcagatcttaatgtacactgtagaatccacacaggagagaaaccctataaatgcgagaggtgtggtaaggccttcagtcagttctccagccttcaggtgcatcagagagttcacactggagagaaaccatatcagtgtgcagagtgtgggaagggcttcagtgtaggttcacagcttcaagcccatcagaggtgccacactggagagaaaccctatcaatgtgaggagtgtgggaagggcttctgtcgggcctccaattttctggcacatcgtggagtccacacaggagaaaaaccataccgatgtgatgtgtgtggtaagcgcttcagacagagatcctaccttcaagcccaccagagggtccacacaggagagagaccatacaaatgtgaggaatgtgggaaagtcttcagctggagctcataccttcaagcccatcaaagagttcacaccggagaaaaaccatacaaatgtgaggagtgtgggaagggcttcagttggagctcaagtcttatcattcatcagcgagtccatgctgatgatgagggtgacaaggactttccttcatcagaggattcacacaggaaaactcgataaaatatgttttactatctcagatgggtgctgaaatattttaataatcagagctatcatagacaaaacatttgttttatagagtcagtagttcagccaagtgattgggagaccacacagcagagaagcctcacaagagtggagacatatggactgcattcagaacattgaccattagctgatacatgcagacaagaggatcaggaaggatgagtctgatctggagtaaatcagaagtactaagatagaaatgctgaattctgttccactagaatataagatccaagagggcagggactttgttgactgccaaatctactctgccttttcagtgcctaatacgttgtaatttttcagtagtatttgaaattactgtcatatttgaaattcagtaatatttgacatttttatttatctctagaagtttctctaaaattgtactcagaagaattctgcaaggcttggaggatatataagttagtcatatggcctgattttcccatttttgcagatctcgtggacaagtgtttatcaaactgaaggttgcagcttgttagtgggttcagaaatcagtttctggctagcaactagaagttttgtatgttaacagtactttattgaggtgtaatctgcatgcagtaacatgcacaagtctcaagttcatggctttctgaattttgacaaatgtaatcatcaccaagatcaatgtatacaatatgtctattaaaccaaaaagttttcttgtgcccatttccagtcaatccca

SEQ ID NO: 35214 - DNA, 3895 bp, Homo sapiens
  source 1..3895: mol_type = unassigned DNA
gagagcgcggccttcattcctctcgtggaagtgagtgagtcctgggaccccgcgacctgttttaacttttatggtttggtcgtaggatcagcagggctcgcacttcggtcagcaggaaaagacgctgcggcgagcagcggagggcggagttgaatggctgggcagctgattgccttactgtatccggagctgctgcgttcggggcggttcgggagtcccctggttggaagtggacctgaatggggaggcgtctgaggatctcctgggctctcagcggcccgacccgccttcccccacctcccacagctctgtagcttcctagcggtgtaacgttgggaaaggaggctgttcttggactatgcctgacccgttttttaagaaagagtgcatcactcaacaggtggcgtctggagttatcctctgtggattttccaggatctcagacaagatcgtgcaatctcccagcctcctttccttcccctgccctgacttctgaaagaatgctgcgggagaggaggaaggagagcatcctggcttctggcagcagagccccactgtgacaggacctagcattcaccttcctcttctgttccgagtgcgagaagacttcagggacctctgtttcatggacattatcatattcttctcaagagtacccagcaagaggtttgcaaagaggagttattcagtgaaatcagaatcataccctgagagctacaagaactccatttttcactgtgcagaggctctctgctgaagggtcaagtggaatctggaatccagcccatgtttccccatcatcaagccatgtgaagctgcagactccaagcaacagagagacaagatttagaatactggctctggtatgaaagctggattcaggtactgttcctgcctcttgacctcaccaagcctcagcttcctcgcctgttaaatggatacaattgtcgtcattatcatctgttgagaactccctaaaatgccagctgagcataggcacagaagtttaggtgtttggaccaaggtcacacaactgatacaacagtagcttcttcacagacttggcacttctccagaaggaggaggacaaaatgacgaagtctaaggaggcagtgacattcaaggacgtggctgtggtcttctctgaggaggagctgcaactgctggaccttgcccagaggaagctgtaccgagatgtgatgctggagaacttcaggaatgtggtctcagtggggcatcagtccacaccagatggcctaccacagttagagagagaagaaaagctgtggatgatgaagatggcaacccagagagataactcctcaggagccaagaatctaaaagagatggagactcttcaagaagtaggattaaggtacctgcctcatgaagagcttttctgctcccagatctggcaacagattacaagagagttaatcaagtatcaagattctgtggtaaatattcaaagaacaggctgccagttggaaaaacgagatgatttgcactataaagatgagggattcagtaatcagagttcccatcttcaagttcacagagtccacactggtgaaaaaccctacaaaggagaacattgtgtgaaaagtttcagctggagctctcatcttcaaattaaccaaagggctcatgcaggagagaagccctacaaatgtgaaaaatgtgataatgccttccgtcggttttcaagtcttcaagcccatcagagagtccacagtagagcaaaatcatacacaaatgatgcaagttacaggagttttagtcagaggtcacatcttccccatcatcagagagttcccactggagagaatccatacaaatatgaagagtgtgggaggaatgttgggaaaagctcacattgtcaagctcctctgatagttcatacgggagagaaaccctataaatgtgaggagtgtggggtgggcttcagtcagagatcatatcttcaagttcatctgaaagttcacactggaaagaaaccatataagtgtgaagagtgtgggaagagcttcagttggcgttcacgactgcaggctcatgagcgaatccacactggcgagaaaccatacaaatgcaatgcatgtggcaagagctttagttacagctcacaccttaatattcattgtagaatccacacaggagagaaaccctataagtgtgaggagtgtgggaaaggtttcagtgtgggttcacaccttcaggcccatcagataagccacactggagagaagccatacaaatgtgaggagtgtgggaaaggcttctgccgggcctcaaatctgctggaccatcaaagaggccatactggagagaaaccgtatcagtgtgatgcatgtggtaagggcttcagtcgtagctcagattttaacattcattttagagtccatacagggaaaaaccctataaatgtgaggagtgtggcaagggcttcagccaggcctcaaatcttctggcccatcaaagaggccacactggagagaaaccctacaaatgtggtacatgtgggaagggcttcagtcggagctcagatcttaatgtacactgtagaatccacacaggagagaaaccctataaatgcgagaggtgtggtaaggccttcagtcagttctccagccttcaggtgcatcagagagttcacactggagagaaaccatatcagtgtgcagagtgtgggaagggcttcagtgtaggttcacagcttcaagcccatcagaggtgccacactggagagaaaccctatcaatgtgaggagtgtgggaagggcttctgtcgggcctccaattttctggcacatcgtggagtccacacaggagaaaaaccataccgatgtgatgtgtgtggtaagcgcttcagacagagatcctaccttcaagcccaccagagggtccacacaggagagagaccatacaaatgtgaggaatgtgggaaagtcttcagctggagctcataccttcaagcccatcaaagagttcacaccggagaaaaaccatacaaatgtgaggagtgtgggaagggcttcagttggagctcaagtcttatcattcatcagcgagtccatgctgatgatgagggtgacaaggactttccttcatcagaggattcacacaggaaaactcgataaaatatgttttactatctcagatgggtgctgaaatattttaataatcagagctatcatagacaaaacatttgttttatagagtcagtagttcagccaagtgattgggagaccacacagcagagaagcctcacaagagtggagacatatggactgcattcagaacattgaccattagctgatacatgcagacaagaggatcaggaaggatgagtctgatctggagtaaatcagaagtactaagatagaaatgctgaattctgttccactagaatataagatccaagagggcagggactttgttgactgccaaatctactctgccttttcagtgcctaatacgttgtaatttttcagtagtatttgaaattactgtcatatttgaaattcagtaatatttgacatttttatttatctctagaagtttctctaaaattgtactcagaagaattctgcaaggcttggaggatatataagttagtcatatggcctgattttcccatttttgcagatctcgtggacaagtgtttatcaaactgaaggttgcagcttgttagtgggttcagaaatcagtttctggctagcaactagaagttttgtatgttaacagtactttattgaggtgtaatctgcatgcagtaacatgcacaagtctcaagttcatggctttctgaattttgacaaatgtaatcatcaccaagatcaatgtatacaatatgtctattaaaccaaaaagttttcttgtgcccatttccagtc

SEQ ID NO: 35215 - DNA, 3849 bp, Homo sapiens
  source 1..3849: mol_type = unassigned DNA
gaaacagtgtggggcctagagcgctgggtgggcgcgttctgcggcctgagcagggacgggtagtgaagcggttacgccccttcttcgcgtcttggcgggagcctgacgccccgcttctcccctaacgaggtgtcccaccggcgcccgccgaggcctaggcctccgcagccgccctccgtctcctcagccccgacgctgcgccttgggccttgtgcgcatttttttcgggggaaaactgaggctcggagtgcgaaagtcagccgaggtcgccccgcccaggacagagaagggctgtggtcggctgatccgcggcattcccgggatggcggcggcgtggatggctccggcgcaggagtctgtgaccttcgaggatgtggctgtgacatttacccaggaggagtgggggcagttggacgtgacccagagggccttgtacgtggaggtgatgctggagacctgtgggcttctggtcgcactgggtgacagcacaaaacctgagaccgtagagcctatcccttctcatctggccttgcctgaggaagtctcactccaggaacagctggcacagggagtcccaagatactcctatttggggcaggccatggatcaagatgggccatctgaaatgcaggaatactttttgagaccagggacagacccacagagtgagaaactccatgggaaaatgagccttgaacacgaaggtttggcgacagctgatggtatttgttcaatgatgatacagaaccaagtctcaccagaagatgctctctatggatttgactcatatggaccagttacagattccttgattcatgaaggggaaaattcctataaattcgaggaaatgtttaatgagaattgcttccttgttcagcatgagcagattctccctcgtgtgaagccctatgattgcccagaatgtgggaaagccttcggcaagagcaaacacctccttcagcatcacatcatccatactggggagaagccctataaatgcctggagtgtgggaaagacttcaaccgcaggtcacacctcacacggcaccagcggactcacaatggagataagccctttgtgtgcagtgaatgtggaaggaccttcaatcgcgggtcgcaccttacacggcaccagcgggttcacagtggagagaagccttttgtgtgcaatgaatgtggaaaggcctttacctaccgctccaattttgtcttgcataacaagagccacaatgagaagaaacccttcgcatgcagcgaatgtggaaaaggcttttatgagagtacagccctcattcaacacttcattatccatactggggagaggccctttaagtgccttgagtgtgggaaggccttcaactgcaggtcacacctcaagcagcatgagcggattcacactggtgagaagccctttgtgtgcagtcaatgtggaaaggccttcactcactattccacctatgtcctgcatgaaagagcccacactggagaaaagccttttgagtgcaaagaatgtgggaaagcctttagcattcgaaaagacctcattcgacacttcaacatccacactggagagaagccctatgagtgtttacagtgtggaaaggcttttacccgcatgtcagggctcacaaggcaccagtggattcatactggagagaagccgtatgtatgcatccaatgtgggaaagccttttgtcggaccacaaacctgattcgacactttagcatccacactggagagaagccctatgaatgcgtggagtgcgggaaggccttcaaccgcaggtcacccctcacaaggcaccagcggattcacactgcagagaagtcccacgaacccatccagagtgggaacgtttcttgtgagagcacagatctcattcaacactccatcatccacactgagagtagcccagtgagtgcagtgaatatggaaacgccttcaattgccgctcattcctcctcactcgacatcaacggattcatagtggaagaaaccctaccattgtaacagatgtggaaagactttttacgtacacttcagtcaacatccaagaattcctattagcgaaatagttttttaatataaccactgaagaaaatctgtggtgagaggaaacatcttaccatctggtcattcatactgaagagaaactccataagtatcatctctgtgggaaaacctgttttagatcatcatttgtcatctaaacaattatgttagaaattgacacagccaagagtcttattctacatctgataattcacccatgaaagagacccagtggttactgtgcacttaggaaaaccttcagccacatctttcttattagtttacagtgaaatgttatctcagggacattcaaacaaaggaggaggagtcatagggaagagaaagaaatggaagcacagcttctttcagacttccctgacaagcccatggcaatttgtcatcccctccttattttatttgggagagggaaatgtttcagaaacaaaagggcctcatcccctttattttccctgtgtatacattcactgctgtccagtgctgtagacaaacggtttgtttgaaaacattttgtgaaagcctgctttgttccacagcattgtctccactcttgaggagcagaagcatatatctttatgagaaagatggaggcttgagttatgaaatacttttacatttaaggagataaaggatgtacatatgaatgggcacattttactgcacacttcagacgctttgacttttttaaaaaaattgtttctccgtgtgtctttaaccacccagtaccatacttttttcttgatctggatctacttgtcaatttcttctttatttttctgtaggatggagatgatattgtagctgtttgtacataatgtaatccagggagtcctaattcttccctctgattgtggtttctcagcttttttactgctctttagagagagtaaatagttcaaaattcacctcaacaattttctagaggtcaatttggaaccaaaaatgaaataagacatgtagctaaagtaagttaaaagattatgataaactcagaaaataaacacagagaaggaatctcatttttcagtcttacagaagattgtgtgaaggctgactatacataaagtgactggaattttaacaggtgaacctgcatatgtatatgcaggtagttgtcaccatggattgagtccagtcgtagtaattaatatgtttaatcagaatattttggaatttctcttttggtattctttttgtttcttttattgtttttaattgacaatgtttatggggtttggtgtgatatttcaatacatgtgtgctaagagtaatgatcaaatcagggtaattagcatatccatctcaatcatttatcatttctttgtgtttagaaacattcacagtctgcttttctagctatttgaaaatataaaatgtattattgccaattgtactcattctgcagtgccacagaacactacaacttattcaaatggaatcttacttgctgtaattttgtatttgttaaccaatctctatctgcctctctgctgtccttcccagcctctggttaccaccattctcaaccttttatgcttgcatatgagtagaaacatggagtatttctctttctgtgtctagcttatttcacttaatgtctttcaagctcattcatgttgctgtgaatgacaggtttatttttcatggctgagtagtattccattgtgtatatatgccatgttttctttcttcattcatctgataatggacacttagactgatttcttagctattatgaatagtgcttcaataaacataggagtgtagatctctctttg

SEQ ID NO: 35216 - DNA, 2037 bp, Homo sapiens
  source 1..2037: mol_type = unassigned DNA
atccttttcttctatgaaaagatccagaaaagaggcaaagcaagcgagaagtcgcgggcccagcccacagcagggagtctgtgaccttcgaggatgtggctgtgacatttacccaggaggagtgggggcagttggacgtgacccagagggccttgtacgtggaggtgatgctggagacctgtgggcttctggtcgcactgggtgacagcacaaaacctgagaccgtagagcctatcccttctcatctggccttgcctgaggaagtctcactccaggaacagctggcacagggagtcccaagatactcctatttggggcaggccatggatcaagatgggccatctgaaatgcaggaatactttttgagaccagggacagacccacagagtgagaaactccatgggaaaatgagccttgaacacgaaggtttggcgacagctgatggtatttgttcaatgatgatacagaaccaagtctcaccagaagatgctctctatggatttgactcatatggaccagttacagattccttgattcatgaaggggaaaattcctataaattcgaggaaatgtttaatgagaattgcttccttgttcagcatgagcagattctccctcgtgtgaagccctatgattgcccagaatgtgggaaagccttcggcaagagcaaacacctccttcagcatcacatcatccatactggggagaagccctataaatgcctggagtgtgggaaagacttcaaccgcaggtcacacctcacacggcaccagcggactcacaatggagataagccctttgtgtgcagtgaatgtggaaggaccttcaatcgcgggtcgcaccttacacggcaccagcgggttcacagtggagagaagccttttgtgtgcaatgaatgtggaaaggcctttacctaccgctccaattttgtcttgcataacaagagccacaatgagaagaaacccttcgcatgcagcgaatgtggaaaaggcttttatgagagtacagccctcattcaacacttcattatccatactggggagaggccctttaagtgccttgagtgtgggaaggccttcaactgcaggtcacacctcaagcagcatgagcggattcacactggtgagaagccctttgtgtgcagtcaatgtggaaaggccttcactcactattccacctatgtcctgcatgaaagagcccacactggagaaaagccttttgagtgcaaagaatgtgggaaagcctttagcattcgaaaagacctcattcgacacttcaacatccacactggagagaagccctatgagtgtttacagtgtggaaaggcttttacccgcatgtcagggctcacaaggcaccagtggattcatactggagagaagccgtatgtatgcatccaatgtgggaaagccttttgtcggaccacaaacctgattcgacactttagcatccacactggagagaagccctatgaatgcgtggagtgcgggaaggccttcaaccgcaggtcacccctcacaaggcaccagcggattcacactgcagagaagtcccacgaacccatccagagtgggaacgtttcttgtgagagcacagatctcattcaacactccatcatccacactgagagtagcccagtgagtgcagtgaatatggaaacgccttcaattgccgctcattcctcctcactcgacatcaacggattcatagtggaagaaaccctaccattgtaacagatgtggaaagactttttacgtacacttcagtcaacatccaagaattcctattagcgaaatagttttttaatataaccactgaagaaaatctgtggtgagaggaaacatcttaccatctggtcattcatactgaagagaaactccataagtatcatctctgtgggaaaacctgttttagatcatcatttgtcatctaaacaattatgttagaaattgacacagccaagagtcttattctacatctgataattcacccatgaaagagacccagtggttactgtgcacttaggaaaaccttcag

SEQ ID NO: 35217 - DNA, 2361 bp, Homo sapiens
  source 1..2361: mol_type = unassigned DNA
agctacttccggtaggagcctcgcaggaatggtctccgggtagaggcaggtaaggatgtcccgggccggtggagaaggaagagctgggcgtgtggcttcgcttggaatccgaatcagagcttggaccagagccttccctgagaatgctgaagcaacaccttctttggattgagtttcttccagagggaacgaagaagaggattaaataatacattcaattctaaaataagacatggcccatgagttggtgatgttcagagatgtggctatagatgtctctcaggaggaatgggaatgcctgaacccagcgcagaggaatttgtacaaggaggtgatgttggagaattatagcaacttggtgtcacttggactttctgtttctaagccagccgtaatctcctcattggagcaagggaaggagccctggatggttgtgagggaagagacaggaagatggtgcccagacttggcatccagagatgagccccagaagttatctccaaaaagggatatttatgaaacagaattatcccagtgggttaacatggaagaatttaaaagccatagtcctgagagatcaattttcagcgctatctgggaaggcaactgtcattttgagcaacatcagggacaagaggagggttattttagacaacttatgattaaccatgaaaacatgcccatttttagccaacatactttactcactcaagaattttatgatagagagaaaatctctgaatgtaaaaagtgtagaaaaatcttcagttaccatttattttttagtcaccacaaaagaactcattctaaagaactttctgaatgtaaagaatgcacagaaattgttaatacaccatgcctttttaaacaacagacaattcaaaatggtgacaaatgcaatgagtgtaaagaatgttggaaggcctttgttcattgctcacaacttaaacatctaagaattcataatggtgaaaaacgctatgaatgtaacgaatgtgggaaggcctttaattatggctcagaacttactctacatcaaagaattcacactggtgagaaaccttatgaatgtaaagaatgtgggaaggcctttagacagcgatcacagcttactcaacatcagagacttcatactggtgaaaaaccctatgaatgtaagcaatgtgggaaggcttttattcgtggctttcaacttactgaacacctgcgactccatactggagagaaaccttatgaatgtaaagaatgtggaaagacttttaggcatcgctcacatcttactatacatcagagaattcatactggtgagaaaccctatgaatgtcgggaatgtgggaaggcctttagctatcactcaagcttctcacaccatcagaaaattcattctggcaagaaaccttatgaatgtcatgaatgtgggaaggctttttgtgatggcttacaactaaccctacatcagaggattcatactggtgagaaaccctatgagtgtaaggaatgtgggaagacttttagacagtgttcacacctcaaaagacatcagagaattcatactggtgagaaacctcatgaatgcatgatatgtggtaaggcctttagacttcattcacaccttattcaacatcaaagaattcatactggtgagaaaccctatgaatgtaaggaatgtgggaaggcctttagctatcattcaagcttctcacaccatcagagaattcattctggaaagaaaccttatcaatgcgggaaggcgtttaatcatagattacaacttaacttacatcagactcttcatactggcgagaagccagtcaggtttcctctcctccctccccatcctagtctagcatcatgaaatttgttgatggaaatatacattgtctttgttttatttaaggaaaaagttggtaagccaccagtttcattagtatttatttatttaaataatccttgaaaatcaaatgtttttaagtgagaaagtggataactaaagtgtaaattttggtctcattttaatgctgtttctgagttattgtattaaccattattgagaataaatttttttattgagaataaattttctaaaattacatgtttcactgaaaccagtgaaatatttcactgaaacagtgaaataaaatgaaaacaatttcctcccttccctcaaatctctgagataaccagtatgtgtatttcttcttcctttatgctcaaacaacctgtacacagaaagcattttttgcatgtgtttggaggagcttttacccccatacagacatttgacagcgtcttgtccttttcataataatcatgaatacttttccaggtcagtacgtaaagatgtaacccattctttgtaag

SEQ ID NO: 35218 - DNA, 1161 bp, Homo sapiens
  source 1..1161: mol_type = unassigned DNA
acttccggtaggagcctcgcaggaatggtctccgggtagaggcaggtaaggatgtcccgggccggtggagaaggaagagctgggcgtgtggcttcgcttggaatccgaatcagagcttggaccagagccttccctgagaatgctgaagcaacaccttctttggattgagtttcttccagagggaacgaagaagaggattaaataatacattcaattctaaaataagacatggcccatgagttggtgatgttcagagatgtggctatagatgtctctcaggaggaatgggaatgcctgaacccagcgcagaggaatttgtacaaggaggtgatgttggagaattatagcaacttggtgtcacttggactttctgtttctaagccagccgtaatctcctcattggagcaagggaaggagccctggatggttgtgagggaagagacaggaagatggtgcccaggtacatggaaaacttggggatttcacaataatttcttggacaataatgaggctacagacataaatgcagacttggcatccagagatgagccccagaagttatctccaaaaagggatatttatgaaacagaattatcccagtgggttaacatggaagaatttaaaagccatagtcctgagagatcaattttcagcgctatctgggaaggcaactgtcattttgagcaacatcagggacaagaggagggttattttagacaacttatgattaaccatgaaaacatgcccatttttagccaacatactttactcactcaagaattttatgatagagagaaaatctctgaatgtaaaaagtgtagaaaaatcttcagttaccatttattttttagtcaccacaaatgttcacacctcaaaagacatcagagaattcatactggtgagaaacctcatgaatgcatgatatgtggtaaggcctttagacttcattcacaccttattcaacatcaaagaattcatactggtgagaaaccctatgaatgtaaggaatgtgggaaggcctttagctatcattcaagcttctcacaccatcagagaattcattctggaaagaaaccttatcaatgcgggaaggcgtttaatcatagattacaacttaacttacatcagactcttcatactggcgagaagccagtcaggttt

SEQ ID NO: 35219 - DNA, 3192 bp, Homo sapiens
  source 1..3192: mol_type = unassigned DNA
acttccggtaggagcctcgcaggaatggtctccgggtagaggcaggtaaggatgtcccgggccggtggagaaggaagagctgggcgtgtggcttcgcttggaatccgaatcagagcttggaccagagccttccctgagaatgctgaagcaacaccttctttggattgagtttcttccagagggaacgaagaagaggattaaataatacattcaattctaaaataagacatggcccatgagttggtgatgttcagagatgtggctatagatgtctctcaggaggaatgggaatgcctgaacccagcgcagaggaatttgtacaaggaggtgatgttggagaattatagcaacttggtgtcacttggactttctgtttctaagccagccgtaatctcctcattggagcaagggaaggagccctggatggttgtgagggaagagacaggaagatggtgcccaggtacatggaaaacttggggatttcacaataatttcttggacaataatgaggctacagacataaatgcagacttggcatccagagatgagccccagaagttatctccaaaaagggatatttatgaaacagaattatcccagtgggttaacatggaagaatttaaaagccatagtcctgagagatcaattttcagcgctatctgggaaggcaactgtcattttgagcaacatcagggacaagaggagggttattttagacaacttatgattaaccatgaaaacatgcccatttttagccaacatactttactcactcaagaattttatgatagagagaaaatctctgaatgtaaaaagtgtagaaaaatcttcagttaccatttattttttagtcaccacaaaagaactcattctaaagaactttctgaatgtaaagaatgcacagaaattgttaatacaccatgcctttttaaacaacagacaattcaaaatggtgacaaatgcaatgagtgtaaagaatgttggaaggcctttgttcattgctcacaacttaaacatctaagaattcataatggtgaaaaacgctatgaatgtaacgaatgtgggaaggcctttaattatggctcagaacttactctacatcaaagaattcacactggtgagaaaccttatgaatgtaaagaatgtgggaaggcctttagacagcgatcacagcttactcaacatcagagacttcatactggtgaaaaaccctatgaatgtaagcaatgtgggaaggcttttattcgtggctttcaacttactgaacacctgcgactccatactggagagaaaccttatgaatgtaaagaatgtggaaagacttttaggcatcgctcacatcttactatacatcagagaattcatactggtgagaaaccctatgaatgtcgggaatgtgggaaggcctttagctatcactcaagcttctcacaccatcagaaaattcattctggcaagaaaccttatgaatgtcatgaatgtgggaaggctttttgtgatggcttacaactaaccctacatcagaggattcatactggtgagaaaccctatgagtgtaaggaatgtgggaagacttttagacagtgttcacacctcaaaagacatcagagaattcatactggtgagaaacctcatgaatgcatgatatgtggtaaggcctttagacttcattcacaccttattcaacatcaaagaattcatactggtgagaaaccctatgaatgtaaggaatgtgggaaggcctttagctatcattcaagcttctcacaccatcagagaattcattctggaaagaaaccttatcaatgcgggaaggcgtttaatcatagattacaacttaacttacatcagactcttcatactggcgagaagccagtcaggtttcctctcctccctccccatcctagtctagcatcatgaaatttgttgatggaaatatacattgtctttgttttatttaaggaaaaagttggtaagccaccagtttcattagtatttatttatttaaataatccttgaaaatcaaatgtttttaagtgagaaagtggataactaaagtgtaaattttggtctcattttaatgctgtttctgagttattgtattaaccattattgagaataaatttttttattgagaataaattttctaaaattacatgtttcactgaaaccagtgaaatatttcactgaaacagtgaaataaaatgaaaacaatttcctcccttccctcaaatctctgagataaccagtatgtgtatttcttcttcctttatgctcaaacaacctgtacacagaaagcattttttgcatgtgtttggaggagcttttacccccatacagacatttgacagcgtcttgtccttttcataataatcatgaatacttttccaggtcagtacgtaaagatgtaacccattctttgtaaggttcagaatatttctagaatggaatgtatgtccgtattttgggccattacctactacagacattgaagttgtttctaatgttcacctagaactctaattttaccttcttttgtttctattgtgcagattcccaacagtgggattaaagagtatctggcgtatatattttgacattacatttattttttaaaatcttctaaattttttgtttaataaaagcacacattataaaaattcaaaaattaccaaaaatgtgaaaattaattctcccctaacatccagttctgtagccactcactttccacagatgcaacaactgctatcagtttccttttattctaacgggaatatttcatgtaaatttcataaattctttggacaaaagtaggttattcataatatgtgatttattacacattctcattattagtccacatttggcctacttcattttttttttttttgagacacacccaggctggagtccagtggtgcaatcttggctcactgcaacctccgccacccaggttaaaaattctcctgcctcagcctcctgagtagctgggactacaggcatgcgcagccactatgcccggccaataagctatatttattcttatttgatgtggatgaaaattatcaaaattggccaggcttggtggctcatgcctgtaatcccagcactttgggaggccgaggcgggcggatcacgaggtcaggagatcgagaccatcctggctaacatggtgaaaccccgtctctacta

SEQ ID NO: 35220 - DNA, 774 bp, Homo sapiens
  source 1..774: mol_type = unassigned DNA
gaaaaacgctatgaatgtaacgaatgtgggaaggcctttaattatggctcagaacttactctacatcaaagaattcacactggtgagaaaccttatgaatgtaaagaatgtgggaaggcctttagacagcgatcacagcttactcaacatcagagacttcatactggtgaaaaaccctatgaatgtaagcaatgtgggaaggcttttattcgtggctttcaacttactgaacacctgcgactccatactggagagaaaccttatgaatgtaaagaatgtggaaagacttttaggcatcgctcacatcttactatacatcagagaattcatactggtgagaaaccctatgaatgtcgggaatgtgggaaggcctttagctatcactcaagcttctcacaccatcagaaaattcattctggcaagaaaccttatgaatgtcatgaatgtgggaaggctttttgtgatggcttacaactaaccctacatcagaggattcatactggtgagaaaccctatgagtgtaaggaatgtgggaagacttttagacagtgttcacacctcaaaagacatcagagaattcatactggtgagaaacctcatgaatgcatgatatgtggtaaggcctttagacttcattcacaccttattcaacatcaaagaattcatactggtgagaaaccctatgaatgtaaggaatgtgggaaggcctttagctatcattcaagcttctcacaccatcagagaattcattctgatgcaacaactgctatcagt

SEQ ID NO: 35221 - DNA, 1742 bp, Homo sapiens
  source 1..1742: mol_type = unassigned DNA
agaatctctcctgtccagtggtaagagaataagtaaaaaaggcaaatgtctcggaattagtatgaaaatagctttgaccttatagacttcctgatagggtctcaggtaccctctgtggtccttggaccacccattgagtactgctgctatatagtaatgaaaattaagaaactactactatttgtaatattacaaatgaacctcacatgtggtactggacagaagatgctggagaaaaaagtacctcctatatcattccatttattggaaattcagaaatagacaaaaaccactgcatagtgtaagaaggcaggatatcgcctacctttggtggacttggcatccagagatgagccccagaagttatctccaaaaagggatatttatgaaacagaattatcccagtgggttaacatggaagaatttaaaagccatagtcctgagagatcaattttcagcgctatctgggaaggcaactgtcattttgagcaacatcagggacaagaggagggttattttagacaacttatgattaaccatgaaaacatgcccatttttagccaacatactttactcactcaagaattttatgatagagagaaaatctctgaatgtaaaaagtgtagaaaaatcttcagttaccatttattttttagtcaccacaaaagaactcattctaaagaactttctgaatgtaaagaatgcacagaaattgttaatacaccatgcctttttaaacaacagacaattcaaaatggtgacaaatgcaatgagtgtaaagaatgttggaaggcctttgttcattgctcacaacttaaacatctaagaattcataatggtgaaaaacgctatgaatgtaacgaatgtgggaaggcctttaattatggctcagaacttactctacatcaaagaattcacactggtgagaaaccttatgaatgtaaagaatgtgggaaggcctttagacagcgatcacagcttactcaacatcagagacttcatactggtgaaaaaccctatgaatgtaagcaatgtgggaaggcttttattcgtggctttcaacttactgaacacctgcgactccatactggagagaaaccttatgaatgtaaagaatgtggaaagacttttaggcatcgctcacatcttactatacatcagagaattcatactggtgagaaaccctatgaatgtcgggaatgtgggaaggcctttagctatcactcaagcttctcacaccatcagaaaattcattctggcaagaaaccttatgaatgtcatgaatgtgggaaggctttttgtgatggcttacaactaaccctacatcagaggattcatactggtgagaaaccctatgagtgtaaggaatgtgggaagacttttagacagtgttcacacctcaaaagacatcagagaattcatactggtgagaaacctcatgaatgcatgatatgtggtaaggcctttagacttcattcacaccttattcaacatcaaagaattcatactggtgagaaaccctatgaatgtaaggaatgtgggaaggcctttagctatcattcaagcttctcacaccatcagagaattcattctggaaagaaaccttatcaatgcgggaaggcgtttaatcatagattacaacttaacttacatcagactcttcatactggcgagaagccagtcaggtttcctctcctccctccccatcctagtctagcatcatgaaatttgttgatggaaat

SEQ ID NO: 35222 - DNA, 2584 bp, Homo sapiens
  source 1..2584: mol_type = unassigned DNA
acttccggtaggagcctcgcaggaatggtctccgggtagaggcaggtaaggatgtcccgggccggtggagaaggaagagctgggcgtgtggcttcgcttggaatccgaatcagagcttggaccagagccttccctgagaatgctgaagcaacaccttctttggattgagtttcttccagagggaacgaagaagaggattaaataatacattcaattctaaaataagacatggcccatgagttggtgatgttcagagatgtggctatagatgtctctcaggaggaatgggaatgcctgaacccagcgcagaggaatttgtacaaggaggtgatgttggagaattatagcaacttggtgtcacttggactttctgtttctaagccagccgtaatctcctcattggagcaagggaaggagccctggatggttgtgagggaagagacaggaagatggtgcccaggtacatggaaaacttggggatttcacaataatttcttggacaataatgaggctacagacataaatgcagacttggcatccagagatgagccccagaagttatctccaaaaagggatatttatgaaacagaattatcccagtgggttaacatggaagaatttaaaagccatagtcctgagagatcaattttcagcgctatctgggaaggcaactgtcattttgagcaacatcagggacaagaggagggttattttagacaacttatgattaaccatgaaaacatgcccatttttagccaacatactttactcactcaagaattttatgatagagagaaaatctctgaatgtaaaaagtgtagaaaaatcttcagttaccatttattttttagtcaccacaaaagaactcattctaaagaactttctgaatgtaaagaatgcacagaaattgttaatacaccatgcctttttaaacaacagacaattcaaaatggtgacaaatgcaatgagtgtaaagaatgttggaaggcctttgttcattgctcacaacttaaacatctaagaattcataatggtgaaaaacgctatgaatgtaacgaatgtgggaaggcctttaattatggctcagaacttactctacatcaaagaattcacactggtgagaaaccttatgaatgtaaagaatgtgggaaggcctttagacagcgatcacagcttactcaacatcagagacttcatactggtgaaaaaccctatgaatgtaagcaatgtgggaaggcttttattcgtggctttcaacttactgaacacctgcgactccatactggagagaaaccttatgaatgtaaagaatgtggaaagacttttaggcatcgctcacatcttactatacatcagagaattcatactggtgagaaaccctatgaatgtcgggaatgtgggaaggcctttagctatcactcaagcttctcacaccatcagaaaattcattctggcaagaaaccttatgaatgtcatgaatgtgggaaggctttttgtgatggcttacaactaaccctacatcagaggattcatactggtgagaaaccctatgagtgtaaggaatgtgggaagacttttagacagtgttcacacctcaaaagacatcagagaattcatactggtgagaaacctcatgaatgcatgatatgtggtaaggcctttagacttcattcacaccttattcaacatcaaagaattcatactggtgagaaaccctatgaatgtaaggaatgtgggaaggcctttagctatcattcaagcttctcacaccatcagagaattcattctggaaagaaaccttatcaatgcgggaaggcgtttaatcatagattacaacttaacttacatcagactcttcatactggcgagaagccagtcaggtttcctctcctccctccccatcctagtctagcatcatgaaatttgttgatggaaatatacattgtctttgttttatttaaggaaaaagttggtaagccaccagtttcattagtatttatttatttaaataatccttgaaaatcaaatgtttttaagtgagaaagtggataactaaagtgtaaattttggtctcattttaatgctgtttctgagttattgtattaaccattattgagaataaatttttttattgagaataaattttctaaaattacatgtttcactgaaaccagtgaaatatttcactgaaacagtgaaataaaatgaaaacaatttcctcccttccctcaaatctctgagataaccagtatgtgtatttcttcttcctttatgctcaaacaacctgtacacagaaagcattttttgcatgtgtttggaggagcttttacccccatacagacatttgacagcgtcttgtccttttcataataatcatgaatacttttccaggtcagtacgtaaagatgtaacccattctttgtaaggttcagaatatttctagaatggaatgtatgtccgtattttgggccattacctactacagacattgaagttgtttctaatgttcacctagaactctaattttaccttcttttgtttctattgtgcagattcccaacagtgggattaaagagtatctggc

SEQ ID NO: 35223 - DNA, 2553 bp, Homo sapiens
  source 1..2553: mol_type = unassigned DNA
gagctcccacttccacacctactccaggctcggagccttaggaccatcacctgcccacctaagcccacggtgctccctcctgggaccccactcctgaaaccccctgcccctgcctcccccagcccggtgcgccggggctctccgcccgctccctcggtccctcctcccttgcaggcgccgtttcccggcttcgactccccgcgcgtctatccctctcctccccgcgaagtttcggggctgtcagtctgtcagtctttcaggccgtcagcacccgagctgcaggcggcgagcgccattgtgagcagagccggcggggcaggaggcccgggcgcctgggtccccgcggcgcgggcggagcggccggccagccaggttctgtggcctgatccccaggaggagctactctgggttaccatgagagagaccttggaggccctcagctccctgggattctctgtgggacagccagagatggccccccaaagtgagcccagggaaggatcccataatgcccaggagcagatgtcctcttctagggaagagagagcactgggggtgtgctcagggcacgaggcccctacaccggaggaaggtgcccacacagaacaagccgaggctccctgcagaggccaggcgtgctcagcacagaaggctcagcctgtgggtacctgcccaggagaggagtggatgattcggaaggtgaaggtggaggacgaagatcaggaggcagaagaggaggtcgaatggccccagcatctatcgttacttcccagcccctttcccgcgcctgacctggggcatctggctgccgcgtacaaactggagccaggggccccgggggcactgagtgggctcgcgctgtctgggtggggtccgatgccggagaagccctacggctgcggggagtgtgagcggcgcttccgggaccagctgacgttgcgactgcaccagcggctgcaccggggcgagggcccctgcgcctgcccggactgcggccgcagcttcacgcagcgcgcccacatgctactgcatcagcgcagccaccgcggcgagcggcctttcccgtgctccgagtgcgacaagcgcttcagcaagaaggcccatctgacccgccacctgcgcacgcacacgggcgagcggccctacccgtgcgcggagtgcggcaagcgcttcagccagaagatccacctgggctcgcaccaaaagacccacaccggcgagcggcccttcccctgcacggaatgcgagaagcgctttcgcaagaagacgcacttgattcggcaccagcgcatccatacgggcgagaggccctaccagtgcgcacagtgcgcacgcagcttcacgcacaagcagcacttggtgcggcaccaaagggtgcaccagacggccggcccggccaggccctctcccgactcgtccgcttctcctcattccactgccccgtccccgaccccatcctttcccgggccaaagcctttcgcgtgctccgactgcggcttgagcttcggctggaaaaagaacctcgccacgcaccagtgtctgcaccgcagcgagggtcgcccctttgggtgcgatgagtgcgcactgggcgccaccgtggatgcccccgccgccaagcccctggccagcgcgcctggcggaccgggctgcggcccaggatccgatcccgtggtgccccagcgcgccccctcgggcgagcggtccttcttctgcccggactgcgggcgcggcttctcccatgggcagcacctggcgcggcacccgcgcgtgcacacgggcgaacggcccttcgcctgcacgcagtgtgaccgccgcttcggctcgcggcctaatctggtcgcccactccagggcccacagcggcgccaggcctttcgcctgcgctcagtgcggccgccgcttcagccgcaagtcgcacctgggccgccaccaggcggtgcacactggcagccgcccccacgcctgcgccgtctgcgcccgcagcttcagctccaaaaccaacctagtccgccaccaggcgatccacacaggctcccgccccttctcctgcccgcagtgcggaaagagcttcagccgcaagacccacctggtgcggcaccagctcattcacggcgaagccgcccacgcggccccggacgccgcccttgcggccccagcctggtccgctccccccgaggtggcgccgcccccgctcttcttctgagcctagttctcacgaggaccctttcttgcccacagtttcgagaggcccgtgccatgagaccgcctggggtgagcaaggcgacctgggctgctgcccgaaggtttggccgccgcgggacacctgtttccttcccgcagtgtctgcgtccgcacagcatacccagctcggacctcctaggacagagactcagcgaacccttgctgggaaccgctgagctgaagttcttggaaggctcccacccaggtgccccgttggaaagcagatatttcccggacccagcgcggcctcaaccagggcaggaaagagtggttatttatgtacttaaagtttcattaaagttaaaatcggaaa

SEQ ID NO: 35224 - DNA, 13203 bp, Homo sapiens
  source 1..13203: mol_type = unassigned DNA
atgcctggggagcgcccccgaggagcgccgccccccaccatgactggagacctgcagccccgccaagttgccagcagcccggggcacccctcccagccgccactggaggacaacaccccagctaccaggaccaccaagggtgccagggaggctggcggccaggcccaggccatggagctccccgaggcccagccaaggcaggccagggacggggagctcaagcccccatccctgagaggccaggccccgagcagcacccctgggaagaggggcagcccccagaccccaccggggagaagccccttgcaggctccctcaaggctggcgggcagggcagagggcagccccccacagcgctacattctgggcatcgccagctcgaggaccaagcccaccctggacgagacaccagagaacccacagctggaggctgcccagctccctgaggtggacaccccccagggccctgggactggagctccactcaggccgggcctcccaaggactgaggcccaacccgccgccgaagagcttggcttccacaggtgcttccaggagccaccctccagctttacctccaccaactatacctcaccaagcgccacccccaggcccccagccccggggcccccccagagcaggggcaccagccccctccagcccggttcctatcccgaataccaggccagtggggccgactcctggcctcccgctgctgagaatagcttcccaggtgctaatttcggggttccccccgccgagccggaacctattcccaaaggcagcaggcccggcggcagccccaggggagtttccttccagttccccttcccggcactgcatggggccagcacaaaacccttccctgcggatgtggctgggcacgcattcaccaatgggccactggtgtttgccttccatcagccccagggagcgtggccggaggaggccgtgggcacgggccctgcctacccgctgcccacccagcctgcgccctcacccctgccctgctaccagggccagccaggtggcctgaaccgccacagcgacctcagtggtgccctctcttcccctggagctgctcactcggccccgagacccttctctgacagtttacacaagagcctgaccaaaatccttcccgaaagaccaccttcagcccaggatgggctggggagcacgagagggccccctagctccctaccccagaggcactttccagggcaggcgtacagagccagtggggtggacaccagcccggggcctccggacaccgagctggccgccccagggcccccacccgccaggctgccccagctgtgggaccccacagcagccccttaccccacacctcctgggggccccctggctgccaccaggagtatgttctttaacggccagcccagcccaggccagcggctctgcctcccccagagtgcccccctgccttggccccaagtgctcccgaccgcccggccaagtccccacggaatggagatgctgagccggctgcctttccccgcggggggccccgagtggcaggggggcagccaaggagccctgggcactgctggcaagacaccgggacccagagagaagctgccagccgtgagaagcagccagggcggctccccagcactgttcacctacaacggaatgacagaccctggggctcagcccctgttcttcggggtggcccagccccaggtttcaccccacgggacacccagcctgcccccaccgagggtagtgggagcctcccccagcgagtccccactgccgtcaccggccaccaacacggccggcagcacctgctcttccctgtcgccgatgtccagcagcccagccaaccccagctcagaggaaagccagctccccggccccctcgggccctcggccttcttccacccacccactcacccccaggagacgggcagccccttcccgtccccggagcccccccactccctccccacccactaccagccagagccagccaaggccttcccttttcccgcagatgggctgggagccgagggtgccttccagtgcctggaggagaccccattcccccacgagggccccgaggtgggtcggggagggctgcagggcttcccccgtgcgccgcctccgtaccccacacaccacttctccctcagcagcgccagcctggaccagctggacgtgctgctgacctgcaggcagtgtgaccgcaactacagcagcctggcggccttcctggcccaccggcagttctgtggcctgctcctggccagggccaaggatggccaccagcggtctccaggcccccctgggctcccctcgccccccgctgcccccagagtccctgccgacgcacacgcgggcttgctcagccacgcgaagaccttcctgttagctggggacgcccaggccgagggcaaagacgaccccctgaggacaggcttcctgcccagcctggccgccacccccttcccgctccctgcctcggacctggacatggaggatgacgccaagctggacagcctcatcacagaggcgctcaacggcatggagtaccagtcggacaacccggagatcgacagcagcttcatcgacgtcttcgcggacgaggagccttccggccccagaggtcccagctccggacacccccttaagagcaaggcgggggtgactccagagagcaaagctccgcccccgctcccagcagccacgccggacccccaaaccccccgccctggggacaggggctgcccagcccgaggcaggcccaaaacgcgttccctgggtctggcccccaccgaggcggatgcgcccagccagggcaggcagcagaggagggggaagcagttgaagctgttccggaaggatctggactcgggcggcgcagcagaggggtcggggtcgggcggcggcggcagagcctccggcctgaggccccggaggaacgacggtctcggggagcggcccccaccccgtccccggcgccctagaacgcaggcccccgggagccgcgcagaccccgcgccccgggtcccgagagccgccgccctccccgaggagacccgcagctcccggcgccgccggctgccccccaggaaggaccccaggaagaggaaggctcggggcggcgcctggggcaaggagctcattctgaagatcgtgcagcagaagaacaggctccgcgagtacgacttcgcctcggagtccgaggaggacgagcagcctccgccgcggggccccggcttcagaggccggcggggccgaggcgagaagaggaaggaagtggagctgacccagggtcccagagaggatgagccacagaaaccccggaaggcggcgaggcaggaagccggcggggacggagcccccgcgaaccccgaggagccgggcgggtctcgcccgggccccggcaggagccctcaggcccgtggcccgtctcgaagcctggagacgggagcggccgccagggagggaggccccaagtgtgctgatcgcccctcagtggcccccaaggatcccctgcaggtccccaccaacaccgagacctcagaggaaacccgcccgtcgctggactttccccaggaggccaaggagcctgaaactgccgaagagtcagccccggacagcacagaattcacagaggctttgcgttctcctccagccgcctgtgcgggagaaatgggagcaagccccggtctcctgataccagagcagccgccgcccagcagacatgacaccggcacccccaagccgtcgggaagcctcgccaacacggcgccccacggaagctcgccaacgccaggtgtgggcagcctgctgggtggtcctgggggcacacaggccccagtctcccacaacagcaaggacccccctgcccgccagcctggagaatttctggcacccgtggctaacccctcaagtaccgcctgccccaaacccagtgttctgtcttcaaagatctccagttttggctgtgaccctgctggttttaacagagaccccttgggggttccagttgccaaaaaggggcctcagccctacagcagcccccacagtgagttgttcctcggacccaaagacctggctggctgtttcctggaagaactgcaccccaagccctcagccagggatgccccgccggccagcagctcctgcctttgccaggacggcgaggatgccggttccctcgagccacagctgccaaggagcccacctggcaccgctgagacggagccaggcagggctgcatcgccaccgaccttggagtcctcatccctcttcccagacctgccggtggacagattcgacccacccctctatggcagcctgtctgcgaacagggactccggtctgccgttcgcatgtgccgaccctccccagaagacggtgccgtcagatccaccgtacccctcttttttgctgcttgaggaagtatccccgatgctgcctagccattttcctgatctctcggggggaaaggtgctcagtaagacgtgtccccctgaacggacagtggttcccggcgccgccccatctttgcctgggaaggggagtggatgtagcgttgctcttatgagtcacctgtccgaggatgaactggagatccagaaattggtcaccgaattagaaagtcagctgcaaaggagcaaagacacacgtggggccccgagagagcttgcagaagctgagtcggtgggcagggtggagctcggcacaggcacagagccaccctcccaacggcgcacctgccaggccaccgtgccccacgaggacacgttctcggcagctgacctcacgcgcgttggagaatccactgcacatcgggagggtgcggaatcggctgtggccaccgtggaagcggttcaggggaggcctggggggacgtggccctgcccagcctccttccatccgggacatgcagcccttctcccctgtgcccaggaagacctggtttctggggctcctttcagccccaggggagccaacttccattttcagccagtgcagaaagccggagcctccaagactggactttgccaggcagaaggagacagcaggcccccccaagatgtctgcctgcctgagcccagcaagcagcctggcccacagctggatgccgggagtttagcaaagtgcagccccgaccaggaactttcatttcctaagaataaggaggccgccagctcacaagaaagtgaagactccctgcggctgcttccctgtgaacagagaggagggttcctcccagagcccggcacagcagaccagccccaccgaggggcccctgctccagaagcttttggcagccctgctgtccatctggcccctgacttggcatttcagggtgacggggctccacctctggatgccacctggccttttggtgccagtcccagccatgctgcccagggacattctgcaggcagagcaggtgggcacctccaccccacggcagggaggcctggctttgagggtaatgagtttgcaccggcgggggcctcctcactgactgccccccggggcagggaggcttggttggtccctgtgccaagtcccgcctgtgtatccaacacccaccctagcaggaggtcccaggacccagctttgagcccccccatacgtcagctccagctcccagggcctggagtggctaagagtaaagatggcatcctgggcttgcaggagctgacacctgctgcccagagccctccacgagtgaacccctcaggtctggaagggggcactgtggaaggagggaaggtggcctgtggccccgcccagggctccccagggggtgtgcaggtgacaactctccctgcagtggccggacatcagctggggctggaggcagatggacattggggcttgcttggccaagccgagaaaacccagggccaaggcacagccaaccagcttcagccagagaacggggtgagcccagggggcacggacaaccacgcctcagtcaatgccagtcccaaaacagcgctgaccggccccaccgagggtgcagtcctgctagagaaatgcaagggaagcagggcagccatgagccttcaggaggaggccgagcccaccccaagccccccgtcccctaatagggagtccctggcgctggccttgacagcagcccacagccgaagtggatctgagggccggactccagagagggcgtccagccccggcctgaacaagccactgctggccacaggggatagcccagcaccctctgtcggggacctggccgcctgcgccccctcacccacttcagccgcccacatgccctgcagccttgggcccctgccccgtgaagacccacttacctcgccttccagggcccaaggtgggctgggggggcagctgccagcatctccgtcctgcagggaccctcccggcccccagcagctgctggcctgttctcctgcctgggcacctctggaagaggcagatggcgtccaagccacgacagatactggggctgaggattccccggtggctcccccgtctttgacaacaagcccctgcgatcccaaggaagccctggctggttgccttctccagggggagggcagccccctggaagacccttcctcctggcctcctggctccgtcagtgctgtaacctgcactcacagtggggacacccccaaagacagcactttaagaattccagaggattccagaaaagagaagctgtgggagtctcctggccgagccacctctcctcctctggcaggggccgtctcccccagcgtggccgtcagggctactggcctgtccagcactcccaccggagatgaggcacaggcaggcaggggactcccagggccagacccccagagcaggggagccccgccccacaccaaccctgacaggatgcccaggggccactcctcgtattctccaagcaatactgcccgcctcggccacagggagggccaggctgtcacagctgtgcccactgagcctcccacgctacagggtgcagggccggactcccccgcctgcctggaaggtgagatggggaccagcagcaaggagccggaggacccagggacccctgagaccgggcgctctggtgctaccaagatgcccagggtcacctgcccttccacaggactgggcttgggaagaaccacagccccaagcagcacagccagtgacttccagtctgactccccccaaagccacagaaatgcctcccaccagactccccagggggaccccctcggcccccaagacctcaaacagaggtcccgtggctataaaaagaagcctgcatctacagagaacggccagtggaagggccaagctccacatgggcctgtgacctgtgaggtctgcgcagcctccttccgctccgggccgggcctgagccggcacaaggccaggaagcaccggccacacccgggagcccccgcggagccgagcccagcggccttgcctgctcagcagcctctagagcccctagcccaaaagtgccagccgcccaggaagaaaagccacagggtgtctgggaaggagagaccaaatcactcacggggagaccccagccacgtcacccagccaccgcctgcccagggctcaaaggaggttctcagagcaccggggtccccacacagccagcagctgcaccctccaagccctactgagcatgaggtagatgtgaagactccggcctccaagcccagaccagaccaggccagggaagatgagctgcatcccaaacaggcagaaaaaagagaaggccggaggtggcgccgagagcccaccgtggactctcctagccactcagaggggaagtcaaataagaaaaggggaaagctgagagggagaaggctccgggaggagagcattcttccagtctctgctgatgtgatttcagatgggcgcggctccagaccatcccctgcaatggccagttacgcagcctctccgagccactgcctctctgtggaaggagggcctgaggctgacggggagcagccgcctcgcttggccactctgggacctggggtgatggagggtgcagcggagactgaccaggaggctctgtgtgcaggggagactggggcccagaagccacctggagatcggatgctgtgtccagggaggatggatggtgcagctctgggggaacagccaactgggcagaagggagcctcggcaagggggttctggggaccaagagagaccaaggcgttgggtgtgtgcaaagagtctgggagcgagcctgcggaggacagcagcagggcccacagccgatcagaggaaggtgtctgggaggagaacacgccccccttgggccccctgggttttcccgagacttccagctctccggcggacagcaccaccagcagctgcctccagggcctcccggacaacccagacacccagggtggagtccaggggcctgaaggccccactcctgatgcctctggctccagtgccaaggatcctccaagcttgtttgatgatgaggtctctttctcccagctcttccctccaggcggtcgcttgactagaaagaggaacccgcatgtctacgggaagcgctgtgagaagccggtgctcccgctgccaacccagcccagctttgaggagggcggtgaccccacgctgggcccagcccgcctgcccacggacctcagcgactccagctccctctgcctctgccatgaggacccgtgggaggacgaggatcccgcaggtctgcccgagtccttcctcctggatgggttcctcaatagcagggtgcctggcattgacccctgggcccccggcctcagcctgtgggccctggagcccagcagggaagctggtgcagagaagctgccctcccactgccccgaggacgatcggccggaggccattcctgagctgcacatggtcccagcggcttggcgaggcctggagatgccggcccctgccgatgactcctcctcttctctcggagatgtgagccccgagccccccagcctggagagagaacgctgtgacggtgggcttcccgggaacacccacctgctgccgctccgtgccacggactttgaggtgctcagcaccaagtttgagatgcaagacctgtgctttctgggaccctttgaagaccccgtgggtctccccggccccagcttcttagacttcgagggcacggcgagctcacaggggccacagagccgaaggacagaggaggctgcaggggcagggagggcccaaggcagaggccggccggccaagggcaggcgggcctcctacaagtgcaaagtgtgcttccagcgcttccgcagcctgggcgagctggacctgcacaagctggcccacacgcccgcgccgccgcccacctgctacatgtgcgtggagcgcaggtttggctcgcgggagctgctgcgggggcacctgcaggagaggcacgcgcagagcaaggccgggccctgggcgtgcggcatgtgcctgaaggaggtggccgacgtctggatgtacaacgagcacctgcgtgagcacgcggtccgcttcgcccgcagggggcaggcgcggaggtccttgggggacctgcccggaggcctggagggcagcagcgctgtcgcccaccttctgaacagcatcacggaacccgcgcccaaacaccacaggggcaagcgctccgccggcaaggccgccgggagcccgggagacccgtgggggcaagagggagaagccaagaaagacagcccgggcgagagggcgaaaccccgggcacgcagcacccccagcaacccagacggggccgcgaccccagacagcgcctctgccaccgccctggctgacgccggcagcccgggcccccccaggacgacccccagcccgtcccccgacccctgggccggcggggagcccctcctgcaagccaccccggtgcacgaggcctgcaaggacccctcccgcgactgccaccactgcgggaagcgcttccccaagcccttcaagctgcagcgccacctggcggtgcacagcccgcagcgcgtctacctgtgcccccggtgcccccgggtctaccccgagcacggggagctgctggcacacctgggcggggcgcacgggctgctggagcggccggagctgcagcacacgccgctgtatgcctgcgagctctgcgccacggttatgcgcatcatcaagaagtccttcgcctgcagctcctgcaactacaccttcgccaagaaggagcagttcgaccgccacatgaacaagcacctcaggggggggcggcagcccttcgcgttccgcggcgtgcggaggccgggagcgccgggacagaaggcccgggccctcgagggcacactgcccagcaaacggcgcagggtggccatgcccggcagtgcccctgggcccggcgaggacaggcctcctccccggggaagcagccccatcctgagtgagggctctctcccggccctgctccacctgtgttcggaggtggctcccagcaccaccaagggatggcccgagaccctagagaggcctgtagaccccgtgacccacccgatcagaggttgtgagctgccatccaaccaccaggagtgtcccccgccgtctctgtctcccttcccagctgccttggctgatggcagaggagactgcgcgctggacggagccctggagaggccagagaacgaggcttccccaggcagccccgggcctcttctccagcaagctctccctctgggggcatctctgccgcggccgggagccagaggccaagatgcggagggaaagagggctcctctcgtgttctcagggaaacgcagggccccgggtgcccgtggcaggtgtgcccctgaccatttccaggaagaccacctacttcagaaagagaaggaggtgtcctcaagccacatggtgtctgagggggggccccgaggcaccttccacaagggcagcgccaccaagcctgcgggctgccagagctcatcaaaggacaggtcggcagcatccacccccagcaaagcactcaagttcccagtgcacccaaggaaggcggtggggagcctggcacccggggagctggcccgtggcacagagaatgggatgaagcccgccacccccaaagccaaacccggccccagctcccagggcagtggaagccctcgccccggcaccaagacaggaggtggcagccagccccagccagccagcgggcagctccagagcgagacagccaccaccccagccaagcccagcttccccagccggagccctgcaccagagaggctccccgctcgagcccaagccaagagctgcaccaaggggccaagggaagctggtgagcaggggccccacgggagcctaggtcccaaggagaagggagagagcagtacgaagaggaaaaagggccaggtcccagggccagccaggagtgaaagtgtggggagcttcgggagagccccctcagcccctgacaagcccccccggacccctcggaagcaggcaactcccagccgcgtgctcccgaccaagcccaagcccaacagccagaacaaacccaggccgccaccatcagagcagcggaaggcagagccgggccacacacagaggaaggacagactgggcaaggccttcccccaggggagacccctgctcaggccccccaagaggggcacagctgtccacggtgctgaacctgccgagccacacacccaccggacggccgaggcccagagtgacctcctcagccagctcttcgggcagagactaactggcttcaaaatccctttaaagaaagatgcttccgagtaatttctaggagcaagagcctgggaccggagctgggcgttcctgtctcggcctgcctccttggccagctccggctccctgagatggtccactctgtggccacttgacttcttgtgcaactgctcaggccttgatgtcagagctgaggtggtgatgctttgaacagggcccaggtgggcagcattccctttcttgctggaaggctgggggtgaaagacggggccactgcagcccttttgagaccacacagctgttttcttggtaccaagtacttgaagagacagcagcccatcccctcagcccacacccctgcgccctgtgggcaccgacaccacagaagccaatgtttggagatttgcacaacctcccgttcccccacatggagaagggaagtaagttgaggcagccgtgggatggtggtaggttccctcttagtcttgctgctgttgctggaattccaaagtgaccttagaaaccacgtgggggaaggcagtgctcactacttagaagggttgcttctgagccgcctggtcccccaagagcacaacaggcctcctccctctgaccacagggtcatgcctcctccctctgaccacagggtcatgccagcctccatttgctctgcgggagaaaagcccatctctagcacaccttgaccccaggaaccgggttcccgtatggaactgggaagaaaccgcccctgtgccagctcccgcgggccctcctcgttccctcccagcctccatggccgccctctagagcctccctgctgtacggagctctgggctccgcctatttgcaatgttactctgaagtttctggtgctatttttgtgttgtaatgtgaatacaggcttccttgatttttttttttaatgggggtattgggtgggacagacggggtcagggaggccccaccatggcttgtcgagggcacgggcacctgcatggcggcgctctccctgcctcccctgccgggctgcaagcctgaggtctgtgctgccagacggggatgctcagggctggggctgcagagccgctgccctggccagggcaccctcatgcaccgacccaacccaggcctgggacgcacgtgtcctctcacagcgtcgtgcctgtgaaggtgggtcaaagggtgagagggcttccttctcacccttctctccataagtatcttgaagatccatggtttgttttgctctattgtttagtttttacttgggtgcaatgtgtacgtcaaaagtttttattttgatatttgaaagagaccaaatcaggcccagaccgcctctctggaaggtgttgtaggccattcaaaacgcctccggagtgtcgcaaaccaagtgcggaggggccctgaggttgtactgtaaacatcatagtgacttgtcttttcaaatatattcccactattttcgcagaaaacctc

SEQ ID NO: 35225 - DNA, 1833 bp, Homo sapiens
  source 1..1833: mol_type = unassigned DNA
aaacccggaagcggatcgcgtggagtgaaggtcacgccgcggcgcgattgacttctaaagagtcatgctgtgtgatgaaaaagcccagaagagaaggaagaggaaagcaaaggagtcagggatggctcttcctcagggacacttaacattcagggacgtggccatagaattctctcaggcggagtggaaatgcctggaccctgcacagagggctttatacaaggatgtgatgttggagaactacaggaacctggtctccctggggagcagctatgcattgggaagcaatgcagaagacaaaccaattaaaaaacaacttggagtatcctttcacttacatctgtctgaactggagctatttccagatgaaagggtaataaatggatgtaatcaagttgaaaactttatcaaccacagttcctctgtttcctgtcttcaagaaatgtcttccagtgtcaaaacccccatttttaataggaatgattttgatgattcttcatttctcccacaagaacagaaagtacaccttagagaaaaaccttatgaatgtaatgagcatagcaaagtctttagagtatcttccagccttactaaacatcaagtaatccatactgtagagaaaccttacaaatgtaattcatgcggcaaggtctttagtcgcaattcacaccttgcagaacattgtagaattcatactggagagaaaccttacaaatgtaatgtctgtggcaaggtttttagttacaattcaaactttgcacgacatcaaagaattcataccagagagaagccgtatgaatgtaatgaatgtggtaaagtcttcagtaataattcttaccttgcacgacatcaaagaattcatgctgaagagaaaccttacaaatgtaatgaatgtggtaaaggcttcagtcataagtcatctctagcaaatcattggagaatttatactggagagaagccttacaaatgtgatgaatgtggcaaggccttctataggattgcgctccttgtacgacatcagaaaattcatactggagagaaaccttacaaatgtaatgaatgtggaaaggtctttattcaaaattcgcacctagcacaacattggagaattcatacaggagagaaaccttacaaatgtaatgaatgtggaaaagtatttaatcaactttcaaatcttgcacgacatcgaagaattcatactggagagaagccttacaaatgtaatgaatgtggtaaagcatttagtgagtattcaggcctttcagcccatcttgtaatccacactggagagaagccttacaaatgtagtgaatgtggcaaggcattcagacacaagttatcactaaccaatcatcagagaatccatactggagaaagaccttacaaatgtaatgaatgtggcaaggtcttcaatcgaattgcacaccttgcacgacatcggaaaattcatactggagagaaaccttacaaatgtaatgagtgtggcaaggcctttagtcgcatttcatacctagcacaacattggacaattcatatgggatagaaactacaaatgcaacaaatgcgtcaaagaatttagtgtgcactcaagccttactacccatcttttattccatactgcaaagaaattttgcaaatgtaaagaatatgacaaggtcttcaaacacaagtttttctaataactcattagagaatttatactggagagacttcacaattataataaatgtgtggaaaagtcttcaaaaaaatttcacaccttgcaaaaggagatctaaaaaacacaatcagaaatgacaaaggggacattaccaccaaccccacagaaatacg

SEQ ID NO: 35226 - DNA, 2722 bp, Homo sapiens
  source 1..2722: mol_type = unassigned DNA
gattgacttctaaagagtcatgctgtgtgatgaaaaagcccagaagagaaggaagaggaaagcaaaggagtcagggatggctcttcctcaggaatctctcttcctgacctgaatattaactccatgttggagcaaaggagggagccctggtctggtgagagtgaagtgaaaatagcaaaaaattcagatgggagggagtgcatcaaaggtgtgaacacagggagcagctatgcattgggaagcaatgcagaagacaaaccaattaaaaaacaacttggagtatcctttcacttacatctgtctgaactggagctatttccagatgaaagggtaataaatggatgtaatcaagttgaaaactttatcaaccacagttcctctgtttcctgtcttcaagaaatgtcttccagtgtcaaaacccccatttttaataggaatgattttgatgattcttcatttctcccacaagaacagaaagtacaccttagagaaaaaccttatgaatgtaatgagcatagcaaagtctttagagtatcttccagccttactaaacatcaagtaatccatactgtagagaaaccttacaaatgtaattcatgcggcaaggtctttagtcgcaattcacaccttgcagaacattgtagaattcatactggagagaaaccttacaaatgtaatgtctgtggcaaggtttttagttacaattcaaactttgcacgacatcaaagaattcataccagagagaagccgtatgaatgtaatgaatgtggtaaagtcttcagtaataattcttaccttgcacgacatcaaagaattcatgctgaagagaaaccttacaaatgtaatgaatgtggtaaaggcttcagtcataagtcatctctagcaaatcattggagaatttatactggagagaagccttacaaatgtgatgaatgtggcaaggccttctataggattgcgctccttgtacgacatcagaaaattcatactggagagaaaccttacaaatgtaatgaatgtggaaaggtctttattcaaaattcgcacctagcacaacattggagaattcatacaggagagaaaccttacaaatgtaatgaatgtggaaaagtatttaatcaactttcaaatcttgcacgacatcgaagaattcatactggagagaagccttacaaatgtaatgaatgtggtaaagcatttagtgagtattcaggcctttcagcccatcttgtaatccacactggagagaagccttacaaatgtagtgaatgtggcaaggcattcagacacaagttatcactaaccaatcatcagagaatccatactggagaaagaccttacaaatgtaatgaatgtggcaaggtcttcaatcgaattgcacaccttgcacgacatcggaaaattcatactggagagaaaccttacaaatgtaatgagtgtggcaaggcctttagtcgcatttcatacctagcacaacattggacaattcatatgggatagaaactacaaatgcaacaaatgcgtcaaagaatttagtgtgcactcaagccttactacccatcttttattccatactgcaaagaaattttgcaaatgtaaagaatatgacaaggtcttcaaacacaagtttttctaataactcattagagaatttatactggagagacttcacaattataataaatgtgtggaaaagtcttcaaaaaaatttcacaccttgcaaaaggagatctaaaaaacacaatcagaaatgacaaaggggacattaccaccaaccccacagaaatacgaaaaaccctcaaagattactataaacacctgtatgcacacaaactagaaaacctagaaaaaattaataaattccttgaaagatataaccccccaagattgaaccaagaagaaattgcatccctgaacagaccaataatgagttccaaaatttaatcactaattaaaaatctatcaaacaaaactctggaccagacagatttatagttgaagcctacgagatgtataaagaaaagctgttaccaatcttactgaaactgttcaaaaacatggatgcagagggactcctccctatctgattctatgaggccagcatcattctaataccaaaacctgacaggcacaatgaaaaaagaaaacttcaggctggtactcctgacgaatataggtgccaaaatcctcagcaaaatactagtaaaccaaatccatctgcacatcaaaaagctaatccaacattatcaagcaggctttagtgttgggctgcaaggttggttcagtatacacaaatcaataaatgtgatttatcacatacacagaactaaaaacaaaaaccacatgaccatgatcatctctttagatgcagaaaggtttttaataaaattcaacatcccttcattttaaaaaccctcaacaaattacacattgagggaacatacttcaataagaaccatctatgctggactcacagccaaattaatactgaacaagcaaaagctggaagcattccccttgagaactggaaaatgacagggatgaccactctcaccactccgattcaacatagtactggaagtcctaagcttagtgatcaggcaagataaagatatgaaaggcatatataaataggaagaggggaagtcagtttctcttgcagaagatataattctgtatttagaaaacctgttgtctctgcccaaaggctcctagatctgat

SEQ ID NO: 35227 - DNA, 535 bp, Homo sapiens
  source 1..535: mol_type = unassigned DNA
ttcccacaaacccggaagcggatcgcgtggagtgaaggtcacgccgcggcgcgattgacttctaaagagtcatgctgtgaaaaagcccagaagagaaggaagaggaaagcaaaggagtcagggatggctcttcctcagggacacttaacattcagggacgtggccatagaattctctcaggcggagtggaaatgcctggaccctgcacagagggctttatacaaggatgtgatgttggagaactacaggaacctggtctccctgggaatctctcttcctgacctgaatattaactccatgttggagcaaaggagggagccctggtctggtgagagtgaagtgaaaatagcaaaaaattcagatgggagggagtgcatcaaaggtgtgaacacagggagcagctatgcattgggaagcaatgcagaagacaaaccaattaaaaaacaacttggagtatcctttcacttacatctgtctgaactggagctatttccagatgaaagggtaataaatggatgtaatcaagttgaaaact

SEQ ID NO: 35228 - DNA, 2512 bp, Homo sapiens
  source 1..2512: mol_type = unassigned DNA
acaaacccggaagcggatcgcgtggagtgaaggtcacgccgcggcgcgattgacttctaaagagtcatgctgtgtgatgaaaaagcccagaagagaaggaagaggaaagcaaaggagtcagggatggctcttcctcagggacacttaacattcagggacgtggccatagaattctctcaggcggagtggaaatgcctggaccctgcacagagggctttatacaaggatgtgatgttggagaactacaggaacctggtctccctgggaatctctcttcctgacctgaatattaactccatgttggagcaaaggagggagccctggtctggtgagagtgaagtgaaaatagcaaaaaattcagatgggagggagtgcatcaaaggtgtgaacacagggagcagctatgcattgggaagcaatgcagaagacaaaccaattaaaaaacaacttggagtatcctttcacttacatctgtctgaactggagctatttccagatgaaagggtaataaatggatgtaatcaagttgaaaactttatcaaccacagttcctctgtttcctgtcttcaagaaatgtcttccagtgtcaaaacccccatttttaataggaatgattttgatgattcttcatttctcccacaagaacagaaagtacaccttagagaaaaaccttatgaatgtaatgagcatagcaaagtctttagagtatcttccagccttactaaacatcaagtaatccatactgtagagaaaccttacaaatgtaattcatgcggcaaggtctttagtcgcaattcacaccttgcagaacattgtagaattcatactggagagaaaccttacaaatgtaatgtctgtggcaaggtttttagttacaattcaaactttgcacgacatcaaagaattcataccagagagaagccgtatgaatgtaatgaatgtggtaaagtcttcagtaataattcttaccttgcacgacatcaaagaattcatgctgaagagaaaccttacaaatgtaatgaatgtggtaaaggcttcagtcataagtcatctctagcaaatcattggagaatttatactggagagaagccttacaaatgtgatgaatgtggcaaggccttctataggattgcgctccttgtacgacatcagaaaattcatactggagagaaaccttacaaatgtaatgaatgtggaaaggtctttattcaaaattcgcacctagcacaacattggagaattcatacaggagagaaaccttacaaatgtaatgaatgtggaaaagtatttaatcaactttcaaatcttgcacgacatcgaagaattcatactggagagaagccttacaaatgtaatgaatgtggtaaagcatttagtgagtattcaggcctttcagcccatcttgtaatccacactggagagaagccttacaaatgtagtgaatgtggcaaggcattcagacacaagttatcactaaccaatcatcagagaatccatactggagaaagaccttacaaatgtaatgaatgtggcaaggtcttcaatcgaattgcacaccttgcacgacatcggaaaattcatactggagagaaaccttacaaatgtaatgagtgtggcaaggcctttagtcgcatttcatacctagcacaacattggacaattcatatgggatagaaactacaaatgcaacaaatgcgtcaaagaatttagtgtgcactcaagccttactacccatcttttattccatactgcaaagaaattttgcaaatgtaaagaatatgacaaggtcttcaaacacaagtttttctaataactcattagagaatttatactggagagacttcacaattataataaatgtgtggaaaagtcttcaaaaaaatttcacaccttgcaaaaggagatctaaaaaacacaatcagaaatgacaaaggggacattaccaccaaccccacagaaatacgaaaaaccctcaaagattactataaacacctgtatgcacacaaactagaaaacctagaaaaaattaataaattccttgaaagatataaccccccaagattgaaccaagaagaaattgcatccctgaacagaccaataatgagttccaaaatttaatcactaattaaaaatctatcaaacaaaactctggaccagacagatttatagttgaagcctacgagatgtataaagaaaagctgttaccaatcttactgaaactgttcaaaaacatggatgcagagggactcctccctatctgattctatgaggccagcatcattctaataccaaaacctgacaggcacaatgaaaaaagaaaacttcaggctggtactcctgacgaatataggtgccaaaatcctcagcaaaatactagtaaaccaaatccatctgcacatcaaaaagctaatccaacattatcaagcaggctttagtgttgggctgcaaggttggttcagtatacacaaatcaataaatgtgatttatcacatacacagaactaaaaacaaaa

SEQ ID NO: 35229 - DNA, 4738 bp, Homo sapiens
  source 1..4738: mol_type = unassigned DNA
acaaacccggaagcggatcgcgtggagtgaaggtcacgccgcggcgcgattgacttctaaagagtcatgctgtgtgatgaaaaagcccagaagagaaggaagaggaaagcaaaggagtcagggatggctcttcctcagggacacttaacattcagggacgtggccatagaattctctcaggcggagtggaaatgcctggaccctgcacagagggctttatacaaggatgtgatgttggagaactacaggaacctggtctccctgggaatctctcttcctgacctgaatattaactccatgttggagcaaaggagggagccctggtctggtgagagtgaagtgaaaatagcaaaaaattcagatgggagggagtgcatcaaaggtgtgaacacagggagcagctatgcattgggaagcaatgcagaagacaaaccaattaaaaaacaacttggagtatcctttcacttacatctgtctgaactggagctatttccagatgaaagggtaataaatggatgtaatcaagttgaaaactttatcaaccacagttcctctgtttcctgtcttcaagaaatgtcttccagtgtcaaaacccccatttttaataggaatgattttgatgattcttcatttctcccacaagaacagaaagtacaccttagagaaaaaccttatgaatgtaatgagcatagcaaagtctttagagtatcttccagccttactaaacatcaagtaatccatactgtagagaaaccttacaaatgtaattcatgcggcaaggtctttagtcgcaattcacaccttgcagaacattgtagaattcatactggagagaaaccttacaaatgtaatgtctgtggcaaggtttttagttacaattcaaactttgcacgacatcaaagaattcataccagagagaagccgtatgaatgtaatgaatgtggtaaagtcttcagtaataattcttaccttgcacgacatcaaagaattcatgctgaagagaaaccttacaaatgtaatgaatgtggtaaaggcttcagtcataagtcatctctagcaaatcattggagaatttatactggagagaagccttacaaatgtgatgaatgtggcaaggccttctataggattgcgctccttgtacgacatcagaaaattcatactggagagaaaccttacaaatgtaatgaatgtggaaaggtctttattcaaaattcgcacctagcacaacattggagaattcatacaggagagaaaccttacaaatgtaatgaatgtggaaaagtatttaatcaactttcaaatcttgcacgacatcgaagaattcatactggagagaagccttacaaatgtaatgaatgtggtaaagcatttagtgagtattcaggcctttcagcccatcttgtaatccacactggagagaagccttacaaatgtagtgaatgtggcaaggcattcagacacaagttatcactaaccaatcatcagagaatccatactggagaaagaccttacaaatgtaatgaatgtggcaaggtcttcaatcgaattgcacaccttgcacgacatcggaaaattcatactggagagaaaccttacaaatgtaatgagtgtggcaaggcctttagtcgcatttcatacctagcacaacattggacaattcatatgggatagaaactacaaatgcaacaaatgcgtcaaagaatttagtgtgcactcaagccttactacccatcttttattccatactgcaaagaaattttgcaaatgtaaagaatatgacaaggtcttcaaacacaagtttttctaataactcattagagaatttatactggagagacttcacaattataataaatgtgtggaaaagtcttcaaaaaaatttcacaccttgcaaaaggagatctaaaaaacacaatcagaaatgacaaaggggacattaccaccaaccccacagaaatacgaaaaaccctcaaagattactataaacacctgtatgcacacaaactagaaaacctagaaaaaattaataaattccttgaaagatataaccccccaagattgaaccaagaagaaattgcatccctgaacagaccaataatgagttccaaaatttaatcactaattaaaaatctatcaaacaaaactctggaccagacagatttatagttgaagcctacgagatgtataaagaaaagctgttaccaatcttactgaaactgttcaaaaacatggatgcagagggactcctccctatctgattctatgaggccagcatcattctaataccaaaacctgacaggcacaatgaaaaaagaaaacttcaggctggtactcctgacgaatataggtgccaaaatcctcagcaaaatactagtaaaccaaatccatctgcacatcaaaaagctaatccaacattatcaagcaggctttagtgttgggctgcaaggttggttcagtatacacaaatcaataaatgtgatttatcacatacacagaactaaaaacaaaaaccacatgaccatgatcatctctttagatgcagaaaggtttttaataaaattcaacatcccttcattttaaaaaccctcaacaaattacacattgagggaacatacttcaataagaaccatctatgctggactcacagccaaattaatactgaacaagcaaaagctggaagcattccccttgagaactggaaaatgacagggatgaccactctcaccactccgattcaacatagtactggaagtcctaagcttagtgatcaggcaagataaagatatgaaaggcatatataaataggaagaggggaagtcagtttctcttgcagaagatataattctgtatttagaaaacctgttgtctctgcccaaaggctcctagatctgataaacaacttcaaaaaagtttcaggatacaaaatctgtgtacaaaaattagttgcatttctatacaccagtaatgtccaagctatgaaccaaatcaagaatggaatcccattcacagtagccacaaaaagtataaaatacctaggaatacagccaaccaggtaagtgaaagatttctacaatgagaattacaaagcagtgcacaaagaaatcagaaacaataaaaattgaaaaatatctcatgctcatggataggaagaatcagtattgttaaaatactgcccaaagcaatttacagagccaatgctatttctatcaaactaccaatggcatttttcacagaatcagaagaaaacattctgaaatttatttggaaccagaaaagcccaacctaaatagcaaaagcaatcctaagcaaaaagagcaatgtttgaggtatcacactacccaactttaaaccatactacaaggctacagcaactaaaacagcatggtactggtataaaaaaagacacatagatcaatggaataggtaagagaacccagaaataaaggcatatacctacaaccatgtgatcctcaacaaaactgacaagcaatgaagtaagaacttcattcaataagtggtgctggcataactggctagccatatgcaggatattgaaactggacccctatccttcacgatatacaaaaatcaactcaagatggattaaagacttaaatataaaacctaaaagtattaaattcctagaagaaaacccaggaaatgccattctggacataagtgctggaaaagacttaatgatgaacaccccaaagcaattgcaacaaaaacaaaaattgacaagtgggacctaattaaactaaataacttctgcacagcaaaagaagctatttgcagactacagaatgggagaaaatgtttacaaactgcatctgacaaagatctaatccagaatctataaagaactcaaacaaatcaacaatgagaaaaacaaccccattaaaaactgggcaaaggccatgaatagacctttctcaaaagaatacatacatgtggcaataagcatatgaaaaaaatggttaatatcgctaatcattaaggaaatgcaatcaaagccacaatgagataccatctcagacctgtctgaatgggtattatcagaatgggtattattaaaaaatcaaaacatagatgctagtgaggctgcagagaaaagcaaatacttatacactgctggtgggaatgtaaattaattcagccattgtggaaagcactgcagcgatttctcaaagacataaaagaacatagcattcaacccagcatcccattactgggtgtatacctaaaggaatataatcattccaccataaagacaaacacttgtatgttcattgcagcactattctcaatagcaaagatgtggaatcaacgtaaatgcccatcagcagtagaccagataaagaaaatttggtacatatacaccatggaatactatgcagccataaaaaagaacaagactgtgtcctttacagcaacatagatggagctgaggctcttatcctaagtgaattaatgcaggaacagaaaatgaaatatcccatgttctcacttataagtgggagctaaacattgattacacatggactcaaagaagggaacagtagacacgggcttatgggtggaggttgggaagaggatgaagattgaataactgcctgttgggtactatgctgattacctggggacaaaattaactgtacaccaaactcctgcaacatgcagttgacccatgtacacatactccttgaacctaaaataaaacatgaaaaaaagcaaa

SEQ ID NO: 35230 - DNA, 5336 bp, Homo sapiens
  source 1..5336: mol_type = unassigned DNA
ggcccgcgcccggcctccgcggcgccgcctcccagcccagagcccagcgctcaggaaggtgcgggcgggggagaaagcaacaccattgtttttcaggcgcctccatttgcccccgagccgagccgtggctttccggatgatcgggagacgcggtctggacgggccgggaaaggagccgggcgcctgcggagaccccgcctcagcgagtacgcccggccgggcgggctgggaggatgaggacggctgccctggacttccgccgccacaggagggttttcggccggacgccgggagggagctccaggctgtgagctccatttgtaaaggtcttaataacaagaacagtgacttcggctccggagcttcaagatagtggcctgcttggcctgcccatctcggatctctccaggaggacccagccacccaagggtcgtcttctgctgctgacccccatcaaatcccatcatgcccacagccctgtgcccccgagtcttggctccgaaggaaagtgaggagcccaggaaaatgaggagcccacctggagagaaccctagcccccagggggagcttcccagccccgagtcctctcggcgtctcttccgccgtttccgctaccaggaggcggcgggcccccgggaggccctgcagcgcctctgggacctgtgcgggggctggctgcggcctgagaggcacaccaaggagcagattctggagctgctggtgctggagcagttcctggccatcctgccccgggagatccagagctgggtgcgggcgcaggagcctgagagcggagagcaggctgtggccgcggtggaggcactggaacgggagcccgggagaccctggcagtggctcaagcactgtgaagaccctgtggtgattgatgatggggacagccctctggaccaggagcaggagcagctgccggtagagccccacagcgaccttgcaaagaaccaggatgcccagcccataaccctggcacagtgcctggggctcccaagcagaccaccaagccagctcagcggggacccagttctgcaagatgctttccttcttcaggaagagaatgtgcgggacacacagcaggtgaccaccctccagctacccccgagtcgggtttctccattcaaggacatgattttatgcttctctgaagaggattggtcccttctagatcctgcccagactggcttctatggagagttcatcattggggaggattacggggtctcaatgcctccaaacgacctagctgcccagccagatctctcccagggagaggagaatgagccacgcgttccagagttgcaggatctccagggcaaagaagtgccccaggtctcctacttggactctccaagtctccagccattccaggtagaagaaagaaggaaacgtgaggagctgcaggtgccagagttccaggcctgcccacagacggtggtgcctcaaaacacctacccagctggcggcaacccgcgatctctagagaacagcctggatgaagaagtgaccatcgagatcgttctctccagctctggggacgaggactcccagcatggcccgtactgcacagaagagctggggagccccacagagaagcagcgcagcctccccgcctcccaccggagcagcaccgaggccggaggcgaggtgcagacctccaagaagtcctacgtgtgtccgaactgtgggaaaatcttccgctggagggtcaacttcatccggcatctgcggagccgcagggagcaggagaagccgcacgagtgctcggtgtgcggggagctgttcagcgacagcgaggacctggatgggcacctagagagccacgaggcccagaagccttaccggtgtggtgcctgcgggaagagcttccgcctgaactcccacctgctctcccaccggcggatacacctgcagccggacagactccagccggtggagaagagagagcaggcggcatccgaggacgcggacaagggtcccaaagagccgctggaaaacggcaaggccaaactgagcttccagtgctgtgagtgtgggaaggccttccagcggcacgaccacctggctcggcaccgcagccactttcacctgaaggacaaagcccggcccttccagtgccggtactgcgtcaagagcttcacgcagaactatgacctcctccgccacgagcgcctgcacatgaagcgccgttccaagcaggctctgaactcctactgagcctctccgcctggggcggcctcaccctggctggtgctgccccctcaccttggtactgatcagcgcccccacccaggacataccttccccaggatagagagcacacctccctcctgtccttgctctcaggtagtgagcgttcgggtggtgccatgggagcactctccctcccccaggtaatgaaagagtggccaagtgagtgttctgtttctgctgtgccaaaaaacgggggggatgtgccatcaccaggttggacatgccaggtgttctgcgtcttagagacccttggcccatgctccccaagctcggggagtaaaactgggctatcccccgtcagggcggcaccctggtcaccagccaaacctcagtatactccctcccctccttccctgtctgaacgctaggatctgctcctgaagctccaggatgcctgcacttccactgagaagctgctggcggatgttggactagaggaaagaagaaggcagggtgggactgatgggctcagtggggagcagggccaggcacactgagccagacatgtcatgtctgagccccagattcgtggccatcaggtaggcaggagcaccccgcagatccaagatgatcaggcagcccttttgggctggcctctgtggcaggggtctgcagagctccttcttgaggtttggaaacagtcgtcatacctgttgattttcctgggggccaatcactagggatctggagctcaccaaaaacaaagcttacattttaatttgtgttgcacacctaccccataatgtctttataccccaaagatccttggtaaatgcttgtgggttggaagcggagttgtcatcgtttaaaaggcacttaagtcccttcttccaatctgtcctgtctaggaatgtggagctctgcccccagtgaggggttctcctgtctgggtgagccaagctccagaacagaaccttgcctgacaacacacttgatagatacattagcttggagtgctggtgtgtccaaacactggctggcttagaacaacaggagtgtattccctgacagttctgggaggtgcacgtccaagatcagggtgtcctcagagttggtgccttccgagagctgtgagggagaagcggcttcatgcctttgctggcagttgccattccttggtgtgtggaagcgtcacccagtctctgccttcatctccacatggcactcttgctgtgtgcgtgtctgtctccaaacctccctttgtttaaggacaccagtcatatcggattagagcccatcccaccgactccagtataacctcatctgtatccgcagcaaccgtttaccaataaggtcacattctgaggtactagaggttgggacttcaacatcggaatttgaaagggacagcattcagcccatgactccagataaacgtgaggtatgctatatcattcctaatttacagatgagtcaatacaaacttgagtgagcttgctcacaattccatcaaaggcagggttcagacccaagtttcagcatttagggcaggtgtcctctgcatggaagaatcatactcaatagccgtaaacgctgacaaattccccttcctccctgccttctgatgggggctgggcaggccagctggagctgtgtctcctgctgggattccggactgagagtgacagcaggtagtgaaacctcaagcaatttaaaacatggtattgttcctggaagactggttatgttggctagggtcagcaagagagggcatcaaggctgtagtctagcagtgatttaatctgcaagtcaaaccagacgggtattttgtattattcatatgtcacatcctaccaacagacagtaagtcaggcaaggctcctggtgctccttgtcactcacgtaattttcacatcaggaaaactctgggctgggtgcagtggctcacacctgtaatcctagcactttgggaaaccaaggtgggtggattgcctagctcagtgacaccagcctgggccacatggcaaaaccccgtctgtaccaaaaatgcaaaaaattagctgggtgtggtgttgacgtttgcggtcccagctactctggaggctgaggtgggaggattgcttgagtctgggaggcagaagttgcagtaagccgagatcatgccactgcacaagctaggtgacagaatgagactctgtctcaaaaataattaaaaagcctctgccccaaactcgttaaaagattttataaccacaactgctgtttctgtgtagatgcatctgcatgcccaggagcagtaaatgcaataaaatcatttggttatactttgaacacaaaataaacggttgaggcttttactttctaaatagtttgtctcttgtatcaacatagctggaaaagggagaaatccgatttttaaggccaagggaggggaaaattccaagtagaagccaggctctctgtacacgtttaccccacctacctgtgtgctcctacctgtgctgaggattctctctgtagctctaaggtcttgggaaggttattcaccttcctgcttcagacgtctgactcaagagaagaacactgttctacttaccagagtgtttttctgtgtaaaaccacatcatgaaggagaaagcgacaaagggaatgtgaggggctggaagccacagggaggctgtctcttgagtccccaccactgatccagagccaaccaaggcacctcaggaaatggaaggccacattgcctctggatttggaaatcctcctgggtaatgtaactgaaacccaggttgatgccatgcagcaggagcagcagggggaacgtgctctcaggagaggtcggccaaccctccagcccaacacccttcaccacagtggtggaggaggctgcacccaggagatctttgtctcccttttggccactgatacctttggccttatctgacaacagctacccctcgatccttccctcccaccccaggggctgggcagctggctggagctttgtgtccaccttgctctggaggttgagacccccatctgagcaacatcctctctctttgttcctctgatcccttggcatcgtcacaaacccacaggtgcataataaaaacttgctgagtcaatat

SEQ ID NO: 35231 - DNA, 2535 bp, Homo sapiens
  source 1..2535: mol_type = unassigned DNA
ggcccgcgcccggcctccgcggcgccgcctcccagcccagagcccagcgctcaggaaggtgcgggcgggggagaaagcaacaccattgtttttcaggcgcctccatttgcccccgagccgagccgtggctttccggatgatcgggagacgcggtctggacgggccgggaaaggagccgggcgcctgcggagaccccgcctcagcgagtacgcccggccgggcgggctgggaggatgaggacggctgccctggacttccgccgccacaggagggttttcggccggacgccgggagggagctccaggctgtgagctccatttgtaaaggtcttaataacaagaacagtgacttcggctccggagcttcaagatagtggcctgcttggcctgcccatctcggatctctccaggaggacccagccacccaagggtcgtcttctgctgctgacccccatcaaatcccatcatgcccacagccctgtgcccccgagtcttggctccgaaggaaagtgaggagcccaggaaaatgaggagcccacctggagagaaccctagcccccagggggagcttcccagccccgagtcctctcggcgtctcttccgccgtttccgctaccaggaggcggcgggcccccgggaggccctgcagcgcctctgggacctgtgcgggggctggctgcggcctgagaggcacaccaaggagcagattctggagctgctggtgctggagcagttcctggccatcctgccccgggagatccagagctgggtgcgggcgcaggagcctgagagcggagagcaggctgtggccgcggtggaggcactggaacgggagcccgggagaccctggcagtggctcaagcactgtgaagaccctgtggtgattgatgatggggacagccctctggaccaggagcaggagcagctgccggtagagccccacagcgaccttgcaaagaaccaggatgcccagcccataaccctggcacagtgcctggggctcccaagcagaccaccaagccagctcagcggggacccagttctgcaagatgctttccttcttcaggaagagaatgtgcgggacacacagcaggtgaccaccctccagctacccccgagaatttttcaatttaataatcatcgcagcaatggttatattttagaaatgttaggaagtggagggaagaaagcacagataatttcagtcctgtcacagatctacgtgagtcgggtttctccattcaaggacatgattttatgcttctctgaagaggattggtcccttctagatcctgcccagactggcttctatggagagttcatcattggggaggattacggggtctcaatgcctccaaacgacctagctgcccagccagatctctcccagggagaggagaatgagccacgcgttccagagttgcaggatctccagggcaaagaagtgccccaggtctcctacttggactctccaagtctccagccattccaggtagaagaaagaaggaaacgtgaggagctgcaggtgccagagttccaggcctgcccacagacggtggtgcctcaaaacacctacccagctggcggcaacccgcgatctctagagaacagcctggatgaagaagtgaccatcgagatcgttctctccagctctggggacgaggactcccagcatggcccgtactgcacagaagagctggggagccccacagagaagcagcgcagcctccccgcctcccaccggagcagcaccgaggccggaggcgaggtgcagacctccaagaagtcctacgtgtgtccgaactgtgggaaaatcttccgctggagggtcaacttcatccggcatctgcggagccgcagggagcaggagaagccgcacgagtgctcggtgtgcggggagctgttcagcgacagcgaggacctggatgggcacctagagagccacgaggcccagaagccttaccggtgtggtgcctgcgggaagagcttccgcctgaactcccacctgctctcccaccggcggatacacctgcagccggacagactccagccggtggagaagagagagcaggcggcatccgaggacgcggacaagggtcccaaagagccgctggaaaacggcaaggccaaactgagcttccagtgctgtgagtgtgggaaggccttccagcggcacgaccacctggctcggcaccgcagccactttcacctgaaggacaaagcccggcccttccagtgccggtactgcgtcaagagcttcacgcagaactatgacctcctccgccacgagcgcctgcacatgaagcgccgttccaagcaggctctgaactcctactgagcctctccgcctggggcggcctcaccctggctggtgctgccccctcaccttggtactgatcagcgcccccacccaggacataccttccccaggatagagagcacacctccctcctgtccttgctctcaggtagtgagcgttcgggtggtgccatgggagcactctccctcccccaggtaatgaaagagtggccaagtg

SEQ ID NO: 35232 - DNA, 2166 bp, Homo sapiens
  source 1..2166: mol_type = unassigned DNA
gctggacacgcagcggctcgcatcgcagagcgcagcgccggcgcggggccgcgagaacgcagcgcaggggagcagcccgaggcggacaccgcgagccgcccggcactcccgcagtccagccggctcctctagcccggccacggctccgctgcgggccacccaggattactcgcgtctggctccaggcgccgagaaggcgcgctgggcgcccgtggccgccgcgccagctcctcctcctcccgctgctcctgctcccggggcgagcgcgcagccccgagcccgccccgcgcctcccggagccctcccccccgctgctcccatgcgcgcgggtgggtcatgagcacagcgccctcgctttctgccctaagaagcagtaagcacagcggcggcggcggcggcggaggcggaggcggcggtgcagaccctgcctggaccagcgcgctctctggaaatagctccggccccggcccaggctcgtccccggccggcagcaccaagccttttgtgcacgccgtgcccccctctgaccccctgcgccaggccaaccgcctgccaatcaaggtgctgaagatgctgacggcacgaactggccacattttgcaccccgagtacctgcagcccctgccttccacgccggtcagccccatcgagctcgatgccaagaagagcccgctggcgctgttggcgcaaacatgttcgcagatcgggaagcccgacccctcgccctcctccaaactctcctcggttgcctccaacgggggcggcgcgggcggtgccggcggcggtgctgcgggcgacaaggacaccaaatcgggccccctgaagctgagcgacatcggcgtggaggacaagtcgagtttcaagccgtactccaaacccggctcggataagaaggagccgggaggcggcggtggaggcggtggcggtggcgggggcggcggcgggggtgtttcgtcggagaagtcgggattccgggtaccgagcgccacctgccagccattcacgcccaggacaggcagcccgagctccagcgcctcggccgaagggggacccacggggctggcacacggccggattagctgcggcggcgggattaatgtggatgtgaaccagcatccggatgggggcccgggaggcaaggctctgggctcggactgcggcggttcatcgggctccagctccggctccggccccagcgcgcccacctcctcctcagtgttgggctctgggctggtggctcccgtgtcaccctacaagccgggccagacagtgttccctctgcctcccgcgggtatgacctacccaggcagcctggccggggcctacgccggctacccgccccagttcctgccacacggcgtggcacttgaccccaccaagccgggcagcctggtgggggcgcagctggcggcggccgcggccgggtctctgggctgcagtaagccggccggctccagccctttggccggagcgtctccgccgtccgtgatgacagccagtttgtgccgggacccttactgcctcagctaccactgcgctagccacctggcaggggcggcggccgccagcgcttcttgcgcacatgatccggctgctgcggctgcggcgctgaagtccggatacccgctggtgtaccccacgcacccgctgcacggtgtgcactcctcgctaacggccgccgcggctgctggcgccacaccgccctccctggccggccaccccctctacccctacggctttatgctccctaacgacccactcccccacatctgcaactgggtgtcggccaacgggccgtgcgacaagcgcttcgccacgtccgaagagctgctgagccacttgcggacccatacggcatttcccgggacagacaaactgctgtcgggctaccccagctcgtcgtctctggccagcgctgccgcggccgccatggcttgccacatgcacatccccacctcgggcgcaccgggcagccctgggacgctggcgctgcgcagcccccaccacgcgctgggactcagcagccgctaccacccctactccaagagcccgcttcccacgcctggcgcccccgtgccggtgcccgccgccaccggaccgtactactccccctacgccctctacggacagagactgaccaccgcctcggcgctggggtatcagtga

SEQ ID NO: 35233 - DNA, 3347 bp, Homo sapiens
  source 1..3347: mol_type = unassigned DNA
ctggcagcggcggcggcggcggcgcgggacgcgtcacatccccttgaccctccaatcacctcgggctcccatttgattggaaggcggcaaaggctttaatctcccccttggtgcagctgcttttgaagtgagtttcctcgccagagccccggctggacacgcagcggctcgcatcgcagagcgcagcgccggcgcggggccgcgagaacgcagcgcaggggagcagcccgaggcggacaccgcgagccgcccggcactcccgcagtccagccggctcctctagcccggccacggctccgctgcgggccacccaggattactcgcgtctggctccaggcgccgagaaggcgcgctgggcgcccgtggccgccgcgccagctcctcctcctcccgctgctcctgctcccggggcgagcgcgcagccccgagcccgccccgcgcctcccggagccctcccccccgctgctcccatgcgcgcgggtgggtcatgagcacagcgccctcgctttctgccctaagaagcagtaagcacagcggcggcggcggcggcggaggcggaggcggcggtgcagaccctgcctggaccagcgcgctctctggaaatagctccggccccggcccaggctcgtccccggccggcagcaccaagccttttgtgcacgccgtgcccccctctgaccccctgcgccaggccaaccgcctgccaatcaaggtgctgaagatgctgacggcacgaactggccacattttgcaccccgagtacctgcagcccctgccttccacgccggtcagccccatcgagctcgatgccaagaagagcccgctggcgctgttggcgcaaacatgttcgcagatcgggaagcccgacccctcgccctcctccaaactctcctcggttgcctccaacgggggcggcgcgggcggtgccggcggcggtgctgcgggcgacaaggacaccaaatcgggccccctgaagctgagcgacatcggcgtggaggacaagtcgagtttcaagccgtactccaaacccggctcggataagaaggagccgggaggcggcggtggaggcggtggcggtggcgggggcggcggcgggggtgtttcgtcggagaagtcgggattccgggtaccgagcgccacctgccagccattcacgcccaggacaggcagcccgagctccagcgcctcggcctgctcgccgggaggtatgctgtcctcggccgggggtgccccggagggcaaggacgacaagaaagacaccgacgtgggcggcggtggcaagggcaccgggggcgcctcggccgaagggggacccacggggctggcacacggccggattagctgcggcggcgggattaatgtggatgtgaaccagcatccggatgggggcccgggaggcaaggctctgggctcggactgcggcggttcatcgggctccagctccggctccggccccagcgcgcccacctcctcctcagtgttgggctctgggctggtggctcccgtgtcaccctacaagccgggccagacagtgttccctctgcctcccgcgggtatgacctacccaggcagcctggccggggcctacgccggctacccgccccagttcctgccacacggcgtggcacttgaccccaccaagccgggcagcctggtgggggcgcagctggcggcggccgcggccgggtctctgggctgcagtaagccggccggctccagccctttggccggagcgtctccgccgtccgtgatgacagccagtttgtgccgggacccttactgcctcagctaccactgcgctagccacctggcaggggcggcggccgccagcgcttcttgcgcacatgatccggctgctgcggctgcggcgctgaagtccggatacccgctggtgtaccccacgcacccgctgcacggtgtgcactcctcgctaacggccgccgcggctgctggcgccacaccgccctccctggccggccaccccctctacccctacggctttatgctccctaacgacccactcccccacatctgcaactgggtgtcggccaacgggccgtgcgacaagcgcttcgccacgtccgaagagctgctgagccacttgcggacccatacggcatttcccgggacagacaaactgctgtcgggctaccccagctcgtcgtctctggccagcgctgccgcggccgccatggcttgccacatgcacatccccacctcgggcgcaccgggcagccctgggacgctggcgctgcgcagcccccaccacgcgctgggactcagcagccgctaccacccctactccaagagcccgcttcccacgcctggcgcccccgtgccggtgcccgccgccaccggaccgtactactccccctacgccctctacggacagagactgaccaccgcctcggcgctggggtatcagtgagggcggccgggagggcgagcgagggagaggagggagagggggaggggaggagtccagggagaggcgggatcacggcccaggctgctgacacccgcgcgtggggaggactcgggccacgaaaggaaagaaatgtataccgtatctatctacccgacagcagcgaccgagacccggtgggacactccccttctccccactttcacctccccacccaaactttataaaagttgaaaaaatatcatttgactttttatagaaaaaaaaaggaaaaaataattgagaaagtgttcatctgaggactgcatcggtggacactggtatttatttatgttagctccaagcggaccggtggttcaaaagtgcattatttagtttgagctctgtaggtaaaaaggaggtgggaaaaattttaaaacttgagggtaaaaatgtggaaaacaaaccctcccatcccttgtagattataaataaaagcaaaaccgccacagaactagaggtcttctctttaatgttactttaaaattgctatgattgtattgtacgttatttaatgtctgattgaaacacaaatttacatgcatgtttgttacaaaaaaaatgaaaaaaaaagtcacaatttgtcagctctgatttcaaattgcaattatttttaaggtgtataccatcgaagagaatgggtatttttttgtatgtattctggaagaaaacaacaaaaaaaaaaagaaaaagaaaaaattctattccaaaacctcatttgccttattttgttctttaaaaggaacacttaactatttttaatttttaagtccacccgctgagaaggggacaaggtttacgtcatgtactaaaataatagacaatgtatcgctttaaagattaaaattccgtatatttgatgtattaaagggttttacttctt

SEQ ID NO: 35234 - DNA, 2362 bp, Homo sapiens
  source 1..2362: mol_type = unassigned DNA
gattggaaggcggcaaaggctttaatctcccccttggtgcagctgcttttgaagtgagtttcctcgccagagccccggctggacacgcagcggctcgcatcgcagagcccgccccgcgcctcccggagccctcccccccgctgctcccatgcgcgcgggtgggtcatgagcacagcgccctcgctttctgccctaagaagcagtaagcacagcggcggcggcggcggcggaggcggaggcggcggtgcagaccctgcctggaccagcgcgctctctggaaatagctccggccccggcccaggctcgtccccggccggcagcaccaagccttttgtgcacgccgtgcccccctctgaccccctgcgccaggccaaccgcctgccaatcaaggtgctgaagatgctgacggcacgaactggccacattttgcaccccgagtacctgcagcccctgccttccacgccggtcagccccatcgagctcgatgccaagaagagcccgctggcgctgttggcgcaaacatgttcgcagatcgggaagcccgacccctcgccctcctccaaactctcctcggttgcctccaacgggggcggcgcgggcggtgccggcggcggtgctgcgggcgacaaggacaccaaatcgggccccctgaagctgagcgacatcggcgtggaggacaagtcgagtttcaagccgtactccaaacccggctcggataagaaggagccgggaggcggcggtggaggcggtggcggtggcgggggcggcggcgggggtgtttcgtcggagaagtcgggattccgggtaccgagcgccacctgccagccattcacgcccaggacaggcagcccgagctccagcgcctcggcctgctcgccgggaggtatgctgtcctcggccgggggtgccccggagggcaaggacgacaagaaagacaccgacgtgggcggcggtggcaagggcaccgggggcgcctcggccgaagggggacccacggggctggcacacggccggattagctgcggcggcgggattaatgtggatgtgaaccagcatccggatgggggcccgggaggcaaggctctgggctcggactgcggcggttcatcgggctccagctccggctccggccccagcgcgcccacctcctcctcagtgttgggctctgggctggtggctcccgtgtcaccctacaagccgggccagacagtgttccctctgcctcccgcgggtatgacctacccaggcagcctggccggggcctacgccggctacccgccccagttcctgccacacggcgtggcacttgaccccaccaagccgggcagcctggtgggggcgcagctggcggcggccgcggccgggtctctgggctgcagtaagccggccggctccagccctttggccggagcgtctccgccgtccgtgatgacagccagtttgtgccgggacccttactgcctcagctaccactgcgctagccacctggcaggggcggcggccgccagcgcttcttgcgcacatgatccggctgctgcggctgcggcgctgaagtccggatacccgctggtgtaccccacgcacccgctgcacggtgtgcactcctcgctaacggccgccgcggctgctggcgccacaccgccctccctggccggccaccccctctacccctacggctttatgctccctaacgacccactcccccacatctgcaactgggtgtcggccaacgggccgtgcgacaagcgcttcgccacgtccgaagagctgctgagccacttgcggacccatacggcatttcccgggacagacaaactgctgtcgggctaccccagctcgtcgtctctggccagcgctgccgcggccgccatggcttgccacatgcacatccccacctcgggcgcaccgggcagccctgggacgctggcgctgcgcagcccccaccacgcgctgggactcagcagccgctaccacccctactccaagagcccgcttcccacgcctggcgcccccgtgccggtgcccgccgccaccggaccgtactactccccctacgccctctacggacagagactgaccaccgcctcggcgctggggtatcagtgagggcggccgggagggcgagcgagggagaggagggagagggggaggggaggagtccagggagaggcgggatcacggcccaggctgctgacacccgcgcgtggggaggactcgggccacgaaaggaaagaaatgtataccgtatctatctacccgacagcagcgaccgagacccggtgggacactccccttctccccactttcacctccccacccaaactttataaaagttgaaaaaatatcatttgactttttatag

SEQ ID NO: 35235 - DNA, 2139 bp, Homo sapiens
  source 1..2139: mol_type = unassigned DNA
catgaatggaagcggcggcggcggcgggagcggcctgagctgggcgccggggccagggccgggggctgcccagggcccgcgccgctgcatgggggcggcccgcgggccctgagaggaagggcagacaggcgggccgagataggaggggcggggtcgggcggccgcaggccggaggcgcgtcgggctggagccggtcacgatgccccgaaggaagcaaagccacccgcagcccgtgaaatgcgagggggtcaaagtggatactgaagactccctcgacgaaggacccggggccctggtattggagagtgatttgctactaggccaggatctggagtttgaggaggaagaggaagaggaggaaggcgacggcaacagtgaccagctcatgggcttcgagagagactcggaaggagactctctgggggccaggcctgggcttccctatgggctgagcgacgatgagtctgggggcggccgggcactaagtgcggagagtgaagttgaggagccagccaggggtccaggggaggccaggggtgagaggccaggcccagcctgccagctgtgtggggggccgacaggtgaggggccgtgttgtggggcaggagggccgggtggggggcccctgctgcccccacggctactgtactcatgccgcctctgcaccttcgtgtcccactactcgagccacctgaagcggcacatgcagacacacagcggagagaagccgttccgctgtggccgctgcccctacgcctcagcccagctcgtcaacctgacacgacatacccgcacccacactggcgagaagccctaccgctgtccccactgcccctttgcctgcagcagcctgggcaacctgaggcggcatcagcgtacccacgcagggccccccactcctccctgcccgacctgtggcttccgctgctgtactccacgaccagcccggcctcccagtcccacagagcaggagggggcggtgccccggcgacctgaagatgctctgctccttccagatttgagcctccatgtgccaccaggtggtgccagtttcctgccagactgtgggcagctgcggggtgaaggggagggcctctgcgggactggatcagaaccactgccagagctgctattcccttggacctgccggggctgtggacaagagctggaggagggtgagggtagtcggctgggagctgccatgtgtgggcgctgcatgcgaggagaggctggagggggtgccagtggggggccccagggccccagtgacaaaggctttgcctgtagcctctgcccctttgccactcactatcccaaccacctggcccggcacatgaagacacacagtggtgagaagcccttccgctgcgcccgctgtccttatgcctctgctcatctggataacctgaaacggcaccagcgcgtccatacaggagagaagccctacaagtgccccctctgcccttatgcctgtggcaatctggccaacctcaagcgtcatggtcgcatccactctggtgacaaaccttttcggtgtagcctttgcaactacagctgcaaccagagcatgaacctcaaacgtcacatgctgcggcacacaggcgagaagcccttccgctgtgccacctgcgcctataccacgggccactgggacaactacaagcgccaccagaaggtgcatggccacggtggggcaggagggcctggtctctctgcctctgagggctgggccccacctcatagcccaccctctgttttgagctctcggggcccaccagccctggggactgctggcagccgggctgtccacacagactcatcctgaactaggtccttcttccccatgttttatacagacggaccagaagccacctttttctcccccgctggccaggggctccacacagactaacgtaggcactataaggaccagcccaaccccatgggcgggggggcccatatggaccaggggaccttgccttgactgaggcacttcacgagctcagtgagaagggccctgtattcacctccactgcccccaggggctgtggacaaaccggctgggggactgcccagcctcccacctgtttatttaacttatttcagtgctttataataaaggaaacactaacaaagcca

SEQ ID NO: 35236 - DNA, 2077 bp, Homo sapiens
  source 1..2077: mol_type = unassigned DNA
aggagcgggggtggggtcagtggagtgggctcaggtcagggtggagggggactcctgagggatgaagtgggcgatccagactcctagcttcccaccgaggcactaagggaatcagagtgggtcagcgagtacgggaagtgtggtccacgagggctggttcctgagggagaatccacaagccccctcccctcttcagtggatactgaagactccctcgacgaaggacccggggccctggtattggagagtgatttgctactaggccaggatctggagtttgaggaggaagaggaagaggaggaaggcgacggcaacagtgaccagctcatgggcttcgagagagactcggaaggagactctctgggggccaggcctgggcttccctatgggctgagcgacgatgagtctgggggcggccgggcactaagtgcggagagtgaagttgaggagccagccaggggtccaggggaggccaggggtgagaggccaggcccagcctgccagctgtgtggggggccgacaggtgaggggccgtgttgtggggcaggagggccgggtggggggcccctgctgcccccacggctactgtactcatgccgcctctgcaccttcgtgtcccactactcgagccacctgaagcggcacatgcagacacacagcggagagaagccgttccgctgtggccgctgcccctacgcctcagcccagctcgtcaacctgacacgacatacccgcacccacactggcgagaagccctaccgctgtccccactgcccctttgcctgcagcagcctgggcaacctgaggcggcatcagcgtacccacgcagggccccccactcctccctgcccgacctgtggcttccgctgctgtactccacgaccagcccggcctcccagtcccacagagcaggagggggcggtgccccggcgacctgaagatgctctgctccttccagatttgagcctccatgtgccaccaggtggtgccagtttcctgccagactgtgggcagctgcggggtgaaggggagggcctctgcgggactggatcagaaccactgccagagctgctattcccttggacctgccggggctgtggacaagagctggaggagggtgagggtagtcggctgggagctgccatgtgtgggcgctgcatgcgaggagaggctggagggggtgccagtggggggccccagggccccagtgacaaaggctttgcctgtagcctctgcccctttgccactcactatcccaaccacctggcccggcacatgaagacacacagtggtgagaagcccttccgctgcgcccgctgtccttatgcctctgctcatctggataacctgaaacggcaccagcgcgtccatacaggagagaagccctacaagtgccccctctgcccttatgcctgtggcaatctggccaacctcaagcgtcatggtcgcatccactctggtgacaaaccttttcggtgtagcctttgcaactacagctgcaaccagagcatgaacctcaaacgtcacatgctgcggcacacaggcgagaagcccttccgctgtgccacctgcgcctataccacgggccactgggacaactacaagcgccaccagaaggtgcatggccacggtggggcaggagggcctggtctctctgcctctgagggctgggccccacctcatagcccaccctctgttttgagctctcggggcccaccagccctggggactgctggcagccgggctgtccacacagactcatcctgaactaggtccttcttccccatgttttatacagacggaccagaagccacctttttctcccccgctggccaggggctccacacagactaacgtaggcactataaggaccagcccaaccccatgggcgggggggcccatatggaccaggggaccttgccttgactgaggcacttcacgagctcagtgagaagggccctgtattcacctccactgcccccaggggctgtggacaaaccggctgggggactgcccagcctcccacctgtttatttaacttatttcagtgctttataataaaggaaacactaacaaa

SEQ ID NO: 35237 - DNA, 4971 bp, Homo sapiens
  source 1..4971: mol_type = unassigned DNA
agtccgggtcttggcgggccccctcctccctcccgctccccgcgctctcgccttttaatcatgcccctctgtctgtgtgtgagtgcaggcaggctgacaatgatttcctcagtgattacgtacagagcgagtccctgcgggttaggggccccctctggagccatcctgatggctttgggggccttgcttccattttccattattatgtggactaccggagcgacagcgcagtccaagaccttgcaggatgtctcgccgcaagcaagcgaaaccgagatccctcaaagaccccaactgtaaacttgaagacaagactgaagatggagaggcactagattgtaagaagaggccggaagacggggaggagttggaagacgaagctgtgcacagctgtgacagctgcctccaggtgtttgaatcgctgagcgatatcacagaacacaagattaatcaatgtcaactgacagatggagtggatgttgaagatgatccgacttgctcttggccagcttcctcaccttctagcaaggatcagacttcccctagccatggagaaggttgcgattttggagaggaagaaggtggccctgggcttccatacccgtgtcaattctgtgacaagtcgtttagccgcctcagctacctaaagcaccatgagcagagtcacagtgacaaactgcctttcaaatgcacctactgcagtaggctgttcaaacacaagcgcagccgagatcgccacataaaactccacaccggggacaagaagtaccactgcagtgaatgtgatgctgcgttttccagaagtgatcacttgaagatccacttaaagactcacacgtccaacaagccatataaatgtgccatttgtcgccgtgggtttctgtcctctagttccttacacggacacatgcaggttcatgagaggaacaaggacggctctcagtccggttccaggatggaggactggaagatgaaggacactcagaagtgcagtcagtgtgaggaaggctttgacttcccggaagacctccaaaaacacattgcagagtgccaccccgaatgctccccaaatgaggaccgagcggccctccagtgtgtctactgccacgagctcttcgtagaggagacctccctcatgaaccacatggagcaggtgcatagcggggagaagaagaactcatgcagcatttgttctgagagtttccacacagttgaggaactgtacagccacatggacagtcaccagcaaccggagtcatgcaatcacagcaacagcccttccctggtcacggtgggctatacctccgtgtccagtacgactccagattccaacctctcagtggacagctcaaccatggtggaagctgccccgccaatcccaaagagtcgagggaggaagagggccgctcaacaaacccctgacatgactggtccctcgagtaaacaagcaaaagttacctacagctgtatttactgcaacaaacaattattttcaagtcttgcagttctgcagattcacctgaaaactatgcacttagataagccagaacaggcccatatttgtcagtattgcttggaggtcctgccctcactctataacctaaatgaacatcttaagcaagtgcatgaagctcaggacccaggtctgattgtttctgccatgcctgccattgtctaccagtgtaacttctgttccgaagttgtcaacgacctcaacactcttcaggaacacatccgatgttctcatggatttgcaaaccctgcagctaaagatagtaatgcattcttttgtccccattgctatatggggtttctcactgactcttccctggaagagcatattagacaggttcattgtgacctcagtggctcccgatttgggtctccagtgcttgggactcccaaagaaccagtagtagaagtctattcttgttcctattgtacaaattcgccaatattcaacagcgttcttaaactgaacaagcatatcaaagagaatcataaaaacattcccttggccctgaattatatccacaatgggaagaaatccagggccttaagccccctatctcctgtggccatagagcagacatctcttaagatgatgcaggcagtaggaggtgcacctgcacgtcccactggagaatatatctgtaatcaatgtggtgctaagtacacatccctagacagctttcagactcacctaaaaactcatctcgacactgtgcttccaaaattgacctgtcctcagtgcaacaaggaattccccaaccaagaatccttgctgaagcatgttaccattcactttatgatcacttcaacgtattacatctgtgagagttgtgacaagcaattcacatcagtggatgaccttcagaaacacctgctggacatgcacacctttgtcttctttcgctgcaccctctgccaggaagtttttgactcaaaagtctccattcagctccacttggctgtgaagcacagtaacgaaaagaaagtctataggtgcacatcttgcaactgggacttccgcaacgaaactgacttgcagctccatgtgaaacacaaccacctggaaaaccaagggaaagtgcataagtgcattttctgcggtgagtcctttggcaccgaggtggagctgcaatgccacatcaccactcacagtaagaagtacaactgcaagttctgtagcaaagccttccatgcgatcattttgttagaaaaacacttgcgagaaaaacactgtgtattcgaaaccaagacacccaactgtggaacaaatggagcttccgagcaagtgcagaaagaggaagtggagctgcagactttgctgaccaacagccaggagtcccacaacagtcacgatgggagcgaagaagacgttgacacctctgagcctatgtacggctgcgacatttgtggggcagcctacactatggaaactttgctgcagaatcaccagctccgagaccacaacatcagacctggagaaagtgccatcgtgaaaaagaaagctgagctcattaaagggaattacaagtgcaacgtgtgctctcgaaccttcttctccgaaaatggcctccgggaacatatgcagacccacctaggccctgtcaaacactacatgtgccctatttgcggagagcggtttccctcccttttaactcttactgaacacaaagtcacgcatagtaagagtcttgatactggaaactgccggatttgcaagatgcctctccagagtgaagaggagtttttagagcattgccaaatgcaccctgacttgaggaattccctgacaggctttcgctgcgtggtgtgcatgcagacagtgacctccaccttggaactcaaaatccatgggacgttccacatgcaaaagacagggaatgggtctgcagttcagaccacagggcggggccagcacgtccaaaaactgtataagtgcgcatcttgcctcaaagaattccgttccaagcaagatctggtgaaacttgatatcaatggcctgccatatggtctgtgtgccggctgcgtgaatctcagtaagagcgccagcccaggcattaacgtccctcccggcacgaatagaccaggcttgggccagaatgagaatctgagtgccattgaggggaaaggcaaggtggggggactgaagacacgctgctctagctgcaacgttaagtttgagtctgaaagtgaactccagaaccacatccaaaccatccaccgagagctcgtgccagacagcaacagcacacagttgaaaacgccccaagtatcaccaatgcccagaatcagtccctcccagtcggatgagaagaagacctatcaatgcatcaagtgtcagatggttttctacaatgaatgggatattcaggttcatgttgcaaatcacatgattgatgaaggactgaaccatgaatgcaaactctgcagccagacctttgactctcctgccaaactccagtgccacctgatagagcacagcttcgaagggatgggaggcaccttcaagtgtccagtctgctttacagtatttgttcaagcaaacaagttgcagcagcatattttctctgcccatggacaagaagacaagatctatgactgtacacaatgtccacagaagtttttcttccaaacagagctgcagaatcatacaatgacccaacacagcagttagtgcaagtacagtctctcaaggagaattgattttgtggcacaaaaagggaacatgttttactctttgcacgaaactttcattgttaatgtatattattcagaaacattgtattgtaccataaaacttgtattatcaaactgttggatgttcatgtgtttgaacttttgcgcaccggatagaccccttgtatataaagtgttgcacatgtattatgtcgtctgatactaaaatggtcttataaagacaagtggacttgggccctattcaggcaagattaaaaaaaaaaaaagactatgaccaaaatggcttaagataaagtatttttaaggaagaaagattaaaaacaactgttatacatgagactatggttggacttccttttctttacacttaagcctagaatttctctttaggtatatcagcgcttaaatccaagactattttttattgctgaagattcttgcaaaccatgaagagatgttctcacagaacagaaccccacagctggataaggcccgtatatatatatttgtaagccttgcaatgtgacaggtagcatcactatatatgcaatagttgttatgtagactgtcaaagaatttttttttccctggatacatttgaagctttgagtgttcaaggttttccttaatgatttcacgcagccaaattcttgaatcagttgaactaacctgtatgttactgttattaatgtttactctgcagtctgaacctggagattactggaattgttttccaagaggaaataaattcagtttaccattagg

SEQ ID NO: 35238 - DNA, 3933 bp, Homo sapiens
  source 1..3933: mol_type = unassigned DNA
atatctagagcccagaaagcacaaacaagaagattaaatgaccccaactgtaaacttgaagacaagactgaagatggagaggcactagattgtaagaagaggccggaagacggggaggagttggaagacgaagctgtgcacagctgtgacagctgcctccaggtgtttgaatcgctgagcgatatcacagaacacaagattaatcaatgtcaactgacagatggagtggatgttgaagatgatccgacttgctcttggccagcttcctcaccttctagcaaggatcagacttcccctagccatggagaaggttgcgattttggagaggaagaaggtggccctgggcttccatacccgtgtcaattctgtgacaagtcgtttagccgcctcagctacctaaagcaccatgagcagagtcacagtgacaaactgcctttcaaatgcacctactgcagtaggctgttcaaacacaagcgcagccgagatcgccacataaaactccacaccggggacaagaagtaccactgcagtgaatgtgatgctgcgttttccagaagtgatcacttgaagatccacttaaagactcacacgtccaacaagccatataaatgtgccatttgtcgccgtgggtttctgtcctctagttccttacacggacacatgcaggttcatgagaggaacaaggacggctctcagtccggttccaggatggaggactggaagatgaaggacactcagaagtgcagtcagtgtgaggaaggctttgacttcccggaagacctccaaaaacacattgcagagtgccaccccgaatgctccccaaatgaggaccgagcggccctccagtgtgtctactgccacgagctcttcgtagaggagacctccctcatgaaccacatggagcaggtgcatagcggggagaagaagaactcatgcagcatttgttctgagagtttccacacagttgaggaactgtacagccacatggacagtcaccagcaaccggagtcatgcaatcacagcaacagcccttccctggtcacggtgggctatacctccgtgtccagtacgactccagattccaacctctcagtggacagctcaaccatggtggaagctgccccgccaatcccaaagagtcgagggaggaagagggccgctcaacaaacccctgacatgactggtccctcgagtaaacaagcaaaagttacctacagctgtatttactgcaacaaacaattattttcaagtcttgcagttctgcagattcacctgaaaactatgcacttagataagccagaacaggcccatatttgtcagtattgcttggaggtcctgccctcactctataacctaaatgaacatcttaagcaagtgcatgaagctcaggacccaggtctgattgtttctgccatgcctgccattgtctaccagtgtaacttctgttccgaagttgtcaacgacctcaacactcttcaggaacacatccgatgttctcatggatttgcaaaccctgcagctaaagatagtaatgcattcttttgtccccattgctatatggggtttctcactgactcttccctggaagagcatattagacaggttcattgtgacctcagtggctcccgatttgggtctccagtgcttgggactcccaaagaaccagtagtagaagtctattcttgttcctattgtacaaattcgccaatattcaacagcgttcttaaactgaacaagcatatcaaagagaatcataaaaacattcccttggccctgaattatatccacaatgggaagaaatccagggccttaagccccctatctcctgtggccatagagcagacatctcttaagatgatgcaggcagtaggaggtgcacctgcacgtcccactggagaatatatctgtaatcaatgtggtgctaagtacacatccctagacagctttcagactcacctaaaaactcatctcgacactgtgcttccaaaattgacctgtcctcagtgcaacaaggaattccccaaccaagaatccttgctgaagcatgttaccattcactttatgatcacttcaacgtattacatctgtgagagttgtgacaagcaattcacatcagtggatgaccttcagaaacacctgctggacatgcacacctttgtcttctttcgctgcaccctctgccaggaagtttttgactcaaaagtctccattcagctccacttggctgtgaagcacagtaacgaaaagaaagtctataggtgcacatcttgcaactgggacttccgcaacgaaactgacttgcagctccatgtgaaacacaaccacctggaaaaccaagggaaagtgcataagtgcattttctgcggtgagtcctttggcaccgaggtggagctgcaatgccacatcaccactcacagtaagaagtacaactgcaagttctgtagcaaagccttccatgcgatcattttgttagaaaaacacttgcgagaaaaacactgtgtattcgaaaccaagacacccaactgtggaacaaatggagcttccgagcaagtgcagaaagaggaagtggagctgcagactttgctgaccaacagccaggagtcccacaacagtcacgatgggagcgaagaagacgttgacacctctgagcctatgtacggctgcgacatttgtggggcagcctacactatggaaactttgctgcagaatcaccagctccgagaccacaacatcagacctggagaaagtgccatcgtgaaaaagaaagctgagctcattaaagggaattacaagtgcaacgtgtgctctcgaaccttcttctccgaaaatggcctccgggaacatatgcagacccacctaggccctgtcaaacactacatgtgccctatttgcggagagcggtttccctcccttttaactcttactgaacacaaagtcacgcatagtaagagtcttgatactggaaactgccggatttgcaagatgcctctccagagtgaagaggagtttttagagcattgccaaatgcaccctgacttgaggaattccctgacaggctttcgctgcgtggtgtgcatgcagacagtgacctccaccttggaactcaaaatccatgggacgttccacatgcaaaagacagggaatgggtctgcagttcagaccacagggcggggccagcacgtccaaaaactgtataagtgcgcatcttgcctcaaagaattccgttccaagcaagatctggtgaaacttgatatcaatggcctgccatatggtctgtgtgccggctgcgtgaatctcagtaagagcgccagcccaggcattaacgtccctcccggcacgaatagaccaggcttgggccagaatgagaatctgagtgccattgaggggaaaggcaaggtggggggactgaagacacgctgctctagctgcaacgttaagtttgagtctgaaagtgaactccagaaccacatccaaaccatccaccgagagctcgtgccagacagcaacagcacacagttgaaaacgccccaagtatcaccaatgcccagaatcagtccctcccagtcggatgagaagaagacctatcaatgcatcaagtgtcagatggttttctacaatgaatgggatattcaggttcatgttgcaaatcacatgattgatgaaggactgaaccatgaatgcaaactctgcagccagacctttgactctcctgccaaactccagtgccacctgatagagcacagcttcgaagggatgggaggcaccttcaagtgtccagtctgctttacagtatttgttcaagcaaacaagttgcagcagcatattttctctgcccatggacaagaagacaagatctatgactgtacacaatgtccacagaagtttttcttccaaacagagctgcaggttcacactgccacacccaggcaatcc

SEQ ID NO: 35239 - DNA, 4139 bp, Homo sapiens
  source 1..4139: mol_type = unassigned DNA
agtccgggtcttggcgggccccctcctccctcccgctccccgcgctctcgccttttaatcatgcccctctgtctgtgtgtgagtgcaggcaggctgacaatgatttcctcagtgattacgtacagagcgagtccctgcgggttaggggccccctctggagccatcctgatggctttgggggccttgcttccattttccattattatgtggactaccggagcgacagcgcagtccaagaccttgcagaccccaactgtaaacttgaagacaagactgaagatggagaggcactagattgtaagaagaggccggaagacggggaggagttggaagacgaagctgtgcacagctgtgacagctgcctccaggtgtttgaatcgctgagcgatatcacagaacacaagattaatcaatgtcaactgacagatggagtggatgttgaagatgatccgacttgctcttggccagcttcctcaccttctagcaaggatcagacttcccctagccatggagaaggttgcgattttggagaggaagaaggtggccctgggcttccatacccgtgtcaattctgtgacaagtcgtttagccgcctcagctacctaaagcaccatgagcagagtcacagtgacaaactgcctttcaaatgcacctactgcagtaggctgttcaaacacaagcgcagccgagatcgccacataaaactccacaccggggacaagaagtaccactgcagtgaatgtgatgctgcgttttccagaagtgatcacttgaagatccacttaaagactcacacgtccaacaagccatataaatgtgccatttgtcgccgtgggtttctgtcctctagttccttacacggacacatgcaggttcatgagaggaacaaggacggctctcagtccggttccaggatggaggactggaagatgaaggacactcagaagtgcagtcagtgtgaggaaggctttgacttcccggaagacctccaaaaacacattgcagagtgccaccccgaatgctccccaaatgaggaccgagcggccctccagtgtgtctactgccacgagctcttcgtagaggagacctccctcatgaaccacatggagcaggtgcatagcggggagaagaagaactcatgcagcatttgttctgagagtttccacacagttgaggaactgtacagccacatggacagtcaccagcaaccggagtcatgcaatcacagcaacagcccttccctggtcacggtgggctatacctccgtgtccagtacgactccagattccaacctctcagtggacagctcaaccatggtggaagctgccccgccaatcccaaagagtcgagggaggaagagggccgctcaacaaacccctgacatgactggtccctcgagtaaacaagcaaaagttacctacagctgtatttactgcaacaaacaattattttcaagtcttgcagttctgcagattcacctgaaaactatgcacttagataagccagaacaggcccatatttgtcagtattgcttggaggtcctgccctcactctataacctaaatgaacatcttaagcaagtgcatgaagctcaggacccaggtctgattgtttctgccatgcctgccattgtctaccagtgtaacttctgttccgaagttgtcaacgacctcaacactcttcaggaacacatccgatgttctcatggatttgcaaaccctgcagctaaagatagtaatgcattcttttgtccccattgctatatggggtttctcactgactcttccctggaagagcatattagacaggttcattgtgacctcagtggctcccgatttgggtctccagtgcttgggactcccaaagaaccagtagtagaagtctattcttgttcctattgtacaaattcgccaatattcaacagcgttcttaaactgaacaagcatatcaaagagaatcataaaaacattcccttggccctgaattatatccacaatgggaagaaatccagggccttaagccccctatctcctgtggccatagagcagacatctcttaagatgatgcaggcagtaggaggtgcacctgcacgtcccactggagaatatatctgtaatcaatgtggtgctaagtacacatccctagacagctttcagactcacctaaaaactcatctcgacactgtgcttccaaaattgacctgtcctcagtgcaacaaggaattccccaaccaagaatccttgctgaagcatgttaccattcactttatgatcacttcaacgtattacatctgtgagagttgtgacaagcaattcacatcagtggatgaccttcagaaacacctgctggacatgcacacctttgtcttctttcgctgcaccctctgccaggaagtttttgactcaaaagtctccattcagctccacttggctgtgaagcacagtaacgaaaagaaagtctataggtgcacatcttgcaactgggacttccgcaacgaaactgacttgcagctccatgtgaaacacaaccacctggaaaaccaagggaaagtgcataagtgcattttctgcggtgagtcctttggcaccgaggtggagctgcaatgccacatcaccactcacagtaagaagtacaactgcaagttctgtagcaaagccttccatgcgatcattttgttagaaaaacacttgcgagaaaaacactgtgtattcgaaaccaagacacccaactgtggaacaaatggagcttccgagcaagtgcagaaagaggaagtggagctgcagactttgctgaccaacagccaggagtcccacaacagtcacgatgggagcgaagaagacgttgacacctctgagcctatgtacggctgcgacatttgtggggcagcctacactatggaaactttgctgcagaatcaccagctccgagaccacaacatcagacctggagaaagtgccatcgtgaaaaagaaagctgagctcattaaagggaattacaagtgcaacgtgtgctctcgaaccttcttctccgaaaatggcctccgggaacatatgcagacccacctaggccctgtcaaacactacatgtgccctatttgcggagagcggtttccctcccttttaactcttactgaacacaaagtcacgcatagtaagagtcttgatactggaaactgccggatttgcaagatgcctctccagagtgaagaggagtttttagagcattgccaaatgcaccctgacttgaggaattccctgacaggctttcgctgcgtggtgtgcatgcagacagtgacctccaccttggaactcaaaatccatgggacgttccacatgcaaaagacagggaatgggtctgcagttcagaccacagggcggggccagcacgtccaaaaactgtataagtgcgcatcttgcctcaaagaattccgttccaagcaagatctggtgaaacttgatatcaatggcctgccatatggtctgtgtgccggctgcgtgaatctcagtaagagcgccagcccaggcattaacgtccctcccggcacgaatagaccaggcttgggccagaatgagaatctgagtgccattgaggggaaaggcaaggtggggggactgaagacacgctgctctagctgcaacgttaagtttgagtctgaaagtgaactccagaaccacatccaaaccatccaccgagagctcgtgccagacagcaacagcacacagttgaaaacgccccaagtatcaccaatgcccagaatcagtccctcccagtcggatgagaagaagacctatcaatgcatcaagtgtcagatggttttctacaatgaatgggatattcaggttcatgttgcaaatcacatgattgatgaaggactgaaccatgaatgcaaactctgcagccagacctttgactctcctgccaaactccagtgccacctgatagagcacagcttcgaagggatgggaggcaccttcaagtgtccagtctgctttacagtatttgttcaagcaaacaagttgcagcagcatattttctctgcccatggacaagaagacaagatctatgactgtacacaatgtccacagaagtttttcttccaaacagagctgcaggttcacactgccacacccaggcaatcc

SEQ ID NO: 35240 - DNA, 3954 bp, Homo sapiens
  source 1..3954: mol_type = unassigned DNA
agggtctgtgtcaagagcggcaggggctgcaggagataagagaaacgggctgccgtggggtgtgtgtaggcttcagagacatgggatcacggaagactgaagcagaaacagtggattaagacttcctgagcgatagctggcactgccttccccacaatggcagaggtggtggctgaggtggccgagatgccaacacagatgtcaccaggggcagtggagatgtcaacacctatgtcggcagagatgatggagatgtcaacagaagtgactgagatgacacctggggaggcccttgcctcatccctcttcttccagcatcaccagttcatgtgctctgagtgtggcagcctctataacacactggaggaagtcctctcacaccaggagcagcacatgcttgctgtctcagaggaggaggcactgaccacacagaatgttggcctggagccggagctggtgccgggtgctgaggggcccttccagtgtggtgaatgcagccagctcatcctctcccctggggagctcctggcccaccaggatgcccacctccgagagtctgcaaaccagatccaataccagtgctgggactgccaggagctgttcccctcgcccgagctgtgggtggctcatcgaaaggcccagcacctttctgctacggtagctgagccaccagtgccacctcctttgcctcccccaacaccactgcctccaccttctcccccatccgaagtcaagatggagccctatgagtgtcctgagtgctctaccctctgcgccacccctgaggagttcttggagcatcagggcacccactttgactccctagagaaagaggagcgcaatgggttggaggaggaggaagaggacgatgaggaggatgaagaagatgatgaagagatggaggatgaggaggccatggcagaggtcggtgatgatgctgtgggaggtgacgagtccacagctggctgggctcagggctgcggggactgtccccagcaccagccctcagcaggggctcgccggcaacaccggcggacggctcacagcccggcatctgccacccaccccttccactgcagccagtgtcagcgcagtttcagctccgccaaccggctgcaggctcatgggcgggcccatgttggtggcacacatgagtgtacaacctgctccaaggtcttcaagaaagcagcatcgcttgagcagcacttgcggctgcatcgcggggaagcccgctacctctgtgtagactgtggccgcggctttggcacagaactcacgttggtggctcaccggcgggcccacactgccaacccattgcatcgctgtcgttgcggcaagacgttcagcaacatgaccaagttcctctaccaccggcgcactcacgccggcaaaagcggggcacctcccacaggagcaacagctcccccagctccagcggagcccacccctccaccaccaccccctgccccacctgcccagctgccctgcccacagtgctccaagtcctttgcctcagcttcccggctgtcccggcaccggcgtgcagtacacgggccccctgaacggcgtcaccgctgtggggtttgtggcaagggcttcaagaagctgatccacgtgcgcaaccacctgcggacacacacgggtgagaggcccttccagtgccactcatgtggcaagacctttgcttctttggccaacctcagccgccaccagctgacccatacgggtgcacgtccctaccaatgcctggactgtggcaagcgcttcacacagagctccaacctgcagcagcaccggcggttgcacttgcggccagtcgcctttgcccgcgccccccgcctccccatcactggtctctacaacaagagtccctactactgcgggacttgtggccgctggttccgcgccatggcgggcttgcgactgcatcagcgggtccatgcccgagctcggactttgacgctacagcctcccagatcaccatctcctgccccacccccacctccagagcctcaacagactatcatgtgcacagagctgggggagaccatcgccatcattgagacatcccagccactggcgcttgaggacaccctgcagctgtgccaggctgcactgggggccagtgaagcaggcgggctcttgcagttggacacggccttcgtgtgacgcagctgaaaagcaacaacaaaagggtttggttgcaacagccagtgtgggtacctctggggagagaggacctcctctgacaaactggtctggtacccaccatgtgccaggatccaccctggcctctttttacccactgactccccagaacaacccttccaggcttctcttgtcatctttctctgcctgaggggaaactgaagctctgaaatgcgatgtgatctgtaccaggtcacccagctatgctgcaaagtgggttggccaaggccctttgcactgcatcaccctggtgcccagcaacatcaggtaaccttcactgagcaccaagcttatgccaggtctgtgctggccactctcatatacctcttcagatcctctgcttgtacccccagcccttgccttccctggattttgggcacccaggactttgctctgcctggtggagggtacttgatttctctgggcttccttcatctcaattctgacagtgtggaaggaaatctgtaggtacccaggtcctcagctccagactgggtgatgctggagacccaggagcaagtcagcacaggctctgcccacaggaggcatgcacaatctggtaggagaaacgcacaagtacagatagcttgctctctgagtgtgtctcattgattcattcagcctgtgtgtcctaaagcctcccttctcccatactgggtgatgctgggggcagagatgagtcaggcctaaggcttctctgggctgtgatggggatgtgcagggacagtgggatcccaggaaacagacctccatggtgggagatcaggagttaaggacttcctagagaaggtagtccctgaaggaaaagtaggaatctggcagtgaaagaggaaaagaacattccaggcagacagcactgcaagagggtgagctcttggtgtatttggagaccatccagttattcatctgactgcctacctgaggcaagcaccacacttaccactgtatgtgtactatgatcccaacaggcttgtgacatagatttcatattatccctgttgtatagatttttaaaactggtggctgggcgtggtggctcacgcctgtaatcccagcactttgggaggccgaggcgggcagatcacgaggtcaggagatcgagaccatcctggctaacacggtgaaaccccgtctctactaaaaatacaaaaaattagccaggagtggtggcgggcgcctgtggtggccagctactcaggaggctgaggcaggagaatggcgtgaacccgggaggcggagcttgcagtgagccgagatcgcgccactgcactccagcctgggcgacagagtgagactccctctcaaaagaaaataaaaataaaaataaactggccaggtgcggtggctcacgcttgcaatcccagtgctttgggagactgaggcaggaggatcacttaaggccaggagttcgagaccagcctgggcaacagcaagacctcatctctacaaaacttaaaagttagccaggcctggtggcacatgcctgtaatccgagtgctttgggaggctgaggcaggaggatcactcgagctcaagaattcaagacctgggcaagagagagagactttgtctctattaaaaataaaaatgattggccgagcatggtggtgcacaccagtattcccagctactctggaggctgaggcggaggcaggattgcttgatatgagggagattgaggctgcagtgagctgtgttcacaccactgcactccagtctgggcaacagtgcaagaccctgtcactt

SEQ ID NO: 35241 - DNA, 2417 bp, Homo sapiens
  source 1..2417: mol_type = unassigned DNA
aatgggaggtgtggatagtgaggggtcccacacgcctggagccgagggtctgtgtcaagagcggcaggggctgcaggagataagagaaacgggctgccgtggggtgtgtgtaggcttcagagacatgggatcacggaagactgaagcagaaacagtggattaagacttcctgagcgatagctggcactgccttccccacaatggcagaggtggtggctgaggtggccgagatgccaacacagatgtcaccaggggcagtggagatgtcaacacctatgtcggcagagatgatggagatgtcaacagaagtgactgagatgacaccttctcccccatccgaagtcaagatggagccctatgagtgtcctgagtgctctaccctctgcgccacccctgaggagttcttggagcatcagggcacccactttgactccctagagaaagaggagcgcaatgggttggaggaggaggaagaggacgatgaggaggatgaagaagatgatgaagagatggaggatgaggaggccatggcagaggtcggtgatgatgctgtgggaggtgacgagtccacagctggctgggctcagggctgcggggactgtccccagcaccagccctcagcaggggctcgccggcaacaccggcggacggctcacagcccggcatctgccacccaccccttccactgcagccagtgtcagcgcagtttcagctccgccaaccggctgcaggctcatgggcgggcccatgttggtggcacacatgagtgtacaacctgctccaaggtcttcaagaaagcagcatcgcttgagcagcacttgcggctgcatcgcggggaagcccgctacctctgtgtagactgtggccgcggctttggcacagaactcacgttggtggctcaccggcgggcccacactgccaacccattgcatcgctgtcgttgcggcaagacgttcagcaacatgaccaagttcctctaccaccggcgcactcacgccggcaaaagcggggcacctcccacaggagcaacagctcccccagctccagcggagcccacccctccaccaccaccccctgccccacctgcccagctgccctgcccacagtgctccaagtcctttgcctcagcttcccggctgtcccggcaccggcgtgcagtacacgggccccctgaacggcgtcaccgctgtggggtttgtggcaagggcttcaagaagctgatccacgtgcgcaaccacctgcggacacacacgggtgagaggcccttccagtgccactcatgtggcaagacctttgcttctttggccaacctcagccgccaccagctgacccatacgggtgcacgtccctaccaatgcctggactgtggcaagcgcttcacacagagctccaacctgcagcagcaccggcggttgcacttgcggccagtcgcctttgcccgcgccccccgcctccccatcactggtctctacaacaagagtccctactactgcgggacttgtggccgctggttccgcgccatggcgggcttgcgactgcatcagcgggtccatgcccgagctcggactttgacgctacagcctcccagatcaccatctcctgccccacccccacctccagagcctcaacagactatcatgtgcacagagctgggggagaccatcgccatcattgagacatcccagccactggcgcttgaggacaccctgcagctgtgccaggctgcactgggggccagtgaagcaggcgggctcttgcagttggacacggccttcgtgtgacgcagctgaaaagcaacaacaaaagggtttggttgcaacagccagtgtgggtacctctggggagagaggacctcctctgacaaactggtctggtacccaccatgtgccaggatccaccctggcctctttttacccactgactccccagaacaacccttccaggcttctcttgtcatctttctctgcctgaggggaaactgaagctctgaaatgcgatgtgatctgtaccaggtcacccagctatgctgcaaagtgggttggccaaggccctttgcactgcatcaccctggtgcccagcaacatcaggtaaccttcactgagcaccaagcttatgccaggtctgtgctggccactctcatatacctcttcagatcctctgcttgtacccccagcccttgccttccctggattttgggcacccaggactttgctctgcctggtggagggtacttgatttctctgggcttccttcatctcaattctgacagtgtggaaggaaatctgtaggtacccaggtcctcagctccagactgggtgatgctggagacccaggagcaagtcagcacaggctctgcccacaggaggcatgcacaatctggtaggagaaacgcacaagtacagatagcttgctctctg

SEQ ID NO: 35242 - DNA, 3157 bp, Homo sapiens
  source 1..3157: mol_type = unassigned DNA
agtctacaactggaaaccggccggatcgtgtctgcgcaggcccagcagctaagatcgggtccggcgctccagaacagaacgatccctgaggctcccttgctcgaactgtgggacttaccctactatggtccgagcctaccctatttcattatactcaagtaacgccccagaaattccagagaatctcacacaaagaggttgagtcttgccgtggtgccttcaggggaatgtcatcccgggctagaagagctgcaaaaggctgtcaggcttctcagaactttgcttctccagcagaataatcctgcggaagactgagcagttcttgtgagtgtaaaaccatggcccatgcattggtgacgttcagggatgtggctatagacttctctcagaaggaatgggagtgcctggacactacccagaggaaattgtacagagatgtgatgttggagaattataataacttggtctcactgggatattctggctcaaagccagatgtgattaccttactggagcaagggaaagagccctgcgtggtggcgagggatgtgacaggaagacagtgccccggtttgttatccaggcataagaccaagaaattatcttcagaaaaggacattcatgaaatcagtttatccaaagagagtataatagaaaaaagtaaaactcttcgtctgaaaggatccatttttagaaatgagtggcagaacaaaagtgagtttgagggtcaacagggacttaaagaaagatctatcagtcaaaagaaaatcgtctctaaaaaaatgtcaactgatagaaaacgtccctcttttactctgaatcagagaattcacaatagtgagaaaagctgtgactcacacttggttcaacatgggaaaatagattctgatgtgaaacatgattgtaaagaatgtgggagtacttttaataatgtctatcagcttactctccatcagaaaattcatactggtgaaaaatcctgtaaatgtgagaaatgtgggaaagtttttagtcatagctatcaacttactctgcatcagagatttcatactggtgagaaaccctatgaatgtcaagaatgtgggaagacctttactctttacccacaacttaatcgacatcagaaaattcacactggtaaaaaaccctatatgtgtaagaaatgtgataagggtttttttagtagattagaacttactcaacataaaagaattcatactggtaagaaatcttatgaatgtaaagaatgtggaaaagtttttcaacttattttctactttaaagaacatgagagaattcatacaggtaagaaaccctatgaatgtaaggagtgtgggaaagcttttagtgtatgcggacaacttacccgtcatcagaaaattcatactggtgtaaaaccctacgaatgtaaggaatgtggaaagacctttagacttagtttttaccttactgaacacagaagaactcatgcaggtaagaaaccttatgaatgtaaggagtgtgggaaatcatttaatgtgcgtggacagcttaatcggcataaaacaatccatactggtataaaaccttttgcatgtaaggtgtgtgagaaggcttttagttatagtggtgacctcagagtacattctagaattcatactggagagaaaccatatgaatgtaaggaatgcgggaaagcctttatgcttcgttcagtccttactgaacatcagagacttcatactggtgtgaagccctacgaatgtaaggaatgtgggaagacctttcgagttcgttctcaaattagtctacataagaaaattcatactgatgtgaagccctacaaatgtgtacgatgtgggaagacctttagatttggtttctaccttactgaacaccagagaattcacactggtgaaaagccctataaatgtaaagaatgtggaaaggcctttattcgtagagggaatcttaaagaacatctgaaaattcattctggtttaaaaccctatgactgtaaagaatgtgggaagtcctttagtcggcgtgggcagttcactgaacatcagaaaattcatacgggtgtaaaaccatacaaatgtaaagaatgtgggaaggcctttagtcgtagtgtagaccttagaatacatcaaagaattcatactggtgagaaaccctatgagtgtaaacaatgtgggaaggcctttagacttaattcacaccttactgaacatcagagaattcacactggtgagaaaccctatgagtgtaaggtatgtagaaaggcctttagacaatattcacatctttatcaacatcagaaaactcataatgtaatttaatataagaaaaggtttccatgtcatgctctatttatagaatatcaaaatatttatggccagaagttctgtcaatgtgttgatgtttttttacacatattaacttaataaatgtatgagtcttaaatacctcttagttctcattaaatttaggaaaattcacactagaaaataaagctgttaatgtaacagttgtggaaaagtgttctagcaacagcatatacttatcatcattgcctttccactactctactatctgtgtgatattagacaaaatatttgcttcttggtacctcagctgtaaaatgaaacacacctaaaagtgtggttgtttccaacatgtataatacagcaacaactatctggcccaaactgctttggattaatattggatattactgtttttattatcatcaacattattattagtggatttcttaataggaagatgcaatggagatgacaaatttggaaaaaccactcatcacttacatttcatgaagtacttctttgataaaatctgttatgggctgaatgtttgtgttcccgtaacaattcctatgttgaaacacgaatcccaaggtgatggtatttgaaggtagggcctttaggaggaaattaggtcatgagggtggagccttcatgagtggaattactgcctttataagaagaagccaaagagccagctagctctttcaaccacatgaggttacagcaagaagtcagcagtctacagtgcaaaagagggccttcaccagaacccaagcatgctggcaccttgaccttggactttcagcctccaaaactgtgagaaataaacctcagttgtttataagcca

SEQ ID NO: 35243 - DNA, 3061 bp, Homo sapiens
  source 1..3061: mol_type = unassigned DNA
agtctacaactggaaaccggccggatcgtgtctgcgcaggcccagcagctaagatcgggtccggcgctccagaacagaacgatccctgaggctcccttgctcgaactgtgggacttaccctactatggtccgagcctaccctatttcattatactcaagtaacgccccagaaattccagagaatctcacacaaagaggttgagtcttgccgtggtgccttcaggggaatgtcatcccgggctagaagagctgcaaaaggctgtcaggcttctcagaactttgcttctccagcagaataatcctgcggaagactgagcagttcttgtgagtgtaaaaccatggcccatgcattggtgacgttcagggatgtggctatagacttctctcagaaggaatgggagtgcctggacactacccagaggaaattgtacagagatgtgatgttggagaattataataacttggtctcactgggtttgttatccaggcataagaccaagaaattatcttcagaaaaggacattcatgaaatcagtttatccaaagagagtataatagaaaaaagtaaaactcttcgtctgaaaggatccatttttagaaatgagtggcagaacaaaagtgagtttgagggtcaacagggacttaaagaaagatctatcagtcaaaagaaaatcgtctctaaaaaaatgtcaactgatagaaaacgtccctcttttactctgaatcagagaattcacaatagtgagaaaagctgtgactcacacttggttcaacatgggaaaatagattctgatgtgaaacatgattgtaaagaatgtgggagtacttttaataatgtctatcagcttactctccatcagaaaattcatactggtgaaaaatcctgtaaatgtgagaaatgtgggaaagtttttagtcatagctatcaacttactctgcatcagagatttcatactggtgagaaaccctatgaatgtcaagaatgtgggaagacctttactctttacccacaacttaatcgacatcagaaaattcacactggtaaaaaaccctatatgtgtaagaaatgtgataagggtttttttagtagattagaacttactcaacataaaagaattcatactggtaagaaatcttatgaatgtaaagaatgtggaaaagtttttcaacttattttctactttaaagaacatgagagaattcatacaggtaagaaaccctatgaatgtaaggagtgtgggaaagcttttagtgtatgcggacaacttacccgtcatcagaaaattcatactggtgtaaaaccctacgaatgtaaggaatgtggaaagacctttagacttagtttttaccttactgaacacagaagaactcatgcaggtaagaaaccttatgaatgtaaggagtgtgggaaatcatttaatgtgcgtggacagcttaatcggcataaaacaatccatactggtataaaaccttttgcatgtaaggtgtgtgagaaggcttttagttatagtggtgacctcagagtacattctagaattcatactggagagaaaccatatgaatgtaaggaatgcgggaaagcctttatgcttcgttcagtccttactgaacatcagagacttcatactggtgtgaagccctacgaatgtaaggaatgtgggaagacctttcgagttcgttctcaaattagtctacataagaaaattcatactgatgtgaagccctacaaatgtgtacgatgtgggaagacctttagatttggtttctaccttactgaacaccagagaattcacactggtgaaaagccctataaatgtaaagaatgtggaaaggcctttattcgtagagggaatcttaaagaacatctgaaaattcattctggtttaaaaccctatgactgtaaagaatgtgggaagtcctttagtcggcgtgggcagttcactgaacatcagaaaattcatacgggtgtaaaaccatacaaatgtaaagaatgtgggaaggcctttagtcgtagtgtagaccttagaatacatcaaagaattcatactggtgagaaaccctatgagtgtaaacaatgtgggaaggcctttagacttaattcacaccttactgaacatcagagaattcacactggtgagaaaccctatgagtgtaaggtatgtagaaaggcctttagacaatattcacatctttatcaacatcagaaaactcataatgtaatttaatataagaaaaggtttccatgtcatgctctatttatagaatatcaaaatatttatggccagaagttctgtcaatgtgttgatgtttttttacacatattaacttaataaatgtatgagtcttaaatacctcttagttctcattaaatttaggaaaattcacactagaaaataaagctgttaatgtaacagttgtggaaaagtgttctagcaacagcatatacttatcatcattgcctttccactactctactatctgtgtgatattagacaaaatatttgcttcttggtacctcagctgtaaaatgaaacacacctaaaagtgtggttgtttccaacatgtataatacagcaacaactatctggcccaaactgctttggattaatattggatattactgtttttattatcatcaacattattattagtggatttcttaataggaagatgcaatggagatgacaaatttggaaaaaccactcatcacttacatttcatgaagtacttctttgataaaatctgttatgggctgaatgtttgtgttcccgtaacaattcctatgttgaaacacgaatcccaaggtgatggtatttgaaggtagggcctttaggaggaaattaggtcatgagggtggagccttcatgagtggaattactgcctttataagaagaagccaaagagccagctagctctttcaaccacatgaggttacagcaagaagtcagcagtctacagtgcaaaagagggccttcaccagaacccaagcatgctggcaccttgaccttggactttcagcctccaaaactgtgagaaataaacctcagttgtttataagcca

SEQ ID NO: 35244 - DNA, 2349 bp, Homo sapiens
  source 1..2349: mol_type = unassigned DNA
agtctacaactggaaaccggccggatcgtgtctgcgcaggcccagcagctaagatcgggtccggcgctccagaacagaacgatccctgaggctcccttgctcgaactgtgggacttaccctactatggtccgagcctaccctatttcattatactcaagtaacgccccagaaattccagagaatctcacacaaagaggttgagtcttgccgtggtgccttcaggggaatgtcatcccgggctagaagagctgcaaaaggctgtcaggcttctcagaactttgcttctccagcagaataatcctgcggaagactgagcagttcttgtgagtgtaaaaccatggcccatgcattggtgacgttcagggatgtggctatagacttctctcagaaggaatgggagtgcctggacactacccagaggaaattgtacagagatgtgatgttggagaattataataacttggtctcactgggtttgttatccaggcataagaccaagaaattatcttcagaaaaggacattcatgaaatcagtttatccaaagagagtataatagaaaaaagtaaaactcttcgtctgaaaggatccatttttagaaatgagtggcagaacaaaagtgagtttgagggtcaacagggacttaaagaaagatctatcagtcaaaagaaaatcgtctctaaaaaaatgtcaactgatagaaaacgtccctcttttactctgaatcagagaattcacaatagtgagaaaagctgtgactcacacttggttcaacatgggaaaatagattctgatgtgaaacatgattgtaaagaatgtgggagtacttttaataatgtctatcagcttactctccatcagaaaattcatactggtgaaaaatcctgtaaatgtgagaaatgtgggaaagtttttagtcatagctatcaacttactctgcatcagagatttcatactggtgagaaaccctatgaatgtcaagaatgtgggaagacctttactctttacccacaacttaatcgacatcagaaaattcacactggtaaaaaaccctatatgtgtaagaaatgtgataagggtttttttagtagattagaacttactcaacataaaagaattcatactggtaagaaatcttatgaatgtaaagaatgtggaaaagtttttcaacttattttctactttaaagaacatgagagaattcatacaggtaagaaaccctatgaatgtaaggagtgtgggaaagcttttagtgtatgcggacaacttacccgtcatcagaaaattcatactggtgtaaaaccctacgaatgtaaggaatgtggaaagacctttagacttagtttttaccttactgaacacagaagaactcatgcaggtaagaaaccttatgaatgtaaggagtgtgggaaatcatttaatgtgcgtggacagcttaatcggcataaaacaatccatactggtataaaaccttttgcatgtaaggtgtgtgagaaggcttttagttatagtggtgacctcagagtacattctagaattcatactggagagaaaccatatgaatgtaaggaatgcgggaaagcctttatgcttcgttcagtccttactgaacatcagagacttcatactggtgtgaagccctacgaatgtaaggaatgtgggaagacctttcgagttcgttctcaaattagtctacataagaaaattcatactgatgtgaagccctacaaatgtgtacgatgtgggaagacctttagatttggtttctaccttactgaacaccagagaattcacactggtgaaaagccctataaatgtaaagaatgtggaaaggcctttattcgtagagggaatcttaaagaacatctgaaaattcattctggtttaaaaccctatgactgtaaagaatgtgggaagtcctttagtcggcgtgggcagttcactgaacatcagaaaattcatacgggtgtaaaaccatacaaatgtaaagaatgtgggaaggcctttagtcgtagtgtagaccttagaatacatcaaagaattcatactggtgagaaaccctatgagtgtaaacaatgtgggaaggcctttagacttaattcacaccttactgaacatcagagaattcacactggtgagaaaccctatgagtgtaaggtatgtagaaaggcctttagacaatattcacatctttatcaacatcagaaaactcataatgtaatttaatataagaaaaggtttccatgtcatgctctatttatagaatatcaaaatatttatggccagaagttctgtcaatgtgttgatgtttttttacacatattaacttaataaatgtatgagtcttaaa

SEQ ID NO: 35245 - DNA, 3147 bp, Homo sapiens
  source 1..3147: mol_type = unassigned DNA
ggccctagcggcttggcggagctggagccctccctggcagtgcgtcggcgctgggctatggccccctcctctccgggggatcgtcgccttggtcccccgaccctaggagtcgggcagggcagaaccaggctaaagaaacgtccagcgtagcttcaaggatgcaccgcgtgatccctatcggatctccccgacgcgtcaggcctgcctagacggtgctgggagcgcgtctccttgaacgttgtcccgcctgggattgcgaggcttctcagaactttgcttctccagcagaataatcctgcggaagactgagcagttcttgtgagtgtaaaaccatggcccatgcattggtgacgttcagggatgtggctatagacttctctcagaaggaatgggagtgcctggacactacccagaggaaattgtacagagatgtgatgttggagaattataataacttggtctcactgggatattctggctcaaagccagatgtgattaccttactggagcaagggaaagagccctgcgtggtggcgagggatgtgacaggaagacagtgccccggtttgttatccaggcataagaccaagaaattatcttcagaaaaggacattcatgaaatcagtttatccaaagagagtataatagaaaaaagtaaaactcttcgtctgaaaggatccatttttagaaatgagtggcagaacaaaagtgagtttgagggtcaacagggacttaaagaaagatctatcagtcaaaagaaaatcgtctctaaaaaaatgtcaactgatagaaaacgtccctcttttactctgaatcagagaattcacaatagtgagaaaagctgtgactcacacttggttcaacatgggaaaatagattctgatgtgaaacatgattgtaaagaatgtgggagtacttttaataatgtctatcagcttactctccatcagaaaattcatactggtgaaaaatcctgtaaatgtgagaaatgtgggaaagtttttagtcatagctatcaacttactctgcatcagagatttcatactggtgagaaaccctatgaatgtcaagaatgtgggaagacctttactctttacccacaacttaatcgacatcagaaaattcacactggtaaaaaaccctatatgtgtaagaaatgtgataagggtttttttagtagattagaacttactcaacataaaagaattcatactggtaagaaatcttatgaatgtaaagaatgtggaaaagtttttcaacttattttctactttaaagaacatgagagaattcatacaggtaagaaaccctatgaatgtaaggagtgtgggaaagcttttagtgtatgcggacaacttacccgtcatcagaaaattcatactggtgtaaaaccctacgaatgtaaggaatgtggaaagacctttagacttagtttttaccttactgaacacagaagaactcatgcaggtaagaaaccttatgaatgtaaggagtgtgggaaatcatttaatgtgcgtggacagcttaatcggcataaaacaatccatactggtataaaaccttttgcatgtaaggtgtgtgagaaggcttttagttatagtggtgacctcagagtacattctagaattcatactggagagaaaccatatgaatgtaaggaatgcgggaaagcctttatgcttcgttcagtccttactgaacatcagagacttcatactggtgtgaagccctacgaatgtaaggaatgtgggaagacctttcgagttcgttctcaaattagtctacataagaaaattcatactgatgtgaagccctacaaatgtgtacgatgtgggaagacctttagatttggtttctaccttactgaacaccagagaattcacactggtgaaaagccctataaatgtaaagaatgtggaaaggcctttattcgtagagggaatcttaaagaacatctgaaaattcattctggtttaaaaccctatgactgtaaagaatgtgggaagtcctttagtcggcgtgggcagttcactgaacatcagaaaattcatacgggtgtaaaaccatacaaatgtaaagaatgtgggaaggcctttagtcgtagtgtagaccttagaatacatcaaagaattcatactggtgagaaaccctatgagtgtaaacaatgtgggaaggcctttagacttaattcacaccttactgaacatcagagaattcacactggtgagaaaccctatgagtgtaaggtatgtagaaaggcctttagacaatattcacatctttatcaacatcagaaaactcataatgtaatttaatataagaaaaggtttccatgtcatgctctatttatagaatatcaaaatatttatggccagaagttctgtcaatgtgttgatgtttttttacacatattaacttaataaatgtatgagtcttaaatacctcttagttctcattaaatttaggaaaattcacactagaaaataaagctgttaatgtaacagttgtggaaaagtgttctagcaacagcatatacttatcatcattgcctttccactactctactatctgtgtgatattagacaaaatatttgcttcttggtacctcagctgtaaaatgaaacacacctaaaagtgtggttgtttccaacatgtataatacagcaacaactatctggcccaaactgctttggattaatattggatattactgtttttattatcatcaacattattattagtggatttcttaataggaagatgcaatggagatgacaaatttggaaaaaccactcatcacttacatttcatgaagtacttctttgataaaatctgttatgggctgaatgtttgtgttcccgtaacaattcctatgttgaaacacgaatcccaaggtgatggtatttgaaggtagggcctttaggaggaaattaggtcatgagggtggagccttcatgagtggaattactgcctttataagaagaagccaaagagccagctagctctttcaaccacatgaggttacagcaagaagtcagcagtctacagtgcaaaagagggccttcaccagaacccaagcatgctggcaccttgaccttggactttcagcctccaaaactgtgagaaataaacctcagttgtttataa

SEQ ID NO: 35246 - DNA, 1788 bp, Homo sapiens
  source 1..1788: mol_type = unassigned DNA
gttagctccgcaaggacccggacgcgaccaggggaggcagaaggactctgcacttgtccaagagaagaatccagagaaatcagagcaggtcaaatagttctaaaagccatggcccagggactggtgacattcagggacgtggccatagagttctctctggaagaatggaagtgcctggaacctgctcagagggacttgtacagggaggtgactctggagaactttggtcacttggcctcactaggactctccatttctaagcctgatgtcgtctccttattggagcaagggaaagagccctggatgattgcaaatgatgtgacaggaccatggtgcccagacttggagtccaggtgtgagaaatttctacaaaaagacatttttgaaatcggggcattcaactgggagataatggaaagccttaaatgcagtgacctggagggctccgattttagagctgactgggaatgcgaaggccagtttgagagacaagtcaatgaagagtgctattttaagcaagtgaacgtcacctatggacatatgcccgtgttccagcatcacacgtctcacactgtacgtcagagcagggagactggtgagaaactgatggaatgtcatgaatgtgggaaagcatttagccgtggctcacaccttattcaacatcagaaaattcacactggtgaaaaaccctttggatgtaaggaatgtgggaaggccttcagccgtgcctcacaccttgttcagcatcagagaattcacacgggtgagaaaccttatgactgtaaggactgtgggaaggcctttggtcgtacatcagaacttattctacatcagagacttcatactggtgtcaaaccttatgaatgtaaagaatgtgggaagacctttaggcagcattcacagctgattctgcatcaaagaactcacacaggcgagaaaccctacgtatgtaaagactgtggcaaggctttcattcgtggctcccaactcactgtgcatcggagaatccacacaggggccagaccctatgagtgtaaagaatgcgggaaagcctttagacagcactcacagctgactgtacaccagcgaatccacactggtgagaaaccctacgagtgtaaggaatgcggaaagggctttattcacagctcagaagttactcgacatcaaagaattcattctggggagaaaccctatgagtgtaaggaatgtgggaaggccttcagacagcacgcacagctcacacgacatcagagagtccatactggcgacagaccctatgaatgtaaggactgcgggaaggcatttagtcgtagctcatacctcattcaacatcaaagaattcatacaggtgacaaaccctacgaatgtaaggaatgtgggaaggcctttattcgtgtttcacaactgactcatcatcagcgaattcacacttgtgagaaaccctatgaatgcagggagtgtggaatggcctttattcgtagttcacaacttaccgaacatcagagaattcatcctggtatcaaaccttacgaatgtagagagtgtgggcaggcatttattcttggctcacaactcattgaacactacagaattcatactggttagaaagccttgagtgtaagggataaagataagcctttatgtggagttcacatctggctcagtactaggtaatttttaatgtagtgtaattaatgtcagaaaacacctgtcacttccatcatagaacatcagaaaactcacacccaaagaaaattaaataaatgtgggaattctttttgcctc

SEQ ID NO: 35247 - DNA, 2519 bp, Homo sapiens
  source 1..2519: mol_type = unassigned DNA
acacacggagacgtgcgcgcacacccacttgtgcagagacacgcgcacgcagacacgtgcgcacagagacgcacacagacacacgtgtgcacacaggcaaacaggcacgcgcagagacgcacacagacacgcgtgtgcaccacaggcaaacagacacgtgcagagacgcacacacaggcacacgtgtgcacacacagagatgcaaacacagacacacgcgtgcacacactgacgcgcgcacagagagacacacgcgcgcacacacacgtctcccccgcgccagctccggctccagcagccttggggtccccgcccagacccgggctcctgactccctcaacgactgcatctcgcggggcgatcccggtcgggttccgcctgagccaaggccccgcacccaaaccgagacagcggatccagtagcccgaggcccgcagctgggcgaaggaaccgggactcaagagtagcctccggcaccgagccctccaagaaaagcagcccgggaccccgacaaccgtggacggagccagggtgggtcatagctcgaggcatcgtcaacggagggtccttaagagaccctgaacccattcacccgggcaccagagactctgccaaagcaccaattcgggcaggtggtagcctcgaagctgggaggctgcatctcaagcctcctcctagatccgcggtggaccctgggaaatgtagtccagagcaagccaccacctaaatgcgccgtggaccctgggaaaggtggtccctcgcaagtcaccgcctggacgcaggactctgcacttgtccaagagaagaatccagagaaatcagagcaggtcaaatagttctaaaagccatggcccagggactggtgacattcagggacgtggccatagagttctctctggaagaatggaagtgcctggaacctgctcagagggacttgtacagggaggtgactctggagaactttggtcacttggcctcactaggactctccatttctaagcctgatgtcgtctccttattggagcaagggaaagagccctggatgattgcaaatgatgtgacaggaccatggtgcccagacttggagtccaggtgtgagaaatttctacaaaaagacatttttgaaatcggggcattcaactgggagataatggaaagccttaaatgcagtgacctggagggctccgattttagagctgactgggaatgcgaaggccagtttgagagacaagtcaatgaagagtgctattttaagcaagtgaacgtcacctatggacatatgcccgtgttccagcatcacacgtctcacactgtacgtcagagcagggagactggtgagaaactgatggaatgtcatgaatgtgggaaagcatttagccgtggctcacaccttattcaacatcagaaaattcacactggtgaaaaaccctttggatgtaaggaatgtgggaaggccttcagccgtgcctcacaccttgttcagcatcagagaattcacacgggtgagaaaccttatgactgtaaggactgtgggaaggcctttggtcgtacatcagaacttattctacatcagagacttcatactggtgtcaaaccttatgaatgtaaagaatgtgggaagacctttaggcagcattcacagctgattctgcatcaaagaactcacacaggcgagaaaccctacgtatgtaaagactgtggcaaggctttcattcgtggctcccaactcactgtgcatcggagaatccacacaggggccagaccctatgagtgtaaagaatgcgggaaagcctttagacagcactcacagctgactgtacaccagcgaatccacactggtgagaaaccctacgagtgtaaggaatgcggaaagggctttattcacagctcagaagttactcgacatcaaagaattcattctggggagaaaccctatgagtgtaaggaatgtgggaaggccttcagacagcacgcacagctcacacgacatcagagagtccatactggcgacagaccctatgaatgtaaggactgcgggaaggcatttagtcgtagctcatacctcattcaacatcaaagaattcatacaggtgacaaaccctacgaatgtaaggaatgtgggaaggcctttattcgtgtttcacaactgactcatcatcagcgaattcacacttgtgagaaaccctatgaatgcagggagtgtggaatggcctttattcgtagttcacaacttaccgaacatcagagaattcatcctggtatcaaaccttacgaatgtagagagtgtgggcaggcatttattcttggctcacaactcattgaacactacagaattcatactggttagaaagccttgagtgtaagggataaagataagcctttatgtggagttcacatctggctcagtactaggtaatttttaatgtagtgtaattaatgtcagaaaacacctgtcacttccatcatagaacatcagaaaactcacacccaaagaaaattaaataaatgtgggaattctt

SEQ ID NO: 35248 - DNA, 1942 bp, Homo sapiens
  source 1..1942: mol_type = unassigned DNA
agaagtctccgcgacgcggcccgcctcggtcaccgcggccaggcccaggctggtactgaattaccttctattaccagcaacgtcgcttctcaggccttggactacatttcccttgaggctttactggtcgactctctgtctcctcccctccccccgcgaacttggccgcctccttctgtgacgatggagctcttgaggactctgcacttgtccaagagaagaatccagagaaatcagagcaggtcaaatagttctaaaagccatggcccagggactggtgacattcagggacgtggccatagagttctctctggaagaatggaagtgcctggaacctgctcagagggacttgtacagggaggtgactctggagaactttggtcacttggcctcactaggactctccatttctaagcctgatgtcgtctccttattggagcaagggaaagagccctggatgattgcaaatgatgtgacaggaccatggtgcccagacttggagtccaggtgtgagaaatttctacaaaaagacatttttgaaatcggggcattcaactgggagataatggaaagccttaaatgcagtgacctggagggctccgattttagagctgactgggaatgcgaaggccagtttgagagacaagtcaatgaagagtgctattttaagcaagtgaacgtcacctatggacatatgcccgtgttccagcatcacacgtctcacactgtacgtcagagcagggagactggtgagaaactgatggaatgtcatgaatgtgggaaagcatttagccgtggctcacaccttattcaacatcagaaaattcacactggtgaaaaaccctttggatgtaaggaatgtgggaaggccttcagccgtgcctcacaccttgttcagcatcagagaattcacacgggtgagaaaccttatgactgtaaggactgtgggaaggcctttggtcgtacatcagaacttattctacatcagagacttcatactggtgtcaaaccttatgaatgtaaagaatgtgggaagacctttaggcagcattcacagctgattctgcatcaaagaactcacacaggcgagaaaccctacgtatgtaaagactgtggcaaggctttcattcgtggctcccaactcactgtgcatcggagaatccacacaggggccagaccctatgagtgtaaagaatgcgggaaagcctttagacagcactcacagctgactgtacaccagcgaatccacactggtgagaaaccctacgagtgtaaggaatgcggaaagggctttattcacagctcagaagttactcgacatcaaagaattcattctggggagaaaccctatgagtgtaaggaatgtgggaaggccttcagacagcacgcacagctcacacgacatcagagagtccatactggcgacagaccctatgaatgtaaggactgcgggaaggcatttagtcgtagctcatacctcattcaacatcaaagaattcatacaggtgacaaaccctacgaatgtaaggaatgtgggaaggcctttattcgtgtttcacaactgactcatcatcagcgaattcacacttgtgagaaaccctatgaatgcagggagtgtggaatggcctttattcgtagttcacaacttaccgaacatcagagaattcatcctggtatcaaaccttacgaatgtagagagtgtgggcaggcatttattcttggctcacaactcattgaacactacagaattcatactggttagaaagccttgagtgtaagggataaagataagcctttatgtggagttcacatctggctcagtactaggtaatttttaatgtagtgtaattaatgtcagaaaacacctgtcacttccatcatagaacatcagaaaactcacacccaaagaaaattaaataaatgtgggaattctttttgcctc

SEQ ID NO: 35249 - DNA, 4056 bp, Homo sapiens
  source 1..4056: mol_type = unassigned DNA
gcagcggaacgattcgattcttctcagcaccaagttgcgctcccaatctctcagagctgggctcgcgggaggccgctcgtgcaaaacctaggctgagctcccctgcgcggagctgtgagccctggaacaccgtggtctgcttctcaggacgcgcaaacagtgaagccagtcccgcccgggtgagccgcgggggcctctgggaagcgtcgcccctggtgtaacggaccgagacttgtggcgctctcagccaccgacagcgccggcctcagtgccgcctctgtcccagcccgcgccggctctgccactttggcagcgttaagtgtggaatcggggcctgtgtccgcgggcttggtgagttcttcatatattaaggattcattcattcatagactcatttattgaaggctgtctgtgtaacaggcacaatcctaggtgcttgggatatagcagtgaacaagagacaaaccccctactatcatggtacttacatttttgtgggctggataataaacaagctctacttctgcaggccccatcccttcccagaaagaagaggaaatgactgagtcccagggaacagtaacattcaaagatgtggctatcgacttcactcaggaggagtggaagagattggatcctgctcagagaaaactgtaccggaatgtgatgctagaaaactataacaacttaatcacagtaggctatccgttcaccaaacctgatgtgattttcaaattggagcaagaagaagaaccatgggtgatggaggaagaagtattaaggagacactggcaaggagaaatatggggagttgatgagcatcagaaaaaccaggacagacttttgagacaagttgaagttaaattccagaaaacactgactgaagaaaaaggcaatgaatgtcaaaagaaatttgcaaatgtatttcctctgaactctgattttttcccttccagacacaatctctatgagtatgacttatttggaaagtgtttagaacataattttgactgtcataataatgtgaaatgccttatgagaaaggagcattgtgaatataatgaacctgtgaaatcatatggtaatagctcatcccattttgtcattaccccctttaagtgtaatcattgtggaaaaggcttcaatcagactttggacctcatcagacatctgagaattcatactggagagaagccctatgaatgtagtaactgtagaaaagccttcagtcacaaggaaaaacttattaaacattataaaattcacagtagggagcagtcttacaaatgtaatgaatgtggtaaagctttcattaaaatgtcaaatctcattagacatcaaagaattcatactggagagaagccctatgcatgtaaggaatgtgagaagtccttcagccagaaatcaaatcttattgatcatgaaaaaattcatactggagagaaaccttatgaatgtaatgagtgtggaaaagcattcagccagaagcaaagcctcattgcacatcagaaagttcatactggggagaaaccttatgcatgtaatgaatgtggtaaagccttccctcgaattgcatcccttgctcttcatatgagaagtcatacaggagaaaaaccttataaatgtgataaatgtggtaaagccttctctcagttttccatgcttattatacatgttagaattcatacaggtgaaaaaccctatgaatgtaatgagtgtggaaaagccttctctcaaagctcagcccttactgtacatatgagaagtcacactggtgagaaaccctatgaatgtaaggaatgcagaaaagccttcagccacaagaaaaacttcattacacaccagaaaattcatactagagagaaaccttatgagtgtaatgaatgtgggaaagcttttatacagatgtcaaatcttgttagacaccagagaattcatactggggaaaaaccctatatatgtaaggaatgtgggaaagcctttagccagaaatcaaatctcattgctcatgaaaaaattcattctggagagaaaccctatgaatgcaatgaatgtggtaaagccttcagccaaaagcaaaacttcattacacatcaaaaagttcatactggagagaaaccttatgattgtaatgaatgtggtaaagccttctctcaaattgcatcccttacccttcatttgagaagtcatacaggggaaaagccttatgaatgtgataaatgtggtaaagccttctctcagtgctcactgcttaatttacatatgagaagtcacacaggtgagaagccctatgtatgtaatgaatgtgggaaagccttctctcaaagaacttcccttattgtgcacatgagaggccatacaggtgaaaaaccctatgaatgtaataaatgtggaaaagccttctcccaaagctcatcccttactatacatatacgaggacatacaggtgagaaacccttcgactgtagtaaatgtggaaaagccttctctcaaatctcatctcttacccttcatatgagaaaacatacaggtgagaagccctatcactgtattgagtgtggcaaggctttcagccaaaagtcgcaccttgttagacaccagagaattcatactcattagaaaccctatgaatattgtgaatatggcaaggccatctgaaggaattaacacctcattgcacattacatgatcacttccagagtagaaaactatgaatgtgggatagccttctgaaaaagccacaaatttatgaaacattagagaattcttccaaggtgacaaattatataatgaaaaagctgttaccagaaactttcagcagacatcttattgataatatttaatcagcattctcattgaaatctgaaacaaggtatcttccatcagcataacaacacaacacttgagctcctagccaatgtattaagtaaggaaaacaagtatcaacgaagaactataaaaataacttttatacaagaaataattagaaaatgtgttgatagaaaacctaagaataaacacaacaatgagttaggtctttatcaagttataaaatatgttgaaaggcacaaaagaacacctgaaaaatgatattttgtctgaaaagacttgacattgtaaaaatataatttctctcccaaatcactaagtttaatatacttctgaagtttacatcagttttattttaaggaacttcacaaacttatccaaaaattttatgtggaaaagtaaagaaacacaaatagctgaaacaaacttgacaaagcaagtagagaagacacactctattattagatatatcatgtacttatttaaagctgctgtcatttaaacaatgtattaccaagtgaataaatcaagcagtagtaagatagtgagcattcatacaaaaatccaagaagatacaggaattctgtgtatgacagtgctattgaaatcactggggaatgaatggcttatttaataaatggaaggttcataggagaaaaattttagctttctactttatatcatatacaaaaataaaatccaactaaagaccagaatataaaaagcaaaattttaaaactatgatgaaagtagaatccgttactttagggtaacaagatttctttaaaaaacatgtaaacatggaatagtctgttgaattttggtgtattggcctcacaggcacccacaaatgtacacaaagagatatatatcactgtgttcctgaatcatggtttgtattgcccaaaattggatataacaaatttttatcaattgtggaatagatgaataagtgtgatcatttctgtgataaaatacagaatttagaaacaaaatctacctatagttatatggatagattacaatatataatattgagagaaaaaattaaaatgcacaaaggaacacagtataacatttgtataatttaataagatcttgcaaagaacagtactgtgtattggtcatggatccatatatgacttggttgccttttgggatgtgggaaaggtttggtgggagttgttatatttatctgtaatatttctttaataaaagagtgaaagc

SEQ ID NO: 35250 - DNA, 2352 bp, Homo sapiens
  source 1..2352: mol_type = unassigned DNA
tgtagtaactgtagaaaagccttcagtcacaaggaaaaacttattaaacattataaaattcacagtagggagcagtcttacaaatgtaatgaatgtggtaaagctttcattaaaatgtcaaatctcattagacatcaaagaattcatactggagagaagccctatgcatgtaaggaatgtgagaagtccttcagccagaaatcaaatcttattgatcatgaaaaaattcatactggagagaaaccttatgaatgtaatgagtgtggaaaagcattcagccagaagcaaagcctcattgcacatcagaaagttcatactggggagaaaccttatgcatgtaatgaatgtggtaaagccttccctcgaattgcatcccttgctcttcatatgagaagtcatacaggagaaaaaccttataaatgtgataaatgtggtaaagccttctctcagttttccatgcttattatacatgttagaattcatacaggtgaaaaaccctatgaatgtaatgagtgtggaaaagccttctctcaaagctcagcccttactgtacatatgagaagtcacactggtgagaaaccctatgaatgtaaggaatgcagaaaagccttcagccacaagaaaaacttcattacacaccagaaaattcatactagagagaaaccttatgagtgtaatgaatgtgggaaagcttttatacagatgtcaaatcttgttagacaccagagaattcatactggggaaaaaccctatatatgtaaggaatgtgggaaagcctttagccagaaatcaaatctcattgctcatgaaaaaattcattctggagagaaaccctatgaatgcaatgaatgtggtaaagccttcagccaaaagcaaaacttcattacacatcaaaaagttcatactggagagaaaccttatgattgtaatgaatgtggtaaagccttctctcaaattgcatcccttacccttcatttgagaagtcatacaggggaaaagccttatgaatgtgataaatgtggtaaagccttctctcagtgctcactgcttaatttacatatgagaagtcacacaggtgagaagccctatgtatgtaatgaatgtgggaaagccttctctcaaagaacttcccttattgtgcacatgagaggccatacaggtgaaaaaccctatgaatgtaataaatgtggaaaagccttctcccaaagctcatcccttactatacatatacgaggacatacaggtgagaaacccttcgactgtagtaaatgtggaaaagccttctctcaaatctcatctcttacccttcatatgagaaaacatacaggtgagaagccctatcactgtattgagtgtggcaaggctttcagccaaaagtcgcaccttgttagacaccagagaattcatactcattagaaaccctatgaatattgtgaatatggcaaggccatctgaaggaattaacacctcattgcacattacatgatcacttccagagtagaaaactatgaatgtgggatagccttctgaaaaagccacaaatttatgaaacattagagaattcttccaaggtgacaaattatataatgaaaaagctgttaccagaaactttcagcagacatcttattgataatatttaatcagcattctcattgaaatctgaaacaaggtatcttccatcagcataacaacacaacacttgagctcctagccaatgtattaagtaaggaaaacaagtatcaacgaagaactataaaaataacttttatacaagaaataattagaaaatgtgttgatagaaaacctaagaataaacacaacaatgagttaggtctttatcaagttataaaatatgttgaaaggcacaaaagaacacctgaaaaatgatattttgtctgaaaagacttgacattgtaaaaatataatttctctcccaaatcactaagtttaatatacttctgaagtttacatcagttttattttaaggaacttcacaaacttatccaaaaattttatgtggaaaagtaaagaaacacaaatagctgaaacaaacttgacaaagcaagtagagaagacacactctattattagatatatcatgtacttatttaaagctgctgtcatttaaacaatgtattaccaagtgaataaatcaagcagtagtaagatagtgagcattcatacaaaaatccaagaagatacaggaattctgtgtatgacagtgctattgaaatcactggggaatgaatggcttatttaataaatggaaggttcataggagaaaaattttagctttctactttatatcatatacaaaaataaaatccaactaaagaccagaatataaaaagc

SEQ ID NO: 35251 - DNA, 1918 bp, Homo sapiens
  source 1..1918: mol_type = unassigned DNA
cttctgcaggccccatcccttcccagaaagaagaggaaatgactgagtcccaggagaaatatggggagttgatgagcatcagaaaaaccaggacagacttttgagacaagttgaagttaaattccagaaaacactgactgaagaaaaaggcaatgaatgtcaaaagaaatttgcaaatgtatttcctctgaactctgattttttcccttccagacacaatctctatgagtatgacttatttggaaagtgtttagaacataattttgactgtcataataatgtgaaatgccttatgagaaaggagcattgtgaatataatgaacctgtgaaatcatatggtaatagctcatcccattttgtcattaccccctttaagtgtaatcattgtggaaaaggcttcaatcagactttggacctcatcagacatctgagaattcatactggagagaagccctatgaatgtagtaactgtagaaaagccttcagtcacaaggaaaaacttattaaacattataaaattcacagtagggagcagtcttacaaatgtaatgaatgtggtaaagctttcattaaaatgtcaaatctcattagacatcaaagaattcatactggagagaagccctatgcatgtaaggaatgtgagaagtccttcagccagaaatcaaatcttattgatcatgaaaaaattcatactggagagaaaccttatgaatgtaatgagtgtggaaaagcattcagccagaagcaaagcctcattgcacatcagaaagttcatactggggagaaaccttatgcatgtaatgaatgtggtaaagccttccctcgaattgcatcccttgctcttcatatgagaagtcatacaggagaaaaaccttataaatgtgataaatgtggtaaagccttctctcagttttccatgcttattatacatgttagaattcatacaggtgaaaaaccctatgaatgtaatgagtgtggaaaagccttctctcaaagctcagcccttactgtacatatgagaagtcacactggtgagaaaccctatgaatgtaaggaatgcagaaaagccttcagccacaagaaaaacttcattacacaccagaaaattcatactagagagaaaccttatgagtgtaatgaatgtgggaaagcttttatacagatgtcaaatcttgttagacaccagagaattcatactggggaaaaaccctatatatgtaaggaatgtgggaaagcctttagccagaaatcaaatctcattgctcatgaaaaaattcattctggagagaaaccctatgaatgcaatgaatgtggtaaagccttcagccaaaagcaaaacttcattacacatcaaaaagttcatactggagagaaaccttatgattgtaatgaatgtggtaaagccttctctcaaattgcatcccttacccttcatttgagaagtcatacaggggaaaagccttatgaatgtgataaatgtggtaaagccttctctcagtgctcactgcttaatttacatatgagaagtcacacaggtgagaagccctatgtatgtaatgaatgtgggaaagccttctctcaaagaacttcccttattgtgcacatgagaggccatacaggtgaaaaaccctatgaatgtaataaatgtggaaaagccttctcccaaagctcatcccttactatacatatacgaggacatacaggtgagaaacccttcgactgtagtaaatgtggaaaagccttctctcaaatctcatctcttacccttcatatgagaaaacatacaggtgagaagccctatcactgtattgagtgtggcaaggctttcagccaaaagtcgcaccttgttagacaccagagaattcatactcattagaaaccctatgaatattgtgaatatggcaaggccatctgaagg

SEQ ID NO: 35252 - DNA, 1659 bp, Homo sapiens
  source 1..1659: mol_type = unassigned DNA
atgtttgaacagctgaagccaatcgaacctagagattgctggagggaggcacgggtgaagaagaagccagtcacctttgaggatgtggcagtgaatttcacccaggaagagtgggactgtctagatgccagccagagggtcctttaccaggatgttatgtcggaaacctttaagaatctaacatctgtggccagaatctttctgcataagccagagctaatcaccaagcttgagcaagaagaggaacagtggagagagtttgtccatctcccaaacacagaaggcctttcagaaggcaagaagaaagagcttcgagaacaacatcccagtctgagagatgaggggactagtgatgacaaggtcttccttgcatgcagaggggccggccagtgccccctatctgccccagctgggactatggacaggacccgggtgcttcaagcatcccaggctgggccaccctttttttgctacacctgtggcaaatgtttcagcaggcgctcctacctctatagccaccagtttgttcacaatcccaagctgactaacagctgcagtcagtgtgggaagttgtttcggagccccaagtccctcagctatcacagacgcatgcatcttggggagaggcccttctgttgcacgctctgtgacaagacctactgtgatgcttctggactaagtcgtcaccgccgcgtccatctgggttaccggccccattcatgctctgtgtgtgggaagagcttccgggaccagtctgagctcaaacgccaccagaagatacaccaaaaccaggagccagtggatggaaaccaggagtgtactttgaggattccaggcacccaggctgaattccagacacccatcgccagaagccagaggtccatccaggggcttttggatgtgaaccatgcaccagtggccaggtcccaggaacccatatttagaactgagggtcctatggcccagaaccaggcatctgtacttaagaaccaagcacctgtgaccaggacccaggcacccatcactggaaccctctgtcaggatgccagatccaactctcatccagtgaagccctcaagactcaatgtcttctgttgcccccattgttctttgacttttagcaagaaatcctatctctccagacaccagaaggcccacctcacagagccgcccaactactgcttccattgcagcaagtctttcagctcattttccaggctggtcagacaccagcagacccactggaagcagaagagctacctttgccctatctgtgacctctcctttggggagaaagagggccttatggatcactggaggggctataaaggcaaggacctgtgccagagcagccaccataaatgccgggtgatcctgggccagtggcttggcttctctcatgatgtccccactatggctggggaggaatggaagcatggaggtgatcaatctccccccaggatccatacccccaggagaagaggcctaagagagaaggcctgcaaaggagacaaaacaaaggaggcagtgagcatcttgaaacataaataaatggcctttctgactgagctctttctttgtgtttagttttcctgaggactgacctctggggtaatgaggctggagtagagggagacaggtgcgtggataaggaaggaa

SEQ ID NO: 35253 - DNA, 1980 bp, Homo sapiens
  source 1..1980: mol_type = unassigned DNA
tccccgggagaccctgtgcccctaaatcgcggtccactgcgcgcgtcaggtttctagaagcagggtagaacagacggcagacacctagcccaggctggtgttgttactaaacaatggcagctggtgagccaagggtgaccagggccctgaactcggtggcccagctttgagggaagcaaaattgttctcaattgtggaagaggagaatttggacagcagaacaaaaaaggaagacagcctcttggagcagatacatttgtcacaggaagccacatcaaaccctggggcctttgctgggcctctccatctgcccagttactgggaggtagatagccccaggaaggaatccagtcaggcctgggcaccaggccaggagtggataaagctagaaagagacaccacagaagagaagatgtttgaacagctgaagccaatcgaacctagagattgctggagggaggcacgggtgaagaagaagccagtcacctttgaggatgtggcagtgaatttcacccaggaagagtgggactgtctagatgccagccagagggtcctttaccaggatgttatgtcggaaacctttaagaatctaacatctgtggccagaatctttctgcataagccagagctaatcaccaagcttgagcaagaagaggaacagtggagagagtttgtccatctcccaaacacagaaggcctttcagaaggcaagaagaaagagcttcgagaacaacatcccagtctgagagatgaggggactagtgatgacaaggtcttccttgcatgcagaggggccggccagtgccccctatctgccccagctgggactatggacaggacccgggtgcttcaagcatcccaggctgggccaccctttttttgctacacctgtggcaaatgtttcagcaggcgctcctacctctatagccaccagtttgttcacaatcccaagctgactaacagctgcagtcagtgtgggaagttgtttcggagccccaagtccctcagctatcacagacgcatgcatcttggggagaggcccttctgttgcacgctctgtgacaagacctactgtgatgcttctggactaagtcgtcaccgccgcgtccatctgggttaccggccccattcatgctctgtgtgtgggaagagcttccgggaccagtctgagctcaaacgccaccagaagatacaccaaaaccaggagccagtggatggaaaccaggagtgtactttgaggattccaggcacccaggctgaattccagacacccatcgccagaagccagaggtccatccaggggcttttggatgtgaaccatgcaccagtggccaggtcccaggaacccatatttagaactgagggtcctatggcccagaaccaggcatctgtacttaagaaccaagcacctgtgaccaggacccaggcacccatcactggaaccctctgtcaggatgccagatccaactctcatccagtgaagccctcaagactcaatgtcttctgttgcccccattgttctttgacttttagcaagaaatcctatctctccagacaccagaaggcccacctcacagagccgcccaactactgcttccattgcagcaagtctttcagctcattttccaggctggtcagacaccagcagacccactggaagcagaagagctacctttgccctatctgtgacctctcctttggggagaaagagggccttatggatcactggaggggctataaaggcaaggacctgtgccagagcagccaccataaatgccgggtgatcctgggccagtggcttggcttctctcatgatgtccccactatggctggggaggaatggaagcatggaggtgatcaatctccccccaggatccatacccccaggagaagaggcctaagagagaaggcctgcaaaggagacaaaacaaaggaggcagtgagcatcttgaaacataaataaatggcctttctgactga

SEQ ID NO: 35254 - DNA, 1980 bp, Homo sapiens; identical to SEQ ID NO: 35253
  source 1..1980: mol_type = unassigned DNA

SEQ ID NO: 35255 - DNA, 1980 bp, Homo sapiens; identical to SEQ ID NO: 35253
  source 1..1980: mol_type = unassigned DNA

SEQ ID NO: 35256 - DNA, 651 bp, Homo sapiens
  source 1..651: mol_type = unassigned DNA
ggccaggtcccaggaacccatatttagaactgagggtcctatggcccagaaccaggcatctgtacttaagaaccaagcacctgtgaccaggacccaggcacccatcactggaaccctctgtcaggatgccagatccaactctcatccagtgaagccctcaagactcaatgtcttctgttgcccccattgttctttgacttttagcaagaaatcctatctctccagacaccagaaggcccacctcacagagccgcccaactactgcttccattgcagcaagtctttcagctcattttccaggctggtcagacaccagcagacccactggaagcagaagagctacctttgccctatctgtgacctctcctttggggagaaagagggccttatggatcactggaggggctataaaggcaaggacctgtgccagagcagccaccataaatgccgggtgatcctgggccagtggcttggcttctctcatgatgtccccactatggctggggaggaatggaagcatggaggtgatcaatctccccccaggatccatacccccaggagaagaggcctaagagagaaggcctgcaaaggagacaaaacaaaggaggcagtgagcatcttgaaacataaataaatggcctttctgactga

SEQ ID NO: 35257 - DNA, 1980 bp, Homo sapiens
  source 1..1980: mol_type = unassigned DNA
tccccgggagaccctgtgcccctaaatcgcggtccactgcgcgcgtcaggtttctagaagcagggtagaacagagggcagacacctagcccaggctggtgttgttactaaacaatggcagctggtgagccaagggtgaccagggccctgaactctgtggcccagctttgagggaagcaaaattgttctcaattgtggaagaggagaatttggacagcagaacaaaaaaggaagacagcctcttggagcagatacatttgtcacaggaagccacatcaaaccctggggcctttgctgggcctctccatctgcccagttactgggaggtagatagccccaggaaggaatccagtcaggcctgggcaccaggccaggagtggataaagctagaaagagacaccacagaagagaagatgtttgaacagctgaagccaatcgaacctagagattgctggagggaggcacgggtgaagaagaagccagtcacctttgaggatgtggcagtgaatttcacccaggaagagtgggactgtctagatgccagccagagggtcctttaccaggatgttatgtcggaaacctttaagaatctaacatctgtggccagaatctttctgcataagccagagctaatcaccaagcttgagcaagaagaggaacagtggagagagtttgtccatctcccaaacacagaaggcctttcagaaggcaagaagaaagagcttcgagaacaacatcccagtctgagagatgaggggactagtgatgacaaggtcttccttgcatgcagaggggccggccagtgccccctatctgccccagctgggactatggacaggacccgggtgcttcaagcatcccaggctgggccaccctttttttgctacacctgtggcaaatgtttcagcaggcgctcctacctctatagccaccagtttgttcacaatcccaagctgactaacagctgcagtcagtgtgggaagttgtttcggagccccaagtccctcagctatcacagacgcatgcatcttggggagaggcccttctgttgcacgctctgtgacaagacctactgtgatgcttctggactaagtcgtcaccgccgcgtccatctgggttaccggccccattcatgctctgtgtgtgggaagagcttccgggaccagtctgagctcaaacgccaccagaagatacaccaaaaccaggagccagtggatggaaaccaggagtgtactttgaggattccaggcacccaggctgaattccagacacccatcgccagaagccagaggtccatccaggggcttttggatgtgaaccatgcaccagtggccaggtcccaggaacccatatttagaactgagggtcctatggcccagaaccaggcatctgtacttaagaaccaagcacctgtgaccaggacccaggcacccatcactggaaccctctgtcaggatgccagatccaactctcatccagtgaagccctcaagactcaatgtcttctgttgcccccattgttctttgacttttagcaagaaatcctatctctccagacaccagaaggcccacctcacagagccgcccaactactgcttccattgcagcaagtctttcagctcattttccaggctggtcagacaccagcagacccactggaagcagaagagctacctttgccctatctgtgacctctcctttggggagaaagagggccttatggatcactggaggggctataaaggcaaggacctgtgccagagcagccaccataaatgccgggtgatcctgggccagtggcttggcttctctcatgatgtccccactatggctggggaggaatggaagcatggaggtgatcaatctccccccaggatccatacccccaggagaagaggcctaagagagaaggcctgcaaaggagacaaaacaaaggaggcagtgagcatcttgaaacataaataaatggcctttctgactga

SEQ ID NO: 35258 - DNA, 1980 bp, Homo sapiens; identical to SEQ ID NO: 35253
  source 1..1980: mol_type = unassigned DNA

SEQ ID NO: 35259 - DNA, 1980 bp, Homo sapiens; identical to SEQ ID NO: 35253
  source 1..1980: mol_type = unassigned DNA

SEQ ID NO: 35260 - DNA, 1980 bp, Homo sapiens; identical to SEQ ID NO: 35253
  source 1..1980: mol_type = unassigned DNA

SEQ ID NO: 35261 - DNA, 1870 bp, Homo sapiens
  source 1..1870: mol_type = unassigned DNA
acaggaagccacatcaaaccctggggcctttgctgggcctctccatctgcccagttactgggaggtagatagccccaggaaggaatccagtcaggcctgggcaccaggccaggagtggataaagctagaaagagacaccacagaagagaagatgtttgaacagctgaagccaatcgaacctgtacagaagacgctcccatgggtgggcgaggtagctgccaccctgcaggaagccatgaagagagattgctggagggaggcacgggtgaagaagaagccagtcacctttgaggatgtggcagtgaatttcacccaggaagagtgggactgtctagatgccagccagagggtcctttaccaggatgttatgtcggaaacctttaagaatctaacatctgtggccagaatctttctgcataagccagagctaatcaccaagcttgagcaagaagaggaacagtggagagagtttgtccatctcccaaacacagaaggcctttcagaaggcaagaagaaagagcttcgagaacaacatcccagtctgagagatgaggggactagtgatgacaaggtcttccttgcatgcagaggggccggccagtgccccctatctgccccagctgggactatggacaggacccgggtgcttcaagcatcccaggctgggccaccctttttttgctacacctgtggcaaatgtttcagcaggcgctcctacctctatagccaccagtttgttcacaatcccaagctgactaacagctgcagtcagtgtgggaagttgtttcggagccccaagtccctcagctatcacagacgcatgcatcttggggagaggcccttctgttgcacgctctgtgacaagacctactgtgatgcttctggactaagtcgtcaccgccgcgtccatctgggttaccggccccattcatgctctgtgtgtgggaagagcttccgggaccagtctgagctcaaacgccaccagaagatacaccaaaaccaggagccagtggatggaaaccaggagtgtactttgaggattccaggcacccaggctgaattccagacacccatcgccagaagccagaggtccatccaggggcttttggatgtgaaccatgcaccagtggccaggtcccaggaacccatatttagaactgagggtcctatggcccagaaccaggcatctgtacttaagaaccaagcacctgtgaccaggacccaggcacccatcactggaaccctctgtcaggatgccagatccaactctcatccagtgaagccctcaagactcaatgtcttctgttgcccccattgttctttgacttttagcaagaaatcctatctctccagacaccagaaggcccacctcacagagccgcccaactactgcttccattgcagcaagtctttcagctcattttccaggctggtcagacaccagcagacccactggaagcagaagagctacctttgccctatctgtgacctctcctttggggagaaagagggccttatggatcactggaggggctataaaggcaaggacctgtgccagagcagccaccataaatgccgggtgatcctgggccagtggcttggcttctctcatgatgtccccactatggctggggaggaatggaagcatggaggtgatcaatctccccccaggatccatacccccaggagaagaggcctaagagagaaggcctgcaaaggagacaaaacaaaggaggcagtgagcatcttgaaacataaataaatggcctttctgactgagctctttctttgtgtttagttttcctgaggactgacctctggggtaatgaggctggagtagagggagacaggtgcgtggataaggaaggaa

SEQ ID NO: 35262 - DNA, 1659 bp, Homo sapiens; identical to SEQ ID NO: 35252
  source 1..1659: mol_type = unassigned DNA

SEQ ID NO: 35263 - DNA, 1356 bp, Homo sapiens
  source 1..1356: mol_type = unassigned DNA
gccggcggatcacctgagtctctcctgttcttccagaagccagtcacctttgaggatgtggcagtgaatttcacccaggaagagtgggactgtctagatgccagccagagggtcctttaccaggatgttatgtcggaaacctttaagaatctaacatctgtggccagaatctttctgcataagccagagctaatcaccaagcttgagcaagaagaggaacagtggagagagacccgggtgcttcaagcatcccaggctgggccaccctttttttgctacacctgtggcaaatgtttcagcaggcgctcctacctctatagccaccagtttgttcacaatcccaagctgactaacagctgcagtcagtgtgggaagttgtttcggagccccaagtccctcagctatcacagacgcatgcatcttggggagaggcccttctgttgcacgctctgtgacaagacctactgtgatgcttctggactaagtcgtcaccgccgcgtccatctgggttaccggccccattcatgctctgtgtgtgggaagagcttccgggaccagtctgagctcaaacgccaccagaagatacaccaaaaccaggagccagtggatggaaaccaggagtgtactttgaggattccaggcacccaggctgaattccagacacccatcgccagaagccagaggtccatccaggggcttttggatgtgaaccatgcaccagtggccaggtcccaggaacccatatttagaactgagggtcctatggcccagaaccaggcatctgtacttaagaaccaagcacctgtgaccaggacccaggcacccatcactggaaccctctgtcaggatgccagatccaactctcatccagtgaagccctcaagactcaatgtcttctgttgcccccattgttctttgacttttagcaagaaatcctatctctccagacaccagaaggcccacctcacagagccgcccaactactgcttccattgcagcaagtctttcagctcattttccaggctggtcagacaccagcagacccactggaagcagaagagctacctttgccctatctgtgacctctcctttggggagaaagagggccttatggatcactggaggggctataaaggcaaggacctgtgccagagcagccaccataaatgccgggtgatcctgggccagtggcttggcttctctcatgatgtccccactatggctggggaggaatggaagcatggaggtgatcaatctccccccaggatccatacccccaggagaagaggcctaagagagaaggcctgcaaaggagacaaaacaaaggaggcagtgagcatcttgaaacataaataa

SEQ ID NO: 35264 - DNA, 1659 bp, Homo sapiens; identical to SEQ ID NO: 35252
  source 1..1659: mol_type = unassigned DNA

SEQ ID NO: 35265 - DNA, 1870 bp, Homo sapiens; identical to SEQ ID NO: 35261
  source 1..1870: mol_type = unassigned DNA

SEQ ID NO: 35266 - DNA, 1870 bp, Homo sapiens; identical to SEQ ID NO: 35261
  source 1..1870: mol_type = unassigned DNA

SEQ ID NO: 35267 - DNA, 1870 bp, Homo sapiens; identical to SEQ ID NO: 35261
  source 1..1870: mol_type = unassigned DNA

SEQ ID NO: 35268 - DNA, 1870 bp, Homo sapiens; identical to SEQ ID NO: 35261
  source 1..1870: mol_type = unassigned DNA

SEQ ID NO: 35269 - DNA, 1659 bp, Homo sapiens; identical to SEQ ID NO: 35252
  source 1..1659: mol_type = unassigned DNA

SEQ ID NO: 35270 - DNA, 1659 bp, Homo sapiens; identical to SEQ ID NO: 35252
  source 1..1659: mol_type = unassigned DNA

SEQ ID NO: 35271 - DNA, 1870 bp, Homo sapiens; identical to SEQ ID NO: 35261
  source 1..1870: mol_type = unassigned DNA

SEQ ID NO: 35272 - DNA, 1659 bp, Homo sapiens; identical to SEQ ID NO: 35252
  source 1..1659: mol_type = unassigned DNA

SEQ ID NO: 35273 - DNA, 1659 bp, Homo sapiens; identical to SEQ ID NO: 35252
  source 1..1659: mol_type = unassigned DNA

SEQ ID NO: 35274 - DNA, 1870 bp, Homo sapiens; identical to SEQ ID NO: 35261
  source 1..1870: mol_type = unassigned DNA

SEQ ID NO: 35275 - DNA, 1974 bp, Homo sapiens
  source 1..1974: mol_type = unassigned DNA
gtagcggctgtgtatcggcgatgcgggtgtttccccagtttgtggcccctgagtgctgggtgggaccgcggtgactgaacctagaaggtggagaggaatcgtcctcggtgcccagaggcggctctgcagccccgtgacggcgaccactgctcccgggccgtgcttccccaagtagtccgatggcagcggctgtgccgaggcgcccaactcagggcactgtgacctttgaagatgtggctgtgaacttttcccaggaggagtggtgtcttcttagtgaggctcagaggtgcttgtaccgtgatgtgatgctagagaacctggctctcatatcctcgctgggttgttggtgtggatcaaaagatgaggaggcaccttgtaagcagagaatttctgtacaaagagagtctcagagcaggactcctagggcaggtgtttctcctaagaaggctcacccctgtgaaatgtgtggcctcatcttggaggatgtttttcactttgctgaccaccaggaaactcatcacaagcagaagctgaacaggagtggagcatgtggaaaaaacttggatgacactgcataccttcatcagcaccagaagcagcatattggagagaaattctacagaaagagtgtcagagaagcatcgtttgtaaagaaacgtaagctcagggtgtcacaggagccatttgtcttccgcgagtttgggaaggacgttctgcccagttcaggattgtgccaagaagaagctgctgtagagaagacagacagtgaaactatgcatggcccaccctttcaggagggaaaaactaattacagttgtggaaaacgcacaaaagccttcagcaccaaacactcagttattccacaccagaaacttttcactagagatggatgttatgtgtgcagtgattgtggaaaatcctttagcagatatgtcagcttcagtaatcatcagcgagatcacactgcaaaaggaccttatgattgtggagagtgtgggaaatcttatagtcgaaagagcagccttattcaacatcagcgagtccacactggacagacagcttatccctgtgaggagtgcgggaaatcttttagtcagaagggcagccttattagccatcagcttgttcacactggagaagggccttatgagtgtagagaatgtgggaaatcttttggtcaaaagggtaacctcattcaacatcagcaaggtcacactggagagagagcttatcactgtggggaatgtgggaaatcttttcgtcagaagttctgctttattaaccatcagcgtgttcacactggagaaaggccttacaagtgtggagaatgtgggaaatcttttggtcaaaagggcaacctcgttcaccatcagcgaggtcatactggagaaaggccctatgagtgcaaggaatgtgggaaatcatttaggtacagatcccacctcactgaacaccagagacttcacactggggaaagaccttacaattgtagggaatgtgggaaattatttaacaggaagtatcatcttctggttcatgagagagttcacactggagaaaggccatatgcgtgtgaggtatgtgggaaattatttggcaataagcacagcgtgactatacatcagaggattcacactggagaaaggccgtatgaatgcagtgaatgtgggaaatcatttctttccagctctgcgcttcatgttcataaaagagttcattctggacaaaagccttataagtgcagtgaatgtggaaaatccttttctgaatgttccagtctcattaaacacaggagaattcacactggagaaaggccttatgaatgcaccaaatgtggaaaaacatttcagcgaagctctaccctccttcatcatcagagttcacacaggagaaaggccttatgagtgcagtgaatatgggaaatcgtttgctgaagcatcccgtctcgttaaacacaggagagttcatactgga

SEQ ID NO: 35276 - DNA, 7861 bp, Homo sapiens
  source 1..7861: mol_type = unassigned DNA
cagcccttgccagcatccagccatgggggatatgaaaaccccagattttgatgaccttctggctgcctttgacatcccagaccccaccagccttgatgccaaggaggccatccagacacccagtgaggagaatgagagtcccctcaaacctccaggcatatgtatggatgaaagtgtgtccttgtctcactcaggatcagcccccgatgtgccggccgtgagtgtcattgtcaagaacaccagccgccaggagtcatttgaagcggagaaagaccacattactcccagtctcctacacaatggattccggggctcagatctgcctccagatccccacaactgtgggaaatttgattctacttttatgaatggagacagtgccaggagtttccctggcaaactggagcctcccaagtcagagccattacccaccttcaaccagttcagtccaatctccagcccagaacctgaggatcccatcaaagataacggatttgggataaagcccaaacactctgacagttatttcccaccccctcttgggtgcggggctgtgggaggcccagtcctggaggctctggctaagtttccggttccagagctgcatatgtttgatcatttttgtaagaaagaacccaagccagaacccctgcccttggggagccagcaggaacacgagcaaagtgggcagaacacagtggaacctcacaaggatccggatgccactcgattcttcggggaagctttggagttcaacagccatcctagcaacagtattggagagtccaaggggcttgcccgggagcttggtacctgctcatcagtcccccctaggcagcgtctaaagccagctcattccaagctgtcctcttgtgtggcagccttggtggccttgcaggccaaaagagtggctagtgtcactaaggaggatcagcctggccacacaaaggatctctcagggcccactaaagagagttctaaaggtagccccaaaatgcccaagtcaccaaagagtccccggagccctctggaggccactagaaaaagtatcaagccatcggacagccctcgtagcatctgcagtgacagcagcagcaaaggctcaccgtctgtggctgccagctccccaccagcaattcccaaagtgagaatcaaaaccattaagacatcatcaggggaaatcaaacggactgtcacaaggatcctgccagatcctgatgatccaagtaagtcccctgttgggtcacctctagggagcgccattgcagaggcccccagcgagatgccaggggatgaggtgcctgtggaagagcactttcctgaggcaggcacaaattcagggagcccccagggggccaggaaaggggacgagagcatgacaaaggccagtgactcgtcatctcccagctgcagttctgggccccgggtcccaaagggggctgccccaggctcacagacaggcaagaagcaacagagcacagcactgcaggcatccaccctggcccctgccaacctcctgcccaaagccgtgcacttggccaacctgaacctcgtcccccacagtgttgctgcatcagtgacagccaagtcttcagtgcaaagacggagccagccacagcttacacaaatgtcggtgcccctggtccaccaggtgaaaaaggctgccccactgattgtagaggtcttcaacaaggtccttcacagctccaaccccgtgcccctctatgcgccaaatctcagcccgcctgcggacagcaggatccacgtgccggccagtgggtactgctgcctggagtgtggagacgcatttgccttagagaagagcctgagccagcactatggccggcggagcgtccacattgaggtactgtgcacactgtgctccaagacgctgctcttcttcaacaagtgcagcctgctccggcacgcccgtgaccacaagagcaaggggctcgtcatgcagtgttcccagctgctggtgaagcctatctctgcggaccaaatgttcgtgtcggcccctgtgaactccacggcaccagcagccccagccccttcatcctctcccaaacatggcctcacttcgggcagtgccagtccccctcctccagccttgccactctacccagaccctgtgaggctcatccggtactcaatcaagtgtcttgaatgtcacaagcagatgcgggactacatggtcctggctgcacatttccagaggacaacagaggagacagaggggctgacctgccaggtatgccaaatgctgctgcccaaccagtgcagtttctgtgcccaccagcggattcatgcacacaagtccccctactgctgcccggagtgtggggtcctctgccgctctgcctacttccagacccatgtaaaggagaattgcctgcactatgcccgcaaggtgggctacaggtgcatccactgtggtgtcgtccacctgaccttggccttgctgaaaagccacatccaggagcgacactgccaggttttccacaaatgtgcattctgccccatggccttcaagactgccagcagcactgcagaccacagtgccacccagcaccccacccagccccacagaccctcccagctcatttataagtgctcctgtgaaatggtcttcaacaagaagaggcacattcagcagcatttttaccagaatgtcagcaagacgcaggtgggcgtcttcaagtgccctgagtgcccactcttgttcgtgcagaagccggagttgatgcaacacgtcaagagcacccacggtgttccccgaaatgtggacgagctgtcaagcctccagtcttcagcggacacatcctcaagccgccctggctctcgagttcccactgagccaccagccactagtgtggctgctcggagcagctccctgccttctggccgctggggtaggcctgaagcccaccgcagggtggaagccaggccgcggctgaggaacactggctggacctgccaggagtgccaggagtgggttccagatcgggagagctacgtgtcccacatgaaaaagagccacggtcggacattgaagcggtacccatgccggcagtgtgaacagtccttccacacccccaacagcctgcgcaaacacatccgcaacaaccatgacacagtaaagaagttctacacctgcgggtactgcacagaggacagccccagctttcctcggccctcccttctggagagccacatcagccttatgcatggcatcagaaaccctgatttgagccagacgtccaaagtgaaacctccgggtggacattcccctcaggtgaaccatctgaaaagaccagtcagtggagtgggggacgctccaggcaccagcaatggcgcaactgtctcttccaccaaaaggcacaagtccctttttcagtgcgcgaaatgtagttttgccacagactcggggctcgagtttcagagccacatacctcagcaccaggtggacagctccacagcccaatgtctcctctgtggtttgtgctacacctctgccagctccctcagccgccacctcttcattgtccacaaggtgagagaccaggaggaggaggaggaagaggaggcggcggcagcggagatggcagtggaggtggcagagccagaggagggctccggggaggaggtgcccatggagactagagagaatggactggaagaatgtgccggtgagcctttgtcagctgacccagaggcgaggagattgctgggcccggcccctgaggacgatggtggccacaatgatcacagtcaaccacaggcctctcaggaccaggacagccacacactgtcccctcaggtgtgaccggagactttgcagtgtgcatggtcaggggtggtgccgaagtgtcttccacctgccctgcggaccgtggaaaataaaaggctctgcccccagtgtgagtgtgaccggttgtaccctggagtagtgtctgccctgagctgccagtgctgggtatcccccagccccaggaaatgtggggtcggccaggaccctcacagctctgaatttgcttctgttatttatggcttttcgctgcttcttggtgccccatctcttgtctgtgtccttccaaccccaagctgcttatgtggcccaaccccactgctgtcaactaggcttgaaccccacagcggctgtgctcttctgggaggttcccgcttgctgccttcagccagggcgctcctcagagctctattttcctgcagacaccagctctccttcctgcctttagatcctgagaaggagggaaatgaggggtgctgacacagtccctctgggagagctctgcctagtctggtttggcgagggcccttgatcaccttgcccctcctccctgtcttctctgattcttttccctcaaaatagtcctgagaactaattgtcacactggctcatcatgtctctgtgggtggggtgggagaaacctctgctgcacacctctgtttggaacctgggcagagcaggaggtaaggcaaaggcaggcaggcaccaagaaccagaccccttgagaaggcgctgtgggtgggtctttgttctgctgttctgcctttcctgacaggtggggttggggcacacagacattggaatatttgtactgctctcgtgccatttgagaggctgctgccccaggcaggccagcccctactcctcttggctacactcatgttgctcagactatatttcaaataaaaaatcttctcaccatgcaggtaggctcttgtattcctctccaagtgagcctggccccaccctattccacccaagggtctttcccagacttcccctgtttgtcccatctctgagggagaacaatacttcctactgtctaaggaaggccttctctagattctggagcttgtggttaggaaaccgggagccctgtactacttagttctctagagaccttctgaaggggtgaggggagcggctccacaatggtcaagtcacctccaagatctccaggctagtgacattggctttagggcgtatcgaaattttctaggcaccttcatctttccttcagttgattttcaacataagagaaccccttactggtaaaaagggaaaagggggtggagaagaggaattttataattttcttatagcattcaagaggtttcttatttcttacagcatcgctactgccacagagaactcaaatgtggcagaactgggattagacttgggagactggctgtcttttcactgatggtggagtcagggcccacccaagcacgaggagcaggctgtgtggaggtgtcgtctgacctctaacccaggtggcatggggttgcgcccagcaggatgtagtggagtaaagggaagagggtgctggccgggtgcttagaggtcatctttcaaggaggcattaaatatcaattataaattattaagtcagataaatatgcctgaccttttcacagttgaaaaaatacattttttcccctctatcaaatgccaagtttttagtggaaatgctaatggcagtgggaaaggttgcctcactttcagagagactctcgctgtctgcacccttttaataattgctcttcctggcaaggctgccacttccctgcctccccagctggcagtggggcaacccaggcctgtttccagctacctgcaaagccagacctagacctgccgtagctgttgtcccatgcctaattctagttacaggaagccatccctgtaccctgggtccattcacaggaatgggttccagaggaggctgatagaagggtttgaaatgactggctggatcccttcctgctcagacacagtggtagctggagagcaggcagagatggtagaattgcaggtttgaccacctgtcgtgaccccagatatacatctccttcctgggaagaacgtgagttggaaaaatgctgagccagtccctggaaaacctgggtcctggcctggattctgtccttagccagctcttaacaaatcccttaacctcactgtctcctctccttcacaatagagttagtaattcccatccaactggcttcacaggcttttgtgagcttatgaatgtgaaagtattttctagtttataaaacactatatgaatgtggggaaatctttacttgaccttagggcatggagggtggagcacattttgtctgctgtttggacttggatgctgattagcagttatgaagtggcccagacacctagccattctttagtaagagtgaagatagcattttaagccctccttgtgtgcctagcatcttactgaacactttctggtgattctctcctttaatcctcacaaagatctcacagttgtcctccattttacggagaagaaaccgaggctccgagaggttaaacgatgtgcagaggctacctgtagtgatggtgctgagtcaagcctgtcaaccactgtgctcgttagtgaccaaggctgctttgacaggctgccagcttgtcagtggtttgcagccccccagacatttgctttcctacttcccatgcagttggggtgccctgccaagtgccaggttctctttggagtccatctgtgccttgtcaccccaaggagggcctcgagcatcacaccgttgacatttcgaaacgtggtatctctacaacctttcattctcattgggatttaccttgccatttgaacaccatcattttttgaggactgtctagaaaaggttgcctaaccctcacagggaacacacagttccctcagagtccagcatcttctggtcttttctttttcaagatttttttaaatggttgtgctatcatttgtcatcatcagaaaatgcttgctgtaacaagcgtttatctgcacattatgctgcagtgaatgctctactgatcaagttaaacagataagatcccttcccttgtagaaactacaacttaatacagtctaagacttgacaaattacttagtatttattttccaactgctttatctctgtaaaatgatatgctgaattattataagctaattgttgtagaaagaactttccccttaacttatgtaaacagtctggttttaaaaaatttgataattgtggcccagtaagctcaacactttgccttccccaagactggggaacctctgtcctgttcaccactgtatattcagcaccaggcagtttctttttttgtttgtttgtttttttgttttgaaaaattaatacatatacatggtaagacattccacaatacaaaagggtatacaataaatggtaagcttccccatggaggtcagcctctagtcccctctccagagttaatcactgttatctatatgttgtgtatcctttcatagcaattctatgcatttacaagtttataaatatgtatatttatatatctatttttaatacaaatagtagaattctatacacagtgttctgaagcttgctttcttatatagtattttggagattattccaaattcatacattgggtcagagtaattctttaaaagttccttgcatataacagtgattcaaaaagtatatggatgaatgagtgaatgctgcatgaatgaatgaatctgattcaattggtagctacagctgttctctcagggtctgatctgaccaagacagcaccttctagattctagaatgtgtcctcctgactaaggggttcaggatactgttcaccttctccaacagatgccaccggagccttaggaactgggcacaggaagccttgggcccctggaggaaaaagttgagactaggacgcaggtcccaagtatgggatttttttgggttcctacttaaaatgcttttttctttattggaaaatgatgtaacattttagagaaattaaaaagcacacatattt

SEQ ID NO: 35277 - DNA, 5951 bp, Homo sapiens
  source 1..5951: mol_type = unassigned DNA
ctggcctgcagtcgccgccgccgccgccaggtggtgtttggactctagaccatgtgcctaggtagaagtttttcctttctccgcagctctgctcccctagcaacgctcgccacacccttgttttgagatcctctctaaggagcggagagtttaataggcaagaaggaagggagaagacagaaggaagacgctcccccgtacggagacagagggagggggggctccaaagccgaaagaggaggtccctacctgccacggataccagtcagcccttgccagcatccagccatgggggatatgaaaaccccagattttgatgaccttctggctgcctttgacatcccagaccccaccagccttgatgccaaggaggccatccagacacccagtgaggagaatgagagtcccctcaaacctccaggcatatgtatggatgaaagtgtgtccttgtctcactcaggatcagcccccgatgtgccggccgtgagtgtcattgtcaagaacaccagccgccaggagtcatttgaagcggagaaagaccacattactcccagtctcctacacaatggattccggggctcagatctgcctccagatccccacaactgtgggaaatttgattctacttttatgaatggagacagtgccaggagtttccctggcaaactggagcctcccaagtcagagccattacccaccttcaaccagttcagtccaatctccagcccagaacctgaggatcccatcaaagataacggatttgggataaagcccaaacactctgacagttatttcccaccccctcttgggtgcggggctgtgggaggcccagtcctggaggctctggctaagtttccggttccagagctgcatatgtttgatcatttttgtaagaaagaacccaagccagaacccctgcccttggggagccagcaggaacacgagcaaagtgggcagaacacagtggaacctcacaaggatccggatgccactcgattcttcggggaagctttggagttcaacagccatcctagcaacagtattggagagtccaaggggcttgcccgggagcttggtacctgctcatcagtcccccctaggcagcgtctaaagccagctcattccaagctgtcctcttgtgtggcagccttggtggccttgcaggccaaaagagtggctagtgtcactaaggaggatcagcctggccacacaaaggatctctcagggcccactaaagagagttctaaaggtagccccaaaatgcccaagtcaccaaagagtccccggagccctctggaggccactagaaaaagtatcaagccatcggacagccctcgtagcatctgcagtgacagcagcagcaaaggctcaccgtctgtggctgccagctccccaccagcaattcccaaagtgagaatcaaaaccattaagacatcatcaggggaaatcaaacggactgtcacaaggatcctgccagatcctgatgatccaagtaagtcccctgttgggtcacctctagggagcgccattgcagaggcccccagcgagatgccaggggatgaggtgcctgtggaagagcactttcctgaggcaggcacaaattcagggagcccccagggggccaggaaaggggacgagagcatgacaaaggccagtgactcgtcatctcccagctgcagttctgggccccgggtcccaaagggggctgccccaggctcacagacaggcaagaagcaacagagcacagcactgcaggcatccaccctggcccctgccaacctcctgcccaaagccgtgcacttggccaacctgaacctcgtcccccacagtgttgctgcatcagtgacagccaagtcttcagtgcaaagacggagccagccacagcttacacaaatgtcggtgcccctggtccaccaggtgaaaaaggctgccccactgattgtagaggtcttcaacaaggtccttcacagctccaaccccgtgcccctctatgcgccaaatctcagcccgcctgcggacagcaggatccacgtgccggccagtgggtactgctgcctggagtgtggagacgcatttgccttagagaagagcctgagccagcactatggccggcggagcgtccacattgaggtactgtgcacactgtgctccaagacgctgctcttcttcaacaagtgcagcctgctccggcacgcccgtgaccacaagagcaaggggctcgtcatgcagtgttcccagctgctggtgaagcctatctctgcggaccaaatgttcgtgtcggcccctgtgaactccacggcaccagcagccccagccccttcatcctctcccaaacatggcctcacttcgggcagtgccagtccccctcctccagccttgccactctacccagaccctgtgaggctcatccggtactcaatcaagtgtcttgaatgtcacaagcagatgcgggactacatggtcctggctgcacatttccagaggacaacagaggagacagaggggctgacctgccaggtatgccaaatgctgctgcccaaccagtgcagtttctgtgcccaccagcggattcatgcacacaagtccccctactgctgcccggagtgtggggtcctctgccgctctgcctacttccagacccatgtaaaggagaattgcctgcactatgcccgcaaggtgggctacaggtgcatccactgtggtgtcgtccacctgaccttggccttgctgaaaagccacatccaggagcgacactgccaggttttccacaaatgtgcattctgccccatggccttcaagactgccagcagcactgcagaccacagtgccacccagcaccccacccagccccacagaccctcccagctcatttataagtgctcctgtgaaatggtcttcaacaagaagaggcacattcagcagcatttttaccagaatgtcagcaagacgcaggtgggcgtcttcaagtgccctgagtgcccactcttgttcgtgcagaagccggagttgatgcaacacgtcaagagcacccacggtgttccccgaaatgtggacgagctgtcaagcctccagtcttcagcggacacatcctcaagccgccctggctctcgagttcccactgagccaccagccactagtgtggctgctcggagcagctccctgccttctggccgctggggtaggcctgaagcccaccgcagggtggaagccaggccgcggctgaggaacactggctggacctgccaggagtgccaggagtgggttccagatcgggagagctacgtgtcccacatgaaaaagagccacggtcggacattgaagcggtacccatgccggcagtgtgaacagtccttccacacccccaacagcctgcgcaaacacatccgcaacaaccatgacacagtaaagaagttctacacctgcgggtactgcacagaggacagccccagctttcctcggccctcccttctggagagccacatcagccttatgcatggcatcagaaaccctgatttgagccagacgtccaaagtgaaacctccgggtggacattcccctcaggtgaaccatctgaaaagaccagtcagtggagtgggggacgctccaggcaccagcaatggcgcaactgtctcttccaccaaaaggcacaagtccctttttcagtgcgcgaaatgtagttttgccacagactcggggctcgagtttcagagccacatacctcagcaccaggtggacagctccacagcccaatgtctcctctgtggtttgtgctacacctctgccagctccctcagccgccacctcttcattgtccacaaggtgagagaccaggaggaggaggaggaagaggaggcggcggcagcggagatggcagtggaggtggcagagccagaggagggctccggggaggaggtgcccatggagactagagagaatggactggaagaatgtgccggtgagcctttgtcagctgacccagaggcgaggagattgctgggcccggcccctgaggacgatggtggccacaatgatcacagtcaaccacaggcctctcaggaccaggacagccacacactgtcccctcaggtgtgaccggagactttgcagtgtgcatggtcaggggtggtgccgaagtgtcttccacctgccctgcggaccgtggaaaataaaaggctctgcccccagtgtgagtgtgaccggttgtaccctggagtagtgtctgccctgagctgccagtgctgggtatcccccagccccaggaaatgtggggtcggccaggaccctcacagctctgaatttgcttctgttatttatggcttttcgctgcttcttggtgccccatctcttgtctgtgtccttccaaccccaagctgcttatgtggcccaaccccactgctgtcaactaggcttgaaccccacagcggctgtgctcttctgggaggttcccgcttgctgccttcagccagggcgctcctcagagctctattttcctgcagacaccagctctccttcctgcctttagatcctgagaaggagggaaatgaggggtgctgacacagtccctctgggagagctctgcctagtctggtttggcgagggcccttgatcaccttgcccctcctccctgtcttctctgattcttttccctcaaaatagtcctgagaactaattgtcacactggctcatcatgtctctgtgggtggggtgggagaaacctctgctgcacacctctgtttggaacctgggcagagcaggaggtaaggcaaaggcaggcaggcaccaagaaccagaccccttgagaaggcgctgtgggtgggtctttgttctgctgttctgcctttcctgacaggtggggttggggcacacagacattggaatatttgtactgctctcgtgccatttgagaggctgctgccccaggcaggccagcccctactcctcttggctacactcatgttgctcagactatatttcaaataaaaaatcttctcaccatgcaggtaggctcttgtattcctctccaagtgagcctggccccaccctattccacccaagggtctttcccagacttcccctgtttgtcccatctctgagggagaacaatacttcctactgtctaaggaaggccttctctagattctggagcttgtggttaggaaaccgggagccctgtactacttagttctctagagaccttctgaaggggtgaggggagcggctccacaatggtcaagtcacctccaagatctccaggctagtgacattggctttagggcgtatcgaaattttctaggcaccttcatctttccttcagttgattttcaacataagagaaccccttactggtaaaaagggaaaagggggtggagaagaggaattttataattttcttatagcattcaagaggtttcttatttcttacagcatcgctactgccacagagaactcaaatgtggcagaactgggattagacttgggagactggctgtcttttcactgatggtggagtcagggcccacccaagcacgaggagcaggctgtgtggaggtgtcgtctgacctctaacccaggtggcatggggttgcgcccagcaggatgtagtggagtaaagggaagagggtgctggccgggtgcttagaggtcatctttcaaggaggcattaaatatcaattataaattattaagtcagataaatatgcctgaccttttcacagttgaaaaaatacattttttcccctctatcaaatgccaagtttttagtggaaatgctaatggcagtgggaaaggttgcctcactttcagagagactctcgctgtctgcacccttttaataattgctcttcctggcaaggctgccacttccctgcctccccagctggcagtggggcaacccaggcctgtttccagctacctgcaaagccagacctagacctgccgtagctgttgtccca

SEQ ID NO: 35278 - DNA, 4248 bp, Homo sapiens
  source 1..4248: mol_type = unassigned DNA
gaggaaaactcacagggtgcgtcgctggtaacccatgctcccataaagcctggcctctggaaagagacttgggaacgagccctgacgttctcagccgtcgagcttcacagagaagggtagctcgaattaggttccttatcttaaagagaataacagcagtcactttctcacaatcttgcgaacgccaaatggaaggatccctcgagagcgctgagaactcgccgagctcctcccgggaaacccggtaccacgaggcgccattttgcggatgggcaaaccgaggcccgcggggccgcgacttacccaggcctttttgcagtgggaggcgacggtggaggagggtggtctgggaccgggacaacaaagtccatcctgccgccggcttcgacgcaggtgccagaaaggtcccaaccccgcccaggcagggcgaggcggcgcggcccaggaacctgtcatggcggcgccgctgcccgacgccggaagtgcccgcctggaactacagctcccagcagaccccgcggcgcgctccggtcgacgccggggaagcagccgccattgtccgcggctgaggttgggatttgctgtgttcctgggcaggtgcctggtcaatcagtcctcgggatggcagccatcaacccgtgggcctcctggggtgcccttacggaccaatcttgggggatgacagctgttgacccatgggcctcctgggctctgtgtcctcagtatcctgcctggcacgtggagggaagcctggaggaggggaggagggccactgggctcccagcagcccaggttcaggaaccagtgaccttcaaggacgtggccgtggacttcacccaagaagagtgggggcagctggaccttgttcagaggaccctgtaccgtgatgtgatgctggagacctatggtcacctgctctctgtgggaaatcagattgccaagcctgaggtcatctccctgttggagcaaggagaagagccgtggtcagtggagcaggcatgtcctcaacgcacttgtccagaatgggtgagaaatcttgaaagcaaagcattgatcccagcacagagcatttttgaggaagaacaatcccatggcatgaagttggaaagatatatatgggatgatccttggttctccaggttagaagttttgggatgtaaagaccaattagaaatgtaccacatgaaccagagtacagctatgaggcagatggtcttcatgcaaaagcaagtactatcccagagaagctctgaattctgtggacttggggcagagtttagccagaacttaaactttgttccatctcagagagtttctcagatagaacatttctataagcctgatacacatgctcaaagttggagatgtgactcagccataatgtatgcagataaggttacctgtgaaaataatgattatgacaaaactgtttatcagtccattcaacctatttaccctgcaagaatacaaactggagataatcttttcaaatgtactgatgctgttaaatctttcaatcatataatacattttggtgatcataaaggaattcacacaggagaaaaactctatgaatataaggaatgccatcaaatctttaaccagagcccatcatttaatgaacacccaaggcttcatgttggagaaaaccagtataattacaaagaatatgagaatatcttttatttctcatcctttatggaacatcaaaaaattggtactgtagagaaagcgtataaatacaatgaatgggagaaagtctttgggtatgactctttccttactcaacatacaagcacttacactgcagagaaaccctatgactacaatgaatgtgggacgtctttcatctggagctcttaccttattcaacataagaaaactcatactggagaaaaaccctatgaatgtgataaatgtggaaaagtttttaggaatcgctcagcccttacgaaacatgaacggactcacactggaataaaaccctatgaatgtaataaatgtggaaaagccttcagctggaattctcatcttattgtacataagagaattcatacaggagaaaaaccttatgtttgtaatgagtgtgggaaatctttcaactggaactctcatcttattggacatcagaggactcatacaggagagaaaccttttgaatgtactgaatgtgggaaatcattcagctggagctcccatcttattgcccatatgagaatgcatactggagagaaaccctttaaatgtgatgaatgtgaaaaagcttttagggactactcagcccttagtaaacatgaaagaactcattctggagcaaaaccatataaatgtactgaatgtggaaaatccttcagctggagctcccatcttattgcccatcagagaactcacacgggagagaaaccatataactgtcaggaatgtggcaaagcattcagagaacgctcagccctcactaaacatgagataattcattctggaattaagccctatgaatgtaataaatgtggaaaatcctgtagccagatggctcaccttgttagacatcaaaggactcatactggagaaaaaccctatgaatgcaataaatgtggaaaatccttcagtcagagctgtcaccttgttgctcatcggagaattcacactggtgagaaaccctataaatgtaatcagtgtgaaagatcctttaactgtagttctcacctcattgcacaccggagaactcatactggagagaaaccatacaggtgtaatgaatgtgggaaagcatttaatgagagttcatcccttattgtacacctaagaaaccatactggagaaaagccctacaaatgtaatcattgtgaaaaagcattttgtaagaattcttcccttattattcatcagagaatgcatagtggagagaaacgctttatatgcagtgaatgtggaaaagcctttagtggtcactcagccctacttcaacaccagagaaatcacagtgaagagaaactgaattgaatttatgcgagtttttcgtttcttgtacatttgacaacacattgaggaaaaccctataaacataatcaagaggggacatttttcattaagagttcagtaagacttctcccacattatttactagaaaatatcatcttagaagaaaccccatgaaggaaaagaatagggaaaagctttcagcagttatttagcccttactcaaaatcagataattaacaatgaaggaaactctaaactccccttatggtctaccagtaattcatacttgaggaccatgactgtggggaatgaggcatcttttagcaagagctctcaccaattgtagattggtgtgaattgctaagggaaaaaccttatgcagagaaaagtttttgactggaaatacactgttttgcatcaagctggagtactggatggaaaactctacaataacattttgtgcataattgtagaaatacagattttgttgttataaggggagggtctgggtgcccaggagtagaatatgaagtgctaaatctgaatgtaagaaaaataatagtattgaatggggtatttactgttgattaacctccttagagaaaattaatgaatgagatgactaacggtagaaaagttattgcctaggagtgtgagactgatgttgctggacagaaagtgatccttagcccagtgtgtcagcgtccattgttactcatcactgcattgttgggcaattagtttgtaatttgttttaggcaatcactataaattataattatggacactgcatcagtatacataacatgaaggaataaaaaggatacagaattgtatatacatacttactgtaacacatctaaaaaaatgtatatgggtaaggacctgaaagatccatggaaaagttaacccagttgagatttttaaaaagttttacaaatacatataacacttatgtgctgggctttcttttaaatgctttccaagtgttaacttgtttagtcccctttactctgagataggtactgttaccccagttttacaaatggctaagctgaagcagagatgttgaaggatcctacctaaggggcacaactagtaagggagtagagctgagattggctccagagttcttgttttcagccaccattttatgctgcctctccagtgattttttttcccattttcttcagtgtttctatagcagagatttgataataaaaagaaaatcctaaacaatgagaaataaagttacctggtttctctgtc

SEQ ID NO: 35279 - DNA, 2417 bp, Homo sapiens
  source 1..2417: mol_type = unassigned DNA
gtcgacgccggggaagcagccgccattgtccgcggctgaggttgggatttgctgtgttcctgggcaggtgcctggtcaatcagtcctcgggatggcagccatcaacccgtgggcctcctggggtgcccttacggaccaatcttgggggatgacagctgttgacccatgggcctcctggggaaccagtgaccttcaaggacgtggccgtggacttcacccaagaagagtgggggcagctggaccttgttcagaggaccctgtaccgtgatgtgatgctggagacctatggtcacctgctctctgtgggaaatcagattgccaagcctgaggtcatctccctgttggagcaaggagaagagccgtggtcagtggagcaggcatgtcctcaacgcacttgtccagaatgggtgagaaatcttgaaagcaaagcattgatcccagcacagagcatttttgaggaagaacaatcccatggcatgaagttggaaagatatatatgggatgatccttggttctccaggttagaagttttgggatgtaaagaccaattagaaatgtaccacatgaaccagagtacagctatgaggcagatggtcttcatgcaaaagcaagtactatcccagagaagctctgaattctgtggacttggggcagagtttagccagaacttaaactttgttccatctcagagagtttctcagatagaacatttctataagcctgatacacatgctcaaagttggagatgtgactcagccataatgtatgcagataaggttacctgtgaaaataatgattatgacaaaactgtttatcagtccattcaacctatttaccctgcaagaatacaaactggagataatcttttcaaatgtactgatgctgttaaatctttcaatcatataatacattttggtgatcataaaggaattcacacaggagaaaaactctatgaatataaggaatgccatcaaatctttaaccagagcccatcatttaatgaacacccaaggcttcatgttggagaaaaccagtataattacaaagaatatgagaatatcttttatttctcatcctttatggaacatcaaaaaattggtactgtagagaaagcgtataaatacaatgaatgggagaaagtctttgggtatgactctttccttactcaacatacaagcacttacactgcagagaaaccctatgactacaatgaatgtgggacgtctttcatctggagctcttaccttattcaacataagaaaactcatactggagaaaaaccctatgaatgtgataaatgtggaaaagtttttaggaatcgctcagcccttacgaaacatgaacggactcacactggaataaaaccctatgaatgtaataaatgtggaaaagccttcagctggaattctcatcttattgtacataagagaattcatacaggagaaaaaccttatgtttgtaatgagtgtgggaaatctttcaactggaactctcatcttattggacatcagaggactcatacaggagagaaaccttttgaatgtactgaatgtgggaaatcattcagctggagctcccatcttattgcccatatgagaatgcatactggagagaaaccctttaaatgtgatgaatgtgaaaaagcttttagggactactcagcccttagtaaacatgaaagaactcattctggagcaaaaccatataaatgtactgaatgtggaaaatccttcagctggagctcccatcttattgcccatcagagaactcacacgggagagaaaccatataactgtcaggaatgtggcaaagcattcagagaacgctcagccctcactaaacatgagataattcattctggaattaagccctatgaatgtaataaatgtggaaaatcctgtagccagatggctcaccttgttagacatcaaaggactcatactggagaaaaaccctatgaatgcaataaatgtggaaaatccttcagtcagagctgtcaccttgttgctcatcggagaattcacactggtgagaaaccctataaatgtaatcagtgtgaaagatcctttaactgtagttctcacctcattgcacaccggagaactcatactggagagaaaccatacaggtgtaatgaatgtgggaaagcatttaatgagagttcatcccttattgtacacctaagaaaccatactggagaaaagccctacaaatgtaatcattgtgaaaaagcattttgtaagaattcttcccttattattcatcagagaatgcatagtggagagaaacgctttatatgcagtgaatgtggaaaagcctttagtggtcactcagccctacttcaacaccagagaaatcacagtgaagagaaactgaattgaatttatgcgagtttttcgtttcttgtacatttgaca

SEQ ID NO: 35280 - DNA, 2009 bp, Homo sapiens
  source 1..2009: mol_type = unassigned DNA
gcgctccggtcgacgccggggaagcagccgccattgtccgcggctgaggtgaggcctttgctcaggctgtggggccgccgtagctgcggggcttggggggtcaggagagccggctgggagaggcggcgtcagggtgggtcctgcgcctgccctttccgcgccggctttgcgccgtcgttgccgtcggttctccagccagcagcctgcctccggcctcccgcctccgggcgttcttcgttttctggtcggacgggcctgggtgaactctgctgcacgtcggctccgcgggcctttgtccccgaggccgcgccgggagctcccaagcgcactcctgggccggacctcggcgcgggacaaaagccaaacgccccaggcgggcagaccccgatcctgctgcgccgccttcaagggggaccgccggccgcgagccaggttgggatttgctgtgttcctgggcaggtgcctggtcaatcagtcctcgggatggcagccatcaacccgtgggcctcctggggtgcccttacggaccaatcttgggggatgacagctgttgacccatgggcctcctgggctctgtgtcctcagtatcctgcctggcacgtggagggaagcctggaggaggggaggagggccactgggctcccagcagcccaggttcaggaaccagtgaccttcaaggacgtggccgtggacttcacccaagaagagtgggggcagctggaccttgttcagaggaccctgtaccgtgatgtgatgctggagacctatggtcacctgctctctgtgggaaatcagattgccaagcctgaggtcatctccctgttggagcaaggagaagagccgtggtcagtggagcaggcatgtcctcaacgcacttgtccagaatgggtgagaaatcttgaaagcaaagcattgatcccagcacagagcatttttgaggaagaacaatcccatggcatgaagttggaaagatatatatgggatgatccttggttctccaggttagaagttttgggatgtaaagaccaattagaaatgtaccacatgaaccagagtacagctatgaggcagatggtcttcatgcaaaagcaagtactatcccagagaagctctgaattctgtggacttggggcagagtttagccagaacttaaactttgttccatctcagagagtttctcagatagaacatttctataagcctgatacacatgctcaaagttggagatgtgactcagccataatgtatgcagataaggttacctgtgaaaataatgattatgacaaaactgtttatcagtccattcaacctatttaccctgcaagaatacaaactggagataatcttttcaaatgtactgatgctgttaaatctttcaatcatataatacattttggtgatcataaaggaattcacacaggagaaaaactctatgaatataaggaatgccatcaaatctttaaccagagcccatcatttaatgaacacccaaggcttcatgttggagaaaaccagtataattacaaagaatatgagaatatcttttatttctcatcctttatggaacatcaaaaaattggtactgtagagaaagcgtataaatacaatgaatgggagaaagtctttgggtatgactctttccttactcaacatacaagcacttacactgcagagaaaccctatgactacaatgaatgtgggacgtctttcatctggagctcttaccttattcaacataagaaaactcatactggagaaaaaccctatgaatgtgataaatgtggaaaagtttttaggaatcgctcagcccttacgaaacatgaacggactcacactggaataaaaccctatgaatgtaataaatgtggaaaagccttcagctggaattctcatcttattgtacataagagaattcatacaggagaaaaaccttatgtttgtaatgagtgtgggaaatctttcaactggaactctcatcttattggacatcagaggactcatacaggaga

SEQ ID NO: 35281 - DNA, 4020 bp, Homo sapiens
  source 1..4020: mol_type = unassigned DNA
tcttccggccgtgcggtccgcgcttttgtcccgctggcggccgggttcccgcggcgccgccacagccagttgccttcttcctcatctctgcagtaactgtcttcatggtttcatagccttctccctgatacccctccccagtgtcacatttgaagacgagcactgaggatgaggaaccaactgaagaatatgaaaatgttggaaatgcagcatctaagtggccaaaagtggaggatcctatgcctgaatctaaggttggtgacacatgtgtttgggatagcaaggtagagaatcaacagaaaaagcctgtggaaaacaggatgaaggaggacaaaagcagcatcagggaagcaatcagcaaagccaagagtacagcaaatataaagacagaacaggaaggtgaggcatctgagaagagcttgcatctgagcccacagcatatcacacaccagactatgcctataggacagagaggcagtgagcaaggcaaacgtgtggagaacattaatggaacctcctaccctagtctacagcagaaaaccaatgctgttaagaaattacataaatgtgatgaatgtgggaaatccttcaaatataattcccgccttgttcaacataaaattatgcacactggggaaaagcgctatgaatgtgatgactgtggagggactttccggagcagctcgagccttcgggtccacaaacggatccacactggggagaagccgtacaagtgtgaggaatgtgggaaagcctacatgtcctactccagccttataaaccacaaaagcacccattctggggagaagaactgtaaatgtgatgaatgtggaaaatccttcaattatagctctgttctggaccagcataaaaggatccacactggggagaagccctatgaatgtggtgagtgtgggaaggccttcaggaacagctctgggctcagagtccacaaaaggatccacacgggggagaagccctatgaatgcgacatctgtgggaaaaccttcagtaacagctctggccttagggtccataaaaggatccacacaggtgagaaaccttacgaatgtgatgagtgtgggaaggccttcattacttgtagaacacttctcaaccataaaagcatccactttggagataaaccctataaatgtgatgagtgtgagaaatcttttaattatagctctcttctcattcagcataaagtcatccacactggagagaaaccttatgaatgtgatgaatgtgggaaggctttcaggaacagctcaggcctcatagtgcataaaaggatccacacaggagagaaaccttacaagtgtgatgtctgtggcaaagcattcagctatagctcaggcctcgcagtccataaaagcattcaccctgggaagaaagcccatgaatgtaaggagtgtgggaaatcctttagttataactcactacttcttcaacacagaactattcataccggagagagaccttatgtatgtgatgtgtgtgggaaaacgttcagaaacaatgcaggcctcaaagtccacaggaggctccatactggggaaaaaccatataagtgtgatgtgtgtgggaaagcctatatctcacgctctagccttaaaaatcacaaaggaatccaccttggggagaagccctataaatgtagctattgtgagaaatccttcaactacagctctgcccttgaacagcataaaaggattcataccagggaaaaaccctttgggtgtgatgagtgtggtaaagctttcagaaataattctggccttaaagtacataaacgaatccacactggggaacgaccttacaaatgtgaagaatgtgggaaagcatacatctctctctcgagccttataaatcataaaagtgtacaccctggggagaagccctttaagtgtgacgagtgtgagaaggccttcatcacataccgaacccttacaaaccacaaaaaagttcatcttggggagaagccctacaaatgtgatgtgtgtgagaaatcttttaattacacatcgctcctttctcagcacagaagggtccacactagagagaaaccctatgaatgtgacaggtgtgagaaggtcttcagaaacaactcaagccttaaagttcataaaagaatccatactggggagaggccctatgaatgtgatgtgtgtggaaaagcctacatctcacactcaagccttattaaccataagagtacccaccctggcaggacaccccatacatgtgatgaatgtggaaaagcttttttctcaagcagaactcttataagccataaaagagtccatcttggggagaaacccttcaagtgtgttgagtgtgggaaatctttcagttacagctctctcctttctcagcacaagaggatccacacaggggagaaaccctatgtgtgtgataggtgtgggaaggccttcaggaacagctcaggcctcacagtgcataaaaggatccacacaggtgagaaaccctatgaatgtgatgagtgtgggaaggcatacatctcacactcaagtcttatcaatcataaaagtgtccaccaggggaagcagccctataattgtgagtgtgggaaatccttcaattatagatcagtccttgaccagcacaaaaggatccacactggaaagaagccataccgatgtaatgagtgtggtaaggcttttaatatcagatcaaatctcaccaagcataaaagaacccatactggagaggaatctttaaatgtgatatatgtgggaagttatagtggcacatcccagaagagaacctatgagggagggaatgccctggatgggggcaggatgaggatgcctctgtagcaggcagagcttaccaagtctctccgaactcaaatggaagaaataccttatgaatgtaagaatgtagggggtcatggcttgtaatttacacagtgtaaatgaaaccatcctagaggattatgaggaatcctttctatgtgattttcaatcatagcaagcaagaaaggctccagtgtcaaggtagttcagctcttacaggatataaaacagtccatacttgagagaaaaacttagatctgagtgatggaatgtgaagcaaatcttcaaaatcagtagacatttctggacataaaacacagatgaggaaagggcttcaattagaagttacgtaatcaccatcagaaagttcatgtttggtaaattctgttactagaaatgtaggaaattcaggtatagctttgaatcccaattacacattggtcagtgggaaaactaagggcctccaacaggcaaattcagggaggataggtttcagggaatataaatttatttaatattagtggtctttaagtataaacttgatgtaattggtttgggagggggcagtgatgatgacttctgaaacaaaatttggatttccttttaggaaaagtagaaagcatagacttacaagtctaacaggagataggagagagtcactcataaaaaatgcaaattgatgaacgtactattgtgatacattagttgaatggatgaaacttttttaaagtttcagatgaactcccataatgaatgatgaatttgtgatgagggataacctggaagtggtattcacacattatgctacaataaaaggttctaccgtggagaggattttgacacattcagtaactaatggaacacaccgtcaacatgaattcgcaccttacatgacagaagtgattcagggattcctatgaatagaaatgctgagaaggaacgcattttattgcagaagctaaaaagctaaagtaccagtcatctagagagaaggaaattaatgtttcttaataatcctgttaaatgtttgattgtttttggaatgtgttattgtaaagatgtcatgcaggacatgtatatgttgtctgttgtaaaatgttaacgaatactttgttcagggctcactctctctttgtcatgaaagccagctccttgtggcgaggtaaagtggaattccaataaagaaattccttaaatc

SEQ ID NO: 35282 - DNA, 1600 bp, Homo sapiens
  source 1..1600: mol_type = unassigned DNA
tgactgtggagggactttccggagcagctcgagccttcgggtccacaaacggatccacactggggagaagccgtacaagtgtgaggaatgtgggaaagcctacatgtcctactccagccttataaaccacaaaagcacccattctggggagaagaactgtaaatgtgatgaatgtggaaaatccttcaattatagctctgttctggaccagcataaaaggatccacactggggagaagccctatgaatgtggtgagtgtgggaaggccttcaggaacagctctgggctcagagtccacaaaaggatccacacgggggagaagccctatgaatgcgacatctgtgggaaaaccttcagtaacagctctggccttagggtccataaaaggatccacacaggtgagaaaccttacgaatgtgatgagtgtgggaaggccttcattacttgtagaacacttctcaaccataaaagcatccactttggagataaaccctataagtgtgatgagtgtggtaaagctttcagaaataattctggccttaaagtacataaacgaatccacactggggaacgaccttacaaatgtgaagaatgtgggaaagcatacatctctctctcgagccttataaatcataaaagtgtacaccctggggagaagccctttaagtgtgacgagtgtgagaaggccttcatcacataccgaacccttacaaaccacaaaaaagttcatcttggggagaagccctacaaatgtgatgtgtgtgagaaatcttttaattacacatcgctcctttctcagcacagaagggtccacactagagagaaaccctatgaatgtgacaggtgtgagaaggtcttcagaaacaactcaagccttaaagttcataaaagaatccatactggggagaggccctatgaatgtgatgtgtgtggaaaagcctacatctcacactcaagccttattaaccataagagtacccaccctggcaggacaccccatacatgtgatgaatgtggaaaagcttttttctcaagcagaactcttataagccataaaagagtccatcttggggagaaacccttcaagtgtgttgagtgtgggaaatctttcagttacagctctctcctttctcagcacaagaggatccacacaggggagaaaccctatgtgtgtgataggtgtgggaaggccttcaggaacagctcaggcctcacagtgcataaaaggatccacacaggtgagaaaccctatgaatgtgatgagtgtgggaaggcatacatctcacactcaagtcttatcaatcataaaagtgtccaccaggggaagcagccctataattgtgagtgtgggaaatccttcaattatagatcagtccttgaccagcacaaaaggatccacactggaaagaagccataccgatgtaatgagtgtggtaaggcttttaatatcagatcaaatctcaccaagcataaaagaacccatactggagaggaatctttaaatgtgatatatgtgggaagttatagtggcacatcccagaagagaacctatgagggagggaatgccctggatgggggcaggatgaggatgcctctgtag

SEQ ID NO: 35283 - DNA, 3415 bp, Homo sapiens
  source 1..3415: mol_type = unassigned DNA
cgtgcggtccgcgcttttgtcccgctggcggccgggttcccgcggcgccgccacagccatgtcacatttgaagacgagcactgaggatgaggaaccaactgaagaatatgaaaatgttggaaatgcagcatctaagtggccaaaagtggaggatcctatgcctgaatctaaggttggtgacacatgtgtttgggatagcaaggtagagaatcaacagaaaaagcctgtggaaaacaggatgaaggaggacaaaagcagcatcagggaagcaatcagcaaagccaagagtacagcaaatataaagacagaacaggaaggtgaggcatctgagaagagcttgcatctgagcccacagcatatcacacaccagactatgcctataggacagagaggcagtgagcaaggcaaacgtgtggagaacattaatggaacctcctaccctagtctacagcagaaaaccaatgctgttaagaaattacataaatgtgatgaatgtgggaaatccttcaaatataattcccgccttgttcaacataaaattatgcacactggggaaaagcgctatgaatgtgatgactgtggagggactttccggagcagctcgagccttcgggtccacaaacggatccacactggggagaagccgtacaagtgtgaggaatgtgggaaagcctacatgtcctactccagccttataaaccacaaaagcacccattctggggagaagaactgtaaatgtgatgaatgtggaaaatccttcaattatagctctgttctggaccagcataaaaggatccacactggggagaagccctatgaatgtggtgagtgtgggaaggccttcaggaacagctctgggctcagagtccacaaaaggatccacacgggggagaagccctatgaatgcgacatctgtgggaaaaccttcagtaacagctctggccttagggtccataaaaggatccacacaggtgagaaaccttacgaatgtgatgagtgtgggaaggccttcattacttgtagaacacttctcaaccataaaagcatccactttggagataaaccctataaatgtgatgagtgtgagaaatcttttaattatagctctcttctcattcagcataaagtcatccacactggagagaaaccttatgaatgtgatgaatgtgggaaggctttcaggaacagctcaggcctcatagtgcataaaaggatccacacaggagagaaaccttacaagtgtgatgtctgtggcaaagcattcagctatagctcaggcctcgcagtccataaaagcattcaccctgggaagaaagcccatgaatgtaaggagtgtgggaaatcctttagttataactcactacttcttcaacacagaactattcataccggagagagaccttatgtatgtgatgtgtgtgggaaaacgttcagaaacaatgcaggcctcaaagtccacaggaggctccatactggggaaaaaccatataagtgtgatgtgtgtgggaaagcctatatctcacgctctagccttaaaaatcacaaaggaatccaccttggggagaagccctataaatgtagctattgtgagaaatccttcaactacagctctgcccttgaacagcataaaaggattcataccagggaaaaaccctttgggtgtgatgagtgtggtaaagctttcagaaataattctggccttaaagtacataaacgaatccacactggggaacgaccttacaaatgtgaagaatgtgggaaagcatacatctctctctcgagccttataaatcataaaagtgtacaccctggggagaagccctttaagtgtgacgagtgtgagaaggccttcatcacataccgaacccttacaaaccacaaaaaagttcatcttggggagaagccctacaaatgtgatgtgtgtgagaaatcttttaattacacatcgctcctttctcagcacagaagggtccacactagagagaaaccctatgaatgtgacaggtgtgagaaggtcttcagaaacaactcaagccttaaagttcataaaagaatccatactggggagaggccctatgaatgtgatgtgtgtggaaaagcctacatctcacactcaagccttattaaccataagagtacccaccctggcaggacaccccatacatgtgatgaatgtggaaaagcttttttctcaagcagaactcttataagccataaaagagtccatcttggggagaaacccttcaagtgtgttgagtgtgggaaatctttcagttacagctctctcctttctcagcacaagaggatccacacaggggagaaaccctatgtgtgtgataggtgtgggaaggccttcaggaacagctcaggcctcacagtgcataaaaggatccacacaggtgagaaaccctatgaatgtgatgagtgtgggaaggcatacatctcacactcaagtcttatcaatcataaaagtgtccaccaggggaagcagccctataattgtgagtgtgggaaatccttcaattatagatcagtccttgaccagcacaaaaggatccacactggaaagaagccataccgatgtaatgagtgtggtaaggcttttaatatcagatcaaatctcaccaagcataaaagaacccatactggagaggaatctttaaatgtgatatatgtgggaagttatagtggcacatcccagaagagaacctatgagggagggaatgccctggatgggggcaggatgaggatgcctctgtagcaggcagagcttaccaagtctctccgaactcaaatggaagaaataccttatgaatgtaagaatgtagggggtcatggcttgtaatttacacagtgtaaatgaaaccatcctagaggattatgaggaatcctttctatgtgattttcaatcatagcaagcaagaaaggctccagtgtcaaggtagttcagctcttacaggatataaaacagtccatacttgagagaaaaacttagatctgagtgatggaatgtgaagcaaatcttcaaaatcagtagacatttctggacataaaacacagatgaggaaagggcttcaattagaagttacgtaatcaccatcagaaagttcatgtttggtaaattctgttactagaaatgtaggaaattcaggtatagctttgaatcccaattacacattggtcagtgggaaaactaagggcctccaacaggcaaattcagggaggataggtttcagggaatataaatttatttaatattagtggtctttaagtataaacttgatgtaattggtttgggagggggcagtgatgatgacttctgaaacaaaatttggatttccttttaggaaaagtagaaagcatagacttacaagtctaacaggagataggagagagtcactcataaaaaatgcaa

SEQ ID NO: 35284 - DNA, 749 bp, Homo sapiens
  source 1..749: mol_type = unassigned DNA
ttttttttggtcggtgagtgatgatgataagctcccgctgcaggtgtgaatagagaccccggaggtgcgtcctagccctcatctggggaagcgcacctgcatacagacgggtgcaccggggaggaggcgacctgccgcgtgttcctgcaagcagaaaaggagttaactagtgtcacatttgaagacgagcactgaggatgaggaaccaactgaagaatatgaaaatgttggaaatgcagcatctaagtggccaaaagtggaggatcctatgcctgaatctaaggttggtgacacatgtgtttgggatagcaaggtagagaatcaacagaaaaagcctgtggaaaacaggatgaaggaggacaaaagcagcatcagggaagcaatcagcaaagccaagagtacagcaaatataaagacagaacaggaaggtgaggcatctgagaagagcttgcatctgagcccacagcatatcacacaccagactatgcctataggacagagaggcagtgagcaaggcaaacgtgtggagaacattaatggaacctcctaccctagtctacagcagaaaaccaatgctgttaagaaattacataaatgtgatgaatgtgggaaatccttcaaatataattcccgccttgttcaacataaaattatgcacactggggaaaagcgctatgaatgtgatgactgtggagggactttccggagcagctcgagccttcgggtccacaaacggatccacactgggg

SEQ ID NO: 35285 - DNA, 544 bp, Homo sapiens
  source 1..544: mol_type = unassigned DNA
gtgcggtccgcgcttttgtcccgctggcggccgggttcccgcggcgccgccacagccagtacgttgccttcttcctcatctctgcagtaactgtcttcatggtttcatagccttctccctgatacccctccccagtgtcacatttgaagacgagcactgaggatgaggaaccaactgaagaatatgaaaatgttggaaatgcagcatctaagtggccaaaagtggaggatcctatgcctgaatctaaggttggtgacacatgtgtttgggatagcaaggtagagaatcaacagaaaaagcctgtggaaaacaggatgaaggaggacaaaagcagcatcagggaagcaatcagcaaagccaagagtacagcaaatataaagacagaacaggaaggtgaggcatctgagaagagcttgcatctgagcccacagcatatcacacaccagactatgcctataggacagagaggcagtgagcaaggcaaacgtgtggagaacattaatggaacctcctaccctagtctacagcagaaaaccaatgctgt

SEQ ID NO: 35286 - DNA, 542 bp, Homo sapiens
  source 1..542: mol_type = unassigned DNA
ccgctgcaggtgtgaatagagaccccggaggtgcgtcctagccctcatctggggaagcgcacctgcatacagacgggtgcaccggggaggaggcgacctgccgcgtgttcctgcaagcagaaaaggagttaactaggttgccttcttcctcatctctgcagtaactgtcttcatggtttcatagccttctccctgatacccctccccagtgtcacatttgaagacgagcactgaggatgaggaaccaactgaagaatatgaaaatgttggaaatgcagcatctaagtggccaaaagtggaggatcctatgcctgaatctaaggttggtgacacatgtgtttgggatagcaaggtagagaatcaacagaaaaagcctgtggaaaacaggatgaaggaggacaaaagcagcatcagggaagcaatcagcaaagccaagagtacagcaaatataaagacagaacaggaaggtgaggcatctgagaagagcttgcatctgagcccacagcatatcacacaccagactatgcctataggacagagag

SEQ ID NO: 35287 - DNA, 4010 bp, Homo sapiens
  source 1..4010: mol_type = unassigned DNA
gtgcggtccgcgcttttgtcccgctggcggccgggttcccgcggcgccgccacagccagttgccttcttcctcatctctgcagtaactgtcttcatggtttcatagccttctccctgatacccctccccagtgtcacatttgaagacgagcactgaggatgaggaaccaactgaagaatatgaaaatgttggaaatgcagcatctaagtggccaaaagtggaggatcctatgcctgaatctaaggttggtgacacatgtgtttgggatagcaaggtagagaatcaacagaaaaagcctgtggaaaacaggatgaaggaggacaaaagcagcatcagggaagcaatcagcaaagccaagagtacagcaaatataaagacagaacaggaaggtgaggcatctgagaagagcttgcatctgagcccacagcatatcacacaccagactatgcctataggacagagaggcagtgagcaaggcaaacgtgtggagaacattaatggaacctcctaccctagtctacagcagaaaaccaatgctgttaagaaattacataaatgtgatgaatgtgggaaatccttcaaatataattcccgccttgttcaacataaaattatgcacactggggaaaagcgctatgaatgtgatgactgtggagggactttccggagcagctcgagccttcgggtccacaaacggatccacactggggagaagccgtacaagtgtgaggaatgtgggaaagcctacatgtcctactccagccttataaaccacaaaagcacccattctggggagaagaactgtaaatgtgatgaatgtggaaaatccttcaattatagctctgttctggaccagcataaaaggatccacactggggagaagccctatgaatgtggtgagtgtgggaaggccttcaggaacagctctgggctcagagtccacaaaaggatccacacgggggagaagccctatgaatgcgacatctgtgggaaaaccttcagtaacagctctggccttagggtccataaaaggatccacacaggtgagaaaccttacgaatgtgatgagtgtgggaaggccttcattacttgtagaacacttctcaaccataaaagcatccactttggagataaaccctataaatgtgatgagtgtgagaaatcttttaattatagctctcttctcattcagcataaagtcatccacactggagagaaaccttatgaatgtgatgaatgtgggaaggctttcaggaacagctcaggcctcatagtgcataaaaggatccacacaggagagaaaccttacaagtgtgatgtctgtggcaaagcattcagctatagctcaggcctcgcagtccataaaagcattcaccctgggaagaaagcccatgaatgtaaggagtgtgggaaatcctttagttataactcactacttcttcaacacagaactattcataccggagagagaccttatgtatgtgatgtgtgtgggaaaacgttcagaaacaatgcaggcctcaaagtccacaggaggctccatactggggaaaaaccatataagtgtgatgtgtgtgggaaagcctatatctcacgctctagccttaaaaatcacaaaggaatccaccttggggagaagccctataaatgtagctattgtgagaaatccttcaactacagctctgcccttgaacagcataaaaggattcataccagggaaaaaccctttgggtgtgatgagtgtggtaaagctttcagaaataattctggccttaaagtacataaacgaatccacactggggaacgaccttacaaatgtgaagaatgtgggaaagcatacatctctctctcgagccttataaatcataaaagtgtacaccctggggagaagccctttaagtgtgacgagtgtgagaaggccttcatcacataccgaacccttacaaaccacaaaaaagttcatcttggggagaagccctacaaatgtgatgtgtgtgagaaatcttttaattacacatcgctcctttctcagcacagaagggtccacactagagagaaaccctatgaatgtgacaggtgtgagaaggtcttcagaaacaactcaagccttaaagttcataaaagaatccatactggggagaggccctatgaatgtgatgtgtgtggaaaagcctacatctcacactcaagccttattaaccataagagtacccaccctggcaggacaccccatacatgtgatgaatgtggaaaagcttttttctcaagcagaactcttataagccataaaagagtccatcttggggagaaacccttcaagtgtgttgagtgtgggaaatctttcagttacagctctctcctttctcagcacaagaggatccacacaggggagaaaccctatgtgtgtgataggtgtgggaaggccttcaggaacagctcaggcctcacagtgcataaaaggatccacacaggtgagaaaccctatgaatgtgatgagtgtgggaaggcatacatctcacactcaagtcttatcaatcataaaagtgtccaccaggggaagcagccctataattgtgagtgtgggaaatccttcaattatagatcagtccttgaccagcacaaaaggatccacactggaaagaagccataccgatgtaatgagtgtggtaaggcttttaatatcagatcaaatctcaccaagcataaaagaacccatactggagaggaatctttaaatgtgatatatgtgggaagttatagtggcacatcccagaagagaacctatgagggagggaatgccctggatgggggcaggatgaggatgcctctgtagcaggcagagcttaccaagtctctccgaactcaaatggaagaaataccttatgaatgtaagaatgtagggggtcatggcttgtaatttacacagtgtaaatgaaaccatcctagaggattatgaggaatcctttctatgtgattttcaatcatagcaagcaagaaaggctccagtgtcaaggtagttcagctcttacaggatataaaacagtccatacttgagagaaaaacttagatctgagtgatggaatgtgaagcaaatcttcaaaatcagtagacatttctggacataaaacacagatgaggaaagggcttcaattagaagttacgtaatcaccatcagaaagttcatgtttggtaaattctgttactagaaatgtaggaaattcaggtatagctttgaatcccaattacacattggtcagtgggaaaactaagggcctccaacaggcaaattcagggaggataggtttcagggaatataaatttatttaatattagtggtctttaagtataaacttgatgtaattggtttgggagggggcagtgatgatgacttctgaaacaaaatttggatttccttttaggaaaagtagaaagcatagacttacaagtctaacaggagataggagagagtcactcataaaaaatgcaaattgatgaacgtactattgtgatacattagttgaatggatgaaacttttttaaagtttcagatgaactcccataatgaatgatgaatttgtgatgagggataacctggaagtggtattcacacattatgctacaataaaaggttctaccgtggagaggattttgacacattcagtaactaatggaacacaccgtcaacatgaattcgcaccttacatgacagaagtgattcagggattcctatgaatagaaatgctgagaaggaacgcattttattgcagaagctaaaaagctaaagtaccagtcatctagagagaaggaaattaatgtttcttaataatcctgttaaatgtttgattgtttttggaatgtgttattgtaaagatgtcatgcaggacatgtatatgttgtctgttgtaaaatgttaacgaatactttgttcagggctcactctctctttgtcatgaaagccagctccttgtggcgaggtaaagtggaattccaataaagaaattccttaaatc

SEQ ID NO: 35288 - DNA, 2864 bp, Homo sapiens
  source 1..2864: mol_type = unassigned DNA
aactgtccattcagatgggcccgggagaggagggcagggcctgcgcctccctacggagcctttgtttctggcgaccgtccccacccgggctcgcgtctccgtttctccgagaggcccaaggtgtctccgccgcagcctctgtcgcgccgtgacctgtacaggtcgcgggagtcgtagggaggacgccgggacacctggaagccgagaaatggattcagtggcctttgaggatgtggctgtgaacttcaccctggaggagtgggctttgctggatccttcccagaagaatctctacagggatgtgatgcgggaaaccttcaggaacctggcttctgtaggaaaacaatgggaagaccagaacattgaagacccattcaaaattcccaggagaaatataagtcatattccagagagactctgtgaaagtaaagaaggtggtcaaggtgaagaaaccttcagccagattccagatggtattctgaacaagaaaactcctggagtaaaaccgtgtgaaagcagtgtgtgtggagaagttggcatgggtccttcatcacttaataggcacatcagagatcacactggacgtgaaccaaatgaatatcaggaatatggaaagaagtcatatacacgtaaccagtgtggacgagccttgagttatcatcgctcttttccagtacgtgaaaggactcatcctggaggaaagccctatgattgtaaggaatgtggagaaacctttatttctcttgtaagcattcgaagacacatgttaacgcataggggaggtgtaccttacaaatgtaaggtgtgtgggaaagcctttgattatcccagtttatttcgtatacatgaaagaagtcacactggagagaaaccttatgaatgcaagcaatgtgggaaagccttcagttgttccagttacattagaatacatgaaaggactcacactggagataaaccctatgaatgcaagcagtgtgggaaagctttcagttgttccaagtacattcgaatccatgaacgaactcacacaggagagaaaccctacgaatgtaaacagtgcggtaaagcctttaggtgcgccagttctgttcgaagtcacgagaggactcacaccggagagaaactttttgaatgtaaggaatgcgggaaggctttgacttgtcttgcaagtgttagaagacacatgataaagcacactggcaatggaccttataaatgtaaggtgtgtgggaaagcctttgatttccccagttcatttcgaatccatgaaaggacccacactggagagaaaccctatgattgtaagcaatgtgggaaagccttcagttgttccagttcgtttcgaaaacatgaaagaattcacactggagagaaaccctataaatgtacaaaatgtgggaaagccttcagtcgttccagttacttccgaatccatgaaagaactcacactggagagaaaccctatgaatgtaagcaatgtgggaaagccttcagtcgatccacttactttcgagtacatgaaaaaattcatactggagagaaaccctatgagaaccctaaccctaacgcttcagttgtcccagttctttcatgagcatgaaaggagtcacatagagaaaccccatgaaagtaagaaatttgggaaagccttcagtcctttctgtttctttcaactacgtgaaaggattcacagtggagaaagaccctgtaagataattggctttaaattacgagagacttgtgataggacagtaaaacctagagttggagttggatctctggattgtgttatgtcagtgttggtaggttaggaactagatttcccagaatccattccatttgtgattccatgatacaattcaccagtaacctatcttacatgagattcggaagtaagttaagaaggcattagtcatggtttggaagcaccatacagggagacagctgtgtgaatacaggctgtatggacacttgcttccatcccattttcctgcttctttgggttgccaatcaagagtatcctcaaaacgacttgactttaattttctcggaggtgataggcttccacacaggtctccagaagccctgcattgaatatccatccacactttggttttccttcagacattattatgtctgtactaggcaactaattcagactgtcctggttgggaatattctgtgatgctctgactcccctagtctgtagacggaattggcatacggtctaatttgtgtagtaagcacctttgttcatactagtagtgactgtattcttgattcagcctgatagctaccatgctgctgtcaaaaccaaccagaggggagcttgttcttctgctgtagtgtgcagtgactggcctcacccaggactttgatgtgagaatgagcactttcctctatcaggaaatttcaagtgtttcctgttattcgtagctcaatgtaatgcctcagttcattttcagttgtttgattatatgtgactaatatgtattttttattcaaacaagacttctgtacatgtttcttcaaaacagtttattaactgtcttcagtcttggattacatcaagtttataattttggcaaattgttaagacactgtgaagtcagcgttaaccatgtgcatacaacttaaggaattttttcctcctcatgtaaattttacttttcatgcttatatagtttcaacttttatcttcatagtaatttctcatctactcataataccaaaagttaagtcatgctgttttgtgtgctctcttgctaaagaccgcagagaccatacctgttgtcaaagagggtgtaataaactgtaataataatcatgaccacaaaccataaaggactgtgtgatgtatcagt

SEQ ID NO: 35289 - DNA, 3847 bp, Homo sapiens
  source 1..3847: mol_type = unassigned DNA
ggtgcatggaaggatttttttgcagatgagagggaatcgggattaataaggggaacttgcgaccccgcgtctcgagctggccgtccctggccttgggctcaccggggcctcggcccccaagacctgacaactggagtccgcgaccacaactgggagaactacaactcccaggatgccgcgcaccgcctgcgcccgagctcgacgaggcctcgcacagccaatgggagggtccgggggcgggaactcggagtacgtgcgttgtgacgcaccgacggcgacgtcggggtttgtgtgcgcgagaggccgccgataaaggttgggtgcctcgcgccgggggccgttgggagggagtgcgcccctgccccccctccccggtccccacagctgcaccgccgctgccggggccccaccttcccgtcgacccccgcgggaaggtcctggggctgccaccctcgttcccccgattggggccgcagaggcatgatcaaggacagggttgcctgccaagaacaggaggggagaggaggggctggaggtttcaggagaaagaagcatgtcaggtgtgatggtcggctcccacgcggacatggcgccggcctctactgcggagggggccggggagaagccaggccctgcggcccctgccccggcggcccagtacgaatgtggggagtgtggcaagtcattccggtggtcgtcccggctcctgcaccaccagcgcacgcacacaggcgagcggccctacaagtgcccagactgccccaaggctttcaaaggctcctcggccctgctctaccaccagcgaggccacacgggcgagcggccctaccagtgccccgactgtcccaaggccttcaagcgctcctctctgctgcagatccaccgtagcgtgcacaccggcctgcgggccttcatctgcggccagtgcggcctggccttcaagtggtcgtcccactaccagtaccacttaaggcagcacacaggcgagcgcccctacccgtgcccggactgccccaaggccttcaagaactcgtccagcctgcggcgccaccgccacgtgcacaccggcgagcggccctacacctgtggagtctgcgggaagagcttcacgcagagcaccaacctgcggcagcaccagcgcgtgcacacgggcgagcggcccttccgctgcccgctctgccccaagaccttcacccactcctccaacctgctgctgcaccagcgcacgcacggcgccgcccccgccccgggtaccgcctccgcggccccgcccccccagtcccgggagcccggcaaggtcttcgtgtgcgacgcctacctgcagcggcacctccagccccacagcccgcccgcgcctcccgccccgccgcccccgcccccgcccgtggtgcctgagctctttttggcggcggcggagaccacggtggagctggtgtaccgctgcgatggctgcgagcagggattcagcagcgaggagctgctcctggagcaccagccgtgccccgggcccgatgcggcgccccagccccaggaggcacccgccgaggcgcccaaggccgaccagccaccgtcccctctgccgcagccccctcctcccgccgccgcccccgcgcctggctttgcctgtctgccctgcggcaagtccttccggacggtggctgggctctcccgccaccagcacagccacggggctgccggcgggcaagcgttccgctgcggcagctgcgacggctccttcccgcagctggccagcctcctggcgcatcagcagtgccacgtggaagaggccgcggccgggcgcccgcccccgcaggctgaggctgcggaggtgacctgcccccaggaaccgctggcgcctgccgcccccgtcccgccgccacccccgtccgcccccgcttctgcggagcggccctacaaatgtgccgagtgcggcaagtccttcaagggctcctccgggctgcgctaccacctgcgggaccacacgggcgagcggccctaccagtgtggcgagtgcggcaaggccttcaagcgctcctccctgctggccatccaccagcgggtgcacacgggcctgcgggccttcacctgtggccagtgcggcctcaccttcaagtggtcgtcccactaccagtaccacctgcggctgcactctggcgagcggccctacgcctgcggggagtgtggcaaggccttccgcaacacgtcgtgcctgcgtcgccaccgccacgtgcacactggcgagaggccccacgcctgcggtgtctgcggcaagagcttcgcgcagacctccaacctgcggcagcaccagcgcgtgcacacgggcgagcggcccttccgctgcccgctctgccccaagaccttcacccactcctccaacctgctgctgcaccagcgcacgcactcggcggagcgccccttcacctgccccatctgcggtcgcggcttcgttatggccgcctatctgcagcggcacctgaggacgcacgccccggccaacacgcctcccagcaccacagcccctgccgccggcccccagccccctgctccactggctgctgcgcgggccccgccagccacccaagatgtccacgtcctgccccacctccaggccacgctctccctcgaggtggcggggggcacggcccaggccccgagcttggggccagcagcgcccaactctcagacgttcctcctggtgcaaactgcccagggcctccagctgatccccagcagcgtgcagccccctacacctccgccccctcccgcacctcccaagctcatcctgctgccctcctccagtgctggggctgggggcggccgtgcaaggcagggcccgcgggcagtggggaaagcgggccagggggcgggagtggtctggctgccaggccctgggggtctaggggtgcagggagcggccagcgctggggccagcgggacagggcagagcctcatcgttctgcagaatgtggggggtggggaggcagggccacaggaaatgagtggggtgcagctccagcccctccgaccagccccagaagtaaccacggtccagctccagccagcgcaggaggtgaccacagtccagctccagccagcacaggaagtaaccacggtccagctccagccagcacaggaggtgaccacggtccagctccagcccgtggccggccagctctccaattccagtgggggagctgtggctactgaggcacccaacctgctggttgttcagagcggggcagctgaggagttgctcactggcccgggccccggggaggcgggggatggcgaggccagcactggtgtggtccaggatgtcctctttgagacactccagacggacgagggcttgcagagcgtgctggtgctgagcggggccgatggcgaacagactcgactctgcgtacaggaggtagaaacacttcctcctgggctgacggagccgcctgccaccggcccacccggacagaaactcctcatcatccgcagcgccccagccactgagctgctggacagcagcaacactggaggaggcaccgccacgctgcagctcctggccccaccgccgtcaggcccagcctcgggccccgcggggctccccggggctccagcctcccagatggtgcaagtggtccccgcaggagctgggcctggtgttatgacccctcagggcctgccctccatccagattgtccagactctacccgcagtccagctggtgcacacgttttgaggagaggcagtgattcccctcccgccccgcacagagaccccgactcactgccagccggggcggggcagggtgccgcaggctgggcttgctaataaagacccgagtctccccgcc

SEQ ID NO: 35290 - DNA, 2791 bp, Homo sapiens
  source 1..2791: mol_type = unassigned DNA
ctggtggccgggaacgcccactcacccggacaagtcgcggcccttccaagcctcacactgctttcgtaggatcaattccgaatacccaaactcggagatatcacgaggactcccccgggcccccaaacgcacctctcctctggctggaatgggagcctccagaagcagtgcgagaccacggccagcgacagaggtcctggcgctggcggaatgacgccatttttgttactggtagagctcggcttcgtggctgtttcggagccaccgaaagataagctccctcgtcaccctgacatctctccgggaagactggaagggaaatggcctttcgggggatgttgaacgcatttgggcaggcggggagccaagcccggcttgagagcagagccggggacgaagttccggaaatggaattaccgagtcagatgagaaacacaagtcatcaatgaattaacaagcaacacattgtcacatccagctgttgaagagtggttaactcagcttgatctccgaagactcttctgcaccccaccccgcccccaactgctttccaaagagaaacagaaaatgattgagtcccaggaaccagtgacatttgaggatgtggctgtggacttcacgcaggaagagtggcagcagttgaatcctgctcagaagaccctgcatagggatgtgatgctggagacctataatcacctggtctccgtggggtgttcaggtataaaaccagatgtaatctttaagttggaacatggaaaggacccatggatcatagagagtgagttgtcaaggtggatctacccagagtgaaaggccttgaatcttcccagcagatcatttctggagaacttttatttcaaagggagatactagaaagagccccaaaggataattcattgtactctgttttaaaaatctggcatattgataatcagatggatagatatcaaggaaatcaagacagagttttgaggcaggtcacagtcatcagtcgtgaaacattgactgatgagatgggttccaagtacagtgcatttgggaaaatgttcaatcggtgcacagaccttgctcctttaagtcaaaaattccataagtttgattcatgtgaaaatagcttgaagtctaattcagacttactaaattataacaggagctatgcaagaaagaaccccactaagagatttagatgtgggagaccacctaagtataatgcttcctgttctgtgcctgagaaggaaggcttcattcatactggaatggagccctatggagatagtcaatgtgaaaaagttctcagtcataagcaagcccatgttcagtataagaaatttcaagccagagagaaacccaatgtttgtagtatgtgtgggaaagcctttatcaagaagtcacagctcattatacatcaaagaattcatactggagagaaaccatatgtatgtggagattgtaggaaagccttcagtgagaaatcacacctcattgtgcatcagaggattcatactggggagaaaccctatgaatgtactaagtatggaagagcattctcccggaagtcacctttcactgttcatcagagagtccatactggagagaaaccctatgagtgttttgagtgtccaaaagctttctcccagaagtcacatctaattatacatcagagagttcataccagagagaagccctttgaatgcagtgaatgcaggaaagccttctgtgagatgtctcacctttttatacaccagataactcatactgggaagaagccctatgaatgtactgaatgtgggaagaccttccctcggaaaacacagctcattatacatcagagaacgcatactggagagaagccctataagtgtggtgaatgtgggaaaactttctgccaacagtcccacctcataggacatcaaagaattcatacaggagaaaaaccttatgtgtgtactgactgtgggaaggccttttcccagaagtcacacctcactggccatcaaagacttcatactggagagaaaccttatatgtgtactgaatgtggaaaatccttctctcagaaatcacctcttatcatacaccagagaattcatacaggggagaaaccttatcagtgtggtgaatgtggcaaaaccttctcccagaaatcactcctcattattcatctgagagttcacacaggggagaaaccctatgagtgtactgagtgtgggagggccttttccctgaagtcacatctcattctacatcagagaggtcatactggagagaaaccctatgaatgtagtgaatgtggaaaggccttctgtggaaagtctccactcattatacatcagaaaactcatcctagggagaaaacccctgaatgtgctgagtctggaatgacttttttctggaaatcacagatgattacatatcagagaagacacactggggagaaaccctccagatgcagtgactgtgggaaggcattctgccagcatgtatactttactgggcatcagaatccatataggaaagacaccttgtatatatgctgattgtgggaaggcctattcccagaagtcagtcctcattgtctatgggaaaactcacattgaatagaaatagtgacaacttctcaactgtagaatagactaatatgttcctcagtatacatgattacccttccacagaatgatctgcttaggccctcagaatattttcaaccccacaaatatggaatcaatttgctcaccctcaaactgtctcagccctcttcacagaataaatgtatctggaagaattagcacta

SEQ ID NO: 35291 - DNA, 2455 bp, Homo sapiens
  source 1..2455: mol_type = unassigned DNA
gagtttgtggggtgatgggggatctgtgcggtgtttgatgatgtctgtaagggacgaagttccggaaatggaattaccgagtcagatgagaaacacaagtcatcaatgaattaacaagcaacacattgtcacatccagctgttgaagagtggttaactcagcttgatctccgaagactcttctgcaccccaccccgcccccaactgctttccaaagagaaacagaaaatgattgagtcccaggaaccagtgacatttgaggatgtggctgtggacttcacgcaggaagagtggcagcagttgaatcctgctcagaagaccctgcatagggatgtgatgctggagacctataatcacctggtctccgtggggtgttcaggtataaaaccagatgtaatctttaagttggaacatggaaaggacccatggatcatagagagtgagttgtcaaggtggatctacccagacagagtgaaaggccttgaatcttcccagcagatcatttctggagaacttttatttcaaagggagatactagaaagagccccaaaggataattcattgtactctgttttaaaaatctggcatattgataatcagatggatagatatcaaggaaatcaagacagagttttgaggcaggtcacagtcatcagtcgtgaaacattgactgatgagatgggttccaagtacagtgcatttgggaaaatgttcaatcggtgcacagaccttgctcctttaagtcaaaaattccataagtttgattcatgtgaaaatagcttgaagtctaattcagacttactaaattataacaggagctatgcaagaaagaaccccactaagagatttagatgtgggagaccacctaagtataatgcttcctgttctgtgcctgagaaggaaggcttcattcatactggaatggagccctatggagatagtcaatgtgaaaaagttctcagtcataagcaagcccatgttcagtataagaaatttcaagccagagagaaacccaatgtttgtagtatgtgtgggaaagcctttatcaagaagtcacagctcattatacatcaaagaattcatactggagagaaaccatatgtatgtggagattgtaggaaagccttcagtgagaaatcacacctcattgtgcatcagaggattcatactggggagaaaccctatgaatgtactaagtatggaagagcattctcccggaagtcacctttcactgttcatcagagagtccatactggagagaaaccctatgagtgttttgagtgtccaaaagctttctcccagaagtcacatctaattatacatcagagagttcataccagagagaagccctttgaatgcagtgaatgcaggaaagccttctgtgagatgtctcacctttttatacaccagataactcatactgggaagaagccctatgaatgtactgaatgtgggaagaccttccctcggaaaacacagctcattatacatcagagaacgcatactggagagaagccctataagtgtggtgaatgtgggaaaactttctgccaacagtcccacctcataggacatcaaagaattcatacaggagaaaaaccttatgtgtgtactgactgtgggaaggccttttcccagaagtcacacctcactggccatcaaagacttcatactggagagaaaccttatatgtgtactgaatgtggaaaatccttctctcagaaatcacctcttatcatacaccagagaattcatacaggggagaaaccttatcagtgtggtgaatgtggcaaaaccttctcccagaaatcactcctcattattcatctgagagttcacacaggggagaaaccctatgagtgtactgagtgtgggagggccttttccctgaagtcacatctcattctacatcagagaggtcatactggagagaaaccctatgaatgtagtgaatgtggaaaggccttctgtggaaagtctccactcattatacatcagaaaactcatcctagggagaaaacccctgaatgtgctgagtctggaatgacttttttctggaaatcacagatgattacatatcagagaagacacactggggagaaaccctccagatgcagtgactgtgggaaggcattctgccagcatgtatactttactgggcatcagaatccatataggaaagacaccttgtatatatgctgattgtgggaaggcctattcccagaagtcagtcctcattgtctatgggaaaactcacattgaatagaaatagtgacaacttctcaactgtagaatagactaatatgttcctcagtatacatgattacccttccacagaatgatctgcttaggccctcagaatattttcaaccccacaaatatggaatcaatttgctcaccctcaaactgtctcagccctcttcacagaataaatgtatctggaagaattagcacta

SEQ ID NO: 35292 - DNA, 988 bp, Homo sapiens
  source 1..988: mol_type = unassigned DNA
cccggacaagtcgcggcccttccaagcctcacactgctttcgtaggatcaattccgaatacccaaactcggagatatcacgaggactcccccgggcccccaaacgcacctctcctctggctggaatgggagcctccagaagcagtgcgagaccacggccagcgacagaggacgaagttccggaaatggaattaccgagtcagatgagaaacacaagtcatcaatgaattaacaagcaacacattgtcacatccagctgttgaagagtggttaactcagcttgatctccgaagactcttctgcaccccaccccgcccccaactgctttccaaagagaaacagaaaatgattgagtcccaggaaccagtgacatttgaggatgtggctgtggacttcacgcaggaagagtggcagcagttgaatcctgctcagaagaccctgcatagggatgtgatgctggagacctataatcacctggtctccgtggggtgttcaggtataaaaccagatgtaatctttaagttggaacatggaaaggacccatggatcatagagagtgagttgtcaaggtggatctacccagacagagtgaaaggccttgaatcttcccagcagatcatttctggagaacttttatttcaaagggagatactagaaagagccccaaaggataattcattgtactctgttttaaaaatctggcatattgataatcagatggatagatatcaaggaaatcaagacagagttttgaggcaggtcacagtcatcagtcgtgaaacattgactgatgagatgggttccaagtacagtgcatttgggaaaatgttcaatcggtgcacagaccttgctcctttaagtcaaaaattccataagtttgattcatgtgaaaatagcttgaagtctaattcagacttactaaattataacaggagctatgcaagaaagaaccccactaagagatttagatgtgggagaccacctaagta

SEQ ID NO: 35293 - DNA, 2562 bp, Homo sapiens
  source 1..2562: mol_type = unassigned DNA
cccggacaagtcgcggcccttccaagcctcacactgctttcgtaggatcaattccgaatacccaaactcggagatatcacgaggactcccccgggcccccaaacgcacctctcctctggctggaatgggagcctccagaagcagtgcgagaccacggccagcgacagaggacgaagttccggaaatggaattaccgagtcagatgagaaacacaagtcatcaatgaattaacaagcaacacattgtcacatccagctgttgaagagtggttaactcagcttgatctccgaagactcttctgcaccccaccccgcccccaactgctttccaaagagaaacagaaaatgattgagtcccaggaagagtggcagcagttgaatcctgctcagaagaccctgcatagggatgtgatgctggagacctataatcacctggtctccgtggggtgttcaggtataaaaccagatgtaatctttaagttggaacatggaaaggacccatggatcatagagagtgagttgtcaaggtggatctacccagacagagtgaaaggccttgaatcttcccagcagatcatttctggagaacttttatttcaaagggagatactagaaagagccccaaaggataattcattgtactctgttttaaaaatctggcatattgataatcagatggatagatatcaaggaaatcaagacagagttttgaggcaggtcacagtcatcagtcgtgaaacattgactgatgagatgggttccaagtacagtgcatttgggaaaatgttcaatcggtgcacagaccttgctcctttaagtcaaaaattccataagtttgattcatgtgaaaatagcttgaagtctaattcagacttactaaattataacaggagctatgcaagaaagaaccccactaagagatttagatgtgggagaccacctaagtataatgcttcctgttctgtgcctgagaaggaaggcttcattcatactggaatggagccctatggagatagtcaatgtgaaaaagttctcagtcataagcaagcccatgttcagtataagaaatttcaagccagagagaaacccaatgtttgtagtatgtgtgggaaagcctttatcaagaagtcacagctcattatacatcaaagaattcatactggagagaaaccatatgtatgtggagattgtaggaaagccttcagtgagaaatcacacctcattgtgcatcagaggattcatactggggagaaaccctatgaatgtactaagtatggaagagcattctcccggaagtcacctttcactgttcatcagagagtccatactggagagaaaccctatgagtgttttgagtgtccaaaagctttctcccagaagtcacatctaattatacatcagagagttcataccagagagaagccctttgaatgcagtgaatgcaggaaagccttctgtgagatgtctcacctttttatacaccagataactcatactgggaagaagccctatgaatgtactgaatgtgggaagaccttccctcggaaaacacagctcattatacatcagagaacgcatactggagagaagccctataagtgtggtgaatgtgggaaaactttctgccaacagtcccacctcataggacatcaaagaattcatacaggagaaaaaccttatgtgtgtactgactgtgggaaggccttttcccagaagtcacacctcactggccatcaaagacttcatactggagagaaaccttatatgtgtactgaatgtggaaaatccttctctcagaaatcacctcttatcatacaccagagaattcatacaggggagaaaccttatcagtgtggtgaatgtggcaaaaccttctcccagaaatcactcctcattattcatctgagagttcacacaggggagaaaccctatgagtgtactgagtgtgggagggccttttccctgaagtcacatctcattctacatcagagaggtcatactggagagaaaccctatgaatgtagtgaatgtggaaaggccttctgtggaaagtctccactcattatacatcagaaaactcatcctagggagaaaacccctgaatgtgctgagtctggaatgacttttttctggaaatcacagatgattacatatcagagaagacacactggggagaaaccctccagatgcagtgactgtgggaaggcattctgccagcatgtatactttactgggcatcagaatccatataggaaagacaccttgtatatatgctgattgtgggaaggcctattcccagaagtcagtcctcattgtctatgggaaaactcacattgaatagaaatagtgacaacttctcaactgtagaatagactaatatgttcctcagtatacatgattacccttccacagaatgatctgcttaggccctcagaatattttcaaccccacaaatatggaatcaatttgctcaccctcaaactgtctcagccctcttcacagaataaatgtatctggaagaattagcactactttggtgttgtttggtcattaaatgctttat

SEQ ID NO: 35294 - DNA, 6505 bp, Homo sapiens
  source 1..6505: mol_type = unassigned DNA
gcatgcgtgcagctctttggaggcggtagcgttttcggcgtcgagactggaggctgagtgctaaactgtgtggggcgcggatgggatccagctgttagtcgggtaggcatagctttgtgttattcttggaaaatttcgcaccacttgtgaattccttgaacctgggcattgcaaacccacttctgttgggcccatctcctttgcactttgctcagattaagactcagttggcgcttcagcagctgaatgccgttgcctcacatggttcaacaccaccttatactttattaaatcaggctttcttgaaaatagccatgtcgagacccaggtttaatcctcgaggagactttccacttcaaaggccacgagcacctaacccttctgggatgaggcctccaggaccatttatgaggcctggatctatgggtctcccaagattttacccagcagggagagcacgtggaattccacacagatttgctggccatgaatcttatcagaacatggggccacagagaatgaatgttcaggtaactcaacacagaactgatccaagattgaccaaagaaaaactggattttcatgaagcacaacagaagaaggggaagcctcatggtagccggtgggatgatgagcctcatatatctgcatcagtggcagtgaaacagagttctgtaacacaggttacagagcagagtcccaaagtacagagccgctatacaaaagagagtgcctcaagtatcttagcaagttttggattatctaatgaagacctagaagaacttagtcgctatcctgatgaacaactaactcctgaaaatatgccattaattttgagggatataagaatgcgaaaaatggggcgccgattacctaatttaccttctcagagcagaaataaagaaacacttggtagtgaagcagtttcaagtaatgtgatcgattatgggcatgcaagcaaatatggctacacagaagatccacttgaagtacgtatttatgatcctgaaattccaactgatgaggtcgagaatgaatttcagtcacagcagaacatttctgcatctgttcccaatccaaatgtgatatgtaattctatgtttcctgttgaagacgtatttcgccaaatggacttccccggtgagtcctccaataatcggtcctttttctcagttgagagtggaaccaagatgtcaggcttacacatttcaggaggacagtcagtccttgaacccataaaatccgtcaaccaatccattaaccaaacagttagccagacaatgagtcaatctctgattcctccatctatgaaccagcaacctttttcgtcggaattaatttcatctgtaagccagcaagagcggatcccacatgaacctgtgattaattcatctaacgtacatgttggatcaagaggaagtaaaaagaattaccagtcacaggctgacattcccattcggtctccctttggtattgtgaaagcatcctggctaccaaagttttcacatgctgatgcccagaagatgaagagacttccaactccttctatgatgaatgattattatgcagcatctccaagaatatttccacatttgtgttctctgtgtaacgtagaatgtagtcatttgaaggattggattcagcatcaaaatacatctactcatattgagagctgtcgacagttacgtcaacagtatcctgattggaatcctgagatcctcccatcgagaagaaatgagggcaatagaaaagaaaatgaaactccacgaagacgttctcattcccccagtcctaggcgttctagaagatcaagctcaagtcacagattccgtcggtctcgaagcccaatgcattacatgtataggccgagaagtcgaagtccaagaatttgccatcgtttcatttctagatacagatccagatccagatcccgttcaccatatcgaattagaaatccatttagaggtagtccaaaatgctttcgatcagttagccctgagaggatgtcaaggagatcagtgagatcatcagatagaaaaaaagcattagaagatgtagtacaacgatctgggcatgggacagaatttaataaacagaagcatcttgaagctgctgataagggacattcaccagcacaaaagcctaaaactagcagtggaacaaaaccatcagttaaacctacaagcgctacaaagagtgattcaaatctaggaggacattctattcgttgtaaatcaaagaatcttgaagatgacactttgtcagaatgtaaacaggtgtctgataaagctgtttctctccagcgaaagcttcggaaagaacagtcattgcattatggttcggttcttcttataactgaattaccagaggatggttgtactgaagaagatgtgagaaaattatttcaaccatttgggaaagtgaatgatgtcctaattgttccatatagaaaagaggcttacctagaaatggaatttaaagaggcaattactgcaattatgaagtacattgaaacaacacctcttacgataaaaggaaaaagtgtgaaaatatgtgttccaggaaagaaaaaagcacagaacaaagaggtgaagaaaaagactttagagtcaaagaaagtatctgcatctaccttaaaaagagatgcagatgcttcaaaagctgttgaaattgttacttcaacttctgctgccaaaactggacaagccaaggcatctgtagccaaagtaaacaaatctacagggaaatcagcaagttctgtaaaatctgtggtaacggtagctgttaaaggtaataaagcttcaatcaaaacagcaaaatctggtggaaagaagtctctagaagccaaaaagactgggaatgtcaaaaacaaagactctaacaaacctgtgactataccagaaaactctgaaataaagaccagtattgaagtcaaagccactgaaaactgtgctaaagaagctatttctgatgctgctttggaggccacagagaatgaaccacttaacaaggaaacagaagaaatgtgtgtgatgcttgtctctaatttgcctaataaaggatattctgtagaagaagtttatgacttagcaaaaccatttggtggtttaaaggatatcttgattttatcatctcataaaaaggcatatatagaaataaatagaaaagctgctgagtctatggtaaaattttatacctgcttcccagtattgatggatggaaatcaactctcaataagtatggctcctgaaaacatgaatataaaagatgaggaagctatatttataaccttggtaaaagaaaatgacccagaggcaaacatagatacaatttatgatcgatttgtacatcttgataatttaccggaagatggacttcagtgtgtactttgtgttggacttcagtttggaaaagtggatcaccatgtattcataagtaatagaaacaaggcaattcttcagttagatagtcctgaatctgctcagtcaatgtatagctttctgaaacaaaatccacaaaatattggtgaccatatgttgacctgctcattatctccaaagatagacttaccagaggtgcaaattgagcatgacccagaattagaaaaagaaagccctggcttgaaaaacagtccaattgatgaaagtgaggtgcaaacagcaactgatagtccctctgttaaacctaatgagcttgaagaagaaagtactcccagcattcaaacagaaactttggtacagcaggaagagccttgtgaggaagaagctgaaaaagcaacatgtgattctgactttgctgttgaaactttggagcttgaaactcaaggagaggaggtcaaagaagaaattcctcttgtagcatccgcttcagtcagtattgaacaattcactgaaaatgccgaggagtgtgctttaaatcagcagatgtttaacagtgacttggagaagaaaggggcagaaattattaaccctaaaacagcattgttaccatctgacagtgtgtttgcagaagaaaggaacctcaaaggaattctagaagaatctccatctgaagcagaagatttcatttctggaattacacagactatggtagaagctgtagctgaagtagaaaaaaatgaaactgtttcggaaatattgccatcaacttgtattgtgacgttagtaccaggaattcccactggggatgagaagacagtggacaaaaagaatatttctgaaaaaaaaggtaacatggatgaaaaggaggagaaggaatttaatactaaggaaaccagaatggatcttcaaataggaacagagaaggctgaaaagaatgaaggtaggatggatgcagaaaaggtggaaaagatggcagcaatgaaagaaaagcctgcagaaaacactttattcaaggcatacccaaataaaggagtgggtcaggctaataagcctgatgaaactagtaaaactagtattctggctgtatcagatgtatctagcagtaaaccaagcatcaaggctgttatagtctcttctcctaaggcaaaagctacagtttcaaaaactgaaaatcagaaaagttttccaaaatctgtgcccagagatcaaataaatgctgaaaagaaactttcagccaaggaatttggtctgcttaaacccacaagtgccaggtcaggcttggcagaaagcagcagtaaattcaaacctactcagagcagtcttaccagaggaggcagtggaaggatctcagccctgcaaggcaagctttctaaactggattacagagatataacaaaacaatctcaggaaacagaggctagaccttccatcatgaaacgggatgacagcaacaataagactttggctgagcaaaacactaagaatcctaaaagcactactggtagaagttccaaatctaaagaggagccattatttccatttaatttggatgaatttgttactgtggatgaggttatagaagaagtgaatccttctcaggccaagcagaatccactaaagggaaaaaggaaagaaactctcaaaaatgttcctttctctgaacttaacttaaagaagaaaaaggggaaaacttccactcctcgtggtgttgagggagaactatcttttgtgacattggatgagattggggaagaggaagatgcagctgcacatctagcacaagctctagtcactgtggatgaagtaattgatgaagaagaactaaatatggaagaaatggtaaaaaattcaaattcactttttacattagatgaattaattgaccaagatgattgcatttcccacagtgaacctaaagatgttactgttctgtcagtggctgaagaacaagatctcctcaaacaggaacgcttggtaactgtggatgaaattggagaagtggaagagctacctttgaatgagtcagcagacataacttttgccactttaaatactaaaggaaatgaaggagatactgtaagggattccattggcttcatttcttctcaggtgcccgaagacccttctactttagttactgtagatgaaatacaagatgacagcagtgatttgcatttagtgactttggatgaagtaactgaagaggatgaagactctctggcggattttaacaaccttaaagaagagcttaattttgttactgttgatgaagttggagaggaggaagatggagataatgatttaaaagttgagttagcacaaagcaaaaatgaccatcccacagataaaaaagggaatagaaagaagagagctgtggacacaaaaaagacaaaacttgaatccttgtcccaagtgggtccagtaaatgagaatgttatggaagaagatctaaaaaccatgattgaaagacacttaacagctaaaactccaaccaagagagttagaattgggaaaactctgccatcagaaaaagctgttgtgacagaaccagcaaaaggtgaagaggccttccagatgagtgaagttgatgaggaatctggattaaaggattcagaaccagagcgaaaacgcaagaagactgaagactcttcttcaggcaaatcagtggcgtctgatgtccctgaggaattagactttcttgtacctaaggctggattcttctgtccaatttgttccctcttctactcaggtgaaaaagcaatgacaaatcactgcaagagtacacgtcataagcaaaatactgagaaattcatggccaagcaaagaaaggaaaaggagcagaatgaggctgaagaaagaagctctaggtgattgggggaaaggaaagaattcactagaaatttgtttagggtccagttgatttgtgtatttttgttatcatttaatttgtaattttcgtttcagaagcaaatattcgtgttgtacaaatttctgattgccctaaatgtagagagactgatggggaaagtatgatgggtttgatttttatatcaaatcatcaggcatggagaaatatcttttagaagtgttaaaataaatgttcctactgtatatttaaaatacca

SEQ ID NO: 35295 - DNA, 5281 bp, Homo sapiens
  source 1..5281: mol_type = unassigned DNA
ggcgcgcatgcgtgcagctctttggaggcggtagcgttttcggcgtcgagactggaggctgagtgctaaactgtgtggggcgcggatgggatccagctgttagtcgggtaggcatagctttgtgttattcttggaaaatttcgcaccacttgtgaattccttgaacctgggcattgcaaacccacttctgttgggcccatctcctttgcactttgctcagattaagactcagttggcgcttcagcagctgaatgccgttgcctcacatggttcaacaccaccttatactttattaaatcaggctttcttgaaaatagccatgtcgagacccaggtttaatcctcgaggagactttccacttcaaaggccacgagcacctaacccttctgggatgaggcctccaggaccatttatgaggcctggatctatgggtctcccaagattttacccagcagggagagcacgtggaattccacacagatttgctggccatgaatcttatcagaacatggggccacagagaatgaatgttcaggtaactcaacacagaactgatccaagattgaccaaagaaaaactggattttcatgaagcacaacagaagaaggggaagcctcatggtagccggtgggatgatgagcctcatatatctgcatcagtggcagtgaaacagagttctgtaacacaggttacagagcagagtcccaaagtacagagccgctatacaaaagagagtgcctcaagtatcttagcaagttttggattatctaatgaagacctagaagaacttagtcgctatcctgatgaacaactaactcctgaaaatatgccattaattttgagggatataagaatgcgaaaaatggggcgccgattacctaatttaccttctcagagcagaaataaagaaacacttggtagtgaagcagtttcaagtaatgtgatcgattatgggcatgcaagcaaatatggctacacagaagatccacttgaagtacgtatttatgatcctgaaattccaactgatgaggtcgagaatgaatttcagtcacagcagaacatttctgcatctgttcccaatccaaatgtgatatgtaattctatgtttcctgttgaagacgtatttcgccaaatggacttccccggtgagtcctccaataatcggtcctttttctcagttgagagtggaaccaagatgtcaggcttacacatttcaggaggacagtcagtccttgaacccataaaatccgtcaaccaatccattaaccaaacagttagccagacaatgagtcaatctctgattcctccatctatgaaccagcaacctttttcgtcggaattaatttcatctgtaagccagcaagagcggatcccacatgaacctgtgattaattcatctaacgtacatgttggatcaagaggaagtaaaaagaattaccagtcacaggctgacattcccattcggtctccctttggtattgtgaaagcatcctggctaccaaagttttcacatgctgatgcccagaagatgaagagacttccaactccttctatgatgaatgattattatgcagcatctccaagaatatttccacatttgtgttctctgtgtaacgtagaatgtagtcatttgaaggattggattcagcatcaaaatacatctactcatattgagagctgtcgacagttacgtcaacagtatcctgattggaatcctgagatcctcccatcgagaagaaatgagggcaatagaaaagaaaatgaaactccacgaagacgttctcattcccccagtcctaggcgttctagaagatcaagctcaagtcacagattccgtcggtctcgaagcccaatgcattacatgtataggccgagaagtcgaagtccaagaatttgccatcgtttcatttctagatacagatccagatccagatcccgttcaccatatcgaattagaaatccatttagaggtagtccaaaatgctttcgatcagttagccctgagaggatgtcaaggagatcagtgagatcatcagatagaaaaaaagcattagaagatgtagtacaacgatctgggcatgggacagaatttaataaacagaagcatcttgaagctgctgataagggacattcaccagcacaaaagcctaaaactagcagtggaacaaaaccatcagttaaacctacaagcgctacaaagagtgattcaaatctaggaggacattctattcgttgtaaatcaaagaatcttgaagatgacactttgtcagaatgtaaacaggtgtctgataaagctgtttctctccagcgaaagcttcggaaagaacagtcattgcattatggttcggttcttcttataactgaattaccagaggatggttgtactgaagaagatgtgagaaaattatttcaaccatttgggaaagtgaatgatgtcctaattgttccatatagaaaagaggcttacctagaaatggaatttaaagaggcaattactgcaattatgaagtacattgaaacaacacctcttacgataaaaggaaaaagtgtgaaaatatgtgttccaggaaagaaaaaagcacagaacaaagaggtgaagaaaaagactttagagtcaaagaaagtatctgcatctaccttaaaaagagatgcagatgcttcaaaagctgttgaaattgttacttcaacttctgctgccaaaactggacaagccaaggcatctgtagccaaagtaaacaaatctacagggaaatcagcaagttctgtaaaatctgtggtaacggtagctgttaaaggtaataaagcttcaatcaaaacagcaaaatctggtggaaagaagtctctagaagccaaaaagactgggaatgtcaaaaacaaagactctaacaaacctgtgactataccagaaaactctgaaataaagaccagtattgaagtcaaagccactgaaaactgtgctaaagaagctatttctgatgctgctttggaggccacagagaatgaaccacttaacaaggaaacagaagaaatgtgtgtgatgcttgtctctaatttgcctaataaaggatattctgtagaagaagtttatgacttagcaaaaccatttggtggtttaaaggatatcttgattttatcatctcataaaaaggcatatatagaaataaatagaaaagctgctgagtctatggtaaaattttatacctgcttcccagtattgatggatggaaatcaactctcaataagtatggctcctgaaaacatgaatataaaagatgaggaagctatatttataaccttggtaaaagaaaatgacccagaggcaaacatagatacaatttatgatcgatttgtacatcttgataatttaccggaagatggacttcagtgtgtactttgtgttggacttcagtttggaaaagtggatcaccatgtattcataagtaatagaaacaaggcaattcttcagttagatagtcctgaatctgctcagtcaatgtatagctttctgaaacaaaatccacaaaatattggtgaccatatgttgacctgctcattatctccaaagatagacttaccagaggtgcaaattgagcatgacccagaattagaaaaagaaagactttggctgagcaaaacactaagaatcctaaaagcactactggtagaagttccaaatctaaagaggagccattatttccatttaatttggatgaatttgttactgtggatgaggttatagaagaagtgaatccttctcaggccaagcagaatccactaaagggaaaaaggaaagaaactctcaaaaatgttcctttctctgaacttaacttaaagaagaaaaaggggaaaacttccactcctcgtggtgttgagggagaactatcttttgtgacattggatgagattggggaagaggaagatgcagctgcacatctagcacaagctctagtcactgtggatgaagtaattgatgaagaagaactaaatatggaagaaatggtaaaaaattcaaattcactttttacattagatgaattaattgaccaagatgattgcatttcccacagtgaacctaaagatgttactgttctgtcagtggctgaagaacaagatctcctcaaacaggaacgcttggtaactgtggatgaaattggagaagtggaagagctacctttgaatgagtcagcagacataacttttgccactttaaatactaaaggaaatgaaggagatactgtaagggattccattggcttcatttcttctcaggtgcccgaagacccttctactttagttactgtagatgaaatacaagatgacagcagtgatttgcatttagtgactttggatgaagtaactgaagaggatgaagactctctggcggattttaacaaccttaaagaagagcttaattttgttactgttgatgaagttggagaggaggaagatggagataatgatttaaaagttgagttagcacaaagcaaaaatgaccatcccacagataaaaaagggaatagaaagaagagagctgtggacacaaaaaagacaaaacttgaatccttgtcccaagtgggtccagtaaatgagaatgttatggaagaagatctaaaaaccatgattgaaagacacttaacagctaaaactccaaccaagagagttagaattgggaaaactctgccatcagaaaaagctgttgtgacagaaccagcaaaaggtgaagaggccttccagatgagtgaagttgatgaggaatctggattaaaggattcagaaccagagcgaaaacgcaagaagactgaagactcttcttcaggcaaatcagtggcgtctgatgtccctgaggaattagactttcttgtacctaaggctggattcttctgtccaatttgttccctcttctactcaggtgaaaaagcaatgacaaatcactgcaagagtacacgtcataagcaaaatactgagaaattcatggccaagcaaagaaaggaaaaggagcagaatgaggctgaagaaagaagctctaggtgattgggggaaaggaaagaattcactagaaatttgtttagggtccagttgatttgtgtatttttgttatcatttaatttgtaattttcgtttcagaagcaaatattcgtgttgtacaaatttctgattgccctaaatgtagagagactgatggggaaagtatgatgggtttgatttttatatcaaatcatcaggcatggagaaatatcttttagaagtgttaaaataaatgttcctactgtatatttaaaat

SEQ ID NO: 35296 - DNA, 2764 bp, Homo sapiens
  source 1..2764: mol_type = unassigned DNA
ggcgcgcatgcgtgcagctctttggaggcggtagcgttttcggcgtcgagactggaggctgagtgctaaactgtgtggggcgcggatgggatccagctgttagtcgggtaggcatagctttgtgttattcttggaaaatttcgcaccacttgtgaattccttgaacctgggcattgcaaacccacttctgttgggcccatctcctttgcactttgctcagattaagactcagttggcgcttcagcagctgaatgccgttgcctcacatggttcaacaccaccttatactttattaaatcaggctttcttgaaaatagccatgtcgagacccaggtttaatcctcgaggagactttccacttcaaaggccacgagcacctaacccttctgggatgaggcctccaggaccatttatgaggcctggatctatgggtctcccaagattttacccagcagggagagcacgtggaattccacacagatttgctggccatgaatcttatcagaacatggggccacagagaatgaatgttcaggtaactcaacacagaactgatccaagattgaccaaagaaaaactggattttcatgaagcacaacagaagaaggggaagcctcatggtagccggtgggatgatgagcctcatatatctgcatcagtggcagtgaaacagagttctgtaacacaggttacagagcagagtcccaaagtacagagccgctatacaaaagagagtgcctcaagtatcttagcaagttttggattatctaatgaagacctagaagaacttagtcgctatcctgatgaacaactaactcctgaaaatatgccattaattttgagggatataagaatgcgaaaaatggggcgccgattacctaatttaccttctcagagcagaaataaagaaacacttggtagtgaagcagtttcaagtaatgtgatcgattatgggcatgcaagcaaatatggctacacagaagatccacttgaagtacgtatttatgatcctgaaattccaactgatgaggtcgagaatgaatttcagtcacagcagaacatttctgcatctgttcccaatccaaatgtgatatgtaattctatgtttcctgttgaagacgtatttcgccaaatggacttccccggtgagtcctccaataatcggtcctttttctcagttgagagtggaaccaagatgtcaggcttacacatttcaggaggacagtcagtccttgaacccataaaatccgtcaaccaatccattaaccaaacagttagccagacaatgagtcaatctctgattcctccatctatgaaccagcaacctttttcgtcggaattaatttcatctgtaagccagcaagagcggatcccacatgaacctgtgattaattcatctaacgtacatgttggatcaagaggaagtaaaaagaattaccagtcacaggctgacattcccattcggtctccctttggtattgtgaaagcatcctggctaccaaagttttcacatgctgatgcccagaagatgaagagacttccaactccttctatgatgaatgattattatgcagcatctccaagaatatttccacatttgtgttctctgtgtaacgtagaatgtagtcatttgaaggattggattcagcatcaaaatacatctactcatattgagagctgtcgacagttacgtcaacagtatcctgattggaatcctgagatcctcccatcgagaagaaatgagggcaatagaaaagaaaatgaaactccacgaagacgttctcattcccccagtcctaggcgttctagaagatcaagctcaagtcacagattccgtcggtctcgaagcccaatgcattacatgtataggccgagaagtcgaagtccaagaatttgccatcgtttcatttctagatacagatccagatccagatcccgttcaccatatcgaattagaaatccatttagaggtagtccaaaatgctttcgatcagttagccctgagaggatgtcaaggagatcagtgagatcatcagatagaaaaaaagcattagaagatgtagtacaacgatctgggcatgggacagaatttaataaacagaagcatcttgaagctgctgataagggacattcaccagcacaaaagcctaaaactagcagtggaacaaaaccatcagttaaacctacaagcgctacaaagagtgattcaaatctaggaggacattctattcgttgtaaatcaaagaatcttgaagatgacactttgtcagaatgtaaacaggtgtctgataaagctgtttctctccagcgaaagcttcggaaagaacagtcattgcattatggttcggttcttcttataactgaattaccagaggatggttgtactgaagaagatgtgagaaaattatttcaaccatttgggaaagtgaatgatgtcctaattgttccatatagaaaagaggcttacctagaaatggaatttaaagaggcaattactgcaattatgaagtacattgaaacaacacctcttacgataaaaggaaaaagtgtgaaaatatgtgttccaggaaagaaaaaagcacagaacaaagaggtgaagaaaaagactttagagtcaaagaaagtatctgcatctaccttaaaaagagatgcagatgcttcaaaagctgttgaaattgttacttcaacttctgctggactgctccctacaggcgggggcaacaactacccacagattgtgttggctccaggcctttgtcattaa

SEQ ID NO: 35297 - DNA, 4924 bp, Homo sapiens
  source 1..4924: mol_type = unassigned DNA
atgccccgggacggcgttcctgccgggaataccaccccggcggcagcccaggctgccgcgcagagcccggattccgcgactgccggggcaccgcaggttttggactcgctgaagcggtatcctgattggaatcctgagatcctcccatcgagaagaaatgagggcaatagaaaagaaaatgaaactccacgaagacgttctcattcccccagtcctaggcgttctagaagatcaagctcaagtcacagattccgtcggtctcgaagcccaatgcattacatgtataggccgagaagtcgaagtccaagaatttgccatcgtttcatttctagatacagatccagatccagatcccgttcaccatatcgaattagaaatccatttagaggtagtccaaaatgctttcgatcagttagccctgagaggatgtcaaggagatcagtgagatcatcagatagaaaaaaagcattagaagatgtagtacaacgatctgggcatgggacagaatttaataaacagaagcatcttgaagctgctgataagggacattcaccagcacaaaagcctaaaactagcagtggaacaaaaccatcagttaaacctacaagcgctacaaagagtgattcaaatctaggaggacattctattcgttgtaaatcaaagaatcttgaagatgacactttgtcagaatgtaaacaggtgtctgataaagctgtttctctccagcgaaagcttcggaaagaacagtcattgcattatggttcggttcttcttataactgaattaccagaggatggttgtactgaagaagatgtgagaaaattatttcaaccatttgggaaagtgaatgatgtcctaattgttccatatagaaaagaggcttacctagaaatggaatttaaagaggcaattactgcaattatgaagtacattgaaacaacacctcttacgataaaaggaaaaagtgtgaaaatatgtgttccaggaaagaaaaaagcacagaacaaagaggtgaagaaaaagactttagagtcaaagaaagtatctgcatctaccttaaaaagagatgcagatgcttcaaaagctgttgaaattgttacttcaacttctgctgccaaaactggacaagccaaggcatctgtagccaaagtaaacaaatctacagggaaatcagcaagttctgtaaaatctgtggtaacggtagctgttaaaggtaataaagcttcaatcaaaacagcaaaatctggtggaaagaagtctctagaagccaaaaagactgggaatgtcaaaaacaaagactctaacaaacctgtgactataccagaaaactctgaaataaagaccagtattgaagtcaaagccactgaaaactgtgctaaagaagctatttctgatgctgctttggaggccacagagaatgaaccacttaacaaggaaacagaagaaatgtgtgtgatgcttgtctctaatttgcctaataaaggatattctgtagaagaagtttatgacttagcaaaaccatttggtggtttaaaggatatcttgattttatcatctcataaaaaggcatatatagaaataaatagaaaagctgctgagtctatggtaaaattttatacctgcttcccagtattgatggatggaaatcaactctcaataagtatggctcctgaaaacatgaatataaaagatgaggaagctatatttataaccttggtaaaagaaaatgacccagaggcaaacatagatacaatttatgatcgatttgtacatcttgataatttaccggaagatggacttcagtgtgtactttgtgttggacttcagtttggaaaagtggatcaccatgtattcataagtaatagaaacaaggcaattcttcagttagatagtcctgaatctgctcagtcaatgtatagctttctgaaacaaaatccacaaaatattggtgaccatatgttgacctgctcattatctccaaagatagacttaccagaggtgcaaattgagcatgacccagaattagaaaaagaaagccctggcttgaaaaacagtccaattgatgaaagtgaggtgcaaacagcaactgatagtccctctgttaaacctaatgagcttgaagaagaaagtactcccagcattcaaacagaaactttggtacagcaggaagagccttgtgaggaagaagctgaaaaagcaacatgtgattctgactttgctgttgaaactttggagcttgaaactcaaggagaggaggtcaaagaagaaattcctcttgtagcatccgcttcagtcagtattgaacaattcactgaaaatgccgaggagtgtgctttaaatcagcagatgtttaacagtgacttggagaagaaaggggcagaaattattaaccctaaaacagcattgttaccatctgacagtgtgtttgcagaagaaaggaacctcaaaggaattctagaagaatctccatctgaagcagaagatttcatttctggaattacacagactatggtagaagctgtagctgaagtagaaaaaaatgaaactgtttcggaaatattgccatcaacttgtattgtgacgttagtaccaggaattcccactggggatgagaagacagtggacaaaaagaatatttctgaaaaaaaaggtaacatggatgaaaaggaggagaaggaatttaatactaaggaaaccagaatggatcttcaaataggaacagagaaggctgaaaagaatgaaggtaggatggatgcagaaaaggtggaaaagatggcagcaatgaaagaaaagcctgcagaaaacactttattcaaggcatacccaaataaaggagtgggtcaggctaataagcctgatgaaactagtaaaactagtattctggctgtatcagatgtatctagcagtaaaccaagcatcaaggctgttatagtctcttctcctaaggcaaaagctacagtttcaaaaactgaaaatcagaaaagttttccaaaatctgtgcccagagatcaaataaatgctgaaaagaaactttcagccaaggaatttggtctgcttaaacccacaagtgccaggtcaggcttggcagaaagcagcagtaaattcaaacctactcagagcagtcttaccagaggaggcagtggaaggatctcagccctgcaaggcaagctttctaaactggattacagagatataacaaaacaatctcaggaaacagaggctagaccttccatcatgaaacgggatgacagcaacaataagactttggctgagcaaaacactaagaatcctaaaagcactactggtagaagttccaaatctaaagaggagccattatttccatttaatttggatgaatttgttactgtggatgaggttatagaagaagtgaatccttctcaggccaagcagaatccactaaagggaaaaaggaaagaaactctcaaaaatgttcctttctctgaacttaacttaaagaagaaaaaggggaaaacttccactcctcgtggtgttgagggagaactatcttttgtgacattggatgagattggggaagaggaagatgcagctgcacatctagcacaagctctagtcactgtggatgaagtaattgatgaagaagaactaaatatggaagaaatggtaaaaaattcaaattcactttttacattagatgaattaattgaccaagatgattgcatttcccacagtgaacctaaagatgttactgttctgtcagtggctgaagaacaagatctcctcaaacaggaacgcttggtaactgtggatgaaattggagaagtggaagagctacctttgaatgagtcagcagacataacttttgccactttaaatactaaaggaaatgaaggagatactgtaagggattccattggcttcatttcttctcaggtgcccgaagacccttctactttagttactgtagatgaaatacaagatgacagcagtgatttgcatttagtgactttggatgaagtaactgaagaggatgaagactctctggcggattttaacaaccttaaagaagagcttaattttgttactgttgatgaagttggagaggaggaagatggagataatgatttaaaagttgagttagcacaaagcaaaaatgaccatcccacagataaaaaagggaatagaaagaagagagctgtggacacaaaaaagacaaaacttgaatccttgtcccaagtgggtccagtaaatgagaatgttatggaagaagatctaaaaaccatgattgaaagacacttaacagctaaaactccaaccaagagagttagaattgggaaaactctgccatcagaaaaagctgttgtgacagaaccagcaaaaggtgaagaggccttccagatgagtgaagttgatgaggaatctggattaaaggattcagaaccagagcgaaaacgcaagaagactgaagactcttcttcaggcaaatcagtggcgtctgatgtccctgaggaattagactttcttgtacctaaggctggattcttctgtccaatttgttccctcttctactcaggtgaaaaagcaatgacaaatcactgcaagagtacacgtcataagcaaaatactgagaaattcatggccaagcaaagaaaggaaaaggagcagaatgaggctgaagaaagaagctctaggtgattgggggaaaggaaagaattcactagaaatttgtttagggtccagttgatttgtgtatttttgttatcatttaatttgtaattttcgtttcagaagcaaatattcgtgttgtacaaatttctgattgccctaaatgtagagagactgatggggaaagtatgatgggtttgatttttatatcaaatcatcaggcatggagaaatatcttttagaagtgttaaaataaatgttcctactgtatatttaaaat

SEQ ID NO: 35298 - DNA, 4470 bp, Homo sapiens
  source 1..4470: mol_type = unassigned DNA
ataaatagagcatagaatggaatatgataaatagtgtgacatagaatggaaggtggggcacagatggcacataggaattctgaacctttcttgtaaacatttttaatcctctatttaaaagaatacctatcattctcttcagttttgccttggctttacaacattttaaggattgttttctcttgtttcctttaaataaggattaaccttacctttgtagtcatatatctgaaacctgaaagaagaatatattccaaacttttaaaacaattaaaaacatttttattgtagtaaaatacacaaattttaccgtttgtaagacataaatttaacattttaatcatgtttaagtgtttgttcactgatattcagcaccttcacattgtgcaaccatcaccaccatccatttgtgaacttttgtctcctcaaactgaagttttctatccttttgacaataactcgccattaattcagcccttatcaaccattatttctgtttttataaatttagttacctcatgtatgtggaattatatttgcttttttgtgactggctcatgtcacttagtataatgtctctaaggttcatccatgttgcagcatgtgtcagatttttcttcatttttaaagctgagtaataattctgttttacgcatgtaacacatttttatatccactcatccattgatggacagttgggttgcttctccctttgtctgttgtgaataatgcttctgtgaacatgggtgtacaaatacatgtttaagtatcggctttcattccttttaggtgtatactaaaaagtggaattgttggattatgtggttattctaattccaatttttttaaagaactattcataactttttaatcttctccaaaggcaattcttcagttagatagtcctgaatctgctcagtcaatgtatagctttctgaaacaaaatccacaaaatattggtgaccatatgttgacctgctcattatctccaaagatagacttaccagaggtaagatttatctttcttcagcttttgtgattttagaaaatacagagaacataaaggtcattctcaggtagtagtcaaactgtttctgtgtttagagatgatttttataatttgtgttgcaatcagtgttccaattttcatagtttataaagcagtataaatttgtctaaatgagaataaagaaattttcaacaatgtaacatatatgcatttttgaatacttactgttgacatgtaggtatctacatttttgtgtatagtgactctttgtatgtaacatgattgtctccagaatgcagctactttgaatccattttggcttcctctgggtagaaagaagtttgttttattcttctttttgtttcagttacatttattataaactgtttttgtgttaagaaataagatttcacaggttcttggcctacacagtagtacatgtaggaaagctatggatagtccacctttgaaagcattaaattcaaactcaatctattttctccttctattccattgtatgctgatatcagaggtgcaaattgagcatgacccagaattagaaaaagaaagccctggcttgaaaaacagtccaattgatgaaagtgaggtgcaaacagcaactgatagtccctctgttaaacctaatgagcttgaagaagaaagtactcccagcattcaaacagaaactttggtacagcaggaagagccttgtgaggaagaagctgaaaaagcaacatgtgattctgactttgctgttgaaactttggagcttgaaactcaaggagaggaggtcaaagaagaaattcctcttgtagcatccgcttcagtcagtattgaacaattcactgaaaatgccgaggagtgtgctttaaatcagcagatgtttaacagtgacttggagaagaaaggggcagaaattattaaccctaaaacagcattgttaccatctgacagtgtgtttgcagaagaaaggaacctcaaaggaattctagaagaatctccatctgaagcagaagatttcatttctggaattacacagactatggtagaagctgtagctgaagtagaaaaaaatgaaactgtttcggaaatattgccatcaacttgtattgtgacgttagtaccaggaattcccactggggatgagaagacagtggacaaaaagaatatttctgaaaaaaaaggtaacatggatgaaaaggaggagaaggaatttaatactaaggaaaccagaatggatcttcaaataggaacagagaaggctgaaaagaatgaaggtaggatggatgcagaaaaggtggaaaagatggcagcaatgaaagaaaagcctgcagaaaacactttattcaaggcatacccaaataaaggagtgggtcaggctaataagcctgatgaaactagtaaaactagtattctggctgtatcagatgtatctagcagtaaaccaagcatcaaggctgttatagtctcttctcctaaggcaaaagctacagtttcaaaaactgaaaatcagaaaagttttccaaaatctgtgcccagagatcaaataaatgctgaaaagaaactttcagccaaggaatttggtctgcttaaacccacaagtgccaggtcaggcttggcagaaagcagcagtaaattcaaacctactcagagcagtcttaccagaggaggcagtggaaggatctcagccctgcaaggcaagctttctaaactggattacagagatataacaaaacaatctcaggaaacagaggctagaccttccatcatgaaacgggatgacagcaacaataagactttggctgagcaaaacactaagaatcctaaaagcactactggtagaagttccaaatctaaagaggagccattatttccatttaatttggatgaatttgttactgtggatgaggttatagaagaagtgaatccttctcaggccaagcagaatccactaaagggaaaaaggaaagaaactctcaaaaatgttcctttctctgaacttaacttaaagaagaaaaaggggaaaacttccactcctcgtggtgttgagggagaactatcttttgtgacattggatgagattggggaagaggaagatgcagctgcacatctagcacaagctctagtcactgtggatgaagtaattgatgaagaagaactaaatatggaagaaatggtaaaaaattcaaattcactttttacattagatgaattaattgaccaagatgattgcatttcccacagtgaacctaaagatgttactgttctgtcagtggctgaagaacaagatctcctcaaacaggaacgcttggtaactgtggatgaaattggagaagtggaagagctacctttgaatgagtcagcagacataacttttgccactttaaatactaaaggaaatgaaggagatactgtaagggattccattggcttcatttcttctcaggtgcccgaagacccttctactttagttactgtagatgaaatacaagatgacagcagtgatttgcatttagtgactttggatgaagtaactgaagaggatgaagactctctggcggattttaacaaccttaaagaagagcttaattttgttactgttgatgaagttggagaggaggaagatggagataatgatttaaaagttgagttagcacaaagcaaaaatgaccatcccacagataaaaaagggaatagaaagaagagagctgtggacacaaaaaagacaaaacttgaatccttgtcccaagtgggtccagtaaatgagaatgttatggaagaagatctaaaaaccatgattgaaagacacttaacagctaaaactccaaccaagagagttagaattgggaaaactctgccatcagaaaaagctgttgtgacagaaccagcaaaaggtgaagaggccttccagatgagtgaagttgatgaggaatctggattaaaggattcagaaccagagcgaaaacgcaagaagactgaagactcttcttcaggcaaatcagtggcgtctgatgtccctgaggaattagactttcttgtacctaaggctggattcttctgtccaatttgttccctcttctactcaggtgaaaaagcaatgacaaatcactgcaagagtacacgtcataagcaaaatactgagaaattcatggccaagcaaagaaaggaaaaggagcagaatgaggctgaagaaagaagctctaggtgattgggggaaaggaaagaattcactagaaatttgtttagggtccagttgatttgtgtatttttgttatcatttaatttgtaattttcgtttcagaagcaaatattcgtgttgtacaaatttctgattgccctaaatgtagagagactgatggggaaagtatgatgggtttgatttttatatcaaatcatcaggcatggagaaatatcttttagaagtgttaaaataaatgttcctactgtatatttaaaatacc

SEQ ID NO: 35299 - DNA, 6821 bp, Homo sapiens
  source 1..6821: mol_type = unassigned DNA
gcatgcgtgcagctctttggaggcggtagcgttttcggcgtcgagactggaggctgagtgctaaactgtgtggggcgcggatgggatccagctgttagtcggtattacagcgtgaaataaattcccagtatttttcaagattatgtaaaaggagttgtaattactgctcagcacctaggacagcacccagtgcaacacaatgtacatgaactctggcttgaggtttggggcttgtgttctgcattcaggaaagaaaagaagagaaagtttttgggaaatttaaatcttcgtaagcccttactctaaaagtatatgaaatgcagaatggtttcatggctttatttcaaaatgttttacactggctgtagaacccacttcatgaagtagtttgagttaaaatgatctaatatttgtgttttaactttcagctttgtgttattcttggaaaatttcgcaccacttgtgaattccttgaacctgggcattgcaaacccacttctgttgggcccatctcctttgcactttgctcagattaagactcagttggcgcttcagcagctgaatgccgttgcctcacatggttcaacaccaccttatactttattaaatcaggctttcttgaaaatagccatgtcgagacccaggtttaatcctcgaggagactttccacttcaaaggccacgagcacctaacccttctgggatgaggcctccaggaccatttatgaggcctggatctatgggtctcccaagattttacccagcagggagagcacgtggaattccacacagatttgctggccatgaatcttatcagaacatggggccacagagaatgaatgttcaggtaactcaacacagaactgatccaagattgaccaaagaaaaactggattttcatgaagcacaacagaagaaggggaagcctcatggtagccggtgggatgatgagcctcatatatctgcatcagtggcagtgaaacagagttctgtaacacaggttacagagcagagtcccaaagtacagagccgctatacaaaagagagtgcctcaagtatcttagcaagttttggattatctaatgaagacctagaagaacttagtcgctatcctgatgaacaactaactcctgaaaatatgccattaattttgagggatataagaatgcgaaaaatggggcgccgattacctaatttaccttctcagagcagaaataaagaaacacttggtagtgaagcagtttcaagtaatgtgatcgattatgggcatgcaagcaaatatggctacacagaagatccacttgaagtacgtatttatgatcctgaaattccaactgatgaggtcgagaatgaatttcagtcacagcagaacatttctgcatctgttcccaatccaaatgtgatatgtaattctatgtttcctgttgaagacgtatttcgccaaatggacttccccggtgagtcctccaataatcggtcctttttctcagttgagagtggaaccaagatgtcaggcttacacatttcaggaggacagtcagtccttgaacccataaaatccgtcaaccaatccattaaccaaacagttagccagacaatgagtcaatctctgattcctccatctatgaaccagcaacctttttcgtcggaattaatttcatctgtaagccagcaagagcggatcccacatgaacctgtgattaattcatctaacgtacatgttggatcaagaggaagtaaaaagaattaccagtcacaggctgacattcccattcggtctccctttggtattgtgaaagcatcctggctaccaaagttttcacatgctgatgcccagaagatgaagagacttccaactccttctatgatgaatgattattatgcagcatctccaagaatatttccacatttgtgttctctgtgtaacgtagaatgtagtcatttgaaggattggattcagcatcaaaatacatctactcatattgagagctgtcgacagttacgtcaacagtatcctgattggaatcctgagatcctcccatcgagaagaaatgagggcaatagaaaagaaaatgaaactccacgaagacgttctcattcccccagtcctaggcgttctagaagatcaagctcaagtcacagattccgtcggtctcgaagcccaatgcattacatgtataggccgagaagtcgaagtccaagaatttgccatcgtttcatttctagatacagatccagatccagatcccgttcaccatatcgaattagaaatccatttagaggtagtccaaaatgctttcgatcagttagccctgagaggatgtcaaggagatcagtgagatcatcagatagaaaaaaagcattagaagatgtagtacaacgatctgggcatgggacagaatttaataaacagaagcatcttgaagctgctgataagggacattcaccagcacaaaagcctaaaactagcagtggaacaaaaccatcagttaaacctacaagcgctacaaagagtgattcaaatctaggaggacattctattcgttgtaaatcaaagaatcttgaagatgacactttgtcagaatgtaaacaggtgtctgataaagctgtttctctccagcgaaagcttcggaaagaacagtcattgcattatggttcggttcttcttataactgaattaccagaggatggttgtactgaagaagatgtgagaaaattatttcaaccatttgggaaagtgaatgatgtcctaattgttccatatagaaaagaggcttacctagaaatggaatttaaagaggcaattactgcaattatgaagtacattgaaacaacacctcttacgataaaaggaaaaagtgtgaaaatatgtgttccaggaaagaaaaaagcacagaacaaagaggtgaagaaaaagactttagagtcaaagaaagtatctgcatctaccttaaaaagagatgcagatgcttcaaaagctgttgaaattgttacttcaacttctgctgccaaaactggacaagccaaggcatctgtagccaaagtaaacaaatctacagggaaatcagcaagttctgtaaaatctgtggtaacggtagctgttaaaggtaataaagcttcaatcaaaacagcaaaatctggtggaaagaagtctctagaagccaaaaagactgggaatgtcaaaaacaaagactctaacaaacctgtgactataccagaaaactctgaaataaagaccagtattgaagtcaaagccactgaaaactgtgctaaagaagctatttctgatgctgctttggaggccacagagaatgaaccacttaacaaggaaacagaagaaatgtgtgtgatgcttgtctctaatttgcctaataaaggatattctgtagaagaagtttatgacttagcaaaaccatttggtggtttaaaggatatcttgattttatcatctcataaaaaggcatatatagaaataaatagaaaagctgctgagtctatggtaaaattttatacctgcttcccagtattgatggatggaaatcaactctcaataagtatggctcctgaaaacatgaatataaaagatgaggaagctatatttataaccttggtaaaagaaaatgacccagaggcaaacatagatacaatttatgatcgatttgtacatcttgataatttaccggaagatggacttcagtgtgtactttgtgttggacttcagtttggaaaagtggatcaccatgtattcataagtaatagaaacaaggcaattcttcagttagatagtcctgaatctgctcagtcaatgtatagctttctgaaacaaaatccacaaaatattggtgaccatatgttgacctgctcattatctccaaagatagacttaccagaggtgcaaattgagcatgacccagaattagaaaaagaaagccctggcttgaaaaacagtccaattgatgaaagtgaggtgcaaacagcaactgatagtccctctgttaaacctaatgagcttgaagaagaaagtactcccagcattcaaacagaaactttggtacagcaggaagagccttgtgaggaagaagctgaaaaagcaacatgtgattctgactttgctgttgaaactttggagcttgaaactcaaggagaggaggtcaaagaagaaattcctcttgtagcatccgcttcagtcagtattgaacaattcactgaaaatgccgaggagtgtgctttaaatcagcagatgtttaacagtgacttggagaagaaaggggcagaaattattaaccctaaaacagcattgttaccatctgacagtgtgtttgcagaagaaaggaacctcaaaggaattctagaagaatctccatctgaagcagaagatttcatttctggaattacacagactatggtagaagctgtagctgaagtagaaaaaaatgaaactgtttcggaaatattgccatcaacttgtattgtgacgttagtaccaggaattcccactggggatgagaagacagtggacaaaaagaatatttctgaaaaaaaaggtaacatggatgaaaaggaggagaaggaatttaatactaaggaaaccagaatggatcttcaaataggaacagagaaggctgaaaagaatgaaggtaggatggatgcagaaaaggtggaaaagatggcagcaatgaaagaaaagcctgcagaaaacactttattcaaggcatacccaaataaaggagtgggtcaggctaataagcctgatgaaactagtaaaactagtattctggctgtatcagatgtatctagcagtaaaccaagcatcaaggctgttatagtctcttctcctaaggcaaaagctacagtttcaaaaactgaaaatcagaaaagttttccaaaatctgtgcccagagatcaaataaatgctgaaaagaaactttcagccaaggaatttggtctgcttaaacccacaagtgccaggtcaggcttggcagaaagcagcagtaaattcaaacctactcagagcagtcttaccagaggaggcagtggaaggatctcagccctgcaaggcaagctttctaaactggattacagagatataacaaaacaatctcaggaaacagaggctagaccttccatcatgaaacgggatgacagcaacaataagactttggctgagcaaaacactaagaatcctaaaagcactactggtagaagttccaaatctaaagaggagccattatttccatttaatttggatgaatttgttactgtggatgaggttatagaagaagtgaatccttctcaggccaagcagaatccactaaagggaaaaaggaaagaaactctcaaaaatgttcctttctctgaacttaacttaaagaagaaaaaggggaaaacttccactcctcgtggtgttgagggagaactatcttttgtgacattggatgagattggggaagaggaagatgcagctgcacatctagcacaagctctagtcactgtggatgaagtaattgatgaagaagaactaaatatggaagaaatggtaaaaaattcaaattcactttttacattagatgaattaattgaccaagatgattgcatttcccacagtgaacctaaagatgttactgttctgtcagtggctgaagaacaagatctcctcaaacaggaacgcttggtaactgtggatgaaattggagaagtggaagagctacctttgaatgagtcagcagacataacttttgccactttaaatactaaaggaaatgaaggagatactgtaagggattccattggcttcatttcttctcaggtgcccgaagacccttctactttagttactgtagatgaaatacaagatgacagcagtgatttgcatttagtgactttggatgaagtaactgaagaggatgaagactctctggcggattttaacaaccttaaagaagagcttaattttgttactgttgatgaagttggagaggaggaagatggagataatgatttaaaagttgagttagcacaaagcaaaaatgaccatcccacagataaaaaagggaatagaaagaagagagctgtggacacaaaaaagacaaaacttgaatccttgtcccaagtgggtccagtaaatgagaatgttatggaagaagatctaaaaaccatgattgaaagacacttaacagctaaaactccaaccaagagagttagaattgggaaaactctgccatcagaaaaagctgttgtgacagaaccagcaaaaggtgaagaggccttccagatgagtgaagttgatgaggaatctggattaaaggattcagaaccagagcgaaaacgcaagaagactgaagactcttcttcaggcaaatcagtggcgtctgatgtccctgaggaattagactttcttgtacctaaggctggattcttctgtccaatttgttccctcttctactcaggtgaaaaagcaatgacaaatcactgcaagagtacacgtcataagcaaaatactgagaaattcatggccaagcaaagaaaggaaaaggagcagaatgaggctgaagaaagaagctctaggtgattgggggaaaggaaagaattcactagaaatttgtttagggtccagttgatttgtgtatttttgttatcatttaatttgtaattttcgtttcagaagcaaatattcgtgttgtacaaatttctgattgccctaaatgtagagagactgatggggaaagtatgatgggtttgatttttatatcaaatcatcaggcatggagaaatatcttttagaagtgttaaaataaatgttcctactgtatatttaaaatacca

SEQ ID NO: 35300 - DNA, 760 bp, Homo sapiens
  source 1..760: mol_type = unassigned DNA
ggaggcggtagcgttttcggcgtcgagactggaggctgagtgctaaactgtgtggggcgcggatgggatccagctgttagtcgggtaggcataggcgaagtttggggccaggaccagaaattgtagtagtttaaaggagtcccgatgaaaaacttgtcaccaggatccagcgatttatgttcaagtactttttccaacgagctctggaattttgcacaaaaaattttctgctttttcccctcatttgttgtaaaggattattttttcagggatgttgtgcttgctggttcagatttacaattaaaaattgataacctggagaaaaggattgaccaaaaaaaggttatttatttcataagatgactatccataaatcttccgatgaacgaacctctttatgaccagagctcctggggttaaaggagaaaggttttataatggctgtcttaatttgtttggtggttttccagctttgtgttattcttggaaaatttcgcaccacttgtgaattccttgaacctgggcattgcaaacccacttctgttgggcccatctcctttgcactttgctcagattaagactcagttggcgcttcagcagctgaatgccgttgcctcacatggttcaacaccaccttatactttattaaatcaggctttcttgaaaatagccatgtcgagacccaggtttaatcctcgaggagactttccacttcaaaggccacgagcacctaacccttctgggatgaggcctccaggac

SEQ ID NO: 35301 - DNA, 889 bp, Homo sapiens
  source 1..889: mol_type = unassigned DNA
gtgcagctctttggaggcggtagcgttttcggcgtcgagactggaggctgagtgctaaactgtgtggggcgcggatgggatccagctgttagtcggctttgtgttattcttggaaaatttcgcaccacttgtgaattccttgaacctgggcattgcaaacccacttctgttgggcccatctcctttgcactttgctcagattaagactcagttggcgcttcagcagctgaatgccgttgcctcacatggttcaacaccaccttatactttattaaatcaggctttcttgaaaatagccatgtcgagacccaggtttaatcctcgaggagactttccacttcaaaggccacgagcacctaacccttctgggatgaggcctccaggaccatttatgaggcctggatctatgggtctcccaagattttacccagcagggagagcacgtggaattccacacagatttgctggccatgaatcttatcagaacatggggccacagagaatgaatgttcaggtaactcaacacagaactgatccaagattgaccaaagaaaaactggattttcatgaagcacaacagaagaaggggaagcctcatggtagccggtgggatgatgagcctcatatatctgcatcagtggcagtgaaacagagttctgtaacacaggttacagagcagagtcccaaagtacagagccgctatacaaaagagagtgcctcaagtatcttagcaagttttggattatctaatgaagacctagaagaacttagtcgctatcctgatgaacaactaactcctgaaaatatgccattaattttgagggatataagaatgcgaaaaatggggcgccgattacctaatttaccttctcagagcagaaataaagaa

SEQ ID NO: 35302 - DNA, 731 bp, Homo sapiens
  source 1..731: mol_type = unassigned DNA
ggaggcggtagcgttttcggcgtcgagactggaggctgagtgctaaactgtgtggggcgcggatgggatccagctgttagtcgggtaggcatagtattacagcgtgaaataaattcccagtatttttcaagattatgtaaaaggagttgtaattactgctcagcacctaggacagcacccagtgcaacacaatgtacatgaactctggcttgaggtttggggcttgtgttctgcattcaggaaagaaaagaagagaaagtttttgggaaatttaaatcttcgtaagcccttactctaaaagtatatgaaatgcagaatggtttcatggctttatttcaaaatgttttacactggctgtagaacccacttcatgaagtagtttgagttaaaatgatctaatatttgtgttttaactttcagctttgtgttattcttggaaaatttcgcaccacttgtgaattccttgaacctgggcattgcaaacccacttctgttgggcccatctcctttgcactttgctcagattaagactcagttggcgcttcagcagctgaatgccgttgcctcacatggttcaacaccaccttatactttattaaatcaggctttcttgaaaatagccatgtcgagacccaggtttaatcctcgaggagactttccacttcaaaggccacgagcacctaacccttctgggatgaggcctccaggaccatttatgaggcctggatcta

SEQ ID NO: 35303 - DNA, 595 bp, Homo sapiens
  source 1..595: mol_type = unassigned DNA
atgcgtgcagctctttggaggcggtagcgttttcggcgtcgagactggaggctgagtgctaaactgtgtggggcgcggatgggatccagctgttagtcgggtaggcatagtgttttgaaatttgtgatggaaaattaaaatggaaggaaaataagtatatagaagatgagaagagaataatggaaaggaaaaagagtgaggaaaagctttgtgttattcttggaaaatttcgcaccacttgtgaattccttgaacctgggcattgcaaacccacttctgttgggcccatctcctttgcactttgctcagattaagactcagttggcgcttcagcagctgaatgccgttgcctcacatggttcaacaccaccttatactttattaaatcaggctttcttgaaaatagccatgtcgagacccaggtttaatcctcgaggagactttccacttcaaaggccacgagcacctaacccttctgggatgaggcctccaggaccatttatgaggcctggatctatgggtctcccaagattttacccagcagggagagcacgtggaattccacacagatttgctggccatgaatcttatcaga

SEQ ID NO: 35304 - DNA, 585 bp, Homo sapiens
  source 1..585: mol_type = unassigned DNA
atgcgtgcagctctttggaggcggtagcgttttcggcgtcgagactggaggctgagtgctaaactgtgtggggcgcggatgggatccagctgttagtcggtgttttgaaatttgtgatggaaaattaaaatggaaggaaaataagtatatagaagatgagaagagaataatggaaaggaaaaagagtgaggaaaagctttgtgttattcttggaaaatttcgcaccacttgtgaattccttgaacctgggcattgcaaacccacttctgttgggcccatctcctttgcactttgctcagattaagactcagttggcgcttcagcagctgaatgccgttgcctcacatggttcaacaccaccttatactttattaaatcaggctttcttgaaaatagccatgtcgagacccaggtttaatcctcgaggagactttccacttcaaaggccacgagcacctaacccttctgggatgaggcctccaggaccatttatgaggcctggatctatgggtctcccaagattttacccagcagggagagcacgtggaattccacacagatttgctggccatgaatcttatcaga

SEQ ID NO: 35305 - DNA, 4468 bp, Homo sapiens
  source 1..4468: mol_type = unassigned DNA
ataaatagagcatagaatggaatatgataaatagtgtgacatagaatggaaggtggggcacagatggcacataggaattctgaacctttcttgtaaacatttttaatcctctatttaaaagaatacctatcattctcttcagttttgccttggctttacaacattttaaggattgttttctcttgtttcctttaaataaggattaaccttacctttgtagtcatatatctgaaacctgaaagaagaatatattccaaacttttaaaacaattaaaaacatttttattgtagtaaaatacacaaattttaccgtttgtaagacataaatttaacattttaatcatgtttaagtgtttgttcactgatattcagcaccttcacattgtgcaaccatcaccaccatccatttgtgaacttttgtctcctcaaactgaagttttctatccttttgacaataactcgccattaattcagcccttatcaaccattatttctgtttttataaatttagttacctcatgtatgtggaattatatttgcttttttgtgactggctcatgtcacttagtataatgtctctaaggttcatccatgttgcagcatgtgtcagatttttcttcatttttaaagctgagtaataattctgttttacgcatgtaacacatttttatatccactcatccattgatggacagttgggttgcttctccctttgtctgttgtgaataatgcttctgtgaacatgggtgtacaaatacatgtttaagtatcggctttcattccttttaggtgtatactaaaaagtggaattgttggattatgtggttattctaattccaatttttttaaagaactattcataactttttaatcttctccaaaggcaattcttcagttagatagtcctgaatctgctcagtcaatgtatagctttctgaaacaaaatccacaaaatattggtgaccatatgttgacctgctcattatctccaaagatagacttaccagaggtaagatttatctttcttcagcttttgtgattttagaaaatacagagaacataaaggtcattctcaggtagtagtcaaactgtttctgtgtttagagatgatttttataatttgtgttgcaatcagtgttccaattttcatagtttataaagcagtataaatttgtctaaatgagaataaagaaattttcaacaatgtaacatatatgcatttttgaatacttactgttgacatgtaggtatctacatttttgtgtatagtgactctttgtatgtaacatgattgtctccagaatgcagctactttgaatccattttggcttcctctgggtagaaagaagtttgttttattcttctttttgtttcagttacatttattataaactgtttttgtgttaagaaataagatttcacaggttcttggcctacacagtagtacatgtaggaaagctatggatagtccacctttgaaagcattaaattcaaactcaatctattttctccttctattccattgtatgctgatatcagaggtgcaaattgagcatgacccagaattagaaaaagaaagccctggcttgaaaaacagtccaattgatgaaagtgaggtgcaaacagcaactgatagtccctctgttaaacctaatgagcttgaagaagaaagtactcccagcattcaaacagaaactttggtacagcaggaagagccttgtgaggaagaagctgaaaaagcaacatgtgattctgactttgctgttgaaactttggagcttgaaactcaaggagaggaggtcaaagaagaaattcctcttgtagcatccgcttcagtcagtattgaacaattcactgaaaatgccgaggagtgtgctttaaatcagcagatgtttaacagtgacttggagaagaaaggggcagaaattattaaccctaaaacagcattgttaccatctgacagtgtgtttgcagaagaaaggaacctcaaaggaattctagaagaatctccatctgaagcagaagatttcatttctggaattacacagactatggtagaagctgtagctgaagtagaaaaaaatgaaactgtttcggaaatattgccatcaacttgtattgtgacgttagtaccaggaattcccactggggatgagaagacagtggacaaaaagaatatttctgaaaaaaaaggtaacatggatgaaaaggaggagaaggaatttaatactaaggaaaccagaatggatcttcaaataggaacagagaaggctgaaaagaatgaaggtaggatggatgcagaaaaggtggaaaagatggcagcaatgaaagaaaagcctgcagaaaacactttattcaaggcatacccaaataaaggagtgggtcaggctaataagcctgatgaaactagtaaaactagtattctggctgtatcagatgtatctagcagtaaaccaagcatcaaggctgttatagtctcttctcctaaggcaaaagctacagtttcaaaaactgaaaatcagaaaagttttccaaaatctgtgcccagagatcaaataaatgctgaaaagaaactttcagccaaggaatttggtctgcttaaacccacaagtgccaggtcaggcttggcagaaagcagcagtaaattcaaacctactcagagcagtcttaccagaggaggcagtggaaggatctcagccctgcaaggcaagctttctaaactggattacagagatataacaaaacaatctcaggaaacagaggctagaccttccatcatgaaacgggatgacagcaacaataagactttggctgagcaaaacactaagaatcctaaaagcactactggtagaagttccaaatctaaagaggagccattatttccatttaatttggatgaatttgttactgtggatgaggttatagaagaagtgaatccttctcaggccaagcagaatccactaaagggaaaaaggaaagaaactctcaaaaatgttcctttctctgaacttaacttaaagaagaaaaaggggaaaacttccactcctcgtggtgttgagggagaactatcttttgtgacattggatgagattggggaagaggaagatgcagctgcacatctagcacaagctctagtcactgtggatgaagtaattgatgaagaagaactaaatatggaagaaatggtaaaattcaaattcactttttacattagatgaattaattgaccaagatgattgcatttcccacagtgaacctaaagatgttactgttctgtcagtggctgaagaacaagatctcctcaaacaggaacgcttggtaactgtggatgaaattggagaagtggaagagctacctttgaatgagtcagcagacataacttttgccactttaaatactaaaggaaatgaaggagatactgtaagggattccattggcttcatttcttctcaggtgcccgaagacccttctactttagttactgtagatgaaatacaagatgacagcagtgatttgcatttagtgactttggatgaagtaactgaagaggatgaagactctctggcggattttaacaaccttaaagaagagcttaattttgttactgttgatgaagttggagaggaggaagatggagataatgatttaaaagttgagttagcacaaagcaaaaatgaccatcccacagataaaaaagggaatagaaagaagagagctgtggacacaaaaaagacaaaacttgaatccttgtcccaagtgggtccagtaaatgagaatgttatggaagaagatctaaaaaccatgattgaaagacacttaacagctaaaactccaaccaagagagttagaattgggaaaactctgccatcagaaaaagctgttgtgacagaaccagcaaaaggtgaagaggccttccagatgagtgaagttgatgaggaatctggattaaaggattcagaaccagagcgaaaacgcaagaagactgaagactcttcttcaggcaaatcagtggcgtctgatgtccctgaggaattagactttcttgtacctaaggctggattcttctgtccaatttgttccctcttctactcaggtgaaaaagcaatgacaaatcactgcaagagtacacgtcataagcaaaatactgagaaattcatggccaagcaaagaaaggaaaaggagcagaatgaggctgaagaaagaagctctaggtgattgggggaaaggaaagaattcactagaaatttgtttagggtccagttgatttgtgtatttttgttatcatttaatttgtaattttcgtttcagaagcaaatattcgtgttgtacaaatttctgattgccctaaatgtagagagactgatggggaaagtatgatgggtttgatttttatatcaaatcatcaggcatggagaaatatcttttagaagtgttaaaataaatgttcctactgtatatttaaaatacc

SEQ ID NO: 35306 - DNA, 3515 bp, Homo sapiens
  source 1..3515: mol_type = unassigned DNA
gtagagagccgcgcgcgccgtctgcgatgccccgggacggcgttcctgccgggaataccaccccggcggcagcccaggctgccgcgcagagcccggattccgcgactgccggggcaccgcaggttttggactcgctgaagcgctttgtgttattcttggaaaatttcgcaccacttgtgaattccttgaacctgggcattgcaaacccacttctgttgggcccatctcctttgcactttgctcagattaagactcagttggcgcttcagcagctgaatgccgttgcctcacatggttcaacaccaccttatactttattaaatcaggctttcttgaaaatagccatgtcgagacccaggtttaatcctcgaggagactttccacttcaaaggccacgagcacctaacccttctgggatgaggcctccaggaccatttatgaggcctggatctatgggtctcccaagattttacccagcagggagagcacgtggaattccacacagatttgctggccatgaatcttatcagaacatggggccacagagaatgaatgttcaggtaactcaacacagaactgatccaagattgaccaaagaaaaactggattttcatgaagcacaacagaagaaggggaagcctcatggtagccggtgggatgatgagcctcatatatctgcatcagtggcagtgaaacagagttctgtaacacaggttacagagcagagtcccaaagtacagagccgctatacaaaagagagtgcctcaagtatcttagcaagttttggattatctaatgaagacctagaagaacttagtcgctatcctgatgaacaactaactcctgaaaatatgccattaattttgagggatataagaatgcgaaaaatggggcgccgattacctaatttaccttctcagagcagaaataaagaaacacttggtagtgaagcagtttcaagtaatgtgatcgattatgggcatgcaagcaaatatggctacacagaagatccacttgaagtacgtatttatgatcctgaaattccaactgatgaggtcgagaatgaatttcagtcacagcagaacatttctgcatctgttcccaatccaaatgtgatatgtaattctatgtttcctgttgaagacgtatttcgccaaatggacttccccggtgagtcctccaataatcggtcctttttctcagttgagagtggaaccaagatgtcaggcttacacatttcaggaggacagtcagtccttgaacccataaaatccgtcaaccaatccattaaccaaacagttagccagacaatgagtcaatctctgattcctccatctatgaaccagcaacctttttcgtcggaattaatttcatctgtaagccagcaagagcggatcccacatgaacctgtgattaattcatctaacgtacatgttggatcaagaggaagtaaaaagaattaccagtcacaggctgacattcccattcggtctccctttggtattgtgaaagcatcctggctaccaaagttttcacatgctgatgcccagaagatgaagagacttccaactccttctatgatgaatgattattatgcagcatctccaagaatatttccacatttgtgttctctgtgtaacgtagaatgtagtcatttgaaggattggattcagcatcaaaatacatctactcatattgagagctgtcgacagttacgtcaacagtatcctgattggaatcctgagatcctcccatcgagaagaaatgagggcaatagaaaagaaaatgaaactccacgaagacgttctcattcccccagtcctaggcgttctagaagatcaagctcaagtcacagattccgtcggtctcgaagcccaatgcattacatgtataggccgagaagtcgaagtccaagaatttgccatcgtttcatttctagatacagatccagatccagatcccgttcaccatatcgaattagaaatccatttagaggtagtccaaaatgctttcgatcagttagccctgagaggatgtcaaggagatcagtgagatcatcagatagaaaaaaagcattagaagatgtagtacaacgatctgggcatgggacagaatttaataaacagaagcatcttgaagctgctgataagggacattcaccagcacaaaagcctaaaactagcagtggaacaaaaccatcagttaaacctacaagcgctacaaagagtgattcaaatctaggaggacattctattcgttgtaaatcaaagaatcttgaagatgacactttgtcagaatgtaaacaggtgtctgataaagctgtttctctccagcgaaagcttcggaaagaacagtcattgcattatggttcggttcttcttataactgaattaccagaggatggttgtactgaagaagatgtgagaaaattatttcaaccatttgggaaagtgaatgatgtcctaattgttccatatagaaaagaggcttacctagaaatggaatttaaagaggcaattactgcaattatgaagtacattgaaacaacacctcttacgataaaaggaaaaagtgtgaaaatatgtgttccaggaaagaaaaaagcacagaacaaagaggtgaagaaaaagactttagagtcaaagaaagtatctgcatctaccttaaaaagagatgcagatgcttcaaaagctgttgaaattgttacttcaacttctgctgagtcggtggatcagactcagcagctggtgcccctcgtgaggaacactgcaagggatcacgacggaacccccgaaaatgaaggcgaagagactgtgcagtcagccctctttggattccagtacgatgcatcagaccataccatggcgtggctaggacccaacacagtaccagaagtgaaggaaatgatcctgcaggacccgcagctccagacaacacagcttcctcagacgacacaagccccggacattacctgggggatgctgaagaagacaacttacaaggctgagcaaatcctgctccagacacagaaaccattcactccagataatttgttccttgctctgctctctggtgatgcaaagccggaatacgagcagtaatcgctacgcctgacaaacctgctgctgtgcacatctgtactcttcaatcaacaaaacctgatgcaaaaaacaaaagggggagatgtaggagatcagtcagggtggtgggaaaagttataaggagagacgcaaaccttcttggaagtccaggaggttttgcaaagcttcgggagagaataaaggctgaaggcagctaaattctcttaccctgacgctaagggcaagaagtaggtaacaaaggagtgtaaaggaatttatctagacgagttttatttacttttgcagacctttgatcatcctattgcgcgcaggactgctcccaaggcggtgggggtgacaattacctacagattgtgttggctccaggcctttgtcattaaatctgtactgaataaatacaagcggctccagctt

SEQ ID NO: 35307 - DNA, 4544 bp, Homo sapiens
  source 1..4544: mol_type = unassigned DNA
gctggctccgccggccgccggctcccagacgcaagcggagggcggaggggaggggcaggcggcgcccgggagggaggcaccgggccgcgggccaagcctaccgggggtcccttgctacccatatgtgtgaagaaaagggggaaatgaaagccctagaacccacactgcagtgggcatgggatcatcctggaaccaggagaaacgaggttagggctaccaccttaaccgcccaggtgctggctctgcgtgaatatcttaggaaatgcaagctgaggacaggtcacaatttgggtctgcagcagaaatgctttcagaacagacagcagcgctggggacaggatgggaatcaatgaatgtacagctggatggagcagagccccaggtggaaaggggaagccaggaagagcggccatggagaacagtaccaggacctctggagcacctgtgctgtgaccttgaagaggagccacagtcccttcaggagaaggctcagtctgctccctgggttcctgcaattccccaggaggggaacactggagactgggagatggcagctgcacttcttgcggctggatcacagggcctggtaaccatcaaggatgtgtcactgtgcttctctcaggaggagtggcggagcctggacccctctcagacagacttttatggagaatatgtcatgcaggaaaactgtgggatagtagtctctctgagatttccaattcccaaactggacatgctttctcaactagaaggaggagaagaacaatgggtccctgacccccaggacttagaggagagggacattctgagggtcacatatacaggagatggaagtgaacatgagggggatacccctgaactagaagcagaacctcccagaatgttatccagcgtgtctgaagatactgttctctggaacccggagcatgatgagagctgggattccatgcccagcagctccagaggaatgctcctggggcccccttttcttcaggaagatagtttctcaaacctgctgtgtagcacagagatggattccctgttaagaccccacacatgcccccagtgtgggaaacagtttgtatggggttcccaccttgccaggcatcaacaaacacacactggggagagaccctacagctgcctcaagtgtgagaagacctttgggcgaagacatcacctcatcaggcaccagaaaacccacctacatgacaagaccagcaggtgctctgagtgtggtaagaatttccgatgcaactcccatctggccagccaccagagagtgcatgcagaaggcaaatcctgcaaaggccaagaggttggagagagccctggcacaaggaaacggcagcgtgccccaccagtgccaaagtgtcacgtgtgcactgaatgtgggaagagctttggccgaaggcaccaccttgtgagacactggctgacccacactggggagaagcccttccagtgccctcgctgtgagaagagctttggccgaaaacatcacctggacaggcacctgctcacccaccagggacaaagtccccggaacagctgggacagaggaacatctgtcttttgaaatctgtttccactacagctatggtcaagtctatcagccggtgctaccaggagtcactgccagggctgccgttctcctgaaccccagtggccagaatcataagccctgaccccatccctagaaagatgaggtcccagcaatggccagagcatttctcaccagttctgtgagatagcacataaaaatagagttctttgggcaaaacttttgggaagcaatgcatcctacatgggctgatattcagcctgagctgttctcaagaggagagtggtactggcagtttatggctgaaatccattctgattggttggagtctatgctataccagttgttaaacattttgagtatcactcttgcatactgttactattatattttctctatatatagacagaaaggccattttagaatattaaaggctctgaaaatttctgcagtagacccaactgaaggttctattaaggcagtgtttcctaaatgtatttgacctcagtatcctttctatttacatcccacagaactggtgactatgaaacactctggtgaacactgggttagagagtaacaaggaaacaagagatagtgatcaggcatccagagcccccttttttatccatatgaaagccaggggggccagaccttgttcatgtgtgggtctgtcttccttatgccaatcagcagtatatacatcacctctcaccctcacctgctgaaaaaataacctttttacccattattcctactcccttcatcctgcacatacatatatccagctgagagatcacactacaaggctaagagatgatctaatacccccaaatagccctggcccacacagaaaaacagaaaaacaaaaaaaactttatccccttgaacagtcccctctctcctcttgactgtctttatgtgtctgtgtatttgtgtgcagggtctttgaagacagcatgctatgtgcaaactgtacaagctaggttttctaggggctgtgttctggggatgagggtagtggggattatatggggttttttctttgtttcaagacaggaagcagtctggttaagggagaactagtggaaagggttaaatgacaggttaagttgagtacaaagctttcccagtactgctgagattaagacaattgtggatgtgtatgtctaggtttgaatctctgggctgcagattgcttttgccctggcagagaaagaggagtctttggggaggtgagctgtttcttgttgatttcaggcaagaggcacatagaaactttgtattgagtggggattttgttttaagtgctggaaaattagggcaggaattacgtgtttgcaagttgttgccatcactggtttgaatttgactgcctcatcaaggggcaagagttattcttgaagatctcattctcccagaaacagaactttagggaaaatggctgtggcttagcttttcagctgctgcagggtaataagctttctggttggttttccttccaattctggaaaggtgtccacactaagacccttaactctagggcttgcataagtattctagcatcgttagctaatgagttggtcattgtttctctttatcaataattgtgttaataccaatcttataatttaaaaattatcttgtatgtaagagcagttcggggttagggaggaagaggagcaaagtgggatattttctctttaatgcttagatactgtttcttccctaagatgtgtttctcaaccacaattggtggaatgaaccagagaggcaagaggaagtgaattgcaccaatttagtttagcgactgtgccttttgcaggaaaaactgggtgaatcacagctcctcagagtcctggactcaactagaattgaagatagacttattttgctgactgggcttcttagagtttatgtgacttgaacagcttggcccctgcctcccttctgctactgtgagcagccttccttcttccttcattcttcctggaatgcagttctcttgcttatgatcctatgaataaggcaaaatggctggtctttgtaaggcaggtcttgccctagcttctcagaaacaggagcattttaggatcagtattaggagatgccccagggagtaagaaagtattgggttcagtgataaatctggactctgacatttcttttactctccctctttaatactaaaagctctgcataagcaatggttcagaacctgtcttgggtacagacctgttgaatctgacagaaaccagaaacgcacttttgagaaaaagacatttgtaattcactcagttttccatacacatttagcaggttcaaagcccatctgtggaatccctaaactgccttcaaagaaagggagttccccgatctaaaatggtcattatatatttgtgtcaagaattagaaggcaagggtcactaaatattttaaggattaaggtaccagaggcatcagtggtataaggatggagtctggtctttaattacgacaagggtattgcttacattctactctctggttttcaaaaagatctgacatgctgacaaatccagctcctcacaaatcttgtttgaaggacttgtgggaagtgatattccttactattagatcacgccccttataactacatgttaacatccagccttttatctgtttgagtaattgtagggatagaaagtgaagcccccagagttaggtgcaagtatagcacccagctgaaaggcatcatggagtctaagggccttctacagaaggggcaatcctttgggttatttctggtgtaccactgtcttctctacctcggtccaacaccacctctcttggacaaaaaataaaacaagcaacagccatcagatgagtgaatagatttgaatgatttttcccacagggaatcagcctcaaatgttcatgtttcaccccgtcccctttaaataaaaagaatctctgtgttctctttgggcaaaatgtaaaa

SEQ ID NO: 35308 - DNA, 1856 bp, Homo sapiens
  source 1..1856: mol_type = unassigned DNA
gtgggaggcccagtagccagagcggaaaatggtcacaatttgggtctgcagcagaaatgctttcagaacagacagcagcgctggggacaggatgggaatcaatgaatgtacagctggatggagcagagccccaggtggaaaggggaagccaggaagagcggccatggagaacagtaccaggacctctggagcacctgtgctgtgaccttgaagaggagccacagtcccttcaggagaaggctcagtctgctccctgggttcctgcaattccccaggaggggaacactggagactgggagatggcagctgcacttcttgcggctggatcacaggtgagctctgcttcccttggcgtctcctgtggtcccatcactgctgcctttgtattgctttcgcatcagcccattgatgagttggctcacatgatcatcaatggatttccaattcccaaactggacatgctttctcaactagaaggaggagaagaacaatgggtccctgacccccaggacttagaggagagggacattctgagggtcacatatacaggagatggaagtgaacatgagggggatacccctgaactagaagcagaacctcccagaatgttatccagcgtgtctgaagatactgttctctggaacccggagcatgatgagagctgggattccatgcccagcagctccagaggaatgctcctggggcccccttttcttcaggaagatagtttctcaaacctgctgtgtagcacagagatggattccctgttaagaccccacacatgcccccagtgtgggaaacagtttgtatggggttcccaccttgccaggcatcaacaaacacacactggggagagaccctacagctgcctcaagtgtgagaagacctttgggcgaagacatcacctcatcaggcaccagaaaacccacctacatgacaagaccagcaggtgctctgagtgtggtaagaatttccgatgcaactcccatctggccagccaccagagagtgcatgcagaaggcaaatcctgcaaaggccaagaggttggagagagccctggcacaaggaaacggcagcgtgccccaccagtgccaaagtgtcacgtgtgcactgaatgtgggaagagctttggccgaaggcaccaccttgtgagacactggctgacccacactggggagaagcccttccagtgccctcgctgtgagaagagctttggccgaaaacatcacctggacaggcacctgctcacccaccagggacaaagtccccggaacagctgggacagaggaacatctgtcttttgaaatctgtttccactacagctatggtcaagtctatcagccggtgctaccaggagtcactgccagggctgccgttctcctgaaccccagtggccagaatcataagccctgaccccatccctagaaagatgaggtcccagcaatggccagagcatttctcaccagttctgtgagatagcacataaaaatagagttctttgggcaaaacttttgggaagcaatgcatcctacatgggctgatattcagcctgagctgttctcaagaggagagtggtactggcagtttatggctgaaatccattctgattggttggagtctatgctataccagttgttaaacattttgagtatcactcttgcatactgttactattatattttctctatatatagacagaaaggccattttagaatattaaaggctctgaaaatttctgcagtagacccaactgaaggttctattaaggcagtgtttcctaaatgtatttgacctcagtatcctttctatttacatcccacagaactggtgactatgaaacactctggtgaacactg

SEQ ID NO: 35309 - DNA, 4872 bp, Homo sapiens
  source 1..4872: mol_type = unassigned DNA
gccggagggagctgcggctggagggagggacgcctggcttcccggggcggctggtgggggctcggtcacccataggggctgggaggaggatcggcgcgtcttccgggttgctgcctttcccgggggtctgccccgctgacattctgtgcccgcctctcgccctgtctccccgtgcccatcgcaactgtcaggccctgcgggctcccgccgctgtcactcgcgcacaggttaccccgtggctccctttctcttcacttgctcatgccccagctcatgggaaacctgttttctgacctcacttcccctgctccagttctgccttgctcggattctctgaaatctgaccctttccaggggcactgtgacaagaagaagggaagaagcaaccttacccctgagcaggctcccgtcccgcccatgccctacccgtggcaggggccagggttctctgatggacggagccaactcgtccgtgtgcccttgggctactcatttttataacatggccccttttctgttcatcagcactggctgcagaaacttccttttgcaggtcccttgctacccatatgtgtgaagaaaagggggaaatgaaagccctagaacccacactgcagtgggcatgggatcatcctggaaccaggagaaacgaggttagggctaccaccttaaccgcccaggtgctggctctgcgtgaatatcttaggaaatgcaagctgaggacaggtcacaatttgggtctgcagcagaaatgctttcagaacagacagcagcgctggggacaggatgggaatcaatgaatgtacagctggatggagcagagccccaggtggaaaggggaagccaggaagagcggccatggagaacagtaccaggacctctggagcacctgtgctgtgaccttgaagaggagccacagtcccttcaggagaaggctcagtctgctccctgggttcctgcaattccccaggaggggaacactggagactgggagatggcagctgcacttcttgcggctggatcacagggcctggtaaccatcaaggatgtgtcactgtgcttctctcaggaggagtggcggagcctggacccctctcagacagacttttatggagaatatgtcatgcaggaaaactgtgggatagtagtctctctgagatttccaattcccaaactggacatgctttctcaactagaaggaggagaagaacaatgggtccctgacccccaggacttagaggagagggacattctgagggtcacatatacaggagatggaagtgaacatgagggggatacccctgaactagaagcagaacctcccagaatgttatccagcgtgtctgaagatactgttctctggaacccggagcatgatgagagctgggattccatgcccagcagctccagaggaatgctcctggggcccccttttcttcaggaagatagtttctcaaacctgctgtgtagcacagagatggattccctgttaagaccccacacatgcccccagtgtgggaaacagtttgtatggggttcccaccttgccaggcatcaacaaacacacactggggagagaccctacagctgcctcaagtgtgagaagacctttgggcgaagacatcacctcatcaggcaccagaaaacccacctacatgacaagaccagcaggtgctctgagtgtggtaagaatttccgatgcaactcccatctggccagccaccagagagtgcatgcagaaggcaaatcctgcaaaggccaagaggttggagagagccctggcacaaggaaacggcagcgtgccccaccagtgccaaagtgtcacgtgtgcactgaatgtgggaagagctttggccgaaggcaccaccttgtgagacactggctgacccacactggggagaagcccttccagtgccctcgctgtgagaagagctttggccgaaaacatcacctggacaggcacctgctcacccaccagggacaaagtccccggaacagctgggacagaggaacatctgtcttttgaaatctgtttccactacagctatggtcaagtctatcagccggtgctaccaggagtcactgccagggctgccgttctcctgaaccccagtggccagaatcataagccctgaccccatccctagaaagatgaggtcccagcaatggccagagcatttctcaccagttctgtgagatagcacataaaaatagagttctttgggcaaaacttttgggaagcaatgcatcctacatgggctgatattcagcctgagctgttctcaagaggagagtggtactggcagtttatggctgaaatccattctgattggttggagtctatgctataccagttgttaaacattttgagtatcactcttgcatactgttactattatattttctctatatatagacagaaaggccattttagaatattaaaggctctgaaaatttctgcagtagacccaactgaaggttctattaaggcagtgtttcctaaatgtatttgacctcagtatcctttctatttacatcccacagaactggtgactatgaaacactctggtgaacactgggttagagagtaacaaggaaacaagagatagtgatcaggcatccagagcccccttttttatccatatgaaagccaggggggccagaccttgttcatgtgtgggtctgtcttccttatgccaatcagcagtatatacatcacctctcaccctcacctgctgaaaaaataacctttttacccattattcctactcccttcatcctgcacatacatatatccagctgagagatcacactacaaggctaagagatgatctaatacccccaaatagccctggcccacacagaaaaacagaaaaacaaaaaaaactttatccccttgaacagtcccctctctcctcttgactgtctttatgtgtctgtgtatttgtgtgcagggtctttgaagacagcatgctatgtgcaaactgtacaagctaggttttctaggggctgtgttctggggatgagggtagtggggattatatggggttttttctttgtttcaagacaggaagcagtctggttaagggagaactagtggaaagggttaaatgacaggttaagttgagtacaaagctttcccagtactgctgagattaagacaattgtggatgtgtatgtctaggtttgaatctctgggctgcagattgcttttgccctggcagagaaagaggagtctttggggaggtgagctgtttcttgttgatttcaggcaagaggcacatagaaactttgtattgagtggggattttgttttaagtgctggaaaattagggcaggaattacgtgtttgcaagttgttgccatcactggtttgaatttgactgcctcatcaaggggcaagagttattcttgaagatctcattctcccagaaacagaactttagggaaaatggctgtggcttagcttttcagctgctgcagggtaataagctttctggttggttttccttccaattctggaaaggtgtccacactaagacccttaactctagggcttgcataagtattctagcatcgttagctaatgagttggtcattgtttctctttatcaataattgtgttaataccaatcttataatttaaaaattatcttgtatgtaagagcagttcggggttagggaggaagaggagcaaagtgggatattttctctttaatgcttagatactgtttcttccctaagatgtgtttctcaaccacaattggtggaatgaaccagagaggcaagaggaagtgaattgcaccaatttagtttagcgactgtgccttttgcaggaaaaactgggtgaatcacagctcctcagagtcctggactcaactagaattgaagatagacttattttgctgactgggcttcttagagtttatgtgacttgaacagcttggcccctgcctcccttctgctactgtgagcagccttccttcttccttcattcttcctggaatgcagttctcttgcttatgatcctatgaataaggcaaaatggctggtctttgtaaggcaggtcttgccctagcttctcagaaacaggagcattttaggatcagtattaggagatgccccagggagtaagaaagtattgggttcagtgataaatctggactctgacatttcttttactctccctctttaatactaaaagctctgcataagcaatggttcagaacctgtcttgggtacagacctgttgaatctgacagaaaccagaaacgcacttttgagaaaaagacatttgtaattcactcagttttccatacacatttagcaggttcaaagcccatctgtggaatccctaaactgccttcaaagaaagggagttccccgatctaaaatggtcattatatatttgtgtcaagaattagaaggcaagggtcactaaatattttaaggattaaggtaccagaggcatcagtggtataaggatggagtctggtctttaattacgacaagggtattgcttacattctactctctggttttcaaaaagatctgacatgctgacaaatccagctcctcacaaatcttgtttgaaggacttgtgggaagtgatattccttactattagatcacgccccttataactacatgttaacatccagccttttatctgtttgagtaattgtagggatagaaagtgaagcccccagagttaggtgcaagtatagcacccagctgaaaggcatcatggagtctaagggccttctacagaaggggcaatcctttgggttatttctggtgtaccactgtcttctctacctcggtccaacaccacctctcttggacaaaaaataaaacaagcaacagccatca

SEQ ID NO: 35310 - DNA, 1823 bp, Homo sapiens
  source 1..1823: mol_type = unassigned DNA
gctggctccgccggccgccggctcccagacgcaagcggagggcggaggggaggggcaggcggcgcccgggagggaggcaccgggccgcgggccaagcctaccgggggtcacaatttgggtctgcagcagaaatgctttcagaacagacagcagcgctggggacaggatgggaatcaatgaatgtacagctggatggagcagagccccaggtggaaaggggaagccaggaagagcggccatggagaacagtaccaggacctctggagcacctgtgctgtgaccttgaagaggagccacagtcccttcaggagaaggctcagtctgctccctgggttcctgcaattccccaggaggggaacactggagactgggagatggcagctgcacttcttgcggctggatcacagggcctggtaaccatcaaggatgtgtcactgtgcttctctcaggaggagtggcggagcctggacccctctcagacagacttttatggagaatatgtcatgcaggaaaactgtgggatagtagtctctctgagatttccaattcccaaactggacatgctttctcaactagaaggaggagaagaacaatgggtccctgacccccaggacttagaggagagggacattctgagggtcacatatacaggagatggaagtgaacatgagggggatacccctgaactagaagcagaacctcccagaatgttatccagcgtgtctgaagatactgttctctggaacccggagcatgatgagagctgggattccatgcccagcagctccagaggaatgctcctggggcccccttttcttcaggaagatagtttctcaaacctgctgtgtagcacagagatggattccctgttaagaccccacacatgcccccagtgtgggaaacagtttgtatggggttcccaccttgccaggcatcaacaaacacacactggggagagaccctacagctgcctcaagtgtgagaagacctttgggcgaagacatcacctcatcaggcaccagaaaacccacctacatgacaagaccagcaggtgctctgagtgtggtaagaatttccgatgcaactcccatctggccagccaccagagagtgcatgcagaaggcaaatcctgcaaaggccaagaggttggagagagccctggcacaaggaaacggcagcgtgccccaccagtgccaaagtgtcacgtgtgcactgaatgtgggaagagctttggccgaaggcaccaccttgtgagacactggctgacccacactggggagaagcccttccagtgccctcgctgtgagaagagctttggccgaaaacatcacctggacaggcacctgctcacccaccagggacaaagtccccggaacagctgggacagaggaacatctgtcttttgaaatctgtttccactacagctatggtcaagtctatcagccggtgctaccaggagtcactgccagggctgccgttctcctgaaccccagtggccagaatcataagccctgaccccatccctagaaagatgaggtcccagcaatggccagagcatttctcaccagttctgtgagatagcacataaaaatagagttctttgggcaaaacttttgggaagcaatgcatcctacatgggctgatattcagcctgagctgttctcaagaggagagtggtactggcagtttatggctgaaatccattctgattggttggagtctatgctataccagttgttaaacattttgagtatcactcttgcatactgttactattatattttctctatatatagacagaaaggccattttagaatattaaa

SEQ ID NO: 35311 - DNA, 575 bp, Homo sapiens
  source 1..575: mol_type = unassigned DNA
ctaccgggggtcccttgctacccatatgtgtgaagaaaagggggaaatgaaagccctagaacccacactgcagtgggcatgggatcatcctggaaccaggagaaacgaggttagggctaccaccttaaccgcccaggtgctggctctgcgtgaatatcttaggaaatgcaagctgaggacaggtcacaatttgggtctgcagcagaaatgctttcagaacagacagcagcgctggggacaggatgggaatcaatgaatgtacagctggatggagcagagccccaggtggaaaggggaagccaggaagagcggccatggagaacagtaccaggacctctggagcacctgtgctgtgaccttgaagaggagccacagtcccttcaggagaaggctcagtctgctccctgggttcctgcaattccccaggaggggaacactggagactgggagatggcagctgcacttcttgcggctggatcacagggcctggtaaccatcaaggatgtgtcactgtgcttctctcaggaggagtggcggagcctggacccctctcagacagacttttatggagaata

SEQ ID NO: 35312 - DNA, 555 bp, Homo sapiens
  source 1..555: mol_type = unassigned DNA
aagtgactcctcctcagtgctctctcaagccctttatcctatcgtgaaaactagagggtacgctccttgaggaattccagactgttgtctggagaaatcgctctcggcctcggtctggcctgtaacgggcggttacgcaattccaggtaattgacgaaccctgaggacagaactccgtgggaggcccagtagccagagcggaaaatggtcacaatttgggtctgcagcagaaatgctttcagaacagacagcagcgctggggacaggatgggaatcaatgaatgtacagctggatggagcagagccccaggtggaaaggggaagccaggaagagcggccatggagaacagtaccaggacctctggagcacctgtgctgtgaccttgaagaggagccacagtcccttcaggagaaggctcagtctgctccctgggttcctgcaattccccaggaggggaacactggagactgggagatggcagctgcacttcttgcggctggatcacagggcctggtaaccatcaaggatgtgtcactgtgcttctctcaggagga

SEQ ID NO: 35313 - DNA, 556 bp, Homo sapiens
  source 1..556: mol_type = unassigned DNA
ggggcactgtgacaagaagaagggaagaagcaaccttacccctgagcaggctcccgtcccgcccatgccctacccgtggcaggggccagggttctctgatggacggagccaactcgtccgtgtgcccttgggctactcatttttataacatggccccttttctgttcatcagcactggctgcagaaacttccttttgcaggtcccttgctacccatatgtgtgaagaaaagggggaaatgaaagccctagaacccacactgcagtgggcatgggatcatcctggaaccaggagaaacgaggtcacaatttgggtctgcagcagaaatgctttcagaacagacagcagcgctggggacaggatgggaatcaatgaatgtacagctggatggagcagagccccaggtggaaaggggaagccaggaagagcggccatggagaacagtaccaggacctctggagcacctgtgctgtgaccttgaagaggagccacagtcccttcaggagaaggctcagtctgctccctgggttcctgcaattccccaggaggggaacact

SEQ ID NO: 35314 - DNA, 5683 bp, Homo sapiens
  source 1..5683: mol_type = unassigned DNA
ccagcgcgaagcttcccgggagctcctcgctggccacccccgcggcccgcagcccggcagaggcgggaaagcagcgcgcctgcgccgtgggaaccggggctggaggcgaaaagcggggagcggaggggggccgctggagccgagtagcgtacagagcggcgtgtgacgcggggacgccgcgtgctcccaacgtcgccccggtttgacgcacacggcaccaaactgtttgatttaattttggatgagatcgttcttgcagcaagatgttaataagacaaaatctagactaaatgtgttaaatgggcttgccaacaatatggatgatttgaagataaacaccgatattactggtgctaaagaagaactcctagatgacaacaattttatctcagacaaagagagcggagttcataagccaaaagattgtcaaacatcatttcagaaaaataatacgttgactctgcctgaagaactgtcaaaggacaaatctgaaaacgccttaagtggaggccagtctagtctatttatacatgctggtgctcctactgtttctagtgaaaactttatcttgcctaaaggagctgctgttaatggaccagtttcacactcctccttaactaagacttccaatatgaataaaggcagtgtttcattaaccactggacagcctgtggatcagccaacaacagaatcttgttcaactttgaaggtagcagctgatcttcagctgtctacaccacagaaagcaagtcaacaccaagttttatttttgttatcagatgtagcacatgctaagaatcccacccattccaataaaaaactacctacctctgcttcagttggttgtgacattcagaattcagtagggagtaatataaagtcagatggcactttaataaatcaagtagaggtgggtgaggatggtgaagatttattggtgaaagatgattgtgtcaatacagtaacgggaatttcctcaggtacagatggatttaggtcagaaaatgatacaaactgggatccccaaaaagagttcattcaatttcttatgactaatgaggaaacagtagataaagctccacctcattctaaaataggtctagaaaaaaaaagaaagcgaaaaatggatgtaagcaagataactcgttataccgaggattgctttagtgattctaattgtgtacccaataaatcaaaaatgcaagaagtagactttctagaacaaaatgaagagctacaagcagtagactcacagaaatatgcattatcaaaagtgaagcctgaatcaactgatgaagacttagaatctgtggatgccttccaacatctaatttataacccagataagtgtggagaagagagttcacctgttcatactagcacttttctttcaaataccttaaaaaagaaatgtgaagagagtgattctgagtcacctgctactttcagtaccgaagagccatcattctacccctgtacaaagtgcaatgtgaattttagggagaagaagcacctccacaggcatatgatgtatcatttagatgggaatagtcactttcgccatcttaatgtcccaaggccatatgcttgtagagaatgtggacggacatttcgagatcgcaattcacttctaaaacatatgattattcaccaggagagaagacagaagttgatggaggaaattcgtgaattgaaagaacttcaggatgaaggaagaagtgcacgattacagtgtcctcagtgtgtgtttggtaccaattgccctaaaacatttgtgcaacatgctaaaacccatgaaaaagataaaaggtactactgctgtgaagagtgtaacttcatggcagtgacagaaaatgaattggaatgccatcgaggcattgcacatggggcagtggtaaaatgccctatggtcacttctgatattgcccagagaaaaacacaaaaaaagactttcatgaaagactctgtagtaggatcatccaaaaaatcagctacctacatatgtaagatgtgtccttttactacttcagccaaaagtgttttaaaaaagcacacggagtacttgcattcatcatcatgtgttgattcatttggtagtcctcttggacttgataaaagaaaaaatgacatccttgaagaacctgtagatagtgatagcactaaaacattaactaaacaacagtcaaccacatttccaaagaactctgctttaaaacaagatgtgaagcgaacatttggatcaacctcacaatcaagtagtttttcaaaaattcataagcggccacacagaatacagaaagctcggaaaagcattgcccaatcaggtgtaaacatgtgcaatcaaaacagctctcctcataagaatgttacaattaaaagcagcgttgaccaaaaacctaagtatttccatcaagcagcaaaagaaaagtctaatgccaaggcaaatagccactatttgtatagacacaaatatgaaaactataggatgatcaaaaaatcaggtgaatcatatcctgtgcatttcaaaaaagaagaagctagttcattaaattctttacacctgttttcatcatcaagtaattctcacaacaattttatttcagaccctcataagcctgacgccaaaaggcctgaaagcttcaaagatcacagacgtgtagctgtaaagagagtaattaaggaatctaagaaggaaagttctgttggaggggaagacttggatagctatccagattttttgcataaaatgactgttgtcgttttgcaaaaacttaattctgctgaaaagaaagatagttatgaaacagaagatgaaagttcctgggataatgttgagttaggagactacactacacaggccatagaagatgaaacctatagtgatattaatcaagagcatgtaaatttattccctttatttaagagcaaagtggaaggtcaggagcctggagaaaatgctactcttagttatgaccaaaacgatggcttttattttgaatactatgaagatactggaagtaacaactttttgcatgagatacatgatcctcagcatttagaaactgcagatgcttcattgtcaaagcatagttctgtttttcattggactgatttgtctcttgagaagaaatcgtgtccttactgcccagcaacatttgaaacaggtgttgggttatcaaatcatgtcagggggcatcttcacagagcaggattaagctatgaagcccgtcatgttgtatcaccagaacaaatagccacaagtgacaaaatgcagcatttcaaaagaactggcacaggaacacctgttaaacgagttagaaaagctatagagaagtctgaaaccacttctgaacacacttgtcagctctgtggtggttggtttgatactaaaattggattatcaaatcatgttagaggccacttgaaaagacttggaaagacgaaatgggatgctcacaaatctccaatctgtgttctgaatgagatgatgcaaaatgaagaaaaatatgaaaaaatcttaaaggcattgaacagtcgtcgtattattcccagaccatttgtagctcaaaaacttgcatcaagtgatgactttatatctcaaaatgttatacctcttgaagcataccgtaatggcctaaagactgaagctctgtcagtgtctgcatcagaagaagaagggctgaatttcttaaatgaatatgatgaaacaaaaccagaactgcccagtgggaaaaagaatcagtctcttacactcatagaacttcttaaaaataaaaggatgggagaagaaaggaattctgctatttctcctcaaaagatccataatcagacagcaagaaagagattcgttcagaaatgcgttcttccattaaatgaggatagtccgttgatgtatcagccacaaaaaatggacttgactatgcactcagccttagattgtaagcaaaagaaatcaaggtcaagatctggaagcaagaagaaaatgctaacattacctcatggtgctgacgaggtttacattctccgatgcaggttttgtggcctagtctttcgaggacccttgtctgttcaggaagactggattaagcacttacaacgacatattgtaaacgctaatcttccacggactggagctggcatggtggaagtcacgtcactacttaaaaagcctgcctccattacagaaacttcattttctctactaatggccgaagcagcttcatagaaccaggaaaccttttaaatagccagtttgaattggatgtaaatttgaaattctttttttttaagccacattaaattatctgtttataaatactaaagcaggaaaatggggggaaagtgaattacagtgacatcagagcaaattgaatacttaaaacagtaagtagtctatatattttatatagggtggaagatgtgtttttaaggtttatgaagttttgttggttaactgtgttcactcagtaaaagagcagtacatgtaagcagccattaataaactgttgcacatggatacttatagacagacttattggacaattatgttttttgcagtgttaccagaatcaaggctctgtttattccccacaagacttgcatagaaaaataagatattatattttgtttgtatgtatttagtgttttgtataataccaagaaccgctgactaaatttactcaaattagggcattaaatatcatgtacttcatagtttgagactgttcactcaaatagggcagagtactattctatctagatgtgtaagtgttttttttaaaatcacatggaacggttttttttatactaaaaagtggagggagatttgtttaaacaagtatttctaaaagaaatatgtacatagttctggaaattatttgtggtaaggaaatattctttactccagttgcatttctcagacaataaagtggtgcatccatgctacctcctactttgtcaacaaagatgctatttaccctttacatttttgtatcataatagattttaaaaatctaatgttctttattgcaagacattcttttgttaacaggtttgtttctttttaatgttttacctaaaatttgacatgcttacaggacaggtttgcctcttactttatttaacattgtagaaatgtaattaataaacaatgctcactacacagtttagaatagacgttctcatttatattatcttccaaatttgatcagttagcaaaacttaatacaccaattaaaatatttctacatatgagaatgtttacaatttaaattttagaacttgttttggatgtgattatatgtacgaaaatcgtgtaacactatgctcatgctaagaaccgacataacagaattactgaaataaatgtgctgtgaggaatggaaaatatggtgcaggtgtcttggtcatgataaattgtgattctttttaaaaattttttccaaaaacaattaggtattttaatctgaaatcagattcctttacaaacaacaagtttttgtatgcaagcaccattttatttcatgtagtatggctaatactatagttgaaccaaggatatgcattgattctttgcttcgtatgtaaataaagttaaaaacagttaaaataaggagtattttggtagagtatatacatacctcactgccagtgaaattgctttcctatggtatatctccttacc

SEQ ID NO: 35315 - DNA, 2036 bp, Homo sapiens
  source 1..2036: mol_type = unassigned DNA
cggggcgggccgagagcagtcaccaacccctctcgttgaggctgctcggttgtggccagaaacgctggctctggcattaactgtctacacccctccccttacttgggacaggaccgcatagccctcccctccccccgtcctgcaagatcttatgcggctaggtgcctgggaagtaacagcaagaggtttgatttaattttggatgagatcgttcttgcagcaagatgttaataagacaaaatctagccttagattgtaagcaaaagaaatcaaggtcaagatctggaagcaagaagaaaatgctaacattacctcatggtgctgacgaggtttacattctccgatgcaggttttgtggcctagtctttcgaggacccttgtctgttcaggaagactggattaagcacttacaacgacatattgtaaacgctaatcttccacggactggagctggcatggtggaagtcacgtcactacttaaaaagcctgcctccattacagaaacttcattttctctactaatggccgaagcagcttcatagaaccaggaaaccttttaaatagccagtttgaattggatgtaaatttgaaattctttttttttaagccacattaaattatctgtttataaatactaaagcaggaaaatggggggaaagtgaattacagtgacatcagagcaaattgaatacttaaaacagtaagtagtctatatattttatatagggtggaagatgtgtttttaaggtttatgaagttttgttggttaactgtgttcactcagtaaaagagcagtacatgtaagcagccattaataaactgttgcacatggatacttatagacagacttattggacaattatgttttttgcagtgttaccagaatcaaggctctgtttattccccacaagacttgcatagaaaaataagatattatattttgtttgtatgtatttagtgttttgtataataccaagaaccgctgactaaatttactcaaattagggcattaaatatcatgtacttcatagtttgagactgttcactcaaatagggcagagtactattctatctagatgtgtaagtgttttttttaaaatcacatggaacggttttttttatactaaaaagtggagggagatttgtttaaacaagtatttctaaaagaaatatgtacatagttctggaaattatttgtggtaaggaaatattctttactccagttgcatttctcagacaataaagtggtgcatccatgctacctcctactttgtcaacaaagatgctatttaccctttacatttttgtatcataatagattttaaaaatctaatgttctttattgcaagacattcttttgttaacaggtttgtttctttttaatgttttacctaaaatttgacatgcttacaggacaggtttgcctcttactttatttaacattgtagaaatgtaattaataaacaatgctcactacacagtttagaatagacgttctcatttatattatcttccaaatttgatcagttagcaaaacttaatacaccaattaaaatatttctacatatgagaatgtttacaatttaaattttagaacttgttttggatgtgattatatgtacgaaaatcgtgtaacactatgctcatgctaagaaccgacataacagaattactgaaataaatgtgctgtgaggaatggaaaatatggtgcaggtgtcttggtcatgataaattgtgattctttttaaaaattttttccaaaaacaattaggtattttaatctgaaatcagattcctttacaaacaacaagtttttgtatgcaagcaccattttatttcatgtagtatggctaatactatagttgaaccaaggatatgcattgattctttgcttcgtatgtaaataaagttaaaaacagttaaaataaggagtattttggtagagtatatacatacctcactgccagtgaaattgctttcctatggtatatctccttaccagaaaaatctctaaataaaaaaaggtttaaagaaaa

SEQ ID NO: 35316 - DNA, 1253 bp, Homo sapiens
  source 1..1253: mol_type = unassigned DNA
gagaacagtggtgcactgtttccgctgccctcgtttgtctaattggcccagacgctccaccagcgcgaagcttcccgggagctcctcgctggccacccccgcggcccgcagcccggcagaggcgggaaagcagcgcgcctgcgccgtgggaaccggggctggaggcgaaaagcggggagcggaggggggccgctggagccgagtagcgtacagagcggcgtgtgacgcggggacgccgcgtgctcccaacgtcgccccggtttgacgcacacggcaccaaactgtttgatttaattttggatgagatcgttcttgcagcaagatgttaataagacaaaatctagccttagattgtaagcaaaagaaatcaaggtcaagatctggaagcaagaagaaaatgctaacattacctcatggtgctgacgaggtttacattctccgatgcaggttttgtggcctagtctttcgaggacccttgtctgttcaggaagactggattaagcacttacaacgacatattgtaaacgctaatcttccacggactggagctggcatggtggaagtcacgtcactacttaaaaagcctgcctccattacagaaacttcattttctctactaatggccgaagcagcttcatagaaccaggaaaccttttaaatagccagtttgaattggatgtaaatttgaaattctttttttttaagccacattaaattatctgtttataaatactaaagcaggaaaatggggggaaagtgaattacagtgacatcagagcaaattgaatacttaaaacagtaagtagtctatatattttatatagggtggaagatgtgtttttaaggtttatgaagttttgttggttaactgtgttcactcagtaaaagagcagtacatgtaagcagccattaataaactgttgcacatggatacttatagacagacttattggacaattatgttttttgcagtgttaccagaatcaaggctctgtttattccccacaagacttgcatagaaaaataagatattatattttgtttgtatgtatttagtgttttgtataataccaagaaccgctgactaaatttactcaaattagggcattaaatatcatgtacttcatagtttgagactgttcactcaaatagggcagagtactattctatctagatgtgtaagtgttttttttaaaatcacatggaacggttttttttatactaaaaagtggagggagatttgtttaaacaag

SEQ ID NO: 35317 - DNA, 5698 bp, Homo sapiens
  source 1..5698: mol_type = unassigned DNA
gcaatgcactgagtaacggggcgggccgagagcagtcaccaacccctctcgttgaggctgctcggttgtggccagaaacgctggctctggcattaactgtctacacccctccccttacttgggacaggaccgcatagccctcccctccccccgtcctgcaagatcttatgcggctaggtgcctgggaagtaacagcaagaggtttgatttaattttggatgagatcgttcttgcagcaagatgttaataagacaaaatctagactaaatgtgttaaatgggcttgccaacaatatggatgatttgaagataaacaccgatattactggtgctaaagaagaactcctagatgacaacaattttatctcagacaaagagagcggagttcataagccaaaagattgtcaaacatcatttcagaaaaataatacgttgactctgcctgaagaactgtcaaaggacaaatctgaaaacgccttaagtggaggccagtctagtctatttatacatgctggtgctcctactgtttctagtgaaaactttatcttgcctaaaggagctgctgttaatggaccagtttcacactcctccttaactaagacttccaatatgaataaaggcagtgtttcattaaccactggacagcctgtggatcagccaacaacagaatcttgttcaactttgaaggtagcagctgatcttcagctgtctacaccacagaaagcaagtcaacaccaagttttatttttgttatcagatgtagcacatgctaagaatcccacccattccaataaaaaactacctacctctgcttcagttggttgtgacattcagaattcagtagggagtaatataaagtcagatggcactttaataaatcaagtagaggtgggtgaggatggtgaagatttattggtgaaagatgattgtgtcaatacagtaacgggaatttcctcaggtacagatggatttaggtcagaaaatgatacaaactgggatccccaaaaagagttcattcaatttcttatgactaatgaggaaacagtagataaagctccacctcattctaaaataggtctagaaaaaaaaagaaagcgaaaaatggatgtaagcaagataactcgttataccgaggattgctttagtgattctaattgtgtacccaataaatcaaaaatgcaagaagtagactttctagaacaaaatgaagagctacaagcagtagactcacagaaatatgcattatcaaaagtgaagcctgaatcaactgatgaagacttagaatctgtggatgccttccaacatctaatttataacccagataagtgtggagaagagagttcacctgttcatactagcacttttctttcaaataccttaaaaaagaaatgtgaagagagtgattctgagtcacctgctactttcagtaccgaagagccatcattctacccctgtacaaagtgcaatgtgaattttagggagaagaagcacctccacaggcatatgatgtatcatttagatgggaatagtcactttcgccatcttaatgtcccaaggccatatgcttgtagagaatgtggacggacatttcgagatcgcaattcacttctaaaacatatgattattcaccaggagagaagacagaagttgatggaggaaattcgtgaattgaaagaacttcaggatgaaggaagaagtgcacgattacagtgtcctcagtgtgtgtttggtaccaattgccctaaaacatttgtgcaacatgctaaaacccatgaaaaagataaaaggtactactgctgtgaagagtgtaacttcatggcagtgacagaaaatgaattggaatgccatcgaggcattgcacatggggcagtggtaaaatgccctatggtcacttctgatattgcccagagaaaaacacaaaaaaagactttcatgaaagactctgtagtaggatcatccaaaaaatcagctacctacatatgtaagatgtgtccttttactacttcagccaaaagtgttttaaaaaagcacacggagtacttgcattcatcatcatgtgttgattcatttggtagtcctcttggacttgataaaagaaaaaatgacatccttgaagaacctgtagatagtgatagcactaaaacattaactaaacaacagtcaaccacatttccaaagaactctgctttaaaacaagatgtgaagcgaacatttggatcaacctcacaatcaagtagtttttcaaaaattcataagcggccacacagaatacagaaagctcggaaaagcattgcccaatcaggtgtaaacatgtgcaatcaaaacagctctcctcataagaatgttacaattaaaagcagcgttgaccaaaaacctaagtatttccatcaagcagcaaaagaaaagtctaatgccaaggcaaatagccactatttgtatagacacaaatatgaaaactataggatgatcaaaaaatcaggtgaatcatatcctgtgcatttcaaaaaagaagaagctagttcattaaattctttacacctgttttcatcatcaagtaattctcacaacaattttatttcagaccctcataagcctgacgccaaaaggcctgaaagcttcaaagatcacagacgtgtagctgtaaagagagtaattaaggaatctaagaaggaaagttctgttggaggggaagacttggatagctatccagattttttgcataaaatgactgttgtcgttttgcaaaaacttaattctgctgaaaagaaagatagttatgaaacagaagatgaaagttcctgggataatgttgagttaggagactacactacacaggccatagaagatgaaacctatagtgatattaatcaagagcatgtaaatttattccctttatttaagagcaaagtggaaggtcaggagcctggagaaaatgctactcttagttatgaccaaaacgatggcttttattttgaatactatgaagatactggaagtaacaactttttgcatgagatacatgatcctcagcatttagaaactgcagatgcttcattgtcaaagcatagttctgtttttcattggactgatttgtctcttgagaagaaatcgtgtccttactgcccagcaacatttgaaacaggtgttgggttatcaaatcatgtcagggggcatcttcacagagcaggattaagctatgaagcccgtcatgttgtatcaccagaacaaatagccacaagtgacaaaatgcagcatttcaaaagaactggcacaggaacacctgttaaacgagttagaaaagctatagagaagtctgaaaccacttctgaacacacttgtcagctctgtggtggttggtttgatactaaaattggattatcaaatcatgttagaggccacttgaaaagacttggaaagacgaaatgggatgctcacaaatctccaatctgtgttctgaatgagatgatgcaaaatgaagaaaaatatgaaaaaatcttaaaggcattgaacagtcgtcgtattattcccagaccatttgtagctcaaaaacttgcatcaagtgatgactttatatctcaaaatgttatacctcttgaagcataccgtaatggcctaaagactgaagctctgtcagtgtctgcatcagaagaagaagggctgaatttcttaaatgaatatgatgaaacaaaaccagaactgcccagtgggaaaaagaatcagtctcttacactcatagaacttcttaaaaataaaaggatgggagaagaaaggaattctgctatttctcctcaaaagatccataatcagacagcaagaaagagattcgttcagaaatgcgttcttccattaaatgaggatagtccgttgatgtatcagccacaaaaaatggacttgactatgcactcagccttagattgtaagcaaaagaaatcaaggtcaagatctggaagcaagaagaaaatgctaacattacctcatggtgctgacgaggtttacattctccgatgcaggttttgtggcctagtctttcgaggacccttgtctgttcaggaagactggattaagcacttacaacgacatattgtaaacgctaatcttccacggactggagctggcatggtggaagtcacgtcactacttaaaaagcctgcctccattacagaaacttcattttctctactaatggccgaagcagcttcatagaaccaggaaaccttttaaatagccagtttgaattggatgtaaatttgaaattctttttttttaagccacattaaattatctgtttataaatactaaagcaggaaaatggggggaaagtgaattacagtgacatcagagcaaattgaatacttaaaacagtaagtagtctatatattttatatagggtggaagatgtgtttttaaggtttatgaagttttgttggttaactgtgttcactcagtaaaagagcagtacatgtaagcagccattaataaactgttgcacatggatacttatagacagacttattggacaattatgttttttgcagtgttaccagaatcaaggctctgtttattccccacaagacttgcatagaaaaataagatattatattttgtttgtatgtatttagtgttttgtataataccaagaaccgctgactaaatttactcaaattagggcattaaatatcatgtacttcatagtttgagactgttcactcaaatagggcagagtactattctatctagatgtgtaagtgttttttttaaaatcacatggaacggttttttttatactaaaaagtggagggagatttgtttaaacaagtatttctaaaagaaatatgtacatagttctggaaattatttgtggtaaggaaatattctttactccagttgcatttctcagacaataaagtggtgcatccatgctacctcctactttgtcaacaaagatgctatttaccctttacatttttgtatcataatagattttaaaaatctaatgttctttattgcaagacattcttttgttaacaggtttgtttctttttaatgttttacctaaaatttgacatgcttacaggacaggtttgcctcttactttatttaacattgtagaaatgtaattaataaacaatgctcactacacagtttagaatagacgttctcatttatattatcttccaaatttgatcagttagcaaaacttaatacaccaattaaaatatttctacatatgagaatgtttacaatttaaattttagaacttgttttggatgtgattatatgtacgaaaatcgtgtaacactatgctcatgctaagaaccgacataacagaattactgaaataaatgtgctgtgaggaatggaaaatatggtgcaggtgtcttggtcatgataaattgtgattctttttaaaaattttttccaaaaacaattaggtattttaatctgaaatcagattcctttacaaacaacaagtttttgtatgcaagcaccattttatttcatgtagtatggctaatactatagttgaaccaaggatatgcattgattctttgcttcgtatgtaaataaagttaaaaacagttaaaataaggagtattttggtagagtatatacatacctcactgccagtgaaattgctttcctatggtatatctccttaccagaaaaatctctaaataaaaaaaggtttaaagaaaatt

SEQ ID NO: 35318 - DNA, 2056 bp, Homo sapiens
  source 1..2056: mol_type = unassigned DNA
tgtacaaagtgcaatgtgaattttagggagaagaagcacctccacaggcatatgatgtatcatttagatgggaatagtcactttcgccatcttaatgtcccaaggccatatgcttgtagagaatgtggacggacatttcgagatcgcaattcacttctaaaacatatgattattcaccaggagagaagacagaagttgatggaggaaattcgtgaattgaaagaacttcaggatgaaggaagaagtgcacgattacagtgtcctcagtgtgtgtttggtaccaattgccctaaaacatttgtgcaacatgctaaaacccatgaaaaagataaaaggtactactgctgtgaagagtgtaacttcatggcagtgacagaaaatgaattggaatgccatcgaggcattgcacatggggcagtggtaaaatgccctatggtcacttctgatattgcccagagaaaaacacaaaaaaagactttcatgaaagactctgtagtaggatcatccaaaaaatcagctacctacatatgtaagatgtgtccttttactacttcagccaaaagtgttttaaaaaagcacacggagtacttgcattcatcatcatgtgttgattcatttggtagtcctcttggacttgataaaagaaaaaatgacatccttgaagaacctgtagatagtgatagcactaaaacattaactaaacaacagtcaaccacatttccaaagaactctgctttaaaacaagatgtgaagcgaacatttggatcaacctcacaatcaagtagtttttcaaaaattcataagcggccacacagaatacagaaagctcggaaaagcattgcccaatcaggtgtaaacatgtgcaatcaaaacagctctcctcataagaatgttacaattaaaagcagcgttgaccaaaaacctaagtatttccatcaagcagcaaaagaaaagtctaatgccaaggcaaatagccactatttgtatagacacaaatatgaaaactataggatgatcaaaaaatcaggtgaatcatatcctgtgcatttcaaaaaagaagaagctagttcattaaattctttacacctgttttcatcatcaagtaattctcacaacaattttatttcagaccctcataagcctgacgccaaaaggcctgaaagcttcaaagatcacagacgtgtagctgtaaagagagtaattaaggaatctaagaaggaaagttctgttggaggggaagacttggatagctatccagattttttgcataaaatgactgttgtcgttttgcaaaaacttaattctgctgaaaagaaagatagttatgaaacagaagatgaaagttcctgggataatgttgagttaggagactacactacacaggccatagaagatgaaacctatagtgatattaatcaagagcatgtaaatttattccctttatttaagagcaaagtggaaggtcaggagcctggagaaaatgctactcttagttatgaccaaaacgatggcttttattttgaatactatgaagatactggaagtaacaactttttgcatgagatacatgatcctcagcatttagaaactgcagatgcttcattgtcaaagcatagttctgtttttcattggactgatttgtctcttgagaagaaatcgtgtccttactgcccagcaacatttgaaacaggtgttgggttatcaaatcatgtcagggggcatcttcacagagcaggattaagctatgaagcccgtcatgttgtatcaccagaacaaatagccacaagtgacaaaatgcagcatttcaaaagaactggcacaggaacacctgttaaacgagttagaaaagctatagagaagtctgaaaccacttctgaacacacttgtcagctctgtggtggttggtttgatactaaaattggattatcaaatcatgttagaggccacttgaaaagacttggaaagacgaaatgggatgctcacaaatctccaatctgtgtttgaatgagatgatgcaaaatgaagaaaaatatgaaaaaatcttaaaggcattgaa

SEQ ID NO: 35319 - DNA, 1903 bp, Homo sapiens
  source 1..1903: mol_type = unassigned DNA
gcaatgcactgagtaacggggcgggccgagagcagtcaccaacccctctcgttgaggctgctcggttgtggccagaaacgctggctctggcattaactgtctacacccctccccttacttgggacaggaccgcatagccctcccctccccccgtcctgcaagatcttatgcggctaggtgcctgggaagtaacagcaagaggtttgatttaattttggatgagatcgttcttgcagcaagatgttaataagacaaaatctagactaaatgtgttaaatgggcttgccaacaatatggatgatttgaagataaacaccgatattactggtgctaaagaagaactcctagatgacaacaattttatctcagacaaagagagcggagttcataagccaaaagattgtcaaacatcatttcagaaaaataatacgttgactctgcctgaagaactgtcaaaggacaaatctgaaaacgccttaagtggaggccagtctagtctatttatacatgctggtgctcctactgtttctagtgaaaactttatcttgcctaaaggagctgctgttaatggaccagtttcacactcctccttaactaagacttccaatatgaataaaggcagtgtttcattaaccactggacagcctgtggatcagccaacaacagaatcttgttcaactttgaaggtagcagctgatcttcagctgtctacaccacagaaagcaagtcaacaccaagttttatttttgttatcagatgtagcacatgctaagaatcccacccattccaataaaaaactacctacctctgcttcagttggttgtgacattcagaattcagtagggagtaatataaagtcagatggcactttaataaatcaagtagaggtgggtgaggatggtgaagatttattggtgaaagatgattgtgtcaatacagtaacgggaatttcctcaggtacagatggatttaggtcagaaaatgatacaaactgggatccccaaaaagagttcattcaatttcttatgactaatgaggaaacagtagataaagctccacctcattctaaaataggtctagaaaaaaagaaagcgaaaaatggatgtaagcaagataactcgttataccgaggattgctttagtgattctaattgtgtacccaataaatcaaaaatgcaagaagtagactttctagaacaaaatgaagagctacaagcagtagactcacagaaatatgcattatcaaaagtgaagcctgaatcaactgatgaagacttagaatctgtggatgccttccaacatctaatttataacccagataagtgtggagaagagagttcacctgttcatactagcacttttctttcaaataccttaaaaaagaaatgtgaagagagtgattctgagtcacctgctactttcagtaccgaagagccatcattctacccctgtacaaagtgcaatgtgaattttagggagaagaagcacctccacaggcatatgatgtatcatttagatgggaatagtcactttcgccatcttaatgtcccaaggccatatgcttgtagagaatgtggacggacatttcgagatcgcaattcacttctaaaacatatgattattcaccaggagagaagacagaagttgatggaggaaattcgtgaattgaaagaacttcaggatgaaggaagaagtgcacgattacagtgtcctcagtgtgtgtttggtaccaattgccctaaaacatttgtgcaacatgctaaaacccatgaaaaagataaaaggtactactgctgtgaagagtgtaacttcatggcagtgacagaaaatgaattggaatgccatcgaggcattgcacatggggcagtggtaaaatgccctatggtcacttctgatattgccc

SEQ ID NO: 35320 - DNA, 3226 bp, Homo sapiens
  source 1..3226: mol_type = unassigned DNA
gaagagaagcccatgtcccatcgtcctagcgcggcagaattgactcgcgccctcgtccgccgccataggccagtgccggggtttaagggccaggaaaggaagcattcagggaatttaggtgtagccagaagaaaatcaggtcctggctccccagaagcaagagagttcaaatgaaggaaggaggaggttcctggatgtggatgtcatcatttctgggaacactcttaaatggagactcagatttcttagccaaaatttagggaggatccagaagaaaccaaagacgaagcatcccagttcttgggtatttcctgaaacagaagaaaatgacaaaggcccaggaatcactgaccctggaggatgtggctgtggacttcacctgggaggagtggcagttcctgagccctgctcagaaggacctgtaccgggatgtgatgttggagaactacagcaaccttgtgtcagtggggtatcaagccggcaaacctgatgccctcaccaagttggaacaaggagaaccactatggacactagaagatgaaatccacagtccagcccacccagaaattgagaaagctgatgatcatctgcagcagcccttgcaaaaccaaaaaatactgaagaggacgggacaacgctatgaacacggaagaactttgaaatcatatttaggtttaaccaaccagagcagaagatacaacagaaaggagcctgctgagtttaatggagatggagcttttctccatgataatcatgaacaaatgcctacggaaattgaattccctgaaagtagaaaacccatcagcaccaagtcacaattccttaaacatcagcaaacacacaacatagagaaagcccatgaatgcactgactgtgggaaagctttcctcaagaagtctcagctcactgagcataagagaattcatacaggaaagaaaccccacgtgtgtagcttgtgtgggaaagccttctacaagaagtacaggctcactgaacacgagagagctcacagaggagagaaaccccacgggtgtagcttgtgtgggaaagccttctacaagaggtacaggctcactgaacacgagagagctcacaaaggagagaaaccatacgggtgcagtgaatgtgggaaagccttccccaggaaatctgagcttactgaacatcaaaggattcacacgggaattaagccccatcaatgcagcgaatgtgggagagctttctccagaaaatcactactcgttgtacatcagcgaactcatacaggagagaagcctcatacatgcagtgaatgtggaaaaggcttcattcagaagggcaatctcaacatacatcaacgaactcacactggagagaaaccttatggatgcattgactgtggcaaggccttcagccagaagtcttgccttgtagcacatcagagatatcatacaggaaagactccctttgtatgtcctgaatgtgggcaaccctgttcacagaagtcaggactcattagacatcagaaaattcactcaggagagaaaccctataaatgcagtgactgtgggaaagccttccttacaaagacaatgctcattgtacatcacagaactcacacgggagagagaccctatggctgtgatgagtgtgagaaagcttacttctatatgtcttgccttgttaaacataagagaatacactcaagggagaaacggggggattcagtgaaggtggaaaatccttccacagcaagtcacagcttaagtcctagtgaacatgtgcaggggaaaagccctgttaatatggtaactgtggcaatggtggcagggcagtgtgagtttgcccacatcctgcattcatgataaacagtttgctgtttgatcatatagcctccagcggaatgctgagtttgtcatgtcccatgggcctttggctccctgcactaatatgtatagtagggtttacaagatatgaaatatattttacttttttatatcttataaacctcactacccctcccacaatattgtttttcatttactatcttgatcatagagtttggctggggaggggggcagttttagaggcttccacttggtgttcctcagaatgatatctcttactccgggggccaaggtaggggttagcttttgttctctttgtagtttagattgtatctcttgccttgttcaagttcacaaatctttttgtgtatacacatatgtacatgaaaatgatgttcatgctttttattattttacccttcattatttcattttttatagttctcatagctatgtctttcagttcactaatcttttttccacagtgtttaatctgtcattaatcccatccaaagtatgttttctctcagaaattgtaatttttaacctctaataatttgacatgggtttttccctgttatatctttcatatctttatttatcatggttttacttttaacctatttatgctttcatatttaaagtgggtgtttagtgggcaacatacagttgggccttccttttttatccagttaacaatctctgtctttttactggggtatttagatcatttacgttcaatgtattgatgtttttaggtttaaattactaacttactatttgttgtttattctatgtcttctttgttctccttttcttctttttctgctttcccttagagtagctgagtgtgtttatattacatattgtctcctttgttggcttattaactgtaaatccttgtcatttgattccttgagattttatagcatacatcattgtgagggattgcatatttatgtcctctccaaatttacatgttgaagtcctaatccctaagggatggcattaggaagtgtgacctttggaaggtaattacatcttgaaagtggaaccctcatgatgagattatgtgtcttatgagacaacacagaagagagtttgttttctctttctctgctctttgccatgtgaagacagaatgagatgaccatgcataaaccaggaaatggactctcactggacactagacctgccaacaccttgattgtgttttagagtccagttctagagactcctcagcctctggaacgtgagaaatgaatgtttgttaaggcagtcagtcagtctatggtgtattttttctagtagcctgaactgactgaaagaaaatcatgaacttatcattctaacttcaaggacattatatcacttactgtataataaaataatcttacagt

SEQ ID NO: 35321 - DNA, 3857 bp, Homo sapiens
  source 1..3857: mol_type = unassigned DNA
atgcgtggtgcgtgtgtgaaggggggtgcagcgcgcggtcccggggtcccggaggggagtgcgcaggcgctgagtccctgctcggctgtctcggtggtcgccgccggggtctgagcccgggaagaccgagccctgccttaccagctctctgcccatctctcagtgtggaccctaaagggggaggaaaggatgccttctgcacgggggaaatccaaatccaaggcacctataacatttggggacttagccatctacttctcccaggaggagtgggaatggctgagccccattcagaaggatttgtatgaagatgtcatgttggagaattaccggaacctggtctcgcttggtctttcctttcggagaccaaatgtgatcaccttattggagaaagggaaagcaccctggatggtagagccagtaagaagacgccgggctcctgactcggggtctaaatgtgagaccaagaagttacctccaaatcaatgcaacaaatctgggcaaagcatctgccagaaactagtttctgcacaacaaaaagctcctacacgaaagagtggctgcaacaaaaattcagtcctagtaaaacctaagaaagggcattcagggaagaaacctttaaaatgtaatgactgtggtaaaacctttagtcgaagcttctctcttaaacttcatcagaacattcatacaggagagaagccttttgaatgcagtaattgtagaaaagctttcagacagatctcatccatcctacttcatcagagaattcacagtggaaagaaaagccatgaatgcaataaatgtggggaaagcttcaatcaaagaacaacccttattctacatatgagaattcatgatggaaaggaaattcttgactgtgggaaggccttgagtcaatgtcagtctttcaatatacatcagaaaattcatgttgttgggaatgtctgccagtgcagaaagtgcggaaaagccttcaatcagatgtcatcccttttacttcataagaaaattcacaatggaaagaaaacacataaatataataaatgtgggagaggcttcaaaaagaaatcagtctttgttgtacataaaagaattcatgctggagagaaaatccctgaaaatgcgaaggccttaagtcagagtctacagcaaagaagtcaccatttagagaatccttttaaatgcagaaaatgtgggaaattatttaataggatttcacccctgatgcttcaccagagaattcacacttcagagaaaccgtacaaatgtgataaatgtgacaagttcttcaggcggctttcaacccttattctgcatctaagaattcataatggagaaaaactatacagatgcaataaatgtgagaaggtctgcaatcggcattcatcccttattcaacatcagaaagttcatacaaagaaaaagaaactatttgagtgtaaggaatgtgggaagatgttttctggaactgcaaaccttaaaatacatcagaatattcattctgaagagaaacctttcaaatgcaataaatgtagtaaagttttcggccgccaatcatttcttattgaacatcaaagaattcatactggagaaaaaccctaccagtgtgaggaatgtggaaaagccttcagccaccgaatatctctcacacgacataagagaattcatactgaagatagaccctatgaatgtgatcagtgtgggaaggccttcagccagagtgcacacctcgcccaacatgaaagaattcacactggagagaagccatatacatgcaaaacatgtggtaaggcctttagtcagcgcacatctcttattctacatgaaagaagtcatactggagagaaaccctatgaatgtaatgaatgtgggaaggcatttagcagtggctcagaccttattcgacatcagagaagtcattcttcagagaaaccctatgaatgtagtaaatgtgggaaggcatatagtcggagttcatccctgattcgacatcagaatacacattctgaagaaaaagcctaaggttgttttaaatctataaaatcaacgaatgaggctatcaaacatatggcaaatatgtatttgtctataatgtaaattttgtgtatatgggaccatttgatgatatgtcccactttgaaagccaaagagcaaaagtcattggtgattttgacctcaggatttgaaattaactgaaggaaactcagaagtttggtcagtcattgtgaatgaagatcatttttcatttgataagaattactggctgggcgcagtggcttacacctgtaaccccagcactttgggaggctgagacaggcggatcacgaggtcaagagtttgagaccacggtgaaaccctgtctctactaaaaaatacaaaattagctgggcgtggtggtgcgcacctgtaatctcagctactggagaggctgaggcaggagaatcgcttgaacccaggaggtgggggttgcaccgagcagagattgcaccactgcactccagtctgggcaacagagcaagactctgtgtcaaaaaaaaaaaaaattaccgatattttacttccagcatagttttaaagataatttattggtcacatacaacaaaatagaattgtgaagtccattatagggctctgagcctgatttaaggtcacagaaaaaagaatttgagtctgtttctcagatctagaattatcaaatataaggaacttctcggcaaaacagggtgccactttcagctgacaaacttgtgggtgagaataaagaaaagtgagtctttaggtagataaagttgtcactcataatggtgtgtaacagtagaaaccttactttaccatctccacggatatgaggatatatgatcttcatggtgtgaacgtctaacttggctgagacaagctatcagtaaaagaaccaagatatagtgaagaatgaggatttcagagccaggagaaatcagtattgttttatttggaaataaatcatctatatttatatgagtaaacattggtattttcatgtaacaatactggtatgcaataagtggtgtaatatgagttgttatggactgaatgtttatgtccctcccaaaactaattatgttaaaatcctcaccatcaatgtgatgttacttggaaatgaggcatttgggaggcaattaggattagatgaggtcatgagggtggagccctcgtgatgggattagtgcctttataagaagagacatcaggctgagcccggtggctcatgcctgtaatcccagcactttgggaggccaaggcgagtggatcatgaggtcaggagattgagacaatcctggctaacacggtgaaaccccgtctccactgaaaaaaaatacaaaaaattagccaggcacagtggcatgtgcctgtagtcccagctactcgggaggctgaaggagaagaatcgcttgaacccaggaggcggaggttgcagtgagccaggatcacgccactgtactccaccctgggcgacagagcgagactacgtctcaaaaagacatcagaaagcctgcttgctctctgcaccatgtgaggatgcaggaagaagccagctgtctacagaacaggaagagaaccctacgagaacctaaccatgctggcgacctgttctcagacttccagacttcagaactgtgagaagtaaattgttgtttaagccacccagtctatgatgttttgttatggcagccccagctaatatatggagtggaaagcctagatttatctactgggttcttttcctgtcagcagttcaacatgtgtagtagctttcagtctctgctgtttgtgccaaatatataagaaataaaatcagataacttttttgtaattggatc

SEQ ID NO: 35322 - DNA, 4052 bp, Homo sapiens
  source 1..4052: mol_type = unassigned DNA
atgagaacattggtcaatgcattgtccggtggaggacaagagataaagccagaaggcaaatgtgctcacaatggaatgtgtttccgctgtgaagaagtggcacctgatacatgtgaagcatacccctaccccggtttagtggtgagtgttgctggaaaagagggtcccaatccagaccataagagagggttcttggatcttgcacaggaaggaattcaagccctgccttaccagctctctgcccatctctcagtgtggaccctaaagggggaggaaaggatgccttctgcacgggggaaatccaaatccaaggcacctataacatttggggacttagccatctacttctcccaggaggagtgggaatggctgagccccattcagaaggatttgtatgaagatgtcatgttggagaattaccggaacctggtctcgcttggtctttcctttcggagaccaaatgtgatcaccttattggagaaagggaaagcaccctggatggtagagccagtaagaagacgccgggctcctgaactggtcactgttgccttatttagttcatttggtgaggtcatgttttcccggatggtcttgatgcttatggatgtttgtcagtacctggtcattgatgaattagactcggggtctaaatgtgagaccaagaagttacctccaaatcaatgcaacaaatctgggcaaagcatctgccagaaactagtttctgcacaacaaaaagctcctacacgaaagagtggctgcaacaaaaattcagtcctagtaaaacctaagaaagggcattcagggaagaaacctttaaaatgtaatgactgtggtaaaacctttagtcgaagcttctctcttaaacttcatcagaacattcatacaggagagaagccttttgaatgcagtaattgtagaaaagctttcagacagatctcatccatcctacttcatcagagaattcacagtggaaagaaaagccatgaatgcaataaatgtggggaaagcttcaatcaaagaacaacccttattctacatatgagaattcatgatggaaaggaaattcttgactgtgggaaggccttgagtcaatgtcagtctttcaatatacatcagaaaattcatgttgttgggaatgtctgccagtgcagaaagtgcggaaaagccttcaatcagatgtcatcccttttacttcataagaaaattcacaatggaaagaaaacacataaatataataaatgtgggagaggcttcaaaaagaaatcagtctttgttgtacataaaagaattcatgctggagagaaaatccctgaaaatgcgaaggccttaagtcagagtctacagcaaagaagtcaccatttagagaatccttttaaatgcagaaaatgtgggaaattatttaataggatttcacccctgatgcttcaccagagaattcacacttcagagaaaccgtacaaatgtgataaatgtgacaagttcttcaggcggctttcaacccttattctgcatctaagaattcataatggagaaaaactatacagatgcaataaatgtgagaaggtctgcaatcggcattcatcccttattcaacatcagaaagttcatacaaagaaaaagaaactatttgagtgtaaggaatgtgggaagatgttttctggaactgcaaaccttaaaatacatcagaatattcattctgaagagaaacctttcaaatgcaataaatgtagtaaagttttcggccgccaatcatttcttattgaacatcaaagaattcatactggagaaaaaccctaccagtgtgaggaatgtggaaaagccttcagccaccgaatatctctcacacgacataagagaattcatactgaagatagaccctatgaatgtgatcagtgtgggaaggccttcagccagagtgcacacctcgcccaacatgaaagaattcacactggagagaagccatatacatgcaaaacatgtggtaaggcctttagtcagcgcacatctcttattctacatgaaagaagtcatactggagagaaaccctatgaatgtaatgaatgtgggaaggcatttagcagtggctcagaccttattcgacatcagagaagtcattcttcagagaaaccctatgaatgtagtaaatgtgggaaggcatatagtcggagttcatccctgattcgacatcagaatacacattctgaagaaaaagcctaaggttgttttaaatctataaaatcaacgaatgaggctatcaaacatatggcaaatatgtatttgtctataatgtaaattttgtgtatatgggaccatttgatgatatgtcccactttgaaagccaaagagcaaaagtcattggtgattttgacctcaggatttgaaattaactgaaggaaactcagaagtttggtcagtcattgtgaatgaagatcatttttcatttgataagaattactggctgggcgcagtggcttacacctgtaaccccagcactttgggaggctgagacaggcggatcacgaggtcaagagtttgagaccacggtgaaaccctgtctctactaaaaaatacaaaattagctgggcgtggtggtgcgcacctgtaatctcagctactggagaggctgaggcaggagaatcgcttgaacccaggaggtgggggttgcaccgagcagagattgcaccactgcactccagtctgggcaacagagcaagactctgtgtcaaaaaaaaaaaaaattaccgatattttacttccagcatagttttaaagataatttattggtcacatacaacaaaatagaattgtgaagtccattatagggctctgagcctgatttaaggtcacagaaaaaagaatttgagtctgtttctcagatctagaattatcaaatataaggaacttctcggcaaaacagggtgccactttcagctgacaaacttgtgggtgagaataaagaaaagtgagtctttaggtagataaagttgtcactcataatggtgtgtaacagtagaaaccttactttaccatctccacggatatgaggatatatgatcttcatggtgtgaacgtctaacttggctgagacaagctatcagtaaaagaaccaagatatagtgaagaatgaggatttcagagccaggagaaatcagtattgttttatttggaaataaatcatctatatttatatgagtaaacattggtattttcatgtaacaatactggtatgcaataagtggtgtaatatgagttgttatggactgaatgtttatgtccctcccaaaactaattatgttaaaatcctcaccatcaatgtgatgttacttggaaatgaggcatttgggaggcaattaggattagatgaggtcatgagggtggagccctcgtgatgggattagtgcctttataagaagagacatcaggctgagcccggtggctcatgcctgtaatcccagcactttgggaggccaaggcgagtggatcatgaggtcaggagattgagacaatcctggctaacacggtgaaaccccgtctccactgaaaaaaaatacaaaaaattagccaggcacagtggcatgtgcctgtagtcccagctactcgggaggctgaaggagaagaatcgcttgaacccaggaggcggaggttgcagtgagccaggatcacgccactgtactccaccctgggcgacagagcgagactacgtctcaaaaagacatcagaaagcctgcttgctctctgcaccatgtgaggatgcaggaagaagccagctgtctacagaacaggaagagaaccctacgagaacctaaccatgctggcgacctgttctcagacttccagacttcagaactgtgagaagtaaattgttgtttaagccacccagtctatgatgttttgttatggcagccccagctaatatatggagtggaaagcctagatttatctactgggttcttttcctgtcagcagttcaacatgtgtagtagctttcagtctctgctgtttgtgccaaatatataagaaataaaatcagataacttttttgtaattggatc

SEQ ID NO: 35323 - DNA, 972 bp, Homo sapiens
  source 1..972: mol_type = unassigned DNA
aaaaattcagtcctagtaaaacctaagaaagggcattcagggaagaaacctttaaaatgtaatgactgtggtaaaacctttagtcgaagcttctctcttaaacttcatcagaacattcatacaggagagaagccttttgaatgcagtaattgtagaaaagctttcagacagatctcatccatcctacttcatcagagaattcacagtggaaagaaaagccatgaatgcaataaatgtggggaaagcttcaatcaaagaacaacccttattctacatatgagaattcatgatggaaagaatccttttaaatgcagaaaatgtgggaaattatttaataggatttcacccctgatgcttcaccagagaattcacacttcagagaaaccgtacaaatgtgaggaatgtgggaagatgttttctggaactgcaaaccttaaaatacatcagaatattcattctgaagagaaacctttcaaatgcaataaatgtagtaaagttttcggccgccaatcatttcttattgaacatcaaagaattcatactggagaaaaaccctaccagtgtgaggaatgtggaaaagccttcagccaccgaatatctctcacacgacataagagaattcatactgaagatagaccctatgaatgtgatcagtgtgggaaggccttcagccagagtgcacacctcgcccaacatgaaagaattcacactggagagaagccatatacatgcaaaacatgtggtaaggcctttagtcagcgcacatctcttattctacatgaaagaagtcatactggagagaaaccctatgaatgtaatgaatgtgggaaggcatttagcagtggctcagaccttattcgacatcagagaagtcattcttcagagaaaccctatgaatgtagtaaatgtgggaaggcatatagtcggagttcatccctgattcgacatcagaatacacattctgaagaaaaa

SEQ ID NO: 35324 - DNA, 3768 bp, Homo sapiens
  source 1..3768: mol_type = unassigned DNA
gcggtcccggggtcccggaggggagtgcgcaggcgctgagtccctgctcggctgtctcggtggtcgccgccggggtctgagcccgggaagaccgagccctgccttaccagctctctgcccatctctcagtgtggaccctaaagggggaggaaaggatgccttctgcacgggggaaatccaaatccaaggcacctataacatttggggacttagccatctacttctcccaggaggagtgggaatggctgagccccattcagaaggatttgtatgaagatgtcatgttggagaattaccggaacctggtctcgcttggtctttcctttcggagaccaaatgtgatcaccttattggagaaagggaaagcaccctggatggtagagccagtaagaagacgccgggctcctggctggactacaatgatggcatgatctcggctcactgcaacctccgcctcctgggttcaagcaattctcgtgcctcagcctcccgagcggctgggattacagactcggggtctaaatgtgagaccaagaagttacctccaaatcaatgcaacaaatctgggcaaagcatctgccagaaactagtttctgcacaacaaaaagctcctacacgaaagagtggctgcaacaaaaattcagtcctagtaaaacctaagaaagggcattcagggaagaaacctttaaaatgtaatgactgtggtaaaacctttagtcgaagcttctctcttaaacttcatcagaacattcatacaggagagaagccttttgaatgcagtaattgtagaaaagctttcagacagatctcatccatcctacttcatcagagaattcacagtggaaagaaaagccatgaatgcaataaatgtggggaaagcttcaatcaaagaacaacccttattctacatatgagaattcatgatggaaaggaaattcttgactgtgggaaggccttgagtcaatgtcagtctttcaatatacatcagaaaattcatgttgttgggaatgtctgccagtgcagaaagtgcggaaaagccttcaatcagatgtcatcccttttacttcataagaaaattcacaatggaaagaaaacacataaatataataaatgtgggagaggcttcaaaaagaaatcagtctttgttgtacataaaagaattcatgctggagagaaaatccctgaaaatgcgaaggccttaagtcagagtctacagcaaagaagtcaccatttagagaatccttttaaatgcagaaaatgtgggaaattatttaataggatttcacccctgatgcttcaccagagaattcacacttcagagaaaccgtacaaatgtgataaatgtgacaagttcttcaggcggctttcaacccttattctgcatctaagaattcataatggagaaaaactatacagatgcaataaatgtgagaaggtctgcaatcggcattcatcccttattcaacatcagaaagttcatacaaagaaaaagaaactatttgagtgtaaggaatgtgggaagatgttttctggaactgcaaaccttaaaatacatcagaatattcattctgaagagaaacctttcaaatgcaataaatgtagtaaagttttcggccgccaatcatttcttattgaacatcaaagaattcatactggagaaaaaccctaccagtgtgaggaatgtggaaaagccttcagccaccgaatatctctcacacgacataagagaattcatactgaagatagaccctatgaatgtgatcagtgtgggaaggccttcagccagagtgcacacctcgcccaacatgaaagaattcacactggagagaagccatatacatgcaaaacatgtggtaaggcctttagtcagcgcacatctcttattctacatgaaagaagtcatactggagagaaaccctatgaatgtaatgaatgtgggaaggcatttagcagtggctcagaccttattcgacatcagagaagtcattcttcagagaaaccctatgaatgtagtaaatgtgggaaggcatatagtcggagttcatccctgattcgacatcagaatacacattctgaagaaaaagcctaaggttgttttaaatctataaaatcaacgaatgaggctatcaaacatatggcaaatatgtatttgtctataatgtaaattttgtgtatatgggaccatttgatgatatgtcccactttgaaagccaaagagcaaaagtcattggtgattttgacctcaggatttgaaattaactgaaggaaactcagaagtttggtcagtcattgtgaatgaagatcatttttcatttgataagaattactggctgggcgcagtggcttacacctgtaaccccagcactttgggaggctgagacaggcggatcacgaggtcaagagtttgagaccacggtgaaaccctgtctctactaaaaaatacaaaaaaaaaaaaaattaccgatattttacttccagcatagttttaaagataatttattggtcacatacaacaaaatagaattgtgaagtccattatagggctctgagcctgatttaaggtcacagaaaaaagaatttgagtctgtttctcagatctagaattatcaaatataaggaacttctcggcaaaacagggtgccactttcagctgacaaacttgtgggtgagaataaagaaaagtgagtctttaggtagataaagttgtcactcataatggtgtgtaacagtagaaaccttactttaccatctccacggatatgaggatatatgatcttcatggtgtgaacgtctaacttggctgagacaagctatcagtaaaagaaccaagatatagtgaagaatgaggatttcagagccaggagaaatcagtattgttttatttggaaataaatcatctatatttatatgagtaaacattggtattttcatgtaacaatactggtatgcaataagtggtgtaatatgagttgttatggactgaatgtttatgtccctcccaaaactaattatgttaaaatcctcaccatcaatgtgatgttacttggaaatgaggcatttgggaggcaattaggattagatgaggtcatgagggtggagccctcgtgatgggattagtgcctttataagaagagacatcaggctgagcccggtggctcatgcctgtaatcccagcactttgggaggccaaggcgagtggatcatgaggtcaggagattgagacaatcctggctaacacggtgaaaccccgtctccactgaaaaaaaatacaaaaaattagccaggcacagtggcatgtgcctgtagtcccagctactcgggaggctgaaggagaagaatcgcttgaacccaggaggcggaggttgcagtgagccaggatcacgccactgtactccaccctgggcgacagagcgagactacgtctcaaaaagacatcagaaagcctgcttgctctctgcaccatgtgaggatgcaggaagaagccagctgtctacagaacaggaagagaaccctacgagaacctaaccatgctggcgacctgttctcagacttccagacttcagaactgtgagaagtaaattgttgtttaagccacccagtctatgatgttttgttatggcagccccagctaatatatggagtggaaagcctagatttatctactgggttcttttcctgtcagcagttcaacatgtgtagtagctttcagtctctgctgtttgtgccaaatatataagaaataaaatcagataacttttttgtaattgg

SEQ ID NO: 35325 - DNA, 4459 bp, Homo sapiens
  source 1..4459: mol_type = unassigned DNA
atgcgtggtgcgtgtgtgaaggggggtgcagcgcgcggtcccggggtcccggaggggagtgcgcaggcgctgagtccctgctcggctgtctcggtggtcgccgccggggtctgagcccgggaagaccgaggttccagccgtcctcacctcaggaggacatagctttgtgcctttcaaagccctttctcatctatcatcagggactcggaagacgagccaggtttacagccctgccttgatgtgtagtgccgagttccttgaagaaaattattttatggacaatgtatgagtctgttttcgtgctgctgataaagacatacccagactcacagttctacgtggctggggaggcctcacaatcgtgatggaaggtgaaagacacgtcttacatggccacagggagaatgagagtccctgtacagaaccatcagatcacatgagacttactcactgccatgagaacagcatgggggaaaccgcccccatgattcagttatctcccaccgggtccctcccacaacacgtggaaattatgggagctataattcaagatgagatttgagtggggacacagccagaccatatcagacaagaatcatcttctcaaatttggggtgcgtggctgagtgcacacacctgtgaaaactgcgggatgaatgcattacaacttcctggaacaagtcattttacctaagtaattggaaggggaaagccaactgatctgcttatctgccctgccttaccagctctctgcccatctctcagtgtggaccctaaagggggaggaaaggatgccttctgcacgggggaaatccaaatccaaggcacctataacatttggggacttagccatctacttctcccaggaggagtgggaatggctgagccccattcagaaggatttgtatgaagatgtcatgttggagaattaccggaacctggtctcgcttggtctttcctttcggagaccaaatgtgatcaccttattggagaaagggaaagcaccctggatggtagagccagtaagaagacgccgggctcctgactcggggtctaaatgtgagaccaagaagttacctccaaatcaatgcaacaaatctgggcaaagcatctgccagaaactagtttctgcacaacaaaaagctcctacacgaaagagtggctgcaacaaaaattcagtcctagtaaaacctaagaaagggcattcagggaagaaacctttaaaatgtaatgactgtggtaaaacctttagtcgaagcttctctcttaaacttcatcagaacattcatacaggagagaagccttttgaatgcagtaattgtagaaaagctttcagacagatctcatccatcctacttcatcagagaattcacagtggaaagaaaagccatgaatgcaataaatgtggggaaagcttcaatcaaagaacaacccttattctacatatgagaattcatgatggaaaggaaattcttgactgtgggaaggccttgagtcaatgtcagtctttcaatatacatcagaaaattcatgttgttgggaatgtctgccagtgcagaaagtgcggaaaagccttcaatcagatgtcatcccttttacttcataagaaaattcacaatggaaagaaaacacataaatataataaatgtgggagaggcttcaaaaagaaatcagtctttgttgtacataaaagaattcatgctggagagaaaatccctgaaaatgcgaaggccttaagtcagagtctacagcaaagaagtcaccatttagagaatccttttaaatgcagaaaatgtgggaaattatttaataggatttcacccctgatgcttcaccagagaattcacacttcagagaaaccgtacaaatgtgataaatgtgacaagttcttcaggcggctttcaacccttattctgcatctaagaattcataatggagaaaaactatacagatgcaataaatgtgagaaggtctgcaatcggcattcatcccttattcaacatcagaaagttcatacaaagaaaaagaaactatttgagtgtaaggaatgtgggaagatgttttctggaactgcaaaccttaaaatacatcagaatattcattctgaagagaaacctttcaaatgcaataaatgtagtaaagttttcggccgccaatcatttcttattgaacatcaaagaattcatactggagaaaaaccctaccagtgtgaggaatgtggaaaagccttcagccaccgaatatctctcacacgacataagagaattcatactgaagatagaccctatgaatgtgatcagtgtgggaaggccttcagccagagtgcacacctcgcccaacatgaaagaattcacactggagagaagccatatacatgcaaaacatgtggtaaggcctttagtcagcgcacatctcttattctacatgaaagaagtcatactggagagaaaccctatgaatgtaatgaatgtgggaaggcatttagcagtggctcagaccttattcgacatcagagaagtcattcttcagagaaaccctatgaatgtagtaaatgtgggaaggcatatagtcggagttcatccctgattcgacatcagaatacacattctgaagaaaaagcctaaggttgttttaaatctataaaatcaacgaatgaggctatcaaacatatggcaaatatgtatttgtctataatgtaaattttgtgtatatgggaccatttgatgatatgtcccactttgaaagccaaagagcaaaagtcattggtgattttgacctcaggatttgaaattaactgaaggaaactcagaagtttggtcagtcattgtgaatgaagatcatttttcatttgataagaattactggctgggcgcagtggcttacacctgtaaccccagcactttgggaggctgagacaggcggatcacgaggtcaagagtttgagaccacggtgaaaccctgtctctactaaaaaatacaaaattagctgggcgtggtggtgcgcacctgtaatctcagctactggagaggctgaggcaggagaatcgcttgaacccaggaggtgggggttgcaccgagcagagattgcaccactgcactccagtctgggcaacagagcaagactctgtgtcaaaaaaaaaaaaaattaccgatattttacttccagcatagttttaaagataatttattggtcacatacaacaaaatagaattgtgaagtccattatagggctctgagcctgatttaaggtcacagaaaaaagaatttgagtctgtttctcagatctagaattatcaaatataaggaacttctcggcaaaacagggtgccactttcagctgacaaacttgtgggtgagaataaagaaaagtgagtctttaggtagataaagttgtcactcataatggtgtgtaacagtagaaaccttactttaccatctccacggatatgaggatatatgatcttcatggtgtgaacgtctaacttggctgagacaagctatcagtaaaagaaccaagatatagtgaagaatgaggatttcagagccaggagaaatcagtattgttttatttggaaataaatcatctatatttatatgagtaaacattggtattttcatgtaacaatactggtatgcaataagtggtgtaatatgagttgttatggactgaatgtttatgtccctcccaaaactaattatgttaaaatcctcaccatcaatgtgatgttacttggaaatgaggcatttgggaggcaattaggattagatgaggtcatgagggtggagccctcgtgatgggattagtgcctttataagaagagacatcaggctgagcccggtggctcatgcctgtaatcccagcactttgggaggccaaggcgagtggatcatgaggtcaggagattgagacaatcctggctaacacggtgaaaccccgtctccactgaaaaaaaatacaaaaaattagccaggcacagtggcatgtgcctgtagtcccagctactcgggaggctgaaggagaagaatcgcttgaacccaggaggcggaggttgcagtgagccaggatcacgccactgtactccaccctgggcgacagagcgagactacgtctcaaaaagacatcagaaagcctgcttgctctctgcaccatgtgaggatgcaggaagaagccagctgtctacagaacaggaagagaaccctacgagaacctaaccatgctggcgacctgttctcagacttccagacttcagaactgtgagaagtaaattgttgtttaagccacccagtctatgatgttttgttatggcagccccagctaatatatggagtggaaagcctagatttatctactgggttcttttcctgtcagcagttcaacatgtgtagtagctttcagtctctgctgtttgtgccaaatatataagaaataaaatcagataacttttttgtaattggatc

SEQ ID NO: 35326 - DNA, 2274 bp, Homo sapiens
  source 1..2274: mol_type = unassigned DNA
ggtcagagtgcagacctgagaccactgctcaccgatttcagactccagtttatctgtgcctcggcttccccacttagtcgcagaagacttaggctgaggccccaggaagagatctccatcctttgcaggagcacaacaagatggccatgtcccaggaatcattgaccttcaaggacgtgtttgtggacttcaccctggaggagtggcagcaactggactctgcccagaagaacctctacagggatgtcatgcttgagaactacagccacctggtgtccgtggggcatctagttgggaagccagatgtgatcttcaggttgggaccaggtgacgagtcctggatggcagatggagggaccccggtacggacctgtgcagtctgggaagttgacgagcagatagatcactacaaggaaagccaagacaaatttctgtggcaagctgcattcataggcaaggaaacactgaaggatgaaagtggtcaagaatgtaaaatatgtagaaaaatcatttatctcaacacagactttgtttctgtaaaacaaagactccctaaatattattcatgggaaaggtgttcaaaacatcatttaaactttcttggtcaaaatagaagctatgtaagaaagaaagatgatggatgtaaggcatattggaaagtatgcctccattataatcttcataaagctcaacctgcagagagattttttgaccctaatcaacgagggaaagccctccaccaaaagcaagcccttagaaaaagtcagagaagtcaaactggggagaaactctacaaatgtactgaatgtggaaaagtgtttatccagaaagcaaacttagttgtacatcaaagaactcacaccggagagaaaccttatgaatgctgcgaatgtgcaaaagccttcagccagaagtcaaccctcatagcacaccagagaactcacacaggggagaagccctatgaatgcagtgaatgtggaaaaacctttatccagaagtcaactctgattaaacatcaacgaactcatacaggagagaaaccatttgtatgtgacaaatgtccaaaagcctttaagagttcatatcatcttattagacatgaaaaaacacacattagacaagcattttataaaggtattaaatgtactacgtccagccttatatatcaaagaattcacacaagtgagaaacctcagtgcagtgaacatgggaaagcctctgatgagaagcccagtcccactaaacattggagaactcatacaaaagagaacatttatgagtgtagtaaatgtgggaaaagcttcagaggaaagtcacacctctctgttcatcagagaattcatacaggagagaaaccctatgaatgtagtatatgtgggaagactttcagtggaaagtcacacctctctgtccatcatagaactcatacaggagagaaaccttatgaatgcagaagatgtgggaaagcctttggggagaagtcaacccttattgtacatcagagaatgcatacaggagagaaaccctataaatgcaacgaatgtgggaaagcctttagtgagaagtcaccactgattaaacatcagagaattcatacaggagagagaccctatgaatgcactgactgtaaaaaagccttcagtaggaagtcaactctcatcaaacatcagagaattcatacaggagaaaaaccttacaaatgtagtgaatgtgggaaggccttcagtgtgaaatcaactctcattgtgcatcacagaactcatacaggagagaaaccttatgaatgcagagactgtgggaaagcattcagtgggaagtcaactctcattaaacatcagagaagtcacacaggagataaaaacctatgattatacttgagagtgggataattatactagtagttatttgtcatttgactattactagtctcattatttgtcaaataatcatggcgagtaatcttataaatgtccagaatattggaaattcttcatatgttaatgttcatttaacttaatacaaagtacaaaagtataattccagaggtgtcaataaatgtgatcagttttttcacccagaattcttcacccaggagtgaagaactgtatgtcaaataattcaaaaggggcaaaactgaatgtagttatgtgggaaagccttcagaaataatttaaatggcactgtttatcagagtatgtatgccgaggaaaactaagaatttagtgagcttataaaaccatggtagccaggcgtggtacgtagctcacacctgta

SEQ ID NO: 35327 - DNA, 4073 bp, Homo sapiens
  source 1..4073: mol_type = unassigned DNA
ccggagggtggcgcttcgttcacactggctgttgtcatccgcccctgaggtttcaggctgtcggcagtgaaggtcagagtgcagacctgagaccactgctcaccgatttcagactccagtttatctgtgcctcggcttccccacttagtcgcagaagacttaggctgaggccccaggaagagatctccatcctttgcaggagcacaacaagatggccatgtcccaggaatcattgaccttcaaggacgtgtttgtggacttcaccctggaggagtggcagcaactggactctgcccagaagaacctctacagggatgtcatgcttgagaactacagccacctggtgtccgtggggcatctagttgggaagccagatgtgatcttcaggttgggaccaggtgacgagtcctggatggcagatggagggaccccggtacggacctgtgcaggtgaggacaggccagaagtctgggaagttgacgagcagatagatcactacaaggaaagccaagacaaatttctgtggcaagctgcattcataggcaaggaaacactgaaggatgaaagtggtcaagaatgtaaaatatgtagaaaaatcatttatctcaacacagactttgtttctgtaaaacaaagactccctaaatattattcatgggaaaggtgttcaaaacatcatttaaactttcttggtcaaaatagaagctatgtaagaaagaaagatgatggatgtaaggcatattggaaagtatgcctccattataatcttcataaagctcaacctgcagagagattttttgaccctaatcaacgagggaaagccctccaccaaaagcaagcccttagaaaaagtcagagaagtcaaactggggagaaactctacaaatgtactgaatgtggaaaagtgtttatccagaaagcaaacttagttgtacatcaaagaactcacaccggagagaaaccttatgaatgctgcgaatgtgcaaaagccttcagccagaagtcaaccctcatagcacaccagagaactcacacaggggagaagccctatgaatgcagtgaatgtggaaaaacctttatccagaagtcaactctgattaaacatcaacgaactcatacaggagagaaaccatttgtatgtgacaaatgtccaaaagcctttaagagttcatatcatcttattagacatgaaaaaacacacattagacaagcattttataaaggtattaaatgtactacgtccagccttatatatcaaagaattcacacaagtgagaaacctcagtgcagtgaacatgggaaagcctctgatgagaagcccagtcccactaaacattggagaactcatacaaaagagaacatttatgagtgtagtaaatgtgggaaaagcttcagaggaaagtcacacctctctgttcatcagagaattcatacaggagagaaaccctatgaatgtagtatatgtgggaagactttcagtggaaagtcacacctctctgtccatcatagaactcatacaggagagaaaccttatgaatgcagaagatgtgggaaagcctttggggagaagtcaacccttattgtacatcagagaatgcatacaggagagaaaccctataaatgcaacgaatgtgggaaagcctttagtgagaagtcaccactgattaaacatcagagaattcatacaggagagagaccctatgaatgcactgactgtaaaaaagccttcagtaggaagtcaactctcatcaaacatcagagaattcatacaggagaaaaaccttacaaatgtagtgaatgtgggaaggccttcagtgtgaaatcaactctcattgtgcatcacagaactcatacaggagagaaaccttatgaatgcagagactgtgggaaagcattcagtgggaagtcaactctcattaaacatcagagaagtcacacaggagataaaaacctatgattatacttgagagtgggataattatactagtagttatttgtcatttgactattactagtctcattatttgtcaaataatcatggcgagtaatcttataaatgtccagaatattggaaattcttcatatgttaatgttcatttaacttaatacaaagtacaaaagtataattccagaggtgtcaataaatgtgatcagttttttcacccagaattcttcacccaggagtgaagaactgtatgtcaaataattcaaaaggggcaaaactgaatgtagttatgtgggaaagccttcagaaataatttaaatggcactgtttatcagagtatgtatgccgaggaaaactaagaatttagtgagcttataaaaccatggtagccaggcgtggtacgtagctcacacctgtaatcctagcacttttgggaggctgaggtgggcagattgcttgagctcacaagtttgagaccagcctgggcaacatggcaaaactctgtctctacaaaaaatacaaaagttatctgagtgtagtggtgcatacctttagtcccagctactcaggaggttgaagtaggagggtggcttgagcccaggaggcagaggttgcagtgaactgagatcgtgccactgcactccagcctgggcattatagccagaccttgtcaaataaataaataaacaaacccatggtataaatgagaggaatcatgctctatattcttttattaatagagacagggtcttgctatgttgcccaggctggtcttgaactcgtagcgttaattgatcctcccacctttgcctcccaaagcacttgtattatagatatgagccaccacacttaccatgttctttaccaaacattttgtggaagaggtgtagaggtggcaaacaattataaatttaagatatgttcactgtggagtagagtatgattatttatttatttagagatggagtttcgctcttctcgcccaggctggagtgcagtggcacgatcttggctcactgcagcctctgccttccaggttcaagtgattctcctgcctcagcctcccaagtagctgggattacaggcacccaccaccacacccggctaattctttttttttttttttttttttagtagagacgcagttttgccatgttgggcaggctggtctcgaactcctgacctcaggtaatccgcccgcctcagcctcccaaagtgctgggattataggcgagagccaccacgctcagtgagtatgacatttttaaaagaacagtataaagcataaaatatcccatgtggggcaaactcccagattattttcctaaacaaatagaaaaaatgcttcctgaaatagggtaagagaggatgagtcatcaggatccctgaaacaaagatctcaaacaggagaccttacgtatattattcatcaatatcttcagtgcaaaaatgcaaagccattacagaaagggcacatagtaagcttttacatactttccttaggaacagtgcttagaacttaaaattctccatgttttaataaagagtaataattttatggtgaagcaatataagatttaaaattttcagagtatcttccataacagcagtattatttaaagtagtgaaaaaataagacaatttaatatccaatgatagatgattaaaaattggtatgtcaggtgaaataacatgcaccaattaagactactggcaaatttgggaaaatgttcgtggtaaatcattaggtaaaaaatattataaaacaataaccatatgattaatattgtacaaacaggaagtatatgaaccattatatcagtgattctgggtggttgacatataaaaattttgtgatgagtaaagttatatgcacatataagtataaatttgtatttatttaagtataaatttgtattcacctatttcataggtgagtgtgtgtgtatagataaacacatggaacaaaaagttaggtatatctgtgtagtgtggagggaaaaagctaggaaagaaatacaccaaattattaagtaaattggcatttgaatgtggggattattgatgtgtaaaaatttttttgattgtagtctccagaaatcaccaataaagtatatcgtttaaagtg

SEQ ID NO: 35328 - DNA, 5378 bp, Homo sapiens
  source 1..5378: mol_type = unassigned DNA
ggccgcggggagggcggcggtggctgcagcggctggagcggggtagagaccgccgggtctcggcccgcaccaggagcggaacaacctttcagatctgtgtggaccccagaagatccgtgaagaatatgaattgattccatgcggacatgaatgagtccttaaacctagaacatcatgtacatcatcctccttaataatagtattgattatttggttctatgctggggaccggaggggatgagatggtttccaccagaatgctcactgagctctattacccttccctgttccctgtattttttttttttttctgagacagtcttgctctgtcgcccaggtgggagtgcagtggcacgatctcagctcactgcaaactccacctcccaggttcaagcaattcttctgcctcagcctcccgagtagctgggactacaggtgtgtgctgccatgcccagctaatttttgtatttttagtagagacggggtttcactatcttggccaggatggtcttgatctcctgacctcgtgatccgcccgcctctgcctccccaagtgctgggattacaggcgtgagccaccatgcccagccccctatatttcttttttttgagacagggtctcgctctgtccaggctggagtgcagtggcgtgatcttggctcattgaaacctcaacctcatgggttcaggcgattctcctgcctcagcctcctttgtagctgcgattacaggcatgtgccaccacacctgtctagttttttgtatttttagtagagacaaggtttcaccatgttggccaagctggtctcaaactcctgacctcaagtgatccatctgcctcagcctcccaaaacgctgggattacaagcatgagccaccgcacctggccccttccctgtatttctaagaactctcttttcccctgctttctctggattttggagcccaccaaggtctgggatctgccgatatgggggatatgaagacccctgattttgatgacctccttgctgcctttgacatccctgacattgatgcgaatgaagccatccattctgggccagaagaaaatgaggggcctggaggcccagggaagccagaaccaggtgtaggaagtgaatctgaagacacagcagcagcctctgctggggatggccctggagttccagcccaggcctctgaccatggcctgccaccgccagacatttctgtagtcagtgtcattgtcaagaacactgtgtgtcccgagcagtctgaggccctggctggaggctcagcaggagacggggcccaggctgctggggtaactaaagaagggcctgtggggcctcatcgaatgcagaatggttttgggagccctgaaccttccctcccaggaactccccactctcctgctcctcccagtgggggcacctggaaagaaaaaggcatggaaggcaaaactcccttggacctgtttgctcattttggccctgagccaggggaccactcagatccgctgcctccctctgcaccctctcccactcgggagggggctctgaccccgcctcctttcccctcttcctttgagctggcccaggagaatggcccaggcatgcagccacctgtttcttccccaccattgggggccttgaagcaggagagctgcagcccccatcatccccaggtcctagcccaacaaggctcaggctccagccctaaggccacggacatccctgccagtgcctcgcctcccccagttgctggggtgcccttcttcaagcagtctccagggcaccagagccctcttgcctcccccaaagtgcccgtctgtcagcccttgaaggaagaagatgatgatgaggggccagtggacaagtcttccccaggaagtccccagagtccctctagtggggccgaggctgcagatgaggacagcaatgactcccctgcctccagctcctctaggcctcttaaggtgcggatcaagaccattaaaacatcctgcgggaatatcacaaggactgtaactcaggtcccctcagatcctgatccacctgcccccttggctgagggggccttcttggctgaggctagcctcttgaagctgtcccctgcaacacctacttctgagggtccaaaggtggtgagcgtacagttgggtgatggtacaaggctgaaaggcactgtgctgcctgtggccaccatccagaacgccagtactgccatgctgatggcagccagtgtggctcgcaaggctgtggtgctgcctggggggactgccaccagccctaagatgattgctaagaacgtgctaggcctggtgccccaagccctgcctaaggctgacgggcgggcagggctggggactgggggacagaaggtgaatggtgcctcggtggtgatggtgcaaccttcaaagacagctactgggccaagtacagggggcggcacagtgatatcacggacccagtccagcctggtggaggccttcaacaagatcctcaacagcaagaacctgctccctgcctataggccaaacctgagcccaccagctgaggctgggctggccctgcctcccaccggctaccgctgcctggagtgtggggatgccttctcattggagaagagcctggcacggcactatgaccgtcggagcatgcgcatcgaggtcacctgcaaccactgcgcccgccgcctggtcttcttcaacaagtgcagcctgctcctgcatgcacgtgaacacaaggacaaggggctcgtcatgcagtgctcacatttggtcatgaggcctgtagcccttgaccagatggtggggcagccggacatcacaccgctgctgcctgtagctgtcccacctgtctctggacctctggccttgcctgccttgggcaagggtgagggggccatcacctcctctgccattactacagttgctgctgaggcccctgtcctgccgctctccacagagccgcctgctgccccggccacctctgcttacacatgctttcgctgcctggagtgcaaggaacagtgccgggacaaggctggcatggcagctcacttccagcagctcggcccccctgcccctggggccaccagcaatgtgtgcccaacctgccccatgatgctccccaatcgctgcagcttcagcgcccaccagcgcatgcataagaatcgacccccccatgtctgtcctgagtgtgggggcaacttcctgcaagccaattttcagacccatctccgggaggcctgtctgcacgtctctcgccgtgtaggatacaggtgccccagctgttcagtggtgtttgggggtgtgaactccatcaagtcccacatccagacgtcgcactgcgaggttttccacaagtgccccatctgccccatggccttcaagtctgggccaagtgcccatgcccacctctactcccagcatcccagcttccaaactcagcaggccaagctgatctacaagtgcgccatgtgcgacacagtcttcactcacaaacccctcctctcctcacacttcgaccagcacttgctgccccagcgtgtcagtgtctttaagtgcccgtcttgtcctctgctctttgcccaaaaaaggaccatgctggaacatctcaagaacacccatcagtctgggcgcttggaggagactgctgggaaaggggccgggggtgccctgctgacccccaagactgagcctgaggagctggctgtttctcagggaggggcagcccctgctactgaggagtcgtcttcatcttcagaagaggaggaagtacccagctcccctgagcccccccgtccagccaaacggcctcggcgggaactagggagcaaaggcctcaagggtgggggtggggggcctggaggctggacctgtggcctgtgtcactcctggttccctgagcgtgatgaatacgtggcccacatgaagaaggagcatggcaagtcagtgaaaaagttcccctgtcgcctgtgtgagcgctccttctgctccgcccccagcctgaggcgccatgtcagagttaatcacgagggcatcaagcgagtttacccctgcaggtattgcacagagggaaaacgcaccttcagcagccgcctgatcctagagaaacatgtccaggtccggcacggcttgcagcttggggcccagtcccctggccgggggaccaccttggctcggggttccagtgccagagcccaggggccaggtcggaaacgccgccagtcttctgactcttgcagtgaggagcctgacagcacgacaccgccagccaagtcccccaggggcggacctggatctggaggccatggccctctgcgctaccggagcagcagctccacagaacagagcctcatgatggggttgagggtggaggatggtgcccagcagtgcctcgactgtggcttgtgctttgcctcccctggctccctgagccgacaccgtttcatcagccacaagaagagacggggtgtgggtaaagccagtgccctggggctgggggatggggaggaagaggcccctccatcaaggtctgaccccgatggtggagactcacccctgcctgcttctggaggcccactgacctgtaaggtctgtggcaagagctgcgacagccctctaaacctcaagacccacttccgcacgcatggcatggcgttcatcagggctcggcagggggctgttggggacaactagtctccaaggcctgggactgaccagccccttcctcttggagcctggttttccctactgctgcctgatccctcggctggggagttttcattaacattaatattttgttaattcctgtctctccaacctgaagaagaagagcatttgaggattattctagttatttgcaacctccctttgggtttggccctggagtcctagtagagtggaccctccattcctcctttctgagcccaacactaattaattttatgctcctgctgcagaacccccagtgtgggcctgggggtgggaggatgggacttaggtatgcctgctagacaggttcagggaaggactgatgggggtgtcatggatggacacacctctccacaattccttcaggcatggactggaactttcctcctctaggccgggccctgccctagtgcccacccccgcccccgcccccgcccaaccccaactcactggcactcaagccccctacccctgcagtgcctttcacttctttttttccccagaaatccggggcgggggggtggggggttggtagggatgagtcctgtcaagggggccacaggagaggaggggacaggctctcaggaatcctttattcttgtagtaataataatactaacaaacagttggggaactagggagaaaaccagaccattaaaactgtttgtggtcgaatctc

SEQ ID NO: 35329 - DNA, 4556 bp, Homo sapiens
  source 1..4556: mol_type = unassigned DNA
gagggagtggggaggccgaaccggagagaagcaggaagtagcggcggccgcggggagggcggcggtggctgcagcggctggagcggggtagagaccgccgggtctcggcccgcaccaggagcggaacaagtctgggatctgccgatatgggggatatgaagacccctgattttgatgacctccttgctgcctttgacatccctgacattgatgcgaatgaagccatccattctgggccagaagaaaatgaggggcctggaggcccagggaagccagaaccaggtgtaggaagtgaatctgaagacacagcagcagcctctgctggggatggccctggagttccagcccaggcctctgaccatggcctgccaccgccagacatttctgtagtcagtgtcattgtcaagaacactgtgtgtcccgagcagtctgaggccctggctggaggctcagcaggagacggggcccaggctgctggggtaactaaagaagggcctgtggggcctcatcgaatgcagaatggttttgggagccctgaaccttccctcccaggaactccccactctcctgctcctcccagtgggggcacctggaaagaaaaaggcatggaaggcaaaactcccttggacctgtttgctcattttggccctgagccaggggaccactcagatccgctgcctccctctgcaccctctcccactcgggagggggctctgaccccgcctcctttcccctcttcctttgagctggcccaggagaatggcccaggcatgcagccacctgtttcttccccaccattgggggccttgaagcaggagagctgcagcccccatcatccccaggtcctagcccaacaaggctcaggctccagccctaaggccacggacatccctgccagtgcctcgcctcccccagttgctggggtgcccttcttcaagcagtctccagggcaccagagccctcttgcctcccccaaagtgcccgtctgtcagcccttgaaggaagaagatgatgatgaggggccagtggacaagtcttccccaggaagtccccagagtccctctagtggggccgaggctgcagatgaggacagcaatgactcccctgcctccagctcctctaggcctcttaaggtgcggatcaagaccattaaaacatcctgcgggaatatcacaaggactgtaactcaggtcccctcagatcctgatccacctgcccccttggctgagggggccttcttggctgaggctagcctcttgaagctgtcccctgcaacacctacttctgagggtccaaaggtggtgagcgtacagttgggtgatggtacaaggctgaaaggcactgtgctgcctgtggccaccatccagaacgccagtactgccatgctgatggcagccagtgtggctcgcaaggctgtggtgctgcctggggggactgccaccagccctaagatgattgctaagaacgtgctaggcctggtgccccaagccctgcctaaggctgacgggcgggcagggctggggactgggggacagaaggtgaatggtgcctcggtggtgatggtgcaaccttcaaagacagctactgggccaagtacagggggcggcacagtgatatcacggacccagtccagcctggtggaggccttcaacaagatcctcaacagcaagaacctgctccctgcctataggccaaacctgagcccaccagctgaggctgggctggccctgcctcccaccggctaccgctgcctggagtgtggggatgccttctcattggagaagagcctggcacggcactatgaccgtcggagcatgcgcatcgaggtcacctgcaaccactgcgcccgccgcctggtcttcttcaacaagtgcagcctgctcctgcatgcacgtgaacacaaggacaaggggctcgtcatgcagtgctcacatttggtcatgaggcctgtagcccttgaccagatggtggggcagccggacatcacaccgctgctgcctgtagctgtcccacctgtctctggacctctggccttgcctgccttgggcaagggtgagggggccatcacctcctctgccattactacagttgctgctgaggcccctgtcctgccgctctccacagagccgcctgctgccccggccacctctgcttacacatgctttcgctgcctggagtgcaaggaacagtgccgggacaaggctggcatggcagctcacttccagcagctcggcccccctgcccctggggccaccagcaatgtgtgcccaacctgccccatgatgctccccaatcgctgcagcttcagcgcccaccagcgcatgcataagaatcgacccccccatgtctgtcctgagtgtgggggcaacttcctgcaagccaattttcagacccatctccgggaggcctgtctgcacgtctctcgccgtgtaggatacaggtgccccagctgttcagtggtgtttgggggtgtgaactccatcaagtcccacatccagacgtcgcactgcgaggttttccacaagtgccccatctgccccatggccttcaagtctgggccaagtgcccatgcccacctctactcccagcatcccagcttccaaactcagcaggccaagctgatctacaagtgcgccatgtgcgacacagtcttcactcacaaacccctcctctcctcacacttcgaccagcacttgctgccccagcgtgtcagtgtctttaagtgcccgtcttgtcctctgctctttgcccaaaaaaggaccatgctggaacatctcaagaacacccatcagtctgggcgcttggaggagactgctgggaaaggggccgggggtgccctgctgacccccaagactgagcctgaggagctggctgtttctcagggaggggcagcccctgctactgaggagtcgtcttcatcttcagaagaggaggaagtacccagctcccctgagcccccccgtccagccaaacggcctcggcgggaactagggagcaaaggcctcaagggtgggggtggggggcctggaggctggacctgtggcctgtgtcactcctggttccctgagcgtgatgaatacgtggcccacatgaagaaggagcatggcaagtcagtgaaaaagttcccctgtcgcctgtgtgagcgctccttctgctccgcccccagcctgaggcgccatgtcagagttaatcacgagggcatcaagcgagtttacccctgcaggtattgcacagagggaaaacgcaccttcagcagccgcctgatcctagagaaacatgtccaggtccggcacggcttgcagcttggggcccagtcccctggccgggggaccaccttggctcggggttccagtgccagagcccaggggccaggtcggaaacgccgccagtcttctgactcttgcagtgaggagcctgacagcacgacaccgccagccaagtcccccaggggcggacctggatctggaggccatggccctctgcgctaccggagcagcagctccacagaacagagcctcatgatggggttgagggtggaggatggtgcccagcagtgcctcgactgtggcttgtgctttgcctcccctggctccctgagccgacaccgtttcatcagccacaagaagagacggggtgtgggtaaagccagtgccctggggctgggggatggggaggaagaggcccctccatcaaggtctgaccccgatggtggagactcacccctgcctgcttctggaggcccactgacctgtaaggtctgtggcaagagctgcgacagccctctaaacctcaagacccacttccgcacgcatggcatggcgttcatcagggctcggcagggggctgttggggacaactagtctccaaggcctgggactgaccagccccttcctcttggagcctggttttccctactgctgcctgatccctcggctggggagttttcattaacattaatattttgttaattcctgtctctccaacctgaagaagaagagcatttgaggattattctagttatttgcaacctccctttgggtttggccctggagtcctagtagagtggaccctccattcctcctttctgagcccaacactaattaattttatgctcctgctgcagaacccccagtgtgggcctgggggtgggaggatgggacttaggtatgcctgctagacaggttcagggaaggactgatgggggtgtcatggatggacacacctctccacaattccttcaggcatggactggaactttcctcctctaggccgggccctgccctagtgcccacccccgcccccgcccccgcccaaccccaactcactggcactcaagccccctacccctgcagtgcctttcacttctttttttccccagaaatccggggcgggggggtggggggttggtagggatgagtcctgtcaagggggccacaggagaggaggggacaggctctcaggaatcctttattcttgtagtaataataatactaacaaacagttggggaactagggagaaaaccagaccattaaaactgtttgtggtcgaatctcca

SEQ ID NO: 35330 - DNA, 4568 bp, Homo sapiens
  source 1..4568: mol_type = unassigned DNA
cgcggggagggcggcggtggctgcagcggctggagcggggtagagaccgccgggtctcggcccgcaccaggagcggaacaagtctgggatctgccgatatgggggatatgaagacccctgattttgatgacctccttgctgcctttgacatccctgacattgatgcgaatgaagccatccattctgggccagaagaaaatgaggggcctggaggcccagggaagccagaaccaggtgtaggaagtgaatctgaagacacagcagcagcctctgctggggatggccctggagttccagcccaggcctctgaccatggcctgccaccgccagacatttctgtagtcagtgtcattgtcaagaacactgtgtgtcccgagcagtctgaggccctggctggaggctcagcaggagacggggcccaggctgctggggtaactaaagaagggcctgtggggcctcatcgaatgcagaatggttttgggagccctgaaccttccctcccaggaactccccactctcctgctcctcccagtgggggcacctggaaagaaaaaggcatggaaggcaaaactcccttggacctgtttgctcattttggccctgagccaggggaccactcagatccgctgcctccctctgcaccctctcccactcgggagggggctctgaccccgcctcctttcccctcttcctttgagctggcccaggagaatggcccaggcatgcagccacctgtttcttccccaccattgggggccttgaagcaggagagctgcagcccccatcatccccaggtcctagcccaacaaggctcaggctccagccctaaggccacggacatccctgccagtgcctcgcctcccccagttgctggggtgcccttcttcaagcagtctccagggcaccagagccctcttgcctcccccaaagtgcccgtctgtcagcccttgaaggaagaagatgatgatgaggggccagtggacaagtcttccccaggaagtccccagagtccctctagtggggccgaggctgcagatgaggacagcaatgactcccctgcctccagctcctctaggcctcttaaggtgcggatcaagaccattaaaacatcctgcgggaatatcacaaggactgtaactcaggtcccctcagatcctgatccacctgcccccttggctgagggggccttcttggctgaggctagcctcttgaagctgtcccctgcaacacctacttctgagggtccaaaggtggtgagcgtacagttgggtgatggtacaaggctgaaaggcactgtgctgcctgtggccaccatccagaacgccagtactgccatgctgatggcagccagtgtggctcgcaaggctgtggtgctgcctggggggactgccaccagccctaagatgattgctaagaacgtgctaggcctggtgccccaagccctgcctaaggctgacgggcgggcagggctggggactgggggacagaaggtgaatggtgcctcggtggtgatggtgcaaccttcaaagacagctactgggccaagtacagggggcggcacagtgatatcacggacccagtccagcctggtggaggccttcaacaagatcctcaacagcaagaacctgctccctgcctataggccaaacctgagcccaccagctgaggctgggctggccctgcctcccaccggctaccgctgcctggagtgtggggatgccttctcattggagaagagcctggcacggcactatgaccgtcggagcatgcgcatcgaggtcacctgcaaccactgcgcccgccgcctggtcttcttcaacaagtgcagcctgctcctgcatgcacgtgaacacaaggacaaggggctcgtcatgcagtgctcacatttggtcatgaggcctgtagcccttgaccagatggtggggcagccggacatcacaccgctgctgcctgtagctgtcccacctgtctctggacctctggccttgcctgccttgggcaagggtgagggggccatcacctcctctgccattactacagttgctgctgaggcccctgtcctgccgctctccacagagccgcctgctgccccggccacctctgcttacacatgctttcgctgcctggagtgcaaggaacagtgccgggacaaggctggcatggcagctcacttccagcagctcggcccccctgcccctggggccaccagcaatgtgtgcccaacctgccccatgatgctccccaatcgctgcagcttcagcgcccaccagcgcatgcataagaatcgacccccccatgtctgtcctgagtgtgggggcaacttcctgcaagccaattttcagacccatctccgggaggcctgtctgcacgtctctcgccgtgtaggatacaggtgccccagctgttcagtggtgtttgggggtgtgaactccatcaagtcccacatccagacgtcgcactgcgaggttttccacaagtgccccatctgccccatggccttcaagtctgggccaagtgcccatgcccacctctactcccagcatcccagcttccaaactcagcaggccaagctgatctacaagtgcgccatgtgcgacacagtcttcactcacaaacccctcctctcctcacacttcgaccagcacttgctgccccagcgtgtcagtgtctttaagtgcccgtcttgtcctctgctctttgcccaaaaaaggaccatgctggaacatctcaagaacacccatcagtctgggcgcttggaggagactgctgggaaaggggccgggggtgccctgctgacccccaagactgagcctgaggagctggctgtttctcagggaggggcagcccctgctactgaggagtcgtcttcatcttcagaagaggaggaagtacccagctcccctgagcccccccgtccagccaaacggcctcggcgggaactagggagcaaaggcctcaagggtgggggtggggggcctggaggctggacctgtggcctgtgtcactcctggttccctgagcgtgatgaatacgtggcccacatgaagaaggagcatggcaagtcagtgaaaaagttcccctgtcgcctgtgtgagcgctccttctgctccgcccccagcctgaggcgccatgtcagagttaatcacgagggcatcaagcgagtttacccctgcagaagcaagggccctggccttcgggctgtgccgctgctgccatcctgtcctctcccatttcaggtattgcacagagggaaaacgcaccttcagcagccgcctgatcctagagaaacatgtccaggtccggcacggcttgcagcttggggcccagtcccctggccgggggaccaccttggctcggggttccagtgccagagcccaggggccaggtcggaaacgccgccagtcttctgactcttgcagtgaggagcctgacagcacgacaccgccagccaagtcccccaggggcggacctggatctggaggccatggccctctgcgctaccggagcagcagctccacagaacagagcctcatgatggggttgagggtggaggatggtgcccagcagtgcctcgactgtggcttgtgctttgcctcccctggctccctgagccgacaccgtttcatcagccacaagaagagacggggtgtgggtaaagccagtgccctggggctgggggatggggaggaagaggcccctccatcaaggtctgaccccgatggtggagactcacccctgcctgcttctggaggcccactgacctgtaaggtctgtggcaagagctgcgacagccctctaaacctcaagacccacttccgcacgcatggcatggcgttcatcagggctcggcagggggctgttggggacaactagtctccaaggcctgggactgaccagccccttcctcttggagcctggttttccctactgctgcctgatccctcggctggggagttttcattaacattaatattttgttaattcctgtctctccaacctgaagaagaagagcatttgaggattattctagttatttgcaacctccctttgggtttggccctggagtcctagtagagtggaccctccattcctcctttctgagcccaacactaattaattttatgctcctgctgcagaacccccagtgtgggcctgggggtgggaggatgggacttaggtatgcctgctagacaggttcagggaaggactgatgggggtgtcatggatggacacacctctccacaattccttcaggcatggactggaactttcctcctctaggccgggccctgccctagtgcccacccccgcccccgcccccgcccaaccccaactcactggcactcaagccccctacccctgcagtgcctttcacttctttttttccccagaaatccggggcgggggggtggggggttggtagggatgagtcctgtcaagggggccacaggagaggaggggacaggctctcaggaatcctttattcttgtagtaataataatactaacaaacagttggggaactagggagaaaaccagaccattaaaactgtttgtggtcgaatctcc

SEQ ID NO: 35331 - DNA, 3277 bp, Homo sapiens
  source 1..3277: mol_type = unassigned DNA
gcactgtgctgcctgtggccaccatccagaacgccagtactgccatgctgatggcagccagtgtggctcgcaaggctgtggtgctgcctggggggactgccaccagccctaagatgattgctaagaacgtgctaggcctggtgccccaagccctgcctaaggctgacgggcgggcagggctggggactgggggacagaaggtgaatggtgcctcggtggtgatggtgcaaccttcaaagacagctactgggccaagtacagggggcggcacagtgatatcacggacccagtccagcctggtggaggccttcaacaagatcctcaacagcaagaacctgctccctgcctataggccaaacctgagcccaccagctgaggctgggctggccctgcctcccaccggctaccgctgcctggagtgtggggatgccttctcattggagaagagcctggcacggcactatgaccgtcggagcatgcgcatcgaggtcacctgcaaccactgcgcccgccgcctggtcttcttcaacaagtgcagcctgctcctgcatgcacgtgaacacaaggacaaggggctcgtcatgcagtgctcacatttggtcatgaggcctgtagcccttgaccagatggtggggcagccggacatcacaccgctgctgcctgtagctgtcccacctgtctctggacctctggccttgcctgccttgggcaagggtgagggggccatcacctcctctgccattactacagttgctgctgaggcccctgtcctgccgctctccacagagccgcctgctgccccggccacctctgcttacacatgctttcgctgcctggagtgcaaggaacagtgccgggacaaggctggcatggcagctcacttccagcagctcggcccccctgcccctggggccaccagcaatgtgtgcccaacctgccccatgatgctccccaatcgctgcagcttcagcgcccaccagcgcatgcataagaatcgacccccccatgtctgtcctgagtgtgggggcaacttcctgcaagccaattttcagacccatctccgggaggcctgtctgcacgtctctcgccgtgtaggatacaggtgccccagctgttcagtggtgtttgggggtgtgaactccatcaagtcccacatccagacgtcgcactgcgaggttttccacaagtgccccatctgccccatggccttcaagtctgggccaagtgcccatgcccacctctactcccagcatcccagcttccaaactcagcaggccaagctgatctacaagtgcgccatgtgcgacacagtcttcactcacaaacccctcctctcctcacacttcgaccagcacttgctgccccagcgtgtcagtgtctttaagtgcccgtcttgtcctctgctctttgcccaaaaaaggaccatgctggaacatctcaagaacacccatcagtctgggcgcttggaggagactgctgggaaaggggccgggggtgccctgctgacccccaagactgagcctgaggagctggctgtttctcagggaggggcagcccctgctactgaggagtcgtcttcatcttcagaagaggaggaagtacccagctcccctgagcccccccgtccagccaaacggcctcggcgggaactagggagcaaaggcctcaagggtgggggtggggggcctggaggctggacctgtggcctgtgtcactcctggttccctgagcgtgatgaatacgtggcccacatgaagaaggagcatggcaagtcagtgaaaaagttcccctgtcgcctgtgtgagcgctccttctgctccgcccccagcctgaggcgccatgtcagagttaatcacgagggcatcaagcgagtttacccctgcagaagcaagggccctggccttcgggctgtgccgctgctgccatcctgtcctctcccatttcaggtattgcacagagggaaaacgcaccttcagcagccgcctgatcctagagaaacatgtccaggtccggcacggcttgcagcttggggcccagtcccctggccgggggaccaccttggctcggggttccagtgccagagcccaggggccaggtcggaaacgccgccagtcttctgactcttgcagtgaggagcctgacagcacgacaccgccagccaagtcccccaggggcggacctggatctggaggccatggccctctgcgctaccggagcagcagctccacagaacagagcctcatgatggggttgagggtggaggatggtgcccagcagtgcctcgactgtggcttgtgctttgcctcccctggctccctgagccgacaccgtttcatcagccacaagaagagacggggtgtgggtaaagccagtgccctggggctgggggatggggaggaagaggcccctccatcaaggtctgaccccgatggtggagactcacccctgcctgcttctggaggcccactgacctgtaaggtctgtggcaagagctgcgacagccctctaaacctcaagacccacttccgcacgcatggcatggcgttcatcagggctcggcagggggctgttggggacaactagtctccaaggcctgggactgaccagccccttcctcttggagcctggttttccctactgctgcctgatccctcggctggggagttttcattaacattaatattttgttaattcctgtctctccaacctgaagaagaagagcatttgaggattattctagttatttgcaacctccctttgggtttggccctggagtcctagtagagtggaccctccattcctcctttctgagcccaacactaattaattttatgctcctgctgcagaacccccagtgtgggcctgggggtgggaggatgggacttaggtatgcctgctagacaggttcagggaaggactgatgggggtgtcatggatggacacacctctccacaattccttcaggcatggactggaactttcctcctctaggccgggccctgccctagtgcccacccccgcccccgcccccgcccaaccccaactcactggcactcaagccccctacccctgcagtgcctttcacttctttttttccccagaaatccggggcgggggggtggggggttggtagggatgagtcctgtcaagggggccacaggagaggaggggacaggctctcaggaatcctttattcttgtagtaataataatactaacaaacagttggggaactagggagaaaaccagaccattaaaactgtttgtggtcgaatctc

SEQ ID NO: 35332 - DNA, 1438 bp, Homo sapiens
  source 1..1438: mol_type = unassigned DNA
ccggtctttccagccccgagagggacctggttcctctgcccaggcttctgtcactctgtcacctacgctatgccctgctgtagtcacaggaggtgtagagaggaccccgggacatctgaaagccaggaaatggaggagtgggctttgctggatatttcccagaggaaactctacaaggaagtgatgctggaaactttcaggaacctgacctctgtaggaaaaagttggaaagaccagaacattgaatatgagtaccaaaaccccaggagaaacttcaggagtctcatagaaaagaaagtcaatgaaattaaagatgacagtcattgtggagaaacttttacccaggttccagatgacaggctgaacttccaggagaagaaagcttctcctgaaataaaatcatgtgacagctttgtgtgtggagaagttggcctaggtaactcatcttttaatatgaacatcagaggtgacattggacacaaggcctatgagtatcaggaatatggaccgaagccataaaaaaatctcactctgtcacccaggctggagtgcagtggcatgatctcaggtcgctgcaacctctgcctccagggttcaagcaactctcctgcttcagcctcctgagtagctgggactacaggcatgcaccaccacgccaggctaattttttgtattttttagtagagacagggtttcaccatattggccaggctggtcttgaactccagacctcatgattcgcctgcctcggcctcccaaaatgctgggattacagatatgagccatcatgcccagccgcaaccctaatttttcattcagtcataataccaacagttatctcatgtacctctgagtgccttcttcccaaaagccagcagtaccatacctgctgtcagcaagtgtgtaatataccatagtgataaatatgaccaaaagccataaatgactgtgagatgtatgagaatgacacgtcacattagtaagaagagaaaaattttggccatgtttatgatttgaaatatgttttcctctatcacatttagaaatatagttacaaaatgcccttagttttatcctgattcatcatggtcactgaggagcatcgtctcatatgcctggtatgtgacatgtgtctcttcaacagtaaaagacttggcattggctgggcatggtggctcacgcctgtaatcccagcactttgggaggccgaggtcaggagttagagaccattctgaccaatatgatcaaaccccgtctctactaaaaatacaaaaattagcggggtgtggtggcatgctcctgtaatcctagctattcaggaggctgacgcaggagacttgcttgaatataggaggcagacgttgcagtgagccgaggtcacaccattcactccagcctgggcaacaagagcgaaactccgtttcaaaaaaaaaaaaaa

SEQ ID NO: 35333 - DNA, 2010 bp, Homo sapiens
  source 1..2010: mol_type = unassigned DNA
tgttcctccagacactgagggggtcgcattccttacctcacctttgtccctgcgcgggctgcggctgggatccggtctttccagccccgagagggacctggttcctctgcccaggcttctgtcactctgtcacctacgctatgccctgctgtagtcacaggaggtgtagagaggaccccgggacatctgaaagccaggaaatggacccagtggcctttgatgatgttgctgtgaacttcacccaggaggagtgggctttgctggatatttcccagaggaaactctacaaggaagtgatgctggaaactttcaggaacctgacctctgtaggaaaaagttggaaagaccagaacattgaatatgagtaccaaaaccccaggagaaacttcaggagtctcatagaaaagaaagtcaatgaaattaaagatgacagtcattgtggagaaacttttacccaggttccagatgacaggctgaacttccaggagaagaaagcttctcctgaaataaaatcatgtgacagctttgtgtgtggagaagttggcctaggtaactcatcttttaatatgaacatcagaggtgacattggacacaaggcctatgagtatcaggaatatggaccgaagccatgtaagtgtcaacaacctaaaaaagccttcagatatcacccctcctttagaacaccacaaagggatcacactggagagaaaccctatgcttgtaaagaatgtggaaaaacttttatttcccattcaagcattcaaagacacgtggtaatgcacagtggggatggaccttataaatgtaaattttgtgggaaagccttccattgtctcagtttatatcttatccatgaaagaattcacactggagagaaaccatatgaatgtaaacaatgtggtaaatcctttagttattctgctacccttcgaatacacgaaagaactcacactggagaaaagccttatgaatgtcagcaatgtgggaaagcatttcatagtcccagatgctatcgtagacatgaaaggattcacacgggagagaaggcttatcaatgtaaggaatgtggaaaagcattcacgtgtccccagtatgttcgtatacatgaaaggacccactctaggaaaaaaccctatgaatgtacgcagtgtgggaaagcattatcctctcttacaagttttcaaacacacataagaatgcactctggagaaagaccttatgaatgtaagatatgtgggaaaggcttttgttctgccaattcatttcaaagacatgaaaaaactcacagtggagagaaaccctataaatgcaagcaatgtggtaaagccttcattcattccagttcccttcgttatcatgaaaggattcacactggagagaaaccctatgagtgtaagcaatgtgggaaggccttcagatcttcctcacaccttcaattgcatggtaggactcacactggagagaagccctatgaatgtcaggaatgtgggaaagccttcagatctatgaagaaccttcaaagtcatgaaaggacacaaacacacgtaagaatacactctggagaaagaccttataaatgtaagctatgtgggaaaggcttttattgtcccaaatcattgcaaagacatgaaaaaactcacactggagagaaactctatgaatgcaagcaatgtggtgaagccttcagtagttccagttcctttcgataccatgaaaggactcacactggagagaaaccctataaatgcaagcaatgtgggaaagccttcagagctgcctcagtccttcgaatgcatggtaggactcaccctgaagataaaccctatgagtgtaagcaatgagggaaagccttcagatctgcctcacacctttgaatgcatggtaggacacacaatcaagagaaaccatgaatgtaaagaatgtgggaaacccttcaggtctgcccagaaccttcgaattcagtaaaggacacaagcacacataagaatgcattctggatagctgaacaaa

SEQ ID NO: 35334 - DNA, 2250 bp, Homo sapiens
  source 1..2250: mol_type = unassigned DNA
cggaagtttgcggggcggggcggacgcgggtggccaaggcccgtttccggcggcgtcgcgcgtttgcgagcctcgggtggtcctcagggagggtctctcggccagaacacgtggatgcccacccaccactgagcctcatggaggtggtaacatttggcgatgtggctgtgcacttctctcgggaggagtggcagtgtctggaccctggccagagggccctctacagggaagtgatgctggagaaccacagcagtgtggctggactagcaggattcctggttttcaagcctgagctgatctctcggctggagcagggagaagagccatgggtcctcgacctgcagggagcagaggggacagaggcaccaaggacctccaagacagattctacgattaggactgaaaatgagcaggcctgtgaggacatggacatcctaaaatcagaatcctatgggacagtggtcagaatctccccacaggactttcctcagaatcctggctttggagacgtttctgattctgaggtctggttagacagtcatctgggcagtcccgggctgaaagtgacaggctttaccttccaaaataactgtttgaatgaggagactgtggttcccaagaccttcaccaaggacgcaccccagggatgtaaggagctgggaagcagcggcctggattgtcagcctcttgaaagtcagggagagagtgcggaagggatgtcccagagatgcgaggagtgtggcaaaggcatcagagccacttcagatatcgctctgcattgggaaattaatacacagaaaattagcagatgtcaagaatgccaaaaaaagttatctgactgcttgcaggggaaacatacaaataactgccatggagagaagccgtacgaatgtgcagagtgtgggaaagtcttcaggctctgctcgcagcttaatcagcatcagagaatccacacgggagagaaaccctttaaatgcactgagtgtggaaaagccttccgcctgagctcaaaacttattcagcatcaaagaatccacactggggagaagccctacagatgtgaggaatgtggaaaagcttttggtcagagctcaagcctcatccaccatcagagaatccacacaggagagaggccctatggttgtcgtgagtgtgggaaagccttcagccagcagtcgcagctggttagacaccagagaactcacactggggagaggccctacccttgcaaggagtgtgggaaggccttcagccagagctccaccctagcccagcatcaaaggatgcatactggggagaaagctcaaattctaaaagcctcagacagtccaagccttgttgcacatcagagaattcacgctgtagagaaaccatttaagtgtgatgagtgtgggaaagcttttaggtggatctctcgcctgagtcagcatcagctgattcacactggagagaagccttataaatgcaacaagtgtacaaaagcctttggttgtagttcacggcttattcgccatcagagaactcacactggagaaaaaccatttaaatgtgatgagtgtggcaaaggctttgttcagggctcacaccttattcagcatcagcgaatccacactggagagaaaccctatgtgtgtaatgactgtggaaaagccttcagtcagagttccagccttatttaccatcagagaatccataaaggagagaagccctacgaatgcctccaatgcggaaaagccttcagtatgagcacacagcttacaatacatcaaagggttcacactggagagaggccctataaatgtaatgaatgtgggaaagccttcagtcaaaactcaacccttttccaacaccagataattcatgcaggggtgaagccctatgagtgcagtgagtgtggaaaagccttcagccggagctcatatcttattgaacaccagagaatacacactagggcccagtggttttacgaatatgggaatgccctggaagggtccacctttgtgagccgtaaaaaggttaatactataaagaaactgcatcagtgtgaagactgtgagaagatatttaggtggcgttcacacctaattatacaccagagaattcacaccggggagaagccttataaatgcaatgactgtggcaaagcttttaatcgtagctcaaggcttacccagcatcaaaaaattcacatgggatagaccacttacatataaatgtgtatatatgtgaataaacctatagccttaactt

SEQ ID NO: 35335 - DNA, 2242 bp, Homo sapiens
  source 1..2242: mol_type = unassigned DNA
cgtttccggcggcgtcgcgcgtttgcgagcctcgggtggtcctcagggagggtctctcggccagaacacgtggatgcccacccaccactgagcctcatgggattcctggggtgctggtgtgtgtcctttcaggaggtggtaacatttggcgatgtggctgtgcacttctctcgggaggagtggcagtgtctggaccctggccagagggccctctacagggaagtgatgctggagaaccacagcagtgtggctggactagcaggattcctggttttcaagcctgagctgatctctcggctggagcagggagaagagccatgggtcctcgacctgcagggagcagaggggacagaggcaccaaggacctccaagacagattctacgattaggactgaaaatgagcaggcctgtgaggacatggacatcctaaaatcagaatcctatgggacagtggtcagaatctccccacaggactttcctcagaatcctggctttggagacgtttctgattctgaggtctggttagacagtcatctgggcagtcccgggctgaaagtgacaggctttaccttccaaaataactgtttgaatgaggagactgtggttcccaagaccttcaccaaggacgcaccccagggatgtaaggagctgggaagcagcggcctggattgtcagcctcttgaaagtcagggagagagtgcggaagggatgtcccagagatgcgaggagtgtggcaaaggcatcagagccacttcagatatcgctctgcattgggaaattaatacacagaaaattagcagatgtcaagaatgccaaaaaaagttatctgactgcttgcaggggaaacatacaaataactgccatggagagaagccgtacgaatgtgcagagtgtgggaaagtcttcaggctctgctcgcagcttaatcagcatcagagaatccacacgggagagaaaccctttaaatgcactgagtgtggaaaagccttccgcctgagctcaaaacttattcagcatcaaagaatccacactggggagaagccctacagatgtgaggaatgtggaaaagcttttggtcagagctcaagcctcatccaccatcagagaatccacacaggagagaggccctatggttgtcgtgagtgtgggaaagccttcagccagcagtcgcagctggttagacaccagagaactcacactggggagaggccctacccttgcaaggagtgtgggaaggccttcagccagagctccaccctagcccagcatcaaaggatgcatactggggagaaagctcaaattctaaaagcctcagacagtccaagccttgttgcacatcagagaattcacgctgtagagaaaccatttaagtgtgatgagtgtgggaaagcttttaggtggatctctcgcctgagtcagcatcagctgattcacactggagagaagccttataaatgcaacaagtgtacaaaagcctttggttgtagttcacggcttattcgccatcagagaactcacactggagaaaaaccatttaaatgtgatgagtgtggcaaaggctttgttcagggctcacaccttattcagcatcagcgaatccacactggagagaaaccctatgtgtgtaatgactgtggaaaagccttcagtcagagttccagccttatttaccatcagagaatccataaaggagagaagccctacgaatgcctccaatgcggaaaagccttcagtatgagcacacagcttacaatacatcaaagggttcacactggagagaggccctataaatgtaatgaatgtgggaaagccttcagtcaaaactcaacccttttccaacaccagataattcatgcaggggtgaagccctatgagtgcagtgagtgtggaaaagccttcagccggagctcatatcttattgaacaccagagaatacacactagggcccagtggttttacgaatatgggaatgccctggaagggtccacctttgtgagccgtaaaaaggttaatactataaagaaactgcatcagtgtgaagactgtgagaagatatttaggtggcgttcacacctaattatacaccagagaattcacaccggggagaagccttataaatgcaatgactgtggcaaagcttttaatcgtagctcaaggcttacccagcatcaaaaaattcacatgggatagaccacttacatataaatgtgtatatatgtgaataaacctatagccttaactt

SEQ ID NO: 35336 - DNA, 1874 bp, Homo sapiens
  source 1..1874: mol_type = unassigned DNA
cgtttccggcggcgtcgcgcgtttgcgagcctcgggtggtcctcagggagggtctctcggccagaacacgtggatgcccacccaccactgagcctcatggaggtggtaacatttggcgatgtggctgtgcacttctctcgggaggagtggcagtgtctggaccctggccagagggccctctacagggaagtgatgctggagaaccacagcagtgtggctggactagcaggattcctggttttcaagcctgagctgatctctcggctggagcagggagaagagccatgggtcctcgacctgcagggagcagaggggacagaggcaccaaggacctccaagacaggctttctgggccgcccaaccatgggacaagagccaaggcacccacatgcaccgcctgcaactcctgttcctggccttccaaaacactgctcacaaagactgaccctgcctcctcctgggctctcgtcatctcctcttggccacttcctggttcatgatcaggacagaaggaggggaacgtcagccatatggatggtctgaaaattccagattctgtgctaaccataatgctgtgttcttttcactaacagcaaccagccaaaaaggggctggggtgcaagcttcattctgcttcagcacctggattctctctggattgacatggtcctaagtcaggggctggcaaaccattcgtagctttttacatttctgaatggttggggagaaaataagagacttgtgacatttgaaaactatgttaaaatcgaatttgactgtgcacagtgtccctgggcttggtgatgcccaagcgtcttcatggagcctctggcggctttcttgctgcagcagtgtttaccacaccagccaagtcaccttgaacttggaaaatgacttcatgccctccagccactgaaggattatttttcctctcagcccttagtggtttctttacctaaatgtcacggtacaactgagaataaggcagctgggtcagttcaatagaagtaaacctaaagtccaacaatccaggttagatattagccacggagggatgggaggaggagtcttctttttttttgagacggaatctcgctctgtccctcaggctgaagtgcagtggtgcggtctcggctcactgcaagctccgccacctgggttcacgccattctcctgcctcagcctcccgagtagctgggactacaggtgcctgctaccacgcccggctaatttttttgtatttttaatagagacggggtttcactgtgttagccagctggtctcgatcttctgacctcgtgatccgcccgcctcggcctccctaagtgctgggatgacaggcgtgagccaccatgccgagctgaggaggagtcctcttctagctgcacgatgtggaaatgacacatcatgtccatggggcagcttgctgagagccaagggtgtgagcacatgacttaaattcaagctactgcacagctttgagatctgagtatcacatggaagcatccaggtggcccctggcacacaggctggtggttcttttgtggagagggagaggaagaggggctgctcatggggtagtgcaggtgctagaatatcctgttaacctgttcacactgcactgcaattcgggcttcggtaagctcatctaaagagtttccaggccaggcacggtggctcacgcctgtaattccagcactttgagaggccaaggaaggatcacgtgaccccaggagttcggagaccacagtgagctgtgatcgcaccactgcactctagcctgggtgacagagtgaggccctgtctccacaatatataaataaaaacattttgggtttctgttttggagacaataaattaaatctataacctag

SEQ ID NO: 35337 - DNA, 2905 bp, Homo sapiens
  source 1..2905: mol_type = unassigned DNA
gcgcggcgggcgcggactcgggttgccctcggtccgagtgatccctggtcgcttccttagccctcccgccttcggcattggggtccccgcgtcccccgggcctccaggcgggaaagcgcgggggctttgcggggccttgagcgcctggtgtgggaggtggtcgagcccagccaccctcccccgcggcggcgcgaggtctctcggccagaacacgtggatgcccacccaccactgagcctcatggaggtggtaacatttggcgatgtggctgtgcacttctctcgggaggagtggcagtgtctggaccctggccagagggccctctacagggaagtgatgctggagaaccacagcagtgtggctggactagcaggattcctggttttcaagcctgagctgatctctcggctggagcagggagaagagccatgggtcctcgacctgcagggagcagaggggacagaggcaccaaggacctccaagacagattctacgattaggactgaaaatgagcaggcctgtgaggacatggacatcctaaaatcagaatcctatgggacagtggtcagaatctccccacaggactttcctcagaatcctggctttggagacgtttctgattctgaggtctggttagacagtcatctgggcagtcccgggctgaaagtgacaggctttaccttccaaaataactgtttgaatgaggagactgtggttcccaagaccttcaccaaggacgcaccccagggatgtaaggagctgggaagcagcggcctggattgtcagcctcttgaaagtcagggagagagtgcggaagggatgtcccagagatgcgaggagtgtggcaaaggcatcagagccacttcagatatcgctctgcattgggaaattaatacacagaaaattagcagatgtcaagaatgccaaaaaaagttatctgactgcttgcaggggaaacatacaaataactgccatggagagaagccgtacgaatgtgcagagtgtgggaaagtcttcaggctctgctcgcagcttaatcagcatcagagaatccacacgggagagaaaccctttaaatgcactgagtgtggaaaagccttccgcctgagctcaaaacttattcagcatcaaagaatccacactggggagaagccctacagatgtgaggaatgtggaaaagcttttggtcagagctcaagcctcatccaccatcagagaatccacacaggagagaggccctatggttgtcgtgagtgtgggaaagccttcagccagcagtcgcagctggttagacaccagagaactcacactggggagaggccctacccttgcaaggagtgtgggaaggccttcagccagagctccaccctagcccagcatcaaaggatgcatactggggagaaagctcaaattctaaaagcctcagacagtccaagccttgttgcacatcagagaattcacgctgtagagaaaccatttaagtgtgatgagtgtgggaaagcttttaggtggatctctcgcctgagtcagcatcagctgattcacactggagagaagccttataaatgcaacaagtgtacaaaagcctttggttgtagttcacggcttattcgccatcagagaactcacactggagaaaaaccatttaaatgtgatgagtgtggcaaaggctttgttcagggctcacaccttattcagcatcagcgaatccacactggagagaaaccctatgtgtgtaatgactgtggaaaagccttcagtcagagttccagccttatttaccatcagagaatccataaaggagagaagccctacgaatgcctccaatgcggaaaagccttcagtatgagcacacagcttacaatacatcaaagggttcacactggagagaggccctataaatgtaatgaatgtgggaaagccttcagtcaaaactcaacccttttccaacaccagataattcatgcaggggtgaagccctatgagtgcagtgagtgtggaaaagccttcagccggagctcatatcttattgaacaccagagaatacacactagggcccagtggttttacgaatatgggaatgccctggaagggtccacctttgtgagccgtaaaaaggttaatactataaagaaactgcatcagtgtgaagactgtgagaagatatttaggtggcgttcacacctaattatacaccagagaattcacaccggggagaagccttataaatgcaatgactgtggcaaagcttttaatcgtagctcaaggcttacccagcatcaaaaaattcacatgggatagaccacttacatataaatgtgtatatatgtgaataaacctatagccttaacttacttattttatatggaatcgtttatactgacaaacatgtagaatgttggtaaaggttcagaattgctctcaagaatatccaacttcaggccgagtgtggtggcttatgcctgtcatcccagcactttgggaggccaaggcgggcacatcacgaggtcaggaggttgagaccatcctgggtaacaggtgaaaccccatctctactaaaaatacaaaaatttagctgggcgtggtggcaggcacctgtggtcccagctgctcgggaggctgaggcaggagaatggcatcagcccaggaggcggagcttgcagtgagctgagatcgcgccactgcactccagcctgggtgacagagtgagactccctctcaaaaaaaaaaaaaaaaaaaaaaatccaacttcatacaaaatgtatgtttatttcctgaaatgtttgaccttaacctgttcaataaagcctgtgtccctcaaaatcagggtgcagtctgcagttttgagttgacaggtccctgtgaatgaggaagcagcacaaggagggctctacgagcgctgcta

SEQ ID NO: 35338 - DNA, 2082 bp, Homo sapiens
  source 1..2082: mol_type = unassigned DNA
cgtttccggcggcgtcgcgcgtttgcgagcctcgggtggtcctcagggagggtctctcggccagaacacgtggatgcccacccaccactgagcctcatgcaggattcctggttttcaagcctgagctgatctctcggctggagcagggagaagagccatgggtcctcgacctgcagggagcagaggggacagaggcaccaaggacctccaagacagattctacgattaggactgaaaatgagcaggcctgtgaggacatggacatcctaaaatcagaatcctatgggacagtggtcagaatctccccacaggactttcctcagaatcctggctttggagacgtttctgattctgaggtctggttagacagtcatctgggcagtcccgggctgaaagtgacaggctttaccttccaaaataactgtttgaatgaggagactgtggttcccaagaccttcaccaaggacgcaccccagggatgtaaggagctgggaagcagcggcctggattgtcagcctcttgaaagtcagggagagagtgcggaagggatgtcccagagatgcgaggagtgtggcaaaggcatcagagccacttcagatatcgctctgcattgggaaattaatacacagaaaattagcagatgtcaagaatgccaaaaaaagttatctgactgcttgcaggggaaacatacaaataactgccatggagagaagccgtacgaatgtgcagagtgtgggaaagtcttcaggctctgctcgcagcttaatcagcatcagagaatccacacgggagagaaaccctttaaatgcactgagtgtggaaaagccttccgcctgagctcaaaacttattcagcatcaaagaatccacactggggagaagccctacagatgtgaggaatgtggaaaagcttttggtcagagctcaagcctcatccaccatcagagaatccacacaggagagaggccctatggttgtcgtgagtgtgggaaagccttcagccagcagtcgcagctggttagacaccagagaactcacactggggagaggccctacccttgcaaggagtgtgggaaggccttcagccagagctccaccctagcccagcatcaaaggatgcatactggggagaaagctcaaattctaaaagcctcagacagtccaagccttgttgcacatcagagaattcacgctgtagagaaaccatttaagtgtgatgagtgtgggaaagcttttaggtggatctctcgcctgagtcagcatcagctgattcacactggagagaagccttataaatgcaacaagtgtacaaaagcctttggttgtagttcacggcttattcgccatcagagaactcacactggagaaaaaccatttaaatgtgatgagtgtggcaaaggctttgttcagggctcacaccttattcagcatcagcgaatccacactggagagaaaccctatgtgtgtaatgactgtggaaaagccttcagtcagagttccagccttatttaccatcagagaatccataaaggagagaagccctacgaatgcctccaatgcggaaaagccttcagtatgagcacacagcttacaatacatcaaagggttcacactggagagaggccctataaatgtaatgaatgtgggaaagccttcagtcaaaactcaacccttttccaacaccagataattcatgcaggggtgaagccctatgagtgcagtgagtgtggaaaagccttcagccggagctcatatcttattgaacaccagagaatacacactagggcccagtggttttacgaatatgggaatgccctggaagggtccacctttgtgagccgtaaaaaggttaatactataaagaaactgcatcagtgtgaagactgtgagaagatatttaggtggcgttcacacctaattatacaccagagaattcacaccggggagaagccttataaatgcaatgactgtggcaaagcttttaatcgtagctcaaggcttacccagcatcaaaaaattcacatgggatagaccacttacatataaatgtgtatatatgtgaataaacctatagccttaactt

SEQ ID NO: 35339 - DNA, 3123 bp, Homo sapiens
  source 1..3123: mol_type = unassigned DNA
gcggtcattgtcctggcagagcggcgagccggtgagtgtggctgcggggtcgcgcccaccctctacctgtgccgggggccggaacctggccccggggagggcgcggcctcggggagacggcgtgcaggcccagcactgttggtcaccgcaggcctgtcttcctattcaccgtgggcagcagagggatggctgctcagctgctgactgatgaggcactgactgggagactagacctgaaatgaaagagttggatccaaagaatgacatttcggaagacaagctctccgttgttggggaggccacggggggacccacgaggaatggtgccaggggtcctggctcagaaggagtgtgggaaccaggcagctggccagagaggccgcggggagatgcaggtgcagagtgggagccattgggaattccccaggggaacaaactcttagggggctcagtacccgcatgtcatgaactgaaggcatttgccaaccaaggctgtgtcctggtcccaccacggctggacgaccccacagaaaagggggcctgtccacccgtaaggcgtggcaagaacttctccagcacttcagacctcagtaagccccccatgccctgcgaggagaagaaaacctacgactgcagcgagtgtggcaaggcctttagccgaagctcgtccctgataaagcaccaaaggatccacacgggagaaaagccgtttgagtgtgacacctgtgggaagcacttcatcgagcgctcgtccctcaccatccaccagcgggtgcacacgggcgagaagccctatgcctgcggggactgcggcaaggccttcagccagcgcatgaacctcactgtgcaccagcgcacgcacacgggcgagaagccgtatgtgtgcgacgtgtgtggcaaggccttccggaagacttcctctctcacccagcacgagcggatccacacgggggagaagccctacgcgtgcggggactgcggcaaggccttcagccagaacatgcacctcatcgtgcaccagcgcacgcacaccggggagaagccgtacgtgtgccccgagtgcgggcgagccttcagccagaacatgcacctgaccgagcaccagcgcacgcacaccggggagaagccgtacgcctgcaaggagtgcggcaaggccttcaacaagagctcctcgctcaccctgcaccagaggaaccacaccggcgagaagccctacgtgtgcggcgagtgcggcaaggccttcagccagagctcctacctcatccagcaccagcgcttccacatcggcgtgaagccgttcgagtgcagcgagtgcggcaaggccttcagcaagaactcctcgctcacgcagcaccagcgcatccacaccggcgagaagccctacgagtgctacatctgcaagaagcacttcacggggcgctcgtccctcatcgtgcaccagatcgtgcacaccggggagaagccctacgtgtgcggcgagtgcggcaaggccttcagccagagcgcctacctcatcgagcaccagcggatccacaccggcgagaagccgtacaggtgcggccagtgcgggaagtccttcatcaagaactcctccctcactgtgcaccagcggatccacacgggcgagaagccctaccgatgcggcgagtgcgggaagaccttcagccgcaacacgaacctgacgcgccacctgcggattcacacctgagcgcctctgtgcagggctctcactggcggtgcccaggacggacgccagatggctgcgcgctttgtcagcagtgctgtgagaagttctcccctggggtggggactcggggtcaggggagctcaggaatgtggggttgtggaggggctggctgatcacacatgccccctccttactgagcctcagaaagcaagcccctcggtgtctgacgtatctggggacacttcaaggttcactgtagctgagccatggccgctggtaacagacatcagggttccagactagccctcttgagtaactgtcctagagctgggacaggtcacgcctgcctccacatctctgtttcttcagcgggaaagtggagctggtggaggggagggaggagacatctccctctttgtcagatacatcctggagtccagatgcagcttgtcaccatctgcattttctccgtgggttgggagcgtgagggccttcctatccctccacccaccgtttccctgcagtgcacgctggcagccaccaagctaggaagtggcaggagtttgccggttgtttgtgaggggaaaaatttttttttcagagttagcaaataacagtaactactgctttgaatgccaaagtttcttagagtggtctgttacgttttttaaaaataaaacttttaattaagggagactatgttattttaaacagtcttctgttttggccagttgtctggtcaaaatcggcttcagtgattgtgggaggggcaagaaggaaaagaaacagcagcaggtttgatattcagaaagaaatatgcatggattcaataagtatatacatctgagcacagattatttttatagtgatttttgcagctaaatgtgaaggcaactgtcttaagtcccttcctgctgctgtaacaaaagaccttagactgggtaatttataaacaatagaaatttgtcactcatggttctggatgctgggaagtccaagatcaaggctctggcagatttggtgtctgatggggtatgttcttcataggtagtgcttgtgtcttgatgtgtgtcttcacgtggttgtaaacggcagacttcctcaggccccttataagggtgctaatcccagtcacaagggccctgacctcatgacctcccaaaggtcctccctcttcatactgttacattggggatcaagtttccaatatgtgaatacagggaagcaccaacagaccatatcagtaacttcgagtgagtttcctaaggccgactgaagctctgtttacacataagagtgttccccaaagtgcactttctctggggccttttaggccatacttttaattttgttatttgatactactggttgctaatgttctggcatttccagttgttccacactccctgacactggtgtacacaaataaataatac

SEQ ID NO: 35340 - DNA, 2887 bp, Homo sapiens
  source 1..2887: mol_type = unassigned DNA
gccatccagagcgcggtcacagtccgactggcggcacggaggcggcggcggcggcggcggcggcagcggcggcggcagcggcggcggcagctgtagctgcagcagcaggtaaagagagcgttttcccaaagaaaataacatagcacagaaggaaaaataaaaagaaattgctgcagattttactttatgtgagaaaatctacaatttcttcgagacactcatataaaggaagcagtcatgtttcatgagtcctcaaaactgagacaagagaatgtagtagagtgaggccagaagtccttactggttcaaagaactccggggaaactgggatagaacattttacattataagtagaaccctgggagccagaggtgaatacaagtttatctgcagagctccgctgcagggctgatctgggtctggaagaaatggatgagagccagtggatgaaattcactaatactagacatctgagtcctctaatattggtgaatgaactttgctaagtatggattcaggcggtggaagtcttggattgcacacgccagactctagaatggcccataccatgattatgcaagattttgtggctggaatggctggtactgcacatatcgatggagaccatattgttgtttcagttcctgaagctgttttagtttctgatgttgtcacagatgatgggataactcttgatcatggccttgcagctgaagttgtccatggacctgatatcatcacagagactgatgtagtaacagaaggtgtgattgttcctgaagcggtacttgaagctgatgttgccattgaagaggatttagaggaagatgatggtgatcacatcttgacttctgaactaattacagaaaccgttagggtaccagagcaggttttcgtggctgaccttgttactggtcctaatggacacttagaacatgtggtccaagattgtgtttcaggagtcgactctcccacaatggtatcagaggaggttcttgtaactaattcagatacagaaactgtgattcaagcagctggaggtgttcctggttctacagttactataaaaaccgaagatgatgatgatgatgatgtcaagagcacttctgaagactacttaatgatatctttggatgatgttggagaaaaattagagcatatggggaatacaccattaaaaattggcagtgatggttcacaagaagatgctaaagaagatgggtttggttctgaagttataaaagtgtatatatttaaagcggaggctgaagatgatgttgaaataggtggaacagaaattgtcacagagagtgagtacaccagtggacattcagtagctggagtgcttgaccagagccgaatgcagcgggagaagatggtttacatggcagttaaagattcttctcaagaagaagatgatatcagagatgaaagaagagtttcccgaaggtatgaagattgtcaagcatcaggaaatactttggactcagcattagaaagcagaagtagtacagcagcacagtaccttcaaatttgtgacggcattaatacaaataaagtacttaaacaaaaagccaaaaagaggagaaggggagaaaccaggcagtggcaaacagctgttataataggtcctgatggacagcccctcacagtgtacccttgccatatttgcacaaaaaagtttaaatccaggggattcttaaaaagacacatgaagaatcatcctgatcatttaatgagaaaaaaatatcagtgtacagattgtgactttacaactaacaagaaagtgagtttccataaccacttagaaagccataagctcataaacaaagtcgacaaaacccatgaatttacagaatacacacgaagatacagagaggctagtccactgagttccaataaacttattttaagagacaaggagccgaagatgcacaagtgcaaatactgtgactatgaaactgcagaacaaggactgttaaacaggcatttgttggccgttcacagcaagaattttcctcatgtttgtgttgagtgtgggaagggttttcgacatccttctgaactcaagaaacatatgagaacccatactggtgagaagccatatcagtgtcagtattgtattttcaggtgtgcagatcaatcaaatctgaaaactcacattaagtctaaacatggtaacaatttgccatataaatgtgagcattgtccccaagcatttggtgatgagagggagcttcaacgccatctggatttgtttcaaggacataagacacaccagtgtcctcattgtgaccataagagcaccaattcaagtgaccttaagcggcacatcatatctgtccatactaaggattttcctcacaaatgtgaggtctgtgataaaggttttcatcgtccttctgagctcaaaaagcatagtgatatccataagggtaggaagattcatcagtgcaggcactgtgactttaaaacatccgatccatttattcttagtggccatatcctttcagttcatactaaagatcagccattgaaatgtaaaaggtgcaagagaggattcagacaacaaaatgagctaaaaaaacatatgaagacccatactggaaggaagatttaccaatgtgagtattgtgaatacagcactacagatgcatctggctttaaacgacatgtgatatcaatacatacaaaagactatccacacaggtgtgaattctgcaagaagggattccgaagaccatcagaaaaaaatcagcatattatgaggcaccacaaagaggctcttatgtaataagatcaatataaagaaagaagctatttaggagatatgatatgctacttgggagaaaactctcactaactgtctcaccgggtttcaaagctt

SEQ ID NO: 35341 - DNA, 4124 bp, Homo sapiens
  source 1..4124: mol_type = unassigned DNA
cggaaacccgaatgtgaggaccttaagggatccacagctgccgccccccgcagccatccagagcgcggtcacagtccgactggcggcacggaggcggcggcggcggcggcggcggcagcggcggcggcagcggcggcggcagctgtagctgcagcagcaggtaaagagagcgttttcccaaagaaaataacatagcacagaaggaaaaataaaaagaaattgctgcagattttactttatgtgagaaaatctacaatttcttcgagacactcatataaagatattggtgaatgaactttgctaagtatggattcaggcggtggaagtcttggattgcacacgccagactctagaatggcccataccatgattatgcaagattttgtggctggaatggctggtactgcacatatcgatggagaccatattgttgtttcagttcctgaagctgttttagtttctgatgttgtcacagatgatgggataactcttgatcatggccttgcagctgaagttgtccatggacctgatatcatcacagagactgatgtagtaacagaaggtgtgattgttcctgaagcggtacttgaagctgatgttgccattgaagaggatttagaggaagatgatggtgatcacatcttgacttctgaactaattacagaaaccgttagggtaccagagcaggttttcgtggctgaccttgttactggtcctaatggacacttagaacatgtggtccaagattgtgtttcaggagtcgactctcccacaatggtatcagaggaggttcttgtaactaattcagatacagaaactgtgattcaagcagctggaggtgttcctggttctacagttactataaaaaccgaagatgatgatgatgatgatgtcaagagcacttctgaagactacttaatgatatctttggatgatgttggagaaaaattagagcatatggggaatacaccattaaaaattggcagtgatggttcacaagaagatgctaaagaagatgggtttggttctgaagttataaaagtgtatatatttaaagcggaggctgaagatgatgttgaaataggtggaacagaaattgtcacagagagtgagtacaccagtggacattcagtagctggagtgcttgaccagagccgaatgcagcgggagaagatggtttacatggcagttaaagattcttctcaagaagaagatgatatcagagatgaaagaagagtttcccgaaggtatgaagattgtcaagcatcaggaaatactttggactcagcattagaaagcagaagtagtacagcagcacagtaccttcaaatttgtgacggcattaatacaaataaagtacttaaacaaaaagccaaaaagaggagaaggggagaaaccaggcagtggcaaacagctgttataataggtcctgatggacagcccctcacagtgtacccttgccatatttgcacaaaaaagtttaaatccaggggattcttaaaaagacacatgaagaatcatcctgatcatttaatgagaaaaaaatatcagtgtacagattgtgactttacaactaacaagaaagtgagtttccataaccacttagaaagccataagctcataaacaaagtcgacaaaacccatgaatttacagaatacacacgaagatacagagaggctagtccactgagttccaataaacttattttaagagacaaggagccgaagatgcacaagtgcaaatactgtgactatgaaactgcagaacaaggactgttaaacaggcatttgttggccgttcacagcaagaattttcctcatgtttgtgttgagtgtgggaagggttttcgacatccttctgaactcaagaaacatatgagaacccatactggtgagaagccatatcagtgtcagtattgtattttcaggtgtgcagatcaatcaaatctgaaaactcacattaagtctaaacatggtaacaatttgccatataaatgtgagcattgtccccaagcatttggtgatgagagggagcttcaacgccatctggatttgtttcaaggacataagacacaccagtgtcctcattgtgaccataagagcaccaattcaagtgaccttaagcggcacatcatatctgtccatactaaggattttcctcacaaatgtgaggtctgtgataaaggttttcatcgtccttctgagctcaaaaagcatagtgatatccataagggtaggaagattcatcagtgcaggcactgtgactttaaaacatccgatccatttattcttagtggccatatcctttcagttcatactaaagatcagccattgaaatgtaaaaggtgcaagagaggattcagacaacaaaatgagctaaaaaaacatatgaagacccatactggaaggaagatttaccaatgtgagtattgtgaatacagcactacagatgcatctggctttaaacgacatgtgatatcaatacatacaaaagactatccacacaggtgtgaattctgcaagaagggattccgaagaccatcagaaaaaaatcagcatattatgaggcaccacaaagaggctcttatgtaataagatcaatataaagaaagaagctatttaggagatatgatatgctacttgggagaaaactctcactaactgtctcaccgggtttcaaagcttgatactaaaccatgactttacattctttgtattaaagatcttaaaatatttgaattcacaggggatcccatagccctttgaaaattacttaaagaatttaagaagcactatagaatggttacagaaaaacttcttaagtatctgtgtaatagtattatatgcatacttaaactacagaggggaaaagcaaagacaaatactttatttggctgattatgttagatacaaatgtttctgagaagagaatacataattgagtttagtgatgctttgctatagcaagcaaacccacttttatgcaattttagaaatggggcagggaaacaaaatgtggtcattcatcagtcacttagtcattgagccttttatattgtacctggaaattaaattccagcaatgacaaaagttttgtgtattcattaaaagaaaactaactggaaaacaggttagattaattcagtactattaaaaaagaattcagagctgttaatattttatcacaggataggatacttaaaatatagcattctgtgctgagatctaaggtgaagtctataaagattaaagttcccttttttctgatgttcaagttgattgttgttcagtatggcatatatgacaaaagtatatttgagtcaaatgtggctttctaaaatggatgcaacattagcgttgcaaacaaaatcagcactatatttcttaatgatctaaagattaatttgagagaacacagttttcttaaatattataatgtctagagtttttttaggacagtcttagcaagtatgattgttctagtcttacttgctctaatgtttaaaggtgcaattttatgccattattgaaattgatttttaaaatctatataccatatgattaacatgcattttcaatatgaggcagtgtttatgcagtatttaacagagcaatctgctgccaatagagtttggaggtggatatttagtttacagtgtataaacttaaaatatgcatccctttaacaacgctttgtgttagcatgctgcaaatcaaaatggcacttaatattaaaagctggtttagggaaattttatgaaaatcctgttcataaatgtaatgcatatgatatgtacttttaagttttagttgcttcatgtttacattcagctgttcaacataattaaaatgtaattttacttcatgctatattgtggctttgtgtttcaaataatgttcacctttctgtttttgcaccagataagaatcagttccttgagaataaattttttatctttcttaacttcagaatattaaatttggaatatctactaaaattgtgtgttatgtggctgtaaatgatgtacacgctgtaaaataagatcgctactgttatgtgggattattatttctaaatgttactcattgaaatgagcatacaataaaaagcatttattgcactt

SEQ ID NO: 35342 - DNA, 4255 bp, Homo sapiens
  source 1..4255: mol_type = unassigned DNA
agacgcagagtagattgtgattggctcgggctgcggaacctcggaaacccgaatgtgaggaccttaagggatccacagctgccgccccccgcagccatccagagcgcggtcacagtccgactggcggcacggaggcggcggcggcggcggcggcggcagcggcggcggcagcggcggcggcagctgtagctgcagcagcaggtaaagagagcgttttcccaaagaaaataacatagcacagaaggaaaaataaaaagaaattgctgcagattttactttatgtgagaaaatctacaatttcttcgagacactcatataaagatattggtgaatgaactttgctaagtatggattcaggcggtggaagtcttggattgcacacgccagactctagaatggcccataccatgattatgcaagattttgtggctggaatggctggtactgcacatatcgatggagaccatattgttgtttcagttcctgaagctgttttagtttctgatgttgtcacagatgatgggataactcttgatcatggccttgcagctgaagttgtccatggacctgatatcatcacagagactgatgtagtaacagaaggtgtgattgttcctgaagcggtacttgaagctgatgttgccattgaagaggatttagaggaagatgatggtgatcacatcttgacttctgaactaattacagaaaccgttagggtaccagagcaggttttcgtggctgaccttgttactggtcctaatggacacttagaacatgtggtccaagattgtgtttcaggagtcgactctcccacaatggtatcagaggaggttcttgtaactaattcagatacagaaactgtgattcaagcagctggaggtgttcctggttctacagttactataaaaaccgaagatgatgatgatgatgatgtcaagagcacttctgaagactacttaatgatatctttggatgatgttggagaaaaattagagcatatggggaatacaccattaaaaattggcagtgatggttcacaagaagatgctaaagaagatgggtttggttctgaagttataaaagtgtatatatttaaagcggaggctgaagatgatgttgaaataggtggaacagaaattgtcacagagagtgagtacaccagtggacattcagtagctggagtgcttgaccagagccgaatgcagcgggagaagatggtttacatggcagttaaagattcttctcaagaagaagatgatatcagttgcgctgaaatagcagatgaagtttacatggaagtcattgtaggggaagaggaaggaacttctctccctgagattcagcttgaggactctgatgttaataaaacagttgtccctgttgtctgggctgcggcatatggaaatactttggactcagcattagaaagcagaagtagtacagcagcacagtaccttcaaatttgtgacggcattaatacaaataaagtacttaaacaaaaagccaaaaagaggagaaggggagaaaccaggcagtggcaaacagctgttataataggtcctgatggacagcccctcacagtgtacccttgccatatttgcacaaaaaagtttaaatccaggggattcttaaaaagacacatgaagaatcatcctgatcatttaatgagaaaaaaatatcagtgtacagattgtgactttacaactaacaagaaagtgagtttccataaccacttagaaagccataagctcataaacaaagtcgacaaaacccatgaatttacagaatacacacgaagatacagagaggctagtccactgagttccaataaacttattttaagagacaaggagccgaagatgcacaagtgcaaatactgtgactatgaaactgcagaacaaggactgttaaacaggcatttgttggccgttcacagcaagaattttcctcatgtttgtgttgagtgtgggaagggttttcgacatccttctgaactcaagaaacatatgagaacccatactggtgagaagccatatcagtgtcagtattgtattttcaggtgtgcagatcaatcaaatctgaaaactcacattaagtctaaacatggtaacaatttgccatataaatgtgagcattgtccccaagcatttggtgatgagagggagcttcaacgccatctggatttgtttcaaggacataagacacaccagtgtcctcattgtgaccataagagcaccaattcaagtgaccttaagcggcacatcatatctgtccatactaaggattttcctcacaaatgtgaggtctgtgataaaggttttcatcgtccttctgagctcaaaaagcatagtgatatccataagggtaggaagattcatcagtgcaggcactgtgactttaaaacatccgatccatttattcttagtggccatatcctttcagttcatactaaagatcagccattgaaatgtaaaaggtgcaagagaggattcagacaacaaaatgagctaaaaaaacatatgaagacccatactggaaggaagatttaccaatgtgagtattgtgaatacagcactacagatgcatctggctttaaacgacatgtgatatcaatacatacaaaagactatccacacaggtgtgaattctgcaagaagggattccgaagaccatcagaaaaaaatcagcatattatgaggcaccacaaagaggctcttatgtaataagatcaatataaagaaagaagctatttaggagatatgatatgctacttgggagaaaactctcactaactgtctcaccgggtttcaaagcttgatactaaaccatgactttacattctttgtattaaagatcttaaaatatttgaattcacaggggatcccatagccctttgaaaattacttaaagaatttaagaagcactatagaatggttacagaaaaacttcttaagtatctgtgtaatagtattatatgcatacttaaactacagaggggaaaagcaaagacaaatactttatttggctgattatgttagatacaaatgtttctgagaagagaatacataattgagtttagtgatgctttgctatagcaagcaaacccacttttatgcaattttagaaatggggcagggaaacaaaatgtggtcattcatcagtcacttagtcattgagccttttatattgtacctggaaattaaattccagcaatgacaaaagttttgtgtattcattaaaagaaaactaactggaaaacaggttagattaattcagtactattaaaaaagaattcagagctgttaatattttatcacaggataggatacttaaaatatagcattctgtgctgagatctaaggtgaagtctataaagattaaagttcccttttttctgatgttcaagttgattgttgttcagtatggcatatatgacaaaagtatatttgagtcaaatgtggctttctaaaatggatgcaacattagcgttgcaaacaaaatcagcactatatttcttaatgatctaaagattaatttgagagaacacagttttcttaaatattataatgtctagagtttttttaggacagtcttagcaagtatgattgttctagtcttacttgctctaatgtttaaaggtgcaattttatgccattattgaaattgatttttaaaatctatataccatatgattaacatgcattttcaatatgaggcagtgtttatgcagtatttaacagagcaatctgctgccaatagagtttggaggtggatatttagtttacagtgtataaacttaaaatatgcatccctttaacaacgctttgtgttagcatgctgcaaatcaaaatggcacttaatattaaaagctggtttagggaaattttatgaaaatcctgttcataaatgtaatgcatatgatatgtacttttaagttttagttgcttcatgtttacattcagctgttcaacataattaaaatgtaattttacttcatgctatattgtggctttgtgtttcaaataatgttcacctttctgtttttgcaccagataagaatcagttccttgagaataaattttttatctttcttaacttcagaatattaaatttggaatatctactaaaattgtgtgttatgtggctgtaaatgatgtacacgctgtaaaataagatcgctactgttatgtgggattattatttctaaatgttactcattgaaatgagcatacaataaaaagcatttattgcactt

SEQ ID NO: 35343 - DNA, 2278 bp, Homo sapiens
  source 1..2278: mol_type = unassigned DNA
tactataaaaaccgaagatgatgatgatgatgatgtcaagagcacttctgaagactacttaatgatatctttggatgatgttggagaaaaattagagcatatggggaatacaccattaaaaattggcagtgatggttcacaagaagatgctaaagaagatgggtttggttctgaagttataaaagtgtatatatttaaagcggaggctgaagatgatgttgaaataggtggaacagaaattgtcacagagagtgagtacaccagtggacattcagtagctggagtgcttgaccagagccgaatgcagcgggagaagatggtttacatggcagttaaagattcttctcaagaagaagatgatatcagttgcgctgaaatagcagatgaagtttacatggaagtcattgtaggggaagaggaaggaacttctctccctgagattcagcttgaggactctgatgttaataaaacagttgtccctgttgtctgggctgcggcatatggagatgaaagaagagtttcccgaaggtatgaagattgtcaagcatcaggaaatactttggactcagcattagaaagcagaagtagtacagcagcacagtaccttcaaatttgtgacggcattaatacaaataaagtacttaaacaaaaagccaaaaagaggagaaggggagaaaccaggcagtggcaaacagctgttataataggtcctgatggacagcccctcacagtgtacccttgccatatttgcacaaaaaagtttaaatccaggggattcttaaaaagacacatgaagaatcatcctgatcatttaatgagaaaaaaatatcagtgtacagattgtgactttacaactaacaagaaagtgagtttccataaccacttagaaagccataagctcataaacaaagtcgacaaaacccatgaatttacagaatacacacgaagatacagagaggctagtccactgagttccaataaacttattttaagagacaaggagccgaagatgcacaagtgcaaatactgtgactatgaaactgcagaacaaggactgttaaacaggcatttgttggccgttcacagcaagaattttcctcatgtttgtgttgagtgtgggaagggttttcgacatccttctgaactcaagaaacatatgagaacccatactggtgagaagccatatcagtgtcagtattgtattttcaggtgtgcagatcaatcaaatctgaaaactcacattaagtctaaacatggtaacaatttgccatataaatgtgagcattgtccccaagcatttggtgatgagagggagcttcaacgccatctggatttgtttcaaggacataagacacaccagtgtcctcattgtgaccataagagcaccaattcaagtgaccttaagcggcacatcatatctgtccatactaaggattttcctcacaaatgtgaggtctgtgataaaggttttcatcgtccttctgagctcaaaaagcatagtgatatccataagggtaggaagattcatcagtgcaggcactgtgactttaaaacatccgatccatttattcttagtggccatatcctttcagttcatactaaagatcagccattgaaatgtaaaaggtgcaagagaggattcagacaacaaaatgagctaaaaaaacatatgaagacccatactggaaggaagatttaccaatgtgagtattgtgaatacagcactacagatgcatctggctttaaacgacatgtgatatcaatacatacaaaagactatccacacaggtgtgaattctgcaagaagggattccgaagaccatcagaaaaaaatcagcatattatgaggcaccacaaagaggctcttatgtaataagatcaatataaagaaagaagctatttaggagatatgatatgctacttgggagaaaactctcactaactgtctcaccgggtttcaaagcttgatactaaaccatgactttacattctttgtattaaagatcttaaaatatttgaattcacaggggatcccatagccctttgaaaattacttaaagaatttaagaagcactatagaatggttacagaaaaacttcttaagtatctgtgtaatagtattatatgcatacttaaactacagaggggaaaagcaaagacaaatactttatttggctgattatgttagatacaaatgtttctgagaagagaatacataattgagtttagtgatgctttgctatagcaagcaaacccacttttatgcaattttagaaat

SEQ ID NO: 35344 - DNA, 8390 bp, Homo sapiens
  source 1..8390: mol_type = unassigned DNA
agagtgaagcggaaggcttccgggttttgcggggcctttgtctctgcagccggagctccaggtcttgtcttcactgctgtgtgtcctctgctcctagaggcccagcctctgtggccctgtgtcctgcaggtattgggagatccacagctaagacgcccgggagcccctggaagcctagaaatggggccattgcaatttagagacgtggccatagaattctctctggaggagtggcattgcctggacactgcacagcggaatttatataggaatgtgatgttagagaactacagaaacctggtcttccttggtattgttgtctctaagccagacctcatcacctgtctggagcaaggaaaaaaacctttgaccatgaagaaacatgagatggtagccaacccctcagttacgtgttctcattttgcccgagatctttggccagagcagagcataaaagattctttccaaaaagtgacactgagaagatatgaaaactatggacatgacaatttacagtttaaaaagggctgtgaaagtgtagatgagtgtaaggtgcacaaaagaggttataatggacttaaccaatatttgacaactactcaaagcaaaatatttcagtgtgataaatatgtgaaagtcattcataaattttcaaattcaaacagacataagataagacatactggaaaaaaacctttcaaatgtatagaatgtggcaaagcttttaaccagtcttcaacccttactacacataagaaaattcatactggggagaaacccttcaaatgtgaagaatgtggcaaagccttcaactggtcctcacaccttactacacataagagaattcatactggagagaaacggtacaaatgtgaagactgtggcaaagcctttagccggttttcataccttactgcacataagataattcatagtggagagaaaccctacaaatgtgaagaatgtggcaaggcctttaagcgctcctctaaccttactacacataagataattcatactggagagaaaccctacaaatgtgaagaatgtggcaaggcctttaagcgctcctctatccttactgcgcataagataattcatagcggagagaaaccctacaaatgtgaagaatgtggcaaagcctttaagcacccctctgtccttactacacataaaagaattcatactggagagaaaccctacaaatgtgaagaatgtggcagagcctttaagtacttctcatcccttactacacacaagataattcatagtggagagaaaccctacaaatgtgaagaatgtggcaaagccttcaactggtcctcacaccttactacacataagagaattcatactggagagaaaccctacaaatgtgaagaatgtggcgaagcctttaagtactcctcttcccttactacacataagataatccatactggacagcaacccttcaagtgtgaagaatgtggcaaggcctttaagtgcttctctatccttactacacataagagaattcatactggagagaaaccctacaaatgtgaagaatgtggcaaagccttcaactcgtcctcacaccttactgcacataagagaattcatactggagagaaaccctacaaatgtgaacgatgtggcaaggcttttaagcgctcctttatccttactagacataagagaattcatactggagagaaaccctacaaatgtgaagaatgtggcaaaggctttaagtgcccctctacccttactacacataaggtaattcatactggagagaaactataaatgtgaggaatgtggcaaagctttaagctatcccactatgcttttttcacataagaaaattcatattggagggaaactgtacaagtgtgataaatgtggcaaagcctttatttcatcctcaaaccttagtagacattagataattcatgcgggaaagaaacccaacaaataagaaaatgcagcaaagcctttaaggacacctctgcccttactagacataagataattcgtactggagagaaaccctgtgagtttgatgaatgtcggaaagcctttaaccagctatcaacttttactaaatatgagaatttatatggaacataaaccctacaaatataaagaatgtgacaacgcttttaggaagttctgaacccttcttacacataattcatgctggacaaaaatcctacaagtttgaggaatgtggcaaatcctataacaagttttcaatatttttttttttgagatgaagtttcatgcttgtcatccaagctggagtacagtgccatgatctcggctcactgcaacctctgcctcctgggtttaagccattctcctacctcagcttcctgagtagctgggattacaggtgtcctccaacatgcccagctaatttttttatttttagtagagatgcgacttcgccatgtttgccaggctggtctcgaactcctgacctcaggtgatccacccaccttggcctcctaaagtgctgggattacaggcgtgagccacgacgcccagccacaagttctcaattcttaagaggcatggcaataattcatgttgaagaggaaatccgcaaagctaaaaaatgtgacattgcttttacgaacacctccaacttctctacacataacaataattatactagtgtgaaaccctagaaatatataaaatgtgacaaagcctttatatggttgccactcttgattgtaggttggataattcatactggcaaaactcctacaagtgtgaagaatgtggcaaaacttttaatcagttcttacaccttatctcacagaaaagctagtatccttgagaaaaattgtacaaatagaaggaatatggaaaacctattaattcctactcacatctaactcaacataaaaatcttccttttaataaaagcattaaaatggcaattactgtcaaaactttcagcaagtataagcctttaaagtgaagaagagtatttattgtgaagacaagcattacaaatataaagggagttacatagtacatttactagtatcacagatcttattgcacacattttgtactggaggaaaatcctaaagcagttgctcaagtttgttcaacatcagggaatttatattggagatgagtcctacaaatgtattaagtttagaaacacttttttttccccagaaactacagcttagaaaacaacagagagtttatgctaaaatataattttgcagatgcagtaaatattaaaaaatatttaattcaaaatagattgtatataaatatcaagagagtttacagtagaataactaaggccccgacacttcagacattacactaaatcagagcattgaatataaaaactaatccacaactgcagtttttaggtaaatgatttctatttaactttaaaaggagtagatttttggaagcattgtaattacgttgaaagtatacttgtttccttgaataaaattttttgaaagctgaataatgatgtaatacagctttcaaattatgctgttattttatttctattcacatgtgagaaagcatgtgatcagtggcttctgcatcagagatattcgatttttttacattatttggacattatgactttttctataaaatagtaagaacattaaaatgtaagacgcataatgaaaatacaagtggagaagctgtttgtagtaaaattctattaagtaatgtataacgtaaatgttcagagcaatactttattatagtgacacaaagaaataattaaaagtatattaaaataaatgagtatattactttactacttgtacttttatgtaataaaatgcagtgcattttaaaactgttagggccgggcttgatggctcatgcctgtaatttcagcactttgggaggccaaggtgggcagatcacctgaggtcaggagttcgagaccagcctgaccaacatggagaaacccagtctctactaaaaatacaaaaaaaattagccaggcatggtggtgcatgcctgtaatctcagctactcaggaggctgaggcaggagaaacacttgaacctgggaggcagaggttgcagtggggcaagattgtgcgattgcactccagtctgggcaacaagagcaaaactctgtctcaaaaaaaaaaaagtttgttagattatttgtgaacttaattttattttatttttaccatggtaagactaccgtgcgtttaatgaaccattattgtgccactaactgtatcccactttactcaagggtgtaggtacaatattgtaggaatatactatttcatacattgtaaaataacatctttagtaatcactgtcagtggctttaaactgcaaatgagttaaatattgttcccatagattaaattttgactctttattatttaaattttttatttgtattcgtgggtatataatatgtgtatatatttatgccttatatggcatcttttgactcaggcctacaatatgtagtaattacattatggtaaataaggtatccatcacctctagcatttatcttttgtattaccaatagtgtaattatatgcttttattcattttaaaatgtacaattaaattgttattgactacagaattatttctatgatcataataattatacaaaaatgtaaataaaatacggccaggcacagtggctcacatctgtaattccagcactttgggaggccgagacaggtggaatgcttgaggttaggagttcaaggccagcctggccaacgtggtgaaaccttgtctctactaaaaacacaaaaattaggcatggtggcacatgccaggaggctgaggcaggagaatcgtttgagcccaggaggcagaggttgcagtgagctgagatcatgccactgcactccagcctggctgacagagtgagtctccatctcaaaaaataaaataaaaataaaatccatacatttctgagtcctgaaaaattataaatacttgtaatatagttttccttgaacatgtggtctctgcctgcaaacacatagacttttagttttaatttacatagagttaaatatacacatattactctgaagataaacctgaggtgtaagaaaattatgaattgagtgtttttgtgtgagtataggtttgtacatattttcagaataaaagcaattactgcaacaaaacaaattatgttatttaggtgattaacaaaactaaacacttttaaaatggtgaaagcaaatctatactttctgctttgtattgaatttattaatataaaatgttctggcctgtgattcggattctccccagagtctgcctattaaagcacaggcaactttgtctccagaaacaactctcttgagtacaataataaaagccctcttaaaacaggaaaaaaaaatcatttttaacacttatttgaatgaacattcaaccaaaattgaataattggatatatttttattgttctatgtgtgtgtgaatgtataaatggtgcataaaaaataatttaagccagaaaaatagttatttgtaatgaataaaactaaaaagtagttaattattatatccagttgatatctttgtttatgtagataacaaaagcagcagaaagactctttttttttttccatgatggagtgttgctctgtcttccaggctggagagcagtggcgtgatctcagctcatggcaacctccacctcctgggttcaagcaattctcctgcctcagcctcctaagtagctgggattacaggcatgcaccaccacgtctgactaatttttgtatttttagtagagacagggtttcatcatgttggccaggctggtcccaaactcctggcctcatgatctgcctgcttcagcctcccacggtgctggtattagaatcatgagccaccgtgcccagcaaaagatgattttaaacatttatttaggtgggtaggcaacattctaagataataccctggattaccagtctgttgcacacgtgctgtgtcatactttcctcttgagtgtaaaaaaaatgtgtgactgtggtgggaaatcacttatgaaattaggttactcatccgtagactttgtgtttatcaaaatggagattatcctgattgtgctaaacttaatcagaggtgcttttaagagaaagagacacatcacagaaaaacacccctgctggcctgaaagtaagtgacttctaggtagaacatgttgtaagctgcttatggtggccacatggcgggaaaaatgtttgtatcttgccatcatttctgcctcctccatgttgcttccagtaaggaacataagaggattctatggcagagggaaaaaaaagggaatctcattcattcaagaaataatcacctctcatctgggatagcttaagagaaacaggagaccacaacaggtccacattaatgggaggaaaaaggtaacctgggtaaaagtgctcactggcattatggaacagtatttagtaagctgtagtgaatgatcagcctctgggataccaatagtctaccaacaaggctgaactcattctaattcaatcagcatgtctgcaccattctggtgacacaggtttacactatttattacagaaatgccatgaagaccagtgggtaatgtcctaaaattgaacttacttcaaaaagtatacctaattgtctgttttcatatttgaaaaaccttaaaaacaatgaatttataaataattaacttctaattatagaggattctactatactgtaatacaagattaaactgtaaacacattaatatgaatattttttgaatccatgattagttatgtagatagtttcttttagattcacatgaccaaggtaacattagagaaaacatttgaaatggaataaaatttaccaagaccacattttttcaatggcttcgcataattgccgtacttacagaaatggccagatgactaacaagaaacaaaggcaagatttaagctttgctcaatgattgtttttgaccttttgaaatctgaaatcctggctaaagtattcaaagggagtattttataggggcttcccagggtttccaagtaattgaagaaagaatttcttttttttttttttagaaggattctcactctgtcactcacgctgcactgcaatggtacgtgctcagctcactgcaacctccacctccctggttcaagtgattcttccgcctcagcctcctgagtagctgggataacaggcacccgccattatgcccggataatttttgtagtagagatgggatttcatcatgttagccaggcttgtcttgaactcctgacctcaggtgatccatccacctcagcctcccagagtgctgggattacaggcatgagccacttttcccagccagaataattttggtaggcaggaaaatgcacattatgtacacacattgctcttctctgatttgctttaacactgaaaaactgaagattgtaaatgtagtctcaatttagagtgaattaacaaaagatttgtttttcaaaaaagcaaatgtataaaattaatgggtaacagatgccattagttgctaaaaaatagtatgactaaagttggtaattatctagctatgcaaataacagcccaattaaattaagactctattgggtgcatgtggaaagcattgatgtgcagtgtggtgcctccactcagcatttccttactgtctctttacagagataccaattccccctgaattactcagggtccataatggttttagaaatgtttgttctctggagctgtaaagaaatagcacttgaaaataaatttaatttttcttagcaaggccatttttactttttgcagaaagcagttttgccacgagtacactgaacagaggagacagagtcatttataacttgacgtgtccaccctactgctgtgtctggttttcattggctggaatgggacctcacattctgtatgtcccaattgtttagcaacttagaactttttaaaagagacaaaggcagaggagaacaaaggaaggaggaagtaacttgtggaatgctgagaaaggtaaaaataccttcaaataaggaggaggaacaggctatgacctaatgcttgcttggattagtataagcatgccagggcaaatatttaggctaaattgtgggagctaagaacataaagtacattgattttttaattgtgcttagcagatatttaagaatgttagcacaggtctttgaataaactttgcttctaagagaagttactattcataattaggtagaaaagtctttgaagaggaacctctacttcactttttacactgtgaactgagaatgctgtgttcagagtgattactgaaaacatggttaatacacttcttccatatgataataaaatgttataaatctt

SEQ ID NO: 35345 - DNA, 2503 bp, Homo sapiens
  source 1..2503: mol_type = unassigned DNA
cttttgtgggagtccggtctgtccacttgccggtccctcagaccgtcggcggtctctgtccgcttcgggacctgtccgctggtcgctccgcgtccgatggctcctggccgcggaaccttaggcctggccctggtctccgagcgcggggcctgccctggatcctggaggctacacagctgcccactcctcctggggaggctgccgtggaggccatggagatccctgccccggagcccgagaagacagctctttcctctcaggatcctgctctttccctgaaagagaatctcgaggatatatcgggttggggtcttcccgaagccaggtccaaggaatcggtgagtttcaaggatgtggctgtggacttcacccaggaggagtggggtcaactagactcccctcagagggccttgtaccgggatgtgatgttggagaactaccagaaccttcttgccctaggacctccactgcacaagccagatgtgatctctcatctggaacgaggcgaggagccatggagcatgcagagggaagtccccagagggccctgtccagaatgggagctgaaggcggtgccctctcaacagcagggcatttgcaaagaagaaccggcccaggagcccatcatggagcggcccctcggcggggcgcaggcgtgggggcgccaggcaggtgctctgcagaggagtcaggctgcgccctgggcgcccgcacctgccatggtctgggacgtccctgtagaggaattccccctcaggtgtcccctcttcgcccagcaacgcgttcccgaggggggacccttgctggacacacgcaagaacgtccaggccactgagggcagaaccaaggcccccgcgagactgtgtgcaggggaaaacgcctccacgccaagtgagccagaaaagttcccccaggtgcgccggcagcgcggggcgggcgccggggagggcgagttcgtgtgcggcgagtgcgggaaggcgttccgccagagctcctccctcacgctgcaccggcgctggcacagccgggagaaggcttacaagtgcgatgaatgcggcaaggccttcacctggagcaccaaccttctggagcaccggcgcatccacaccggcgagaagcccttcttctgcggcgagtgcgggaaggccttcagctgccactcgtccctcaacgtgcaccagcgcatccacacgggcgagcggccctacaagtgcagcgcctgcgagaaggccttcagctgcagctcgctgctcagcatgcacctgcgggtgcacaccggcgagaagccctaccggtgcggcgagtgcggcaaggccttcaaccagcgtacacacctcacacgccaccaccgcatccacacgggcgagaagccctaccagtgcggctcctgcggcaaggccttcacctgccactcatccctcaccgtgcatgagaagatccacagcggggacaagccgttcaagtgcagcgactgcgagaaggccttcaacagccgctcgcgcctcaccctccaccagaggacgcacacgggcgagaagcccttcaagtgcgccgactgcgggaagggcttcagctgccacgcgtacctgctcgtgcaccggcgcatccacagcggcgagaagcccttcaagtgcaacgagtgcggcaaagccttcagctcccacgcctacctcatcgtgcaccggcgcatccacacaggcgagaagcccttcgactgcagccagtgttggaaggccttcagctgccactcgtccctcatcgtgcaccagcgcatccacaccggtgagaagccctacaagtgcagcgagtgcggcagagccttcagccagaaccactgtctcattaaacatcagaaaatccactccggggagaagtcgtttaagtgtgagaaatgtggggagatgttcaactggagctcgcacctcactgagcaccagaggctgcacagcgaggggaagcccttggccatccagttcaacaaacacctgctcagcacatactacgtgcctggcagcctgctgggtgcaggggatgctggactgagggacgtggatcccatcgacgcgctggatgtggcaaagctcttgtgcgtggttccccccagagctggcaggaatttctccctggggagcaaacctcgaaactaacatgatgtgctttggtgtcagtagctgctttctgagctactcaacaaggaaagcaccctggtcctccctggctcctagatccagaccaccttcctccaggtgtgggagccttgccttatcacccccatcaggtctgcatgccagggtgcctcctctagttaaagtcagtcacctccccagaagggccacactccaggaggagtgttgagagtcatttgaggtagtcttgccacctgttttccttgatgggcctggaagttgttgacaaggggaaagatctttcttgccaataaaaagaagggatatcgttgggtgccatggctcacacctgtaatcttaacactgtgggaggccaa

SEQ ID NO: 35346 - DNA, 3159 bp, Homo sapiens
  source 1..3159: mol_type = unassigned DNA
gtagtttgcgcctatttcgcgcaggcgcgctttcccgcagcggccgcctgctgctctttgtggcagtcgcagtccttttgtgggagtccggtctgtccacttgccggtccctcagaccgtcggcggtctctgtccgcttcgggacctgtccgctggtcgctccgcgtccgatggctcctggccgcggaaccttaggcctggccctggtctccgagcgcgggttcgccgggaggagcgtgtggcgggggtgtgccggggcgtgagtgcgccgagcatggggctgagcctggtgtggggagtgggtatctgcggagccggcctgaaccccacctcagccgggcgcggggagggggctccgtgcgtgtgatcgtgcagctgtgagcgcgtggccgccccgcggggctccgctgcaggcccctcagccccaggagcagtactcgctcttcagggcctgccctggatcctggaggctacacagctgcccactcctcctggggaggctgccgtggaggccatggagatccctgccccggagcccgagaagacagctctttcctctcaggatcctgctctttccctgaaagagaatctcgaggatatatcgggttggggtcttcccgaagccaggtccaaggaatcggtgagtttcaaggatgtggctgtggacttcacccaggaggagtggggtcaactagactcccctcagagggccttgtaccgggatgtgatgttggagaactaccagaaccttcttgccctaggacctccactgcacaagccagatgtgatctctcatctggaacgaggcgaggagccatggagcatgcagagggaagtccccagagggccctgtccagaatgggagctgaaggcggtgccctctcaacagcagggcatttgcaaagaagaaccggcccaggagcccatcatggagcggcccctcggcggggcgcaggcgtgggggcgccaggcaggtgctctgcagaggagtcaggctgcgccctgggcgcccgcacctgccatggtctgggacgtccctgtagaggaattccccctcaggtgtcccctcttcgcccagcaacgcgttcccgaggggggacccttgctggacacacgcaagaacgtccaggccactgagggcagaaccaaggcccccgcgagactgtgtgcaggggaaaacgcctccacgccaagtgagccagaaaagttcccccaggtgcgccggcagcgcggggcgggcgccggggagggcgagttcgtgtgcggcgagtgcgggaaggcgttccgccagagctcctccctcacgctgcaccggcgctggcacagccgggagaaggcttacaagtgcgatgaatgcggcaaggccttcacctggagcaccaaccttctggagcaccggcgcatccacaccggcgagaagcccttcttctgcggcgagtgcgggaaggccttcagctgccactcgtccctcaacgtgcaccagcgcatccacacgggcgagcggccctacaagtgcagcgcctgcgagaaggccttcagctgcagctcgctgctcagcatgcacctgcgggtgcacaccggcgagaagccctaccggtgcggcgagtgcggcaaggccttcaaccagcgtacacacctcacacgccaccaccgcatccacacgggcgagaagccctaccagtgcggctcctgcggcaaggccttcacctgccactcatccctcaccgtgcatgagaagatccacagcggggacaagccgttcaagtgcagcgactgcgagaaggccttcaacagccgctcgcgcctcaccctccaccagaggacgcacacgggcgagaagcccttcaagtgcgccgactgcgggaagggcttcagctgccacgcgtacctgctcgtgcaccggcgcatccacagcggcgagaagcccttcaagtgcaacgagtgcggcaaagccttcagctcccacgcctacctcatcgtgcaccggcgcatccacacaggcgagaagcccttcgactgcagccagtgttggaaggccttcagctgccactcgtccctcatcgtgcaccagcgcatccacaccggtgagaagccctacaagtgcagcgagtgcggcagagccttcagccagaaccactgtctcattaaacatcagaaaatccactccggggagaagtcgtttaagtgtgagaaatgtggggagatgttcaactggagctcgcacctcactgagcaccagaggctgcacagcgaggggaagcccttggccatccagttcaacaaacacctgctcagcacatactacgtgcctggcagcctgctgggtgcaggggatgctggactgagggacgtggatcccatcgacgcgctggatgtggcaaagctcttgtgcgtggttccccccagagctggcaggaatttctccctggggagcaaacctcgaaactaacatgatgtgctttggtgtcagtagctgctttctgagctactcaacaaggaaagcaccctggtcctccctggctcctagatccagaccaccttcctccaggtgtgggagccttgccttatcacccccatcaggtctgcatgccagggtgcctcctctagttaaagtcagtcacctccccagaagggccacactccaggaggagtgttgagagtcatttgaggtagtcttgccacctgttttccttgatgggcctggaagttgttgacaaggggaaagatctttcttgccaataaaaagaagggatatcgttgggtgccatggctcacacctgtaatcttaacactgtgggaggccaaggcaaggggatcacttgagcccaggagtctaggaccagcctggacaacatggtgagacctcgtctctacaaaaaatgcaaaaattagccagatgtggcggcatgtccctgtggtcccagctactcaggaggctgaggtgggaggatcatttgagcctaggaggtcaaggctgcagtgagccatgattcacagcactgcactgcagcctgggtgacaaagcaagaccctgtgtgaaattaaaaggaggtatatcaactgttgtatcctcggacgggctcctgacacggctttaatcaggagtttcctccataaactattattttcagaataataataaaacaagaattatgacta

SEQ ID NO: 35347 - DNA, 1839 bp, Homo sapiens
  source 1..1839: mol_type = unassigned DNA
atggagatccctgccccggagcccgagaagacagctctttcctctcaggatcctgctctttccctgaaagagaatctcgaggatatatcgggttggggtcttcccgaagccaggtccaaggaatcggtgagtttcaaggatgtggctgtggacttcacccaggaggagtggggtcaactagactcccctcagagggccttgtaccgggatgtgatgttggagaactaccagaaccttcttgccctagaatgggagctgaaggcggtgccctctcaacagcagggcatttgcaaagaagaaccggcccaggagcccatcatggagcggcccctcggcggggcgcaggcgtgggggcgccaggcaggtgctctgcagaggagtcaggctgcgccctgggcgcccgcacctgccatggtctgggacgtccctgtagaggaattccccctcaggtgtcccctcttcgcccagcaacgcgttcccgaggggggacccttgctggacacacgcaagaacgtccaggccactgagggcagaaccaaggcccccgcgagactgtgtgcaggggaaaacgcctccacgccaagtgagccagaaaagttcccccaggtgcgccggcagcgcggggcgggcgccggggagggcgagttcgtgtgcggcgagtgcgggaaggcgttccgccagagctcctccctcacgctgcaccggcgctggcacagccgggagaaggcttacaagtgcgatgaatgcggcaaggccttcacctggagcaccaaccttctggagcaccggcgcatccacaccggcgagaagcccttcttctgcggcgagtgcgggaaggccttcagctgccactcgtccctcaacgtgcaccagcgcatccacacgggcgagcggccctacaagtgcagcgcctgcgagaaggccttcagctgcagctcgctgctcagcatgcacctgcgggtgcacaccggcgagaagccctaccggtgcggcgagtgcggcaaggccttcaaccagcgtacacacctcacacgccaccaccgcatccacacgggcgagaagccctaccagtgcggctcctgcggcaaggccttcacctgccactcatccctcaccgtgcatgagaagatccacagcggggacaagccgttcaagtgcagcgactgcgagaaggccttcaacagccgctcgcgcctcaccctccaccagaggacgcacacgggcgagaagcccttcaagtgcgccgactgcgggaagggcttcagctgccacgcgtacctgctcgtgcaccggcgcatccacagcggcgagaagcccttcaagtgcaacgagtgcggcaaagccttcagctcccacgcctacctcatcgtgcaccggcgcatccacacaggcgagaagcccttcgactgcagccagtgttggaaggccttcagctgccactcgtccctcatcgtgcaccagcgcatccacaccggtgagaagccctacaagtgcagcgagtgcggcagagccttcagccagaaccactgtctcattaaacatcagaaaatccactccggggagaagtcgtttaagtgtgagaaatgtggggagatgttcaactggagctcgcacctcactgagcaccagaggctgcacagcgaggggaagcccttggccatccagttcaacaaacacctgctcagcacatactacgtgcctggcagcctgctgggtgcaggggatgctggactgagggacgtggatcccatcgacgcgctggatgtggcaaagctcttgtgcgtggttccccccagagctggcaggaatttctccctggggagcaaacctcgaaactaa

SEQ ID NO: 35348 - DNA, 3744 bp, Homo sapiens
  source 1..3744: mol_type = unassigned DNA
ggtgtggggagtgggtatctgcggagccggcctgaaccccacctcagccgggcgcggggagggggctccgtgcgtgtgatcgtgcagctgtgagcgcgtggccgccccgcggggctccgctgcaggcccctcagccccaggagcagtactcgctcttcagggcctgccctggatcctggaggctacacagctgcccactcctcctggggaggctgccgtggaggccatggagatccctgccccggagcccgagaagacagctctttcctctcaggatcctgctctttccctgaaagagaatctcgaggatatatcgggttggggtcttcccgaagccaggtccaagagtttggctcttgtcacccaggctggagtgcagtggcgcaatcttggctcactgcaacctccacctcttgggttcaagcaattctcctgacctcaggaatcggtgagtttcaaggatgtggctgtggacttcacccaggaggagtggggtcaactagactcccctcagagggccttgtaccgggatgtgatgttggagaactaccagaaccttcttgccctaggacctccactgcacaagccagatgtgatctctcatctggaacgaggcgaggagccatggagcatgcagagggaagtccccagagggccctgtccagaatgggagctgaaggcggtgccctctcaacagcagggcatttgcaaagaagaaccggcccaggagcccatcatggagcggcccctcggcggggcgcaggcgtgggggcgccaggcaggtgctctgcagaggagtcaggctgcgccctgggcgcccgcacctgccatggtctgggacgtccctgtagaggaattccccctcaggtgtcccctcttcgcccagcaacgcgttcccgaggggggacccttgctggacacacgcaagaacgtccaggccactgagggcagaaccaaggcccccgcgagactgtgtgcaggggaaaacgcctccacgccaagtgagccagaaaagttcccccaggtgcgccggcagcgcggggcgggcgccggggagggcgagttcgtgtgcggcgagtgcgggaaggcgttccgccagagctcctccctcacgctgcaccggcgctggcacagccgggagaaggcttacaagtgcgatgaatgcggcaaggccttcacctggagcaccaaccttctggagcaccggcgcatccacaccggcgagaagcccttcttctgcggcgagtgcgggaaggccttcagctgccactcgtccctcaacgtgcaccagcgcatccacacgggcgagcggccctacaagtgcagcgcctgcgagaaggccttcagctgcagctcgctgctcagcatgcacctgcgggtgcacaccggcgagaagccctaccggtgcggcgagtgcggcaaggccttcaaccagcgtacacacctcacacgccaccaccgcatccacacgggcgagaagccctaccagtgcggctcctgcggcaaggccttcacctgccactcatccctcaccgtgcatgagaagatccacagcggggacaagccgttcaagtgcagcgactgcgagaaggccttcaacagccgctcgcgcctcaccctccaccagaggacgcacacgggcgagaagcccttcaagtgcgccgactgcgggaagggcttcagctgccacgcgtacctgctcgtgcaccggcgcatccacagcggcgagaagcccttcaagtgcaacgagtgcggcaaagccttcagctcccacgcctacctcatcgtgcaccggcgcatccacacaggcgagaagcccttcgactgcagccagtgttggaaggccttcagctgccactcgtccctcatcgtgcaccagcgcatccacaccggtgagaagccctacaagtgcagcgagtgcggcagagccttcagccagaaccactgtctcattaaacatcagaaaatccactccggggagaagtcgtttaagtgtgagaaatgtggggagatgttcaactggagctcgcacctcactgagcaccagaggctgcacagcgaggggaagcccttggccatccagttcaacaaacacctgctcagcacatactacgtgcctggcagcctgctgggtgcaggggatgctggactgagggacgtggatcccatcgacgcgctggatgtggcaaagctcttgtgcgtggttccccccagagctggcaggaatttctccctggggagcaaacctcgaaactaacatgatgtgctttggtgtcagtagctgctttctgagctactcaacaaggaaagcaccctggtcctccctggctcctagatccagaccaccttcctccaggtgtgggagccttgccttatcacccccatcaggtctgcatgccagggtgcctcctctagttaaagtcagtcacctccccagaagggccacactccaggaggagtgttgagagtcatttgaggtagtcttgccacctgttttccttgatgggcctggaagttgttgacaaggggaaagatctttcttgccaataaaaagaagggatatcgttgggtgccatggctcacacctgtaatcttaacactgtgggaggccaaggcaaggggatcacttgagcccaggagtctaggaccagcctggacaacatggtgagacctcgtctctacaaaaaatgcaaaaattagccagatgtggcggcatgtccctgtggtcccagctactcaggaggctgaggtgggaggatcatttgagcctaggaggtcaaggctgcagtgagccatgattcacagcactgcactgcagcctgggtgacaaagcaagaccctgtgtgaaattaaaaggaggtatatcaactgttgtatcctcggacgggctcctgacacggctttaatcaggagtttcctccataaactattattttcagaataataataaaacaagaattatgactagcatcactttccagtgaacattattatattgctagagaggagaataatcttgggtggtgggcatttggaaaaagtgaatttcctggacttaactcatgtaaatagctctactgcagagctgtgtgtttagtgacagtgcagtcaggggcattcccacagctgtcacagcacggcccagcatcattgtagccagatcctaacatgccaacatcacctcttgccatttagcccctagtgagaaattgggagctaccaggcaggtgcccagtgcattcagggaagatgggcacaacatcaggatgggtgtgtctggaagctcctcttcactgaccagggctgggcagggccaccctgggctggtgaggctgccctgcagggcttctcactatgtagcaccagtcaccagcccaggtcacagaagaagcccctcccagcacccactggagaggggaagctgaagcccagggagacgggctccatggtggtcccacatggagctgttttgcaaaccctggaaaaggcggctctccctgtcccaacactcttcagagacaggaagacagagttaatcttgaatgaatgttatttctacttagtcctaagcaagaataagctgccctcttggtgatcatactttatacggagtgctatcgtttatgaaatgctttcagtatgctttttaaattatgcaggcaaaataaccacacttcagaaaatgtggacttctgaaaaataaaatccccataattcttaataaaactgccttttgcactttga

SEQ ID NO: 35349 - DNA, 3806 bp, Homo sapiens
  source 1..3806: mol_type = unassigned DNA
gtggggctgtgcggccgcgctgcctccaggaagcctcacgggccttcgtctgccgggccgcggcgccggctcccaggatgcagtgtggaccggccgggcgctgacggaggcggcgcgactgcgggcggcgcggcgcaggggcagccagcgaggagcggcggcagaggaaaggccaggcaggcgccgcctgcggagagcaccgggcggccgggcctgcgtggtgccgcgcgcggcggcggcgacgacgacttcctccgggccgggcgggacagcgcagggccatggccgaggcggtcgcggctccgatttctccgtggacgatggcagccacgattcaggccatggagaggaagattgaatcgcaggctgctcgcctgctttccctagaaggtcgaaccgggatggccgagaagaagctggctgattgcgagaagacagccgtggagttcgggaaccagctggagggcaagtgggccgtgctggggaccctgctgcaggagtacgggctgctgcagaggcggctggagaacgtggagaacctgctgcgcaacaggaacttctggatcctgcggctgcccccgggcagcaagggggagtcccctaaggagtggggcaagctggaggactggcagaaggagctctacaagcacgtgatgaggggcaactacgagacgctggtctccctggactacgccatctccaagcccgaggtcctctcccagattgaacaagggaaggagccctgcaactggcgccgccctggccccaagattccagatgttcctgtggaccccagtccaggctcggggcccccagttcccgccccagacctcttgatgcagatcaagcaggagggtgagctccagctccaggagcagcaggccctgggcgtggaggcgtgggcagccgggcagccagatattggggaggagccctggggcctcagccagctggattccggagcaggagacatctccacggatgccacctctggtgtccattccaacttttccaccaccatcccgcccacctcctggcaaacggatctccctccccaccatccctcttcagcatgctcggacgggaccctgaagctcaacacagcagcctccacggaagatgtaaaaattgtaataaaaacagaagtccaggaagaggaggtggtggccacacccgtacatcctactgacctagaggctcacgggaccctgtttggaccaggccaagccacacggttcttccctagtcctgcccaggaaggagcctgggaaagccagggcagctccttccccagccaggaccctgtgctggggctgcgagagcccgcccggcctgagagggacatgggtgagctcagtcctgctgtggcccaggaggagacccctcctggggactggctcttcggaggggtccggtggggctggaatttccggtgtaaaccgccagtgggcctgaacccgaggacggggcccgaggggcttccttactcctccccggacaacggagaggccatcttggaccccagccaggccccaaggccattcaacgaaccctgtaaataccctggccggaccaaaggctttggccacaagccagggctgaagaagcaccccgcggcgccccccgggggccggcccttcacctgcgccacgtgtgggaagagcttccagctgcaagtcagcctgagcgcgcaccagcgcagctgtggggcgcccgacgggtcgggcccgggcacaggcggtggcggcagcggcagtggcggcggcggtggcggcagcggtgggggcagcgcacgggatggcagcgcccttcggtgtggggagtgcggccgttgcttcacgcgccccgcgcacctcatccgccatcgcatgctgcacaccggcgagcggcccttcccctgcaccgagtgtgagaagcgcttcaccgaacgctccaagctcatcgaccactaccgaacgcacacgggcgtgcggcccttcacctgcaccgtctgcggcaaaagcttcatccgcaaggaccacctccgcaagcaccagcgcaaccatgcagcgggcgccaagaccccggcccgaggccagccactcccgacgccgcccgcacctcctgatcccttcaagagccccgcctccaaaggacctttggcctccacagaccttgtgaccgactggacttgtggcctcagcgtcctgggacccaccgatggcggggacatgtgagcgcctccagccccatagcccctgccggccgcacgtgtaaaaagccccgtgtgcaggcagcagggcggcgtggaagcttcaggcagacgcgggacggggagaaccaaatgtccaagttgctgaactgatgatcactggagaaagagaaactatccaccaggacagctgccacctctaaaccaagtagaattctctgtgaaatgggagcgccgtagaattttaagtaatttaattgcaaacctgttttgttttttgttttttgtttttttttaattcttgaggaaaaagctggaaaatagtaatagggctatttaaattttgtaggtacttttggttttcagggcgtgcatttctgtcactatctcactgagtctgatagtgtgttggaaggttggccagttggggacccctggcccactgactcctggggatggggtcctgtgtgtgcccctgctctgcccagttgggctgagtgggcctagcgcaccaagcccctgggcagtgagggccattgggtcccttggagcacacctcagtgcagcaggaaggacccctccgggagtagcggttgcatttcccagcttgcctctcctgaaaaggccccccaaaagtgctggccccaacttttctctattttgggccatctgtggtacccgtcccaagggcacttggtggtgtcccctagtgtgtgactccctggcctcataaggacgagttgtctgaaatcccagcgttaggtctggggagatggagaagctgaaactggggagctgcaccacaaacgtctagctctcagcagagctgggagcaaagcctggccgcccaccccaacctggggctgcctcccactccgtgagatgcttctgtctcctgttcactttgtgtggtagtttcttattttcaaaatgcatctcatttgatcattactgtgaccttgggaagcagcaggacagggatttctttttagaggtgcaaactgctcagaggggacacacctcagcctctcactgtgggtacacgtggcgtgccatgagtggggaagagcaacaggcgagatgcctcattctactggaacatcactgtgggtgaacagagatttccaggttttccctcttaaaatatttgtcccacaccgacaagagtccagtcaccaggcctcaaaggaacttctgcttgtagcagccgcctcccctgtgccccagcctccttaatgtgtgcactctcagagggcacagctcgcgaggctgggtttgggggccaagtggcttgttcattccagcatctaacatcataaaggtgggcccagatttcttgattcgaccacagtgctgttcctaccacacaaatatccattcctgttttgttgaagcagccactggtcctcttgtttcccctgcagacggagggacctggcagtgcccattcattcagccccctcatgcatacttttattaggcgatagactagttaagaaaattgtttctatgtactgtatattttgtacctgtttacacttctaatattgatataactgatattttgaaaaataagagaaaacatcctgttaaaataaaacctaaccagcaccaa

SEQ ID NO: 35350 - DNA, 3797 bp, Homo sapiens
  source 1..3797: mol_type = unassigned DNA
gcggccgcgctgcctccaggaagcctcacgggccttcgtctgccgggccgcggcgccggctcccaggatgcagtgtggaccggccgggcgctgacggaggcggcgcgactgcgggcggcgcggcgcaggggcagccagcgaggagcggcggcagaggaaaggccaggcaggcgccgcctgcggagagcaccgggcggccgggcctgcgtggtgccgcgcgcggcggcggcgacgacgacttcctccgggccgggcgggacagcgcagggccatggccgaggcggtcgcggctccgatttctccgtggacgatggcagccacgattcaggccatggagaggaagattgaatcgcaggctgctcgcctgctttccctagaaggtcgaaccgggatggccgagaagaagctggctgattgcgagaagacagccgtggagttcgggaaccagctggagggcaagtgggccgtgctggggaccctgctgcaggagtacgggctgctgcagaggcggctggagaacgtggagaacctgctgcgcaacaggaacttctggatcctgcggctgcccccgggcagcaagggggagtcccctaaggagtggggcaagctggaggactggcagaaggagctctacaagcacgtgatgaggggcaactacgagacgctggtctccctggactacgccatctccaagcccgaggtcctctcccagattgaacaagggaaggagccctgcaactggcgccgccctggccccaagattccagatgttcctgtggaccccagtccaggctcggggcccccagttcccgccccagacctcttgatgcagatcaagcaggagggtgagctccagctccaggagcagcaggccctgggcgtggaggcgtgggcagccgggcagccagatattggggaggagccctggggcctcagccagctggattccggagcaggagacatctccacggatgccacctctggtgtccattccaacttttccaccaccatcccgcccacctcctggcaaacggatctccctccccaccatccctcttcagcatgctcggacgggaccctgaagctcaacacagcagcctccacggaagcagatgtaaaaattgtaataaaaacagaagtccaggaagaggaggtggtggccacacccgtacatcctactgacctagaggctcacgggaccctgtttggaccaggccaagccacacggttcttccctagtcctgcccaggaaggagcctgggaaagccagggcagctccttccccagccaggaccctgtgctggggctgcgagagcccgcccggcctgagagggacatgggtgagctcagtcctgctgtggcccaggaggagacccctcctggggactggctcttcggaggggtccggtggggctggaatttccggtgtaaaccgccagtgggcctgaacccgaggacggggcccgaggggcttccttactcctccccggacaacggagaggccatcttggaccccagccaggccccaaggccattcaacgaaccctgtaaataccctggccggaccaaaggctttggccacaagccagggctgaagaagcaccccgcggcgccccccgggggccggcccttcacctgcgccacgtgtgggaagagcttccagctgcaagtcagcctgagcgcgcaccagcgcagctgtggggcgcccgacgggtcgggcccgggcacaggcggtggcggcagcggcagtggcggcggcggtggcggcagcggtgggggcagcgcacgggatggcagcgcccttcggtgtggggagtgcggccgttgcttcacgcgccccgcgcacctcatccgccatcgcatgctgcacaccggcgagcggcccttcccctgcaccgagtgtgagaagcgcttcaccgaacgctccaagctcatcgaccactaccgaacgcacacgggcgtgcggcccttcacctgcaccgtctgcggcaaaagcttcatccgcaaggaccacctccgcaagcaccagcgcaaccatgcagcgggcgccaagaccccggcccgaggccagccactcccgacgccgcccgcacctcctgatcccttcaagagccccgcctccaaaggacctttggcctccacagaccttgtgaccgactggacttgtggcctcagcgtcctgggacccaccgatggcggggacatgtgagcgcctccagccccatagcccctgccggccgcacgtgtaaaaagccccgtgtgcaggcagcagggcggcgtggaagcttcaggcagacgcgggacggggagaaccaaatgtccaagttgctgaactgatgatcactggagaaagagaaactatccaccaggacagctgccacctctaaaccaagtagaattctctgtgaaatgggagcgccgtagaattttaagtaatttaattgcaaacctgttttgttttttgttttttgtttttttttaattcttgaggaaaaagctggaaaatagtaatagggctatttaaattttgtaggtacttttggttttcagggcgtgcatttctgtcactatctcactgagtctgatagtgtgttggaaggttggccagttggggacccctggcccactgactcctggggatggggtcctgtgtgtgcccctgctctgcccagttgggctgagtgggcctagcgcaccaagcccctgggcagtgagggccattgggtcccttggagcacacctcagtgcagcaggaaggacccctccgggagtagcggttgcatttcccagcttgcctctcctgaaaaggccccccaaaagtgctggccccaacttttctctattttgggccatctgtggtacccgtcccaagggcacttggtggtgtcccctagtgtgtgactccctggcctcataaggacgagttgtctgaaatcccagcgttaggtctggggagatggagaagctgaaactggggagctgcaccacaaacgtctagctctcagcagagctgggagcaaagcctggccgcccaccccaacctggggctgcctcccactccgtgagatgcttctgtctcctgttcactttgtgtggtagtttcttattttcaaaatgcatctcatttgatcattactgtgaccttgggaagcagcaggacagggatttctttttagaggtgcaaactgctcagaggggacacacctcagcctctcactgtgggtacacgtggcgtgccatgagtggggaagagcaacaggcgagatgcctcattctactggaacatcactgtgggtgaacagagatttccaggttttccctcttaaaatatttgtcccacaccgacaagagtccagtcaccaggcctcaaaggaacttctgcttgtagcagccgcctcccctgtgccccagcctccttaatgtgtgcactctcagagggcacagctcgcgaggctgggtttgggggccaagtggcttgttcattccagcatctaacatcataaaggtgggcccagatttcttgattcgaccacagtgctgttcctaccacacaaatatccattcctgttttgttgaagcagccactggtcctcttgtttcccctgcagacggagggacctggcagtgcccattcattcagccccctcatgcatacttttattaggcgatagactagttaagaaaattgtttctatgtactgtatattttgtacctgtttacacttctaatattgatataactgatattttgaaaaataagagaaaacatcctgttaaaataaaacctaaccagcacc

SEQ ID NO: 35351 - DNA, 3190 bp, Homo sapiens
  source 1..3190: mol_type = unassigned DNA
acttaaatccctcccactggaacagcaggctccagtttcacccagcaagcgtgagaacaggtactgcttcctgagcaccgccagccaccggcaccaagaccggccacatcccagcactgcccacctctgctcccagccgccagatgacggaggctctcgccagaccctcagcacgcagagctggcttctgatagaagtgatcgggaaagaaagcaaagcgggaggtgcctctttagaaaccacgaagtgcacgcggcgtcgacagtgatcacgccacctggacagccagagtccaaggcataaggaggaaaatgagtctcctcaaagagcggaagccaaaaaagccacattacatccccaggcctccaggaaagcccttcaagtataaatgtttccaatgtccctttacttgcaatgagaagtcacatctttttaatcacatgaagtatggtctttgtaaaaactcgattactttagtatcagagcaggatcgagttcccaagtgccctaaatctaactcactagaccccaagcaaaccaaccagcccgatgccacggcgaagccagcctcttccaagtctgtcgcaaatggactctctgccttcgactcgaagcttcagcacagctctgccagggaagacatcaaggaaaacctggagctgcaagcccggggaacccacaggtgcctgggacagaagccagccctccacagggcatcaccctgcaagagcccagctccggaagccgccctcggtgcccagcctgctctggaaggcgcagctcggccttctgcatttgttccagtcggcgagcacagactcaaggggccagacaacgccgaggcgcccgagacactggctttacacaaccccactgccaaggccgtgtctttccacaccaagtcggccttccacactcctggctacccctggaaagccggctcacctttccttccaccagagtttccacataaaatctcatctacaaaggggcttggggccatttccccttacatgcaccccacaatcccagagtacccgcctcacttttacacagagcacgggctggccaccatctactcgccttacctgctggctgggagctcgcctgagtgtgacgcacccctgctgtcagtctacggaacccaagacccgagacacttcctgcctcacccggggccgatccctaagcacctggctccatctccagccacatacgatcactacaggtttttccagcaatatccctctaacctgccgattccttacggattttacaggccagagtctgcattttcctcctatggtctcagactcccacctgtcactggcctcacccgagatcagagctctcacctgcttgaagaagccaccctggtctatccagcctcgagtccttccaggttaaacccttcggaccccaacagaaaacacgtcgagttcgaaagtccaattcctgaggctaaagactcctccaaggctgggcagagagacacggaagggtccaaaatgagcccccgcgcagggagtgcagccacgggctccccagggaggccgagccccaccgacttcatgcagacgagccagacctgcgaaggcctgtacgacctctccaacaaggcagcctccagcgcactgggaagactctacccgccagagcaaagcctcacagccttcaggcctgttaagaaaagcacagaatgcctacctgcccaggctgctgagaccacagcagagtctccagtaagcctcaatgttgtgaacggagaccctcctgctccgaccggaagcgcctctctcgtctcggaggccgcgccttccagtccggacgacagctccgggatgggccccctcaacctctccaagaaatcagagataaacctggcagccacccacgaacccacgtaccaaggcagcccccaggcggaaaccgccagcttctcagagctgcaggaccttccactcaatctctcggtgaaggacccctgtaacacccaggctccgaggcctgccttccccggtcgaccacgagctgcagaacctgctgctgctgttccacagaagactgggacagaaggttctgaggatgggcccagccaccctgagaccaagccaggcagcctcgacggtgacggggccccacccacaggccccggcgaggaggctccagacgcatgcgcggtggacagcagcgaggagcagaagcagacggcagccgtggccctgtgccagctggcggcctacagccccaggaacatccgggtgggcgatggggatgctgcggccccggaacctgcctgccggcaagacacacccacactgagctccatggagagccaagaggcccagtgtgacctcagacccaaaggacaaaagaggacaagtctaagggatgctggaaaatcccagcaaggagctaagaaggcgaagctgcaggacacggccagagtgttcacactacgaaggagggcccgggtgtcctaacgccgggttcacacgtgtgttcacagagctacggccacacacacgccttccaaggtggcaagctacaacacctctgaactggcactttcacatttttacaaatgcagctgctgcttctcaaaaaaacaaacaaacaaacaaacaaaaaaccctccaattcagtttttataaatattaagcatgaatattaaaaggtgcttctacttttggttgtaaaaacacctgaatgactctaagactgatatgtattttcaagtctaagctgtcttacagaagatcttttataaatgtttccttataaatatctcaccattacaacaaattgttttaactgtttttctattagctctagctgcatatttgatgtaaatgacaattactgaaaaaatgtcagaaaaaacattttcagtactaacattaaagtgccatatgtaaaaaagaaaaatgtgatttgtataactaaataacacacaaacatcaagaggctatttatacaaataatttatttccactagggaaagtgcattactggtgaaggtattatcaatttattctacttgcttataatgttacagtgaatgttctggcttactctgcctcactttccattccccaaaatgatgtgtatgttgctaattttccaataaactcatatgaaccataaggaaacataaaatgcaaataaacataaatctatgttatccttt

SEQ ID NO: 35352 - DNA, 2459 bp, Homo sapiens
  source 1..2459: mol_type = unassigned DNA
acttaaatccctcccactggaacagcaggctccagtttcacccagcaagcgtgagaacaggtactgcttcctgagcaccgccagccaccggcaccaagaccggccacatcccagcactgcccacctctgctcccagccgccagatgacggaggctctcgccagaccctcagcacgcagagctggcttctgatagaagtgatcgggaaagaaagcaaagcgggaggtgcctctttagaaaccacgaagtgcacgcggcgtcgacagtgatcacgccacctggacagccagagtccaaggcataaggaggaaaatgagtctcctcaaagagcggaagccaaaaaagccacattacatccccaggcctccaggaaagcccttcaagtataaatgtttccaatgtccctttacttgcaatgagaagtcacatctttttaatcacatgaagtatggtctttgtaaaaactcgattactttagtatcagagcaggatcgagttcccaagtgccctaaatctaactcactagaccccaagcaaaccaaccagcccgatgccacggcgaagccagcctcttccaagtctgtcgcaaatggactctctgccttcgactcgaagcttcagcacagctctgccagggaagacatcaaggaaaacctggagctgcaagcccggggaacccacaggtgcctgggacagaagccagccctccacagggcatcaccctgcaagagcccagctccggaagccgccctcggtgcccagcctgctctggaaggcgcagctcggccttctgcatttgttccagtcggcgagcacagactcaaggggccagacaacgccgaggcgcccgagacactggctttacacaaccccactgccaaggccgtgtctttccacaccaagtcggccttccacactcctggctacccctggaaagccggctcacctttccttccaccagagtttccacataaaatctcatctacaaaggggcttggggccatttccccttacatgcaccccacaatcccagagtacccgcctcacttttacacagagcacgggctggccaccatctactcgccttacctgctggctgggagctcgcctgagtgtgacgcacccctgctgtcagtctacggaacccaagacccgagacacttcctgcctcacccggggccgatccctaagcacctggctccatctccagccacatacgatcactacaggtttttccagcaatatccctctaacctgccgattccttacggattttacaggccagagtctgcattttcctcctatggtctcagactcccacctgtcactggcctcacccgagatcagagctctcacctgcttgaagaagccaccctggtctatccagcctcgagtccttccaggttaaacccttcggaccccaacagaaaacacgtcgagttcgaaagtccaattcctgaggctaaagactcctccaaggctgggcagagagacacggaagggtccaaaatgagcccccgcgcagggagtgcagccacgggctccccagggaggccgagccccaccgacttcatgcagacgagccagacctgcgaaggcctgtacgacctctccaacaaggcagcctccagcgcactgggaagactctacccgccagagcaaagcctcacagccttcaggcctgttaagaaaagcacagaatgcctacctgcccaggctgctgagaccacagcagagtctccagtaagcctcaatgttgtgaacggagaccctcctgctccgaccggaagcgcctctctcgtctcggaggccgcgccttccagtccggacgacagctccgggaaatcagagataaacctggcagccacccacgaacccacgtaccaaggcagcccccaggcggaaaccgccagcttctcagagctgcaggaccttccactcaatctctcggtgaaggacccctgtaacacccaggctccgaggcctgccttccccggtcgaccacgagctgcagaacctgctgctgctgttccacagaagactgggacagaaggttctgaggatgggcccagccaccctgagaccaagccaggcagcctcgacggtgacggggccccacccacaggccccggcgaggaggctccagacgcatgcgcggtggacagcagcgaggagcagaagcagacggcagccgtggccctgtgccagctggcggcctacagccccaggaacatccgggtgggcgatggggatgctgcggccccggaacctgcctgccggcaagacacacccacactgagctccatggagagccaagaggcccagtgtgacctcagacccaaaggacaaaagaggacaagtctaagggatgctggaaaatcccagcaaggagctaagaaggcgaagctgcaggacacggccagagtgttcacactacgaaggagggcccgggtgtcctaa

SEQ ID NO: 35353 - DNA, 2069 bp, Homo sapiens
  source 1..2069: mol_type = unassigned DNA
ttccggccggcgctctggctctgtacctggacagggctgcggtaggccagcggtgggctggcggttgcgctcctcagatcggcggcctttcgggcggtggcttgcgtttgagcctcagaaagcgaggagcggcctccacggaagccaagctggccgaggttgcagtccatgagctgggaaaggaggcagtgctcttgggagaaacagcagaggcctcaagtttcgggctgaagccaacagagtcccaaccagtgggcgtatcccaagatgaagaattttggaatacatacgagggtctgcaagaacagctcagcaggaatactcataaagagactgagcctgtgtatgagagggctgtgcctactcaacagattctagcttttcctgagcaaacaaacaccaaagactggacagtgacacctgagcacgtcttgcctgagtcccagagcttgttgacatttgaagaagtggccatgtatttttcccaggaagaatgggagttattggatcccactcagaaggccctctacaatgatgtaatgcaggaaaactatgagactgtcatctctctagcattgtttgtgctccccaaacctaaagtgatctcctgtctagagcaaggggaagagccatgggttcaagtatccccggagtttaaggatagtgccggaaaatctcctacagggttaaagctcaaaaacgacactgaaaatcatcagcctgtgtctctttctgacttagaaatacaagcatcagcaggcgtcatatcaaaaaaggccaaagtaaaagttccccagaaaacagcaggcaaagaaaatcattttgatatgcacagagtgggaaaatggcaccaagattttccagtgaagaaaagaaagaaactttcaacctggaaacaagagctgctcaaacttatggatcgtcacaagaaagattgtgcaagagagaagccttttaaatgtcaggaatgtgggaaaaccttcagagttagctctgaccttattaagcaccaaagaattcacactgaagagaaaccctataaatgtcaacagtgtgataagaggtttagatggagttcagatcttaataagcacttaacaacacaccaaggaataaaaccatataaatgttcatggtgtgggaaaagcttcagtcaaaatacaaatttacatacacaccaaagaactcatacaggagaaaagcccttcacatgtcatgaatgtggaaaaaaattcagtcagaactcccaccttattaaacaccggagaacccacacaggtgagcagccatatacttgtagcatatgcaggagaaacttcagcaggcggtcaagccttcttagacaccagaaactccacctgtgaagagaagcttgtccagtgtcctcattctgaagacattcaccaaatggagcttggcactaaaatttatgtaaaagaaaaatcacaaaccttgaaaaattttacatcagaaaatgggataaacatacatttcacagaaaataatcaagacttgctctgcagccactcagtagtcttctgtggtcacagaagtaaacattgttggctttgtattgatctctccagtcatttttgaacacatccaatagaaacattggcagcatggtcttccaaaacaaaaagcagtaacatgcatgtttaattgcataccattctcttcacagtagcaggcttaccaatttccatagtctcatgaggccgaaatgaattacaatgtaaagtgttccaggaaccaaattggattttctttcttttgtcattggacacggtttgcaaagttggacatcacttgagttccttcttaaacttttcggcaacttctcttggatcctgttatcacagttttttactgtgatgaaatcttgttaaccaccactagggaatctccagatgaactattaatgcactgtcttatgcctctcattggtgatgtttggaaaatagaagacatctctaatggaatcatgggggaaacgggttggaatttgtagccatggaatatatattagatgtaaagaattttctgcaataaaagaaactagacttgtt

SEQ ID NO: 35354 - DNA, 2347 bp, Homo sapiens
  source 1..2347: mol_type = unassigned DNA
ttccggccggcgctctggctctgtacctggacagggctgcggtaggccagcggtgggctggcggttgcgctcctcagatcggcggcctttcgggcggtggcttgcgtttgagcctcagaaagcgaggagcggcctccacggaagccaagctggccgaggttgcagtccatgagctgggaaaggaggcagtgctcttgggagaaacagcagaggcctcaagtttcgggctgaagccaacagagtcccaaccagtgggcgtatcccaagatgaagaattttggaatacatacgagggtctgcaagaacagctcagcaggaatactcataaagagactgagcctgtgtatgagagggctgtgcctactcaacagattctagcttttcctgagcaaacaaacaccaaagactggacagtgacacctgagcacgtcttgcctgagtcccagagcttgttgacatttgaagaagtggccatgtatttttcccaggaagaatgggagttattggatcccactcagaaggccctctacaatgatgtaatgcaggaaaactatgagactgtcatctctctagcattgtttgtgctccccaaacctaaagtgatctcctgtctagagcaaggggaagagccatgggttcaagtatccccggagtttaaggatagtgccggaaaatctcctacagggttaaagctcaaaaacgacactgaaaatcatcagcctgtgtctctttctgacttagaaatacaagcatcagcaggcgtcatatcaaaaaaggccaaagtaaaagttccccagaaaacagcaggcaaagaaaatcattttgatatgcacagagtgggaaaatggcaccaagattttccagtgaagaaaagaaagaaactttcaacctggaaacaagagctgctcaaacttatggatcgtcacaagaaagattgtgcaagagagaagccttttaaatgtcaggaatgtgggaaaaccttcagagttagctctgaccttattaagcaccaaagaattcacactgaagagaaaccctataaatgtcaacagtgtgataagaggtttagatggagttcagatcttaataagcacttaacaacacaccaaggaataaaaccatataaatgttcatggtgtgggaaaagcttcagtcaaaatacaaatttacatacacaccaaagaactcatacaggagaaaagcccttcacatgtcatgaatgtggaaaaaaattcagtcagaactcccaccttattaaacaccggagaacccacacaggtgagcagccatatacttgtagcatatgcaggagaaacttcagcaggcggtcaagccttcttagacaccagaaactccacctgtgaagagaagcttgtccagtgtcctcattctgaagacattcaccaaatggagcttggcactaaaatttatgtaaaagaaaaatcacaaaccttgaaaaattttacatcagaaaatgggataaacatacatttcacagaaaataatcaagacttgctctgcagccactcagtagtcttctgtggtcacagaagtaaacattgttggctttgtattgatctctccagtcatttttgaacacatccaatagaaacattggcagcatggtcttccaaaacaaaaagcagtaacatgcatgtttaattgcataccattctcttcacagtagcaggcttaccaatttccatagtctcatgaggccgaaatgaattacaatgtaaagtgttccaggaaccaaattggattttctttcttttgtcattggacacggtttgcaaagttggacatcacttgagttccttcttaaacttttcggcaacttctcttggatcctgttatcacagttttttactgtgatgaaatcttgttaaccaccactagggaatctccagatgaactattaatgcactgtcttatgcctctcattggtgatgtttggaaaatagaagacatctctaatggaatcatgggggaaacgggttggaatttgtagccatggaatatatattagatgtaaagaattttctgcaataaaagaaactagacttgttaatccctgccttgcaatgtcagtaggataaagcagctataaaaattagtacttgcccaaggcctgaaagagaattagtgggaattaagatcaacttctcagttttgtttgtttactttttaattggcttttctttgttgttaagaatgagagacttaatttccatgggagttggagtgtgtgtgctgcaggcaggatcctgtggctcatttggcatggagacctggacatgtagtcagcaggagacggttccctaaataaaagatttgggcactggtg

SEQ ID NO: 35355 - DNA, 2977 bp, Homo sapiens
  source 1..2977: mol_type = unassigned DNA
agaactcgaccctggaagagagagtcggggtcaggtcttcgggaggtggagggatcgaatgagggaactgatattccaagactccccacatcttggagcttcactcgccaggcatcccgcgctttcctgacgtcgcttcccctagtggtgcagcagcggagagctttgctacccagagcagcagggaggcgtggccacagaggcagaggcgtagtcgagccgaggaagaggaaagtggcctccggggaagccagagctgactgaagtgctcttgggaagaacaattcattgatttggtaccaacctgatgcaccctgatttgtcaaaggtggtaccaggtgggtgtcagtgtcacatacaagagtaaaactgttcctagagcaaatggcgatgagagagctgaacgcggattcatgctcaagcccccagatgggggctatgtgggagactagtgggtctgtgaaagagaactccagtcagagtaagaaatacagcacaaaaatagagaatcttggtcctgagagcgcttgcaggcacttctggagcttccgttatcatgaagcaaccggaccgcttgagactatcagccaacttcagaaattgtgccatcagtggctgaggccagagatccactcaaaagagcagatcttggaaatgctggtgttagagcagttcctgagcattctgcccaaggagacccagaactgggtgcagaagcatcatccacagaatgtcaaacaggctctggtcctggtggaattcttgcagagggagcctgatggaacaaagaatgagagtttgttgacatttgaagatgtggctgtgtatttttctgaggaagagtggcaattattgaatcctcttgagaagactctctacaatgatgtaatgcaggatatctatgagactgtcatctctctagggttaaagctaaaaaatgacactggaaatgatcatcctatatctgtttctacatcagaaatacaaacatcaggatgcgaagtatcaaaaaagaccagaatgaaaattgcccagaaaacaatgggcagggaaaatcctggtgatacacacagtgtacagaaatggcatcgagcttttccaaggaagaaaagaaagaaacctgcaacttgtaaacaagagcttccaaaacttatggatcttcatgggaaaggccccacaggggagaaaccttttaagtgtcaggaatgtgggaaaagcttcagagttagctctgatcttattaaacaccacagaattcacactggagagaaaccctataaatgtcaacaatgtgacaggaggtttagatggagttcagatcttaataagcacttcatgacccatcaaggaataaaaccatatagatgctcatggtgtgggaaaagctttagtcataacacaaatctacacacacaccaaagaattcacacaggagagaagccctttaaatgtgatgaatgtggaaaaagattcattcagaactcccaccttattaaacaccagagaactcacacaggtgagcagccttatacgtgtagcttatgcaagagaaactttagtaggcgatcgagccttcttagacaccagaaactccacagaagaagggaagcatgtctagtgtctccaaactgaggaaagttaccatgtagagcttgactttagaagtggtgaaagaatacaaaattatgaggcacccaatgataggaatctgtgattaataaaacatttgggaagggtacatgttacacttcacaaaaaggaatctaagctgtctgttttattcagcattgcatcttctgtgcctagcacaagagttgatacataaggagtactttataaataaaaaaatgaaagtgtagtgatgagattcctttagctatctatctatatgtatatatctggttattcaaagcttccccacccccagtcatctaaatttttcaggtatcaagtgctcaacagacatatgatagtcaaggctcttagtctcattttttactctttgtcaagagaaatggaaaataagagtacttgggccctcttaagggagctcagagagaattactaaattagggacagtttcaatagttatcattctgtctacatgaacaatcaagaccaggactcagggaactttactctgtaacagaaagagaggattcagtgtttgccctgggagaattgtcccattcttgttgcttctctcctgagtacccactaccacaatgtcttctgtcaaggaattacaagtagcaagggaaggtctgaatgtaaggacaggcctagggaccttgcaagcacttgatatctctcctcttgctgactttgtcaacatagacatatagtgaaatgatgagggaggcagtcttggccctcatccaggtatctggtttttttttgtagaaagcacagataagtggtaaatggtctttttctgactttcattatgtggactggatggaggctttcaaactggtgccatactgctgcaggacctaaagggagccccatctttatggctgatcaactacaaccctatatgcctgaatactctgcaagaaggcctggagattttgcaaaactgatttattgagaatggcaaggagagccttgtgaacttttagctttggtgcacagctgataccaggagggaacatcctgaagtgtcagagaaaagtaaggcatatggctcacagtgatgatgccagtcagagccaggccagatggaaattgttttctgatgttactggttttcttttccctattagccaaagtgactatctcttaagagaagataatgtgacgtcaagggaagttggaaggcatggatttatatctatgtcagatcctggtttataatgttggccaaggcttatttatatatgtttatttagtattccataaaattgtacttcgtaatgaaaatgacacattttatcttaaatttagacaataaacaaaactttgttaccaaatc

SEQ ID NO: 35356 - DNA, 5592 bp, Homo sapiens
  source 1..5592: mol_type = unassigned DNA
gatacaatggtgtcgttcgggaaacgcagccctaacgttggtcctaagctgacaaattggtctgtggacgccaaacttccgtgctaggactttctgcgtgtggaccgggggcctagtcctgcgtgggtccaacacagacaggagaaagctgcctgcttttgtgcctcccggaggtcctggtagaagcgaaacggggacaggagctgcagcgtcccaagcccagtgaggcgaagctactggagacagctctgccgggtccaaagttgggctcaccggctggaacttgaaaccggagcacgccggactcctgctgaagccatcatctctctctcctggccccgggcgccttggccggcgggcacaactggtttcggggccaaggtggtctggaagcctgactgtggcgtctggcctgggctcccgcgagcggaaaaggttcccctcctgtgagagggaaactatggaagttcctacgcccggagccagaactcctgctgctcccgcccgacccaaggtctagcttggcggcctcccacctgtgcttctgagggttctgcttccaagaggctgctggtgcccgggacaccagcagtttcgccatgggtgtttcgccatgggagtttcgccatgggtgactttggcctgagatgcgctccatggagcagattctggagttgctggtgttggaggagttcctgactatcctgtcccaggacatccacagcagggtgcagaagctgcaacgggcgagctgtgaagaagctgtaactcttttaaagtatatgtatgacttttaaaagagagagcttgtgaaactgagggaataggtgagtgagagagaggttttatctgccatcttcctcaaggaggcccagcctcccctttattcatagggttctgggtctggtgggtccagaggactgagacatctcgctgtcttaattccccattcagattttcttgattgccctgagtagaccttacacgggccagtgattttttgttgttgttgttgttgttgtcttctctggaaccttcatcctccagatttccccccagtgcagtgaagagtgtgctattgcttttggtttccacggggaggcagtgtcgctgtcatagtgtccgctctggaggtagatcaaagggggctttcaactcctggctctgctccctactagctgtgcgactttgggcaagtgacttttgcttggctgggcttcactttctgcactggtcaaatgcagaaagggtaatagacccttctggggttgtttggaggattaaagggagagcagtatgtccgtaataatcgcactgctggcacacagctagtgcttgaaactgtgagctgctgttaggttaggggcagcagtctggtctcctctgcagagatgggtctcagttaattgtgaacttaaacagtttggcactgaggctttggggtcattgccccagggccacccaagtaagcttgtctaattgagaggaacaggagcagctggagaatgtgggggaggaaccgaagacctatgggggacatgtgtgtactgaaatgggctttctccccacaccctccacacaagcacatacacacattcactctgggtcatggcatcataaaaaccttgagtttaaaccatccctttctcttgttgggtccaaatggacagactctggttttctattgaagatttacacgcagattcctgtcataatttttcttttctatcgagccctgtcatgatgataagtgatagcaggttggttcctagatcatacaccatggacctagcacagaagtgttttcagaagagccttttccttacaaaacagcatgaaagtcattgagccaatggatactgagatttcaaactggagccaatggatacttagaggagccctgaagtgtagagtagttgctacttcttgttcactaggtctaattagcatgtcatcagtgtaacagactagtgtgttgtcttgtgaaagagaaaggtgataagatccctgtgaactaaactatgatgtagggcttgaaaattgatatacaatacgcctgaggtaggatggcgaaggtgtattcctggtcttaccagctgaaagtaaattgcttctggtggtctttactaacagttattgagaaaaaaagcattttcaaggtcaagaggtacatactaggttccaggggatatgttaatttgctcaagaaatgaaaccacatctggaacagcagctgcaattggagtcatcacctggcttagtttacaatgacccactaccatcttccaagatccatctgccttctgcataggccaaacaggtccacagaactcgaccctggaagagagagtcggggtcaggtcttcgggaggtggagggatcgaatgagggaactgatattccaagactccccacatcttggagcttcactcgccaggcatcccgcgctttcctgacgtcgcttcccctagtggtgcagcagcggagagctttgctacccagagcagcagggaggcgtggccacagaggcagaggcgtagtcgagccgaggaagaggaaagtggcctccggggaagccagagctgactgaagtgctcttgggaagaacaattcattgatttggtaccaacctgatgcaccctgatttgtcaaaggtggtaccaggtgggtgtcagtgtcacatacaagagtaaaactgttcctagagcaaatggcgatgagagagctgaacgcggattcatgctcaagcccccagatgggggctatgtgggagactagtgggtctgtgaaagagaactccagtcagagtaagaaatacagcacaaaaatagagaatcttggtcctgagagcgcttgcaggcacttctggagcttccgttatcatgaagcaaccggaccgcttgagactatcagccaacttcagaaattgtgccatcagtggctgaggccagagatccactcaaaagagcagatcttggaaatgctggtgttagagcagttcctgagcattctgcccaaggagacccagaactgggtgcagaagcatcatccacagaatgtcaaacaggctctggtcctggtggaattcttgcagagggagcctgatggaacaaagaatgaggtcacagcccatgagctgggaaaggaggcagtgctcttgggaggaacagcagtggccccaggcttcaagtggaagccagcagagccccaaccaatgggtgtgttccagaaagaatattggaatacataccgggtactacaagaacagctgggctggaacactcacaaagaaacccagcctgtatatgaaagagctgtgcatgatcaacagatgttagccctttctgagcagaaaagaatcaaacactggaagatggcatctaaactcatcctgcctgagtccctgagtttgttgacatttgaagatgtggctgtgtatttttctgaggaagagtggcaattattgaatcctcttgagaagactctctacaatgatgtaatgcaggatatctatgagactgtcatctctctagggttaaagctaaaaaatgacactggaaatgatcatcctatatctgtttctacatcagaaatacaaacatcaggatgcgaagtatcaaaaaagaccagaatgaaaattgcccagaaaacaatgggcagggaaaatcctggtgatacacacagtgtacagaaatggcatcgagcttttccaaggaagaaaagaaagaaacctgcaacttgtaaacaagagcttccaaaacttatggatcttcatgggaaaggccccacaggggagaaaccttttaagtgtcaggaatgtgggaaaagcttcagagttagctctgatcttattaaacaccacagaattcacactggagagaaaccctataaatgtcaacaatgtgacaggaggtttagatggagttcagatcttaataagcacttcatgacccatcaaggaataaaaccatatagatgctcatggtgtgggaaaagctttagtcataacacaaatctacacacacaccaaagaattcacacaggagagaagccctttaaatgtgatgaatgtggaaaaagattcattcagaactcccaccttattaaacaccagagaactcacacaggtgagcagccttatacgtgtagcttatgcaagagaaactttagtaggcgatcgagccttcttagacaccagaaactccacagaagaagggaagcatgtctagtgtctccaaactgaggaaagttaccatgtagagcttgactttagaagtggtgaaagaatacaaaattatgaggcacccaatgataggaatctgtgattaataaaacatttgggaagggtacatgttacacttcacaaaaaggaatctaagctgtctgttttattcagcattgcatcttctgtgcctagcacaagagttgatacataaggagtactttataaataaaaaaatgaaagtgtagtgatgagattcctttagctatctatctatatgtatatatctggttattcaaagcttccccacccccagtcatctaaatttttcaggtatcaagtgctcaacagacatatgatagtcaaggctcttagtctcattttttactctttgtcaagagaaatggaaaataagagtacttgggccctcttaagggagctcagagagaattactaaattagggacagtttcaatagttatcattctgtctacatgaacaatcaagaccaggactcagggaactttactctgtaacagaaagagaggattcagtgtttgccctgggagaattgtcccattcttgttgcttctctcctgagtacccactaccacaatgtcttctgtcaaggaattacaagtagcaagggaaggtctgaatgtaaggacaggcctagggaccttgcaagcacttgatatctctcctcttgctgactttgtcaacatagacatatagtgaaatgatgagggaggcagtcttggccctcatccaggtatctggtttttttttgtagaaagcacagataagtggtaaatggtctttttctgactttcattatgtggactggatggaggctttcaaactggtgccatactgctgcaggacctaaagggagccccatctttatggctgatcaactacaaccctatatgcctgaatactctgcaagaaggcctggagattttgcaaaactgatttattgagaatggcaaggagagccttgtgaacttttagctttggtgcacagctgataccaggagggaacatcctgaagtgtcagagaaaagtaaggcatatggctcacagtgatgatgccagtcagagccaggccagatggaaattgttttctgatgttactggttttcttttccctattagccaaagtgactatctcttaagagaagataatgtgacgtcaagggaagttggaaggcatggatttatatctatgtcagatcctggtttataatgttggccaaggcttatttatatatgtttatttagtattccataaaattgtacttcgtaatgaaaatgacacattttatcttaaatttagacaataaacaaaactttgttaccaaatcactc

SEQ ID NO: 35357 - DNA, 2447 bp, Homo sapiens
  source 1..2447: mol_type = unassigned DNA
ggccggcgctggtggcggggcccggtgcatggcggtctgtcggcggagtcgccctcgggggctgtcagatttgtgacccagaaggaaatctctgacctcagctgtggctcttggtgctggccagaagccaacttcatgtctgagtgcacgagcagcagtttgccatggagagcttggggctgcacacggtgacccttagtgatgggacaacagcctacgtccagcaagctgtcaaaggagagaagcttcttgaagggcaggtgatccagctcgaggatgggaccaccgcatacattcaccaggtgacggtacagaaagaagctctctcctttgaggatggtcagcctgtgcagctggaagatggcagcatggcttacatacaccgcacacccagagaaggctatgaccccagcaccctggaagccgtccaactggaagatggctccactgcctacattcaccaccctgtggctgtgccatcggagagcaccatcctggccgtacagacagaggtgggcttggaggacctggcagcagaggatgatgagggcttcagtgcagacgcagtggtggccctggagcagtatgccagcaaggttcttcatgacagccagattccccgtaatggaaaagggcagcaagttggagacagagcattccgctgtggctacaagggctgtgggcgtctctacaccaccgctcatcacttaaaggtgcatgaacgagctcatacaggtgaccgtccatacagatgtgacttccccagctgtggaaaggcctttgccacaggctatggactgaagagccacgttcgtacccacactggtgagaaaccatacaagtgcccagaggagctgtgcagcaaggccttcaagacctcaggagacctgcagaagcatgtccgtacccacactggtgaacgcccgttccagtgcccttttgagggctgtggccgctccttcaccacatctaacatccgcaaggtacatgtgcgcacccacacaggcgagaggccctacacctgcccggagccccactgtggccgcggcttcaccagcgccaccaactataagaatcacgtgcgcatccacacaggggagaagccatacgtttgcacggtgccaggctgcgggaaacgcttcaccgagtactcgagcttgtataagcaccacgtggtgcacacacactgcaagccctacacctgcagcacctgcggcaagacctaccggcagacctccaccttggccatgcacaagcgcagtgcccacggcgagctggaggccacggaggagagcgagcaggccctctatgagcagcagcaacttgaggccgcctctgcagccgaggagagtccgccacccaaacgaccccggatagcttacctttcggaggtgaaggaagagagagatgacatcccagcccaggtggcgatggtgactgaagaagatggggccccccaggtggctctgatcactcaggatggtgcccagcaggtcacaatcattacctctggggctgtggtggctgaggactcaagtgtagcatctcttcgtcatcaacaggtggcactgttggccacagccaacggaacgcacattgcagtgcagctggaggaacagcagaccttagaggaggccatcaatgtggccactgcggccatgcagcaaggggctgtgaccctggagacaacagtgtcggagagtggctgctgagtccaagagggctgggtcccacaccatgctggaggaagtgccatctgcatggccactcttgcccccaagggcccaggctgtggctgacacatagaaggtggccacataggtctctggggtgagaagacagcaagaaaactgcctaactgaagggaatgggggccctgctcaagaagggggccaggcagctggaatcaggggagtgcatcatcctcgggagctgacaacagccaggctacaccagggcacccgcctctcaaaatcagctgggcgcccactctcctcctaaagaacacccttctggccctcagtctgttccccttctcaggtagagattggggctgctatggggactggccctgtagggttgagccacagacagctcttcagcccagtagcagtggagcaggccctgtcctgccctcccagcaataaccacctccctggaggccagctgagatgcctggctacttggcaccagggacttcctgacaccacagtcaattaattcctcaggggcctgtggctgaagaaaaggtgcccagcccccaccactcctcagctgccccccaacctctctatggcagagaggcagggagtggccctgtacatagactgctggggattgggtttgatttgttttgttttttttaattccattttgataatttttttcctgctctgggtggtggtggcacatggatgaatgagtatttaataaaagttccaaatttc

SEQ ID NO: 35358 - DNA, 2716 bp, Homo sapiens
  source 1..2716: mol_type = unassigned DNA
ggcgcgccaagaggaaaggaaagtgcggcggccctggaacctggatatcgcgcgaggcaagctgcgcgcgggcgggcgggctatggcgcaggcgggttgtggggccggcgctggtggcggggcccggtgcatggcggtctgtcggcggagtcgccctcgggggctgtcagatttgtgacccagaaggaaatctctgacctcagctgtggctcttggtgctggccagaagccaacttcatgtctgagtgcacgagcagcagtttgccatggagagcttggggctgcacacggtgacccttagtgatgggacaacagcctacgtccagcaagctgtcaaaggagagaagcttcttgaagggcaggtgatccagctcgaggatgggaccaccgcatacattcaccaggtgacggtacagaaagaagctctctcctttgaggatggtcagcctgtgcagctggaagatggcagcatggcttacatacaccgcacacccagagaaggctatgaccccagcaccctggaagccgtccaactggaagatggctccactgcctacattcaccaccctgtggctgtgccatcggagagcaccatcctggccgtacagacagaggtgggcttggaggacctggcagcagaggatgatgagggcttcagtgcagacgcagtggtggccctggagcagtatgccagcaaggttcttcatgacagccagattccccgtaatggaaaagggcagcaagttggagacagagcattccgctgtggctacaagggctgtgggcgtctctacaccaccgctcatcacttaaaggtgcatgaacgagctcatacaggtgaccgtccatacagatgtgacttccccagctgtggaaaggcctttgccacaggctatggactgaagagccacgttcgtacccacactggtgagaaaccatacaagtgcccagaggagctgtgcagcaaggccttcaagacctcaggagacctgcagaagcatgtccgtacccacactggtgaacgcccgttccagtgcccttttgagggctgtggccgctccttcaccacatctaacatccgcaaggtacatgtgcgcacccacacaggcgagaggccctacacctgcccggagccccactgtggccgcggcttcaccagcgccaccaactataagaatcacgtgcgcatccacacaggggagaagccatacgtttgcacggtgccaggctgcgggaaacgcttcaccgagtactcgagcttgtataagcaccacgtggtgcacacacactgcaagccctacacctgcagcacctgcggcaagacctaccggcagacctccaccttggccatgcacaagcgcagtgcccacggcgagctggaggccacggaggagagcgagcaggccctctatgagcagcagcaacttgaggccgcctctgcagccgaggagagtccgccacccaaacgaccccggatagcttacctttcggaggtgaaggaagagagagatgacatcccagcccaggtggcgatggtgactgaagaagatggggccccccaggtggctctgatcactcaggatggtgcccagcaggtcagcctgtccccggaagacctgcaggccctggggagtgccatcagtatggtcacccagcacggcagcaccaccctcaccatccccagtcctgatgccgacctggccacatctggcacacatacagtcaccatggtcagcgccgatggcacccagacgcagcccgtcacaatcattacctctggggctgtggtggctgaggactcaagtgtagcatctcttcgtcatcaacaggtggcactgttggccacagccaacggaacgcacattgcagtgcagctggaggaacagcagaccttagaggaggccatcaatgtggccactgcggccatgcagcaaggggctgtgaccctggagacaacagtgtcggagagtggctgctgagtccaagagggctgggtcccacaccatgctggaggaagtgccatctgcatggccactcttgcccccaagggcccaggctgtggctgacacatagaaggtggccacataggtctctggggtgagaagacagcaagaaaactgcctaactgaagggaatgggggccctgctcaagaagggggccaggcagctggaatcaggggagtgcatcatcctcgggagctgacaacagccaggctacaccagggcacccgcctctcaaaatcagctgggcgcccactctcctcctaaagaacacccttctggccctcagtctgttccccttctcaggtagagattggggctgctatggggactggccctgtagggttgagccacagacagctcttcagcccagtagcagtggagcaggccctgtcctgccctcccagcaataaccacctccctggaggccagctgagatgcctggctacttggcaccagggacttcctgacaccacagtcaattaattcctcaggggcctgtggctgaagaaaaggtgcccagcccccaccactcctcagctgccccccaacctctctatggcagagaggcagggagtggccctgtacatagactgctggggattgggtttgatttgttttgttttttttaattccattttgataatttttttcctgctctgggtggtggtggcacatggatgaatgagtatttaataaaagttccaaatttcca

SEQ ID NO: 35359 - DNA, 2000 bp, Homo sapiens
  source 1..2000: mol_type = unassigned DNA
aagctgcgcgcgggcgggcgggctatggcgcaggcgggttgtggggccggcgctggtggcggggcccggtgcatggcggtctgtcggcggagtcgccctcgggggctgtcagatttgtgacccagaaggaaatctctgacctcagctgtggctcttggtgctggccagaagccaacttcatgtctgagtgcacgagcagcagtttgccatggagagcttggggctgcacacggtgacccttagtgatgggacaacagcctacgtccagcaagctgtcaaaggagagaagcttcttgaagggcaggtgatccagctcgaggatgggaccaccgcatacattcaccaggtgacggtacagaaagaagctctctcctttgaggatggtcagcctgtgcagctggaagatggcagcatggcttacatacaccgcacacccagagaaggctatgaccccagcaccctggaagccgtccaactggaagatggctccactgcctacattcaccaccctgtggctgtgccatcggagagcaccatcctggccgtacagacagaggtgggcttggaggacctggcagcagaggatgatgagggcttcagtgcagacgcagtggtggccctggagcagtatgccagcaaggttcttcatgacagccagattccccgtaatggaaaagggcagcaagttggagacagagcattccgctgtggctacaagggctgtgggcgtctctacaccaccgctcatcacttaaaggtgcatgaacgagctcatacaggtgaccgtccatacagatgtgacttccccagctgtggaaaggcctttgccacaggctatggactgaagagccacgttcgtacccacactggtgagaaaccatacaagtgcccagaggagctgtgcagcaaggccttcaagacctcaggagacctgcagaagcatgtccgtacccacactggtgaacgcccgttccagtgcccttttgagggctgtggccgctccttcaccacatctaacatccgcaaggtacatgtgcgcacccacacaggcgagaggccctacacctgcccggagccccactgtggccgcggcttcaccagcgccaccaactataagaatcacgtgcgcatccacacaggggagaagccatacgtttgcacggtgccaggctgcgggaaacgcttcaccgagtactcgagcttgtataagcaccacgtggtgcacacacactgcaagccctacacctgcagcacctgcggcaagacctaccggcagacctccaccttggccatgcacaagcgcagtggccactgcggccatgcagcaaggggctgtgaccctggagacaacagtgtcggagagtggctgctgagtccaagagggctgggtcccacaccatgctggaggaagtgccatctgcatggccactcttgcccccaagggcccaggctgtggctgacacatagaaggtggccacataggtctctggggtgagaagacagcaagaaaactgcctaactgaagggaatgggggccctgctcaagaagggggccaggcagctggaatcaggggagtgcatcatcctcgggagctgacaacagccaggctacaccagggcacccgcctctcaaaatcagctgggcgcccactctcctcctaaagaacacccttctggccctcagtctgttccccttctcaggtagagattggggctgctatggggactggccctgtagggttgagccacagacagctcttcagcccagtagcagtggagcaggccctgtcctgccctcccagcaataaccacctccctggaggccagctgagatgcctggctacttggcaccagggacttcctgacaccacagtcaattaattcctcaggggcctgtggctgaagaaaaggtgcccagcccccaccactcctcagctgccccccaacctctctatggcagagaggcagggagtggccctgtacatagactgctggggatt

SEQ ID NO: 35360 - DNA, 2575 bp, Homo sapiens
  source 1..2575: mol_type = unassigned DNA
ctgcgcgcgggcgggcgggctatggcgcaggcgggttgtggggccggcgctggtggcggggcccggtgcatggcggtctgtcggcggagtcgccctcgggggctgtcagatttgtgacccagaaggaaatctctgacctcagctgtggctcttggtgctggccagaagccaacttcatgtctgagtgcacgagcagcagtttgccatggagagcttggggctgcacacggtgacccttagtgatgggacaacagcctacgtccagcaagctgtcaaaggagagaagcttcttgaagggcaggtgatccagctcgaggatgggaccaccgcatacattcaccaggtgacggtacagaaagaaggctatgaccccagcaccctggaagccgtccaactggaagatggctccactgcctacattcaccaccctgtggctgtgccatcggagagcaccatcctggccgtacagacagaggtgggcttggaggacctggcagcagaggatgatgagggcttcagtgcagacgcagtggtggccctggagcagtatgccagcaaggttcttcatgacagccagattccccgtaatggaaaagggcagcaagttggagacagagcattccgctgtggctacaagggctgtgggcgtctctacaccaccgctcatcacttaaaggtgcatgaacgagctcatacaggtgaccgtccatacagatgtgacttccccagctgtggaaaggcctttgccacaggctatggactgaagagccacgttcgtacccacactggtgagaaaccatacaagtgcccagaggagctgtgcagcaaggccttcaagacctcaggagacctgcagaagcatgtccgtacccacactggtgaacgcccgttccagtgcccttttgagggctgtggccgctccttcaccacatctaacatccgcaaggtacatgtgcgcacccacacaggcgagaggccctacacctgcccggagccccactgtggccgcggcttcaccagcgccaccaactataagaatcacgtgcgcatccacacaggggagaagccatacgtttgcacggtgccaggctgcgggaaacgcttcaccgagtactcgagcttgtataagcaccacgtggtgcacacacactgcaagccctacacctgcagcacctgcggcaagacctaccggcagacctccaccttggccatgcacaagcgcagtgcccacggcgagctggaggccacggaggagagcgagcaggccctctatgagcagcagcaacttgaggccgcctctgcagccgaggagagtccgccacccaaacgaccccggatagcttacctttcggaggtgaaggaagagagagatgacatcccagcccaggtggcgatggtgactgaagaagatggggccccccaggtggctctgatcactcaggatggtgcccagcaggtcagcctgtccccggaagacctgcaggccctggggagtgccatcagtatggtcacccagcacggcagcaccaccctcaccatccccagtcctgatgccgacctggccacatctggcacacatacagtcaccatggtcagcgccgatggcacccagacgcagcccgtcacaatcattacctctggggctgtggtggctgaggactcaagtgtagcatctcttcgtcatcaacaggtggcactgttggccacagccaacggaacgcacattgcagtgcagctggaggaacagcagaccttagaggaggccatcaatgtggccactgcggccatgcagcaaggggctgtgaccctggagacaacagtgtcggagagtggctgctgagtccaagagggctgggtcccacaccatgctggaggaagtgccatctgcatggccactcttgcccccaagggcccaggctgtggctgacacatagaaggtggccacataggtctctggggtgagaagacagcaagaaaactgcctaactgaagggaatgggggccctgctcaagaagggggccaggcagctggaatcaggggagtgcatcatcctcgggagctgacaacagccaggctacaccagggcacccgcctctcaaaatcagctgggcgcccactctcctcctaaagaacacccttctggccctcagtctgttccccttctcaggtagagattggggctgctatggggactggccctgtagggttgagccacagacagctcttcagcccagtagcagtggagcaggccctgtcctgccctcccagcaataaccacctccctggaggccagctgagatgcctggctacttggcaccagggacttcctgacaccacagtcaattaattcctcaggggcctgtggctgaagaaaaggtgcccagcccccaccactcctcagctgccccccaacctctctatggcagagaggcagggagtggccctgtacatagactgctggggattgggtttgatttgttttgttttttttaattccattttgataatttttttcctgctctgggtggtggtggcacatggatgaatgagtatttaataaaagttccaaatttc

SEQ ID NO: 35361 - DNA, 1928 bp, Homo sapiens
  source 1..1928: mol_type = unassigned DNA
atgcgtcaccccggccttggtgggggcggggctccgaagagctcggttcagatcccggccgcctgggctccaggagccccggaaccaggataagttggatggctgccgcggcgaagcggggggcggggtggaccgtgcccggtattttctatacgggttccggggcccggtagaggcgcgccaagaggaaaggaaagtgcggcggccctggaacctggatatcgcgcgagatttgtgacccagaaggaaatctctgacctcagctgtggctcttggtgctggccagaagccaacttcatgtctgagtgcacgagcagcagtttgccatggagagcttggggctgcacacggtgacccttagtgatgggacaacagcctacgtccagcaagctgtcaaaggagagaagcttcttgaagggcaggtgatccagctcgaggatgggaccaccgcatacattcaccaggtgacggtacagaaagaagctctctcctttgaggatggtcagcctgtgcagctggaagatggcagcatggcttacatacaccgcacacccagagaaggctatgaccccagcaccctggaagccgtccaactggaagatggctccactgcctacattcaccaccctgtggctgtgccatcggagagcaccatcctggccgtacagacagaggtgggcttggaggacctggcagcagaggatgatgagggcttcagtgcagacgcagtggtggccctggagcagtatgccagcaaggttcttcatgacagccagattccccgtaatggaaaagggcagcaagttggagacagagcattccgctgtggctacaagggctgtgggcgtctctacaccaccgctcatcacttaaaggtgcatgaacgagctcatacaggtgaccgtccatacagatgtgacttccccagctgtggaaaggcctttgccacaggctatggactgaagagccacgttcgtacccacactggtgagaaaccatacaagtgcccagaggagctgtgcagcaaggccttcaagacctcaggagacctgcagaagcatgtccgtacccacactggtgaacgcccgttccagtgcccttttgagggctgtggccgctccttcaccacatctaacatccgcaaggtacatgtgcgcacccacacaggcgagaggccctacacctgcccggagccccactgtggccgcggcttcaccagcgccaccaactataagaatcacgtgcgcatccacacaggggagaagccatacgtttgcacggtgccaggctgcgggaaacgcttcaccgagtactcgagcttgtataagcaccacgtggtgcacacacaccactgcggccatgcagcaaggggctgtgaccctggagacaacagtgtcggagagtggctgctgagtccaagagggctgggtcccacaccatgctggaggaagtgccatctgcatggccactcttgcccccaagggcccaggctgtggctgacacatagaaggtggccacataggtctctggggtgagaagacagcaagaaaactgcctaactgaagggaatgggggccctgctcaagaagggggccaggcagctggaatcaggggagtgcatcatcctcgggagctgacaacagccaggctacaccagggcacccgcctctcaaaatcagctgggcgcccactctcctcctaaagaacacccttctggccctcagtctgttccccttctcaggtagagattggggctgctatggggactggccctgtagggttgagccacagacagctcttcagcccagtagcagtggagcaggccctgtcctgccctcccagcaataaccacctccctggaggccagctgagatgcctggctacttggcaccagggacttcctgacaccacagtcaattaattcctca

SEQ ID NO: 35362 - DNA, 1373 bp, Homo sapiens
  source 1..1373: mol_type = unassigned DNA
ttccctgggcgctcagcctcgctggccatgcgtcaccccggccttggtgggggcggggctccgaagagctcggttcagatcccggccgcctgggctccaggagccccggaaccaggataagttggatggctgccgcggcgaagcggggggcggggtggaccgtgcccggtattttctatacgggttccggggcccggtagaggcgcgccaagaggaaaggaaagtgcggcggccctggaacctggatatcgcgcgagatttgtgacccagaaggaaatctctgacctcagctgtggctcttggtgctggccagaagccaacttcatgtctgagtgcacgagcagcagtttgccatggagagcttggggctgcacacggtgacccttagtgatgggacaacagcctacgtccagcaagctgtcaaaggagagaagcttcttgaagggcaggtgatccagctcgaggatgggaccaccgcatacattcaccaggtgacggtacagaaagaagctctctcctttgaggatggtcagcctgtgcagctggaagatggcagcatggcttacatacaccgcacacccagagaaggctatgaccccagcaccctggaagccgtccaactggaagatggctccactgcctacattcaccaccctgtggctgtgccatcggagagcaccatcctggccgtacagacagaggtgggcttggaggacctggcagcagaggatgatgagggcttcagtgcagacgcagtggtggccctggagcagtatgccagcaaggttcttcatgacagccagattccccgtaatggaaaagggcagcaagttggagacagagcattccgctgtggctacaagggctgtgggcgtctctacaccaccgctcatcacttaaaggtgcatgaacgagctcatacaggtgaccgtccatacagatgtgacttccccagctgtggaaaggcctttgccacaggctatggactgaagagccacgttcgtacccacactggtgagaaaccatacaagtgcccagaggagctgtgcagcaaggccttcaagacctcaggagacctgcagaagcatgtccgtacccacactggtgaacgcccgttccagtgcccttttgagggctgtggccgctccttcaccacatctaacatccgcaaggtacatgtgcgcacccacacaggcgagaggccctacacctgcccggagccccactgtggccgcggcttcaccagcgccaccaactataagaatcacgtgcgcatccacacaggggagaagccatacgtttgcacggtgccaggctgcgggaaacgcttcaccgagtactcgagcttgtataagcaccacgtggtgcacaca

SEQ ID NO: 35363 - DNA, 2039 bp, Homo sapiens
  source 1..2039: mol_type = unassigned DNA
aagccgagttcccctctgccttgcgcgcttccccgcctaccccgagcggctcaggtgtcctgtcgtgctcacctgcgccggtcgctggaccgcggggcgctaaccctggagagcccaggagcgggcgggacatggactgcgtgatctttgaggaagtggctgtgaacttcaccccagaagagtgggcattgctggatcatgctcagaggagcctctacagagatgtgatgctggagacctgcaggaaccttgcctccttggattgttacatttatgttagaaccagtggatcaagttctcagagggacgtttttgggaatggaatatccaatgatgaagagattgtaaagttcacaggaagtgattcctggtctatttttggagaaaattggagatttgataacactggagatcagcaccaaatcccacagaggcatctgagaagtcagctggggagactctgtgaaagtaatgaaggtcatcaatgcggagagaccttgagccagactgcgaaccttcttgtgcacaagagttaccctaccgaagctaaaccctctgagtgcactaagtgtggcaaagccttcgagaatcggcagagatctcacactggacagagaccgtgtaaggaatgtgggcaagcctgcagctgcctctcctgccaaagccctcctatgaaaacgcagactgtagagaaaccctgtaattgccaggactcaaggacagcatctgtgacatacgtgaaaagtctcagcagtaaaaagtcttatgaatgtcagaaatgtggaaaagctttcatttgtccctcatctttcaggggacatgtgaatagtcatcatgggcagaaaacccatgcatgtaaagtatgtgggaagacctttatgtattactcctaccttacacggcacgtaagaactcacacaggagagaaaccctatgagtgtaaggagtgtgggaaagccttcagctgtccctcatactttcgagaacatgtcagaacacacactggagagaaaccgtatgaatgtaagcattgtggaaaatcattcagctgttactcctcctttagagatcacgtgaggacgcacactggagagaaaccctgtcagtgtaaacattgcggaaaagcgttcacttgttactcgtctcttcgagaacatgggagaacgcacagtggagagaaaccctatgaatgtaaggaatgcggcaaagccttcaggtacccctcctctctgcgagcacacatgagaatgcacaccggagagaagccctatgtgtgcaagcagtgtgggaaggccttcggatgtcccacttactttagaagacatgtgaaaacacacagcggggtgaagccctatcaatgtaaagagtgtgggaaagcctacagtttttcctcctcccttcgaatccacgtgaggacgcatactggagagaagccctttgagtgtaagcattgtgggaaagccttcagctgtcactcctcccttcgagagcatgtgcgaacccacagcggagagaaaccgtacgaatgtaatcaatgtgggaaagccttcagccacgctcagtactttcaaaagcatgtgagatcacacagtggggtcaaaccctacgaatgtactgaatgtgggaaagcctacagttgttcctcgtcccttcgtgtgcacgtgagaacgcacactggagagagaccgtatgaatgcaagcagtgtgggaaaaccttcaggtatctcgcatcgcttcaagcacatgtgagaacacatgctggagcgtgaatctacgaatacagtggacctgggagagtgttcaaccgtaaaaccttgttgtaaatgtgagaaacgttatttatgtagagcatgtaggaaaacctggtatagcacttattttgtacctaaaaattcagagtaggagagaaatctcttaattatgattaatatggtattgcctttacatgcctcagccttaatagtgattccttttgtattaatttctagtgtatgtttgtgatataaacatttaataaatatcctgttttgtacgctttc

SEQ ID NO: 35364 - DNA, 1305 bp, Homo sapiens
  source 1..1305: mol_type = unassigned DNA
agactctgtgaaagtaatgaaggtcatcaatgcggagagaccttgagccagactgcgaaccttcttgtgcacaagagttaccctaccgaagctaaaccctctgagtgcactaagtgtgggaagacctttatgtattactcctaccttacacggcacgtaagaactcacacaggagagaaaccctatgagtgtaaggagtgtgggaaagccttcagctgtccctcatactttcgagaacatgtcagaacacacactggagagaaaccgtatgaatgtaagcattgtggaaaatcattcagctgttactcctcctttagagatcacgtgaggacgcacactggagagaaaccctgtcagtgtaaacattgcggaaaagcgttcacttgttactcgtctcttcgagaacatgggagaacgcacagtggagagaaaccctatgaatgtaaggaatgcggcaaagccttcaggtacccctcctctctgcgagcacacatgagaatgcacaccggagagaagccctatgtgtgcaagcagtgtgggaaggccttcggatgtcccacttactttagaagacatgtgaaaacacacagcggggtgaagccctatcaatgtaaagagtgtgggaaagcctacagtttttcctcctcccttcgaatccacgtgaggacgcatactggagagaagccctttgagtgtaagcattgtgggaaagccttcagctgtcactcctcccttcgagagcatgtgcgaacccacagcggagagaaaccgtacgaatgtaatcaatgtgggaaagccttcagccacgctcagtactttcaaaagcatgtgagatcacacagtggggtcaaaccctacgaatgtactgaatgtgggaaagcctacagttgttcctcgtcccttcgtgtgcacgtgagaacgcacactggagagagaccgtatgaatgcaagcagtgtgggaaaaccttcagttggccctcggaccttagggttcacatgagaacacactctggggaaaagcgctgtggatgcaaacagtgtggaaaatccttcagttctccctcctcctttaagggacacataaggactcacactggagagaaactgtacacctgtagggaatgtgggaaagtcttcagtagtccctcatacttccgaacacaagtgagaattcacattggagagaaaccctatgtgtgtgagcagcgtgggaaagtcttcagttggtcatcatcttttcgaggacatttgagaactcacagtagagagaaaccctacgaatgtaaggagtgtacaaaagccttc

SEQ ID NO: 35365 - DNA, 2078 bp, Homo sapiens
  source 1..2078: mol_type = unassigned DNA
aatcaggcgcgtccctctggcgctggagccaggacctggcgttgggcggtacttggacagcggttcttgagctctcgcggttgccggtagattgttgccagttgccagttgccagtcgtttttcggaaagctggcagcggctttttcaccgggttctgcttgaggccgagccaaagagtggctgtgactcgggagacggagtggaacacccggctgggcaggcccggacagctcccgcgacccagcaccgcaggatcagaccgtgcctctgcggggagaggctggagaggaagagtccggcctgggagccgtcagagcagccctgcagaacggggtgggggctgctgtagatagacccttacgcccagagaactgctgggaggctgtggcgcgaggcgggactcaaatgctggaggaaggagtactgccttccccaggccctgcccttccccaagaggaaaacacaggagaggaaggaatggctgctggtctcctcacagctgggccccggggatccacattcttcagcagtgtgacggtagcttttgcacaggaaaggtggaggtgcctcgtgtctactccacgggacaggttcaaggaggggataccaggaaagtccaggagccttgtcctactaggacttccagtttcccagcctggcatgaactcccagttggaacaaagggaaggcgcatggatgctggagggcgaagacctgcgaagtccctctccaggctggaagattatatctggatcaccaccagagcaagccctttctgaagcttcattccaagacccatgtgtagagatgccccctggggattcagaccacgggaccagtgaccttgagaagagcttcaatctgagaccagtcctctctccgcaacagagagtgcccgtggaagcgagacctcgcaaatgtgagacacacaccgagagcttcaagaactcggaaatcctgaaacctcacagagcaaaaccatatgcatgtaatgaatgtggcaaagccttcagttactgttcttccctttctcagcatcagaagagccacactggagagaagccctatgagtgcagtgaatgtgggaaggccttcagccagagctcatctctcattcagcaccagaggattcacactggagagaagccttacaagtgcagtgaatgtggaagagccttcagccagaacgccaacctcaccaaacaccagcgaacccacaccggagagaagccctacagatgcagcgagtgtgagaaagccttcagtgactgctcagctcttgttcagcatcagagaattcataccggagagaagccctacgaatgcagcgactgtgggaaggccttccgtcacagtgcaaacctcacgaaccatcagaggactcacaccggggagaagccctacaagtgcagcgagtgtgggaaggccttcagttactgcgcagcgttcattcagcaccagaggattcacaccggggagaagccctacagatgtgccgcgtgtgggaaggccttcagccagagtgcaaacctcacaaaccatcagaggactcacactggggagaaaccctacaagtgcagcgagtgtgggaaggccttcagccagagtaccaatctcataatccaccaaaagacccacaccggggagaagccatataaatgtaatgaatgtgggaaattcttcagtgagagctcagccctcattcggcatcatataatccacaccggagaaaaaccttatgagtgtaatgagtgtggtaaagcgtttaaccagagctcatcccttagtcagcatcagagaatccacacaggcgtgaaaccctacgaatgcagcgagtgtgggaaggccttccggtgcagctctgccttcgttagacatcagagactccacgccggagagtaactaggaacatggtagaagtggagagagtcccggacatgccgactcaggacaggtgggtgaggatctgagaaatgctaaaggcttgaaagcatctgaagacatctaacttagagtctgcagcccagagccacatgcaaaacaccttcaataaacagccactatttcacatgctgta

SEQ ID NO: 35366 - DNA, 1965 bp, Homo sapiens
  source 1..1965: mol_type = unassigned DNA
acagcggttcttgagctctcgcggttgccggtagattgttgccagttgccagttgccagtcgtttttcggaaagctggcagcggctttttcaccgggttctgcttgaggccgagccaaagagtggctgtgactcgggagacggagtggaacacccggctgggcaggcccggacagctcccgcgacccagcaccgcaggatcagaccgtgcctctgcggggagaggctggagaggaagagtccggcctgggagccgtcagagcagccctgcagaacggggtgggggctgctgtagatagacccttacgcccagagaactgctgggaggctgtggcgcgaggcgggactcaaatgctggaggaaggagatgagaaaaatgagacttagagaggttacgtgatttgcacactgctgctgagtggtggatcatggatacttgagagtctgtgaacactctaatgcctccctacatctgatactgccttccccaggccctgcccttccccaagaggaaaacacaggagaggaaggaatggctgctggtctcctcacagctgggccccggggatccacattcttcagcagtgtgacggtagcttttgcacaggaaaggtggaggtgcctcgtgtctactccacgggacaggttcaaggaggggataccaggaaagtccaggagccttgtcctactaggacttccagtttcccagcctggcatgaactcccagttggaacaaagggaaggcgcatggatgctggagggcgaagacctgcgaagtccctctccaggctggaagattatatctggatcaccaccagagcaagccctttctgaagcttcattccaagacccatgtgtagagatgccccctggggattcagaccacgggaccagtgaccttgagaagagcttcaatctgagaccagtcctctctccgcaacagagagtgcccgtggaagcgagacctcgcaaatgtgagacacacaccgagagcttcaagaactcggaaatcctgaaacctcacagagcaaaaccatatgcatgtaatgaatgtggcaaagccttcagttactgttcttccctttctcagcatcagaagagccacactggagagaagccctatgagtgcagtgaatgtgggaaggccttcagccagagctcatctctcattcagcaccagaggattcacactggagagaagccttacaagtgcagtgaatgtggaagagccttcagccagaacgccaacctcaccaaacaccagcgaacccacaccggagagaagccctacagatgcagcgagtgtgagaaagccttcagtgactgctcagctcttgttcagcatcagagaattcataccggagagaagccctacgaatgcagcgactgtgggaaggccttccgtcacagtgcaaacctcacgaaccatcagaggactcacaccggggagaagccctacaagtgcagcgagtgtgggaaggccttcagttactgcgcagcgttcattcagcaccagaggattcacaccggggagaagccctacagatgtgccgcgtgtgggaaggccttcagccagagtgcaaacctcacaaaccatcagaggactcacactggggagaaaccctacaagtgcagcgagtgtgggaaggccttcagccagagtaccaatctcataatccaccaaaagacccacaccggggagaagccatataaatgtaatgaatgtgggaaattcttcagtgagagctcagccctcattcggcatcatataatccacaccggagaaaaaccttatgagtgtaatgagtgtggtaaagcgtttaaccagagctcatcccttagtcagcatcagagaatccacacaggcgtgaaaccctacgaatgcagcgagtgtgggaaggccttccggtgcagctctgccttcgttagacatcagagactccacgccggagagtaactaggaaca

SEQ ID NO: 35367 - DNA, 2210 bp, Homo sapiens
  source 1..2210: mol_type = unassigned DNA
gttgtagtcgccgcgtcgccggtgcggccgccattgtccggcgttcggcgagtcgggtggtccctttggctggagtgcctctctggtctggggatcacctcaggcgctgtccttcactgggcgatccagcatggaccccgaggacgaaggggtagcgggagtgatgtctgtggggccgccggcggcccggcttcaggaaccagtgaccttccgggatgtggctgtggactttacccaggaggaatgggggcagctggaccctacccagaggatcctctaccgtgacgtgatgctggagacctttggtcacctgctctccataggtcctgagcttccgaagcctgaagtcatctcccagctggagcaagggaccgagctatgggtggctgagagaggaaccacccagggctgccatccagcctgggagcctcgatctgaaagccaagcatcacgcaaggaagagggcctgcctgaagaggagccatcccatgtcacgggaagggaaggattcccgacagatgctccttatcccaccacgttagggaaagacagggagtgtcagagccagagtctggcactcaaggagcagaataacttgaagcagttggaatttggcctcaaggaagcaccagttcaagatcaaggctacaaaactctcagactcagggaaaactgcgtcctgagttcaagcccaaatccattcccagagatctctagaggggagtatttgtatacttacgactcacagattacagactcagaacataactccagcttagtcagtcagcagacaggctccccaggaaaacagcccggtgaaaacagtgactgtcacagagattccagtcaggccattccaattacggaactcacaaaaagccaggtgcaggacaaaccctacaaatgtactgactgtgggaagtcgtttaaccataacgcacacctcaccgtgcacaagaggattcatacgggagaaagaccttatatgtgcaaggagtgtgggaaagccttcagccagaactcctccctcgtccagcatgagcgcatccacactggagacaagccctacaagtgtgccgaatgtgggaagtctttctgccatagtacacaccttaccgtccatcggaggattcacactggggagaagccctatgagtgtcaggactgtgggagggccttcaaccagaactcctccctggggcggcacaagaggacacacactggggagaagccatacacctgcagtgtgtgtgggaaatccttctctcggaccacttgccttttcctgcacctgagaactcacaccgaggagaggccctacgagtgtaaccactgcgggaagggcttcaggcacagctcatccctggcccagcaccagcggaagcacgcgggggagaagccctttgagtgccgccagaggctgatctttgagcagacgccagctctcacaaagcatgaatggacagaagccctgggctgtgacccacctttgagtcaagatgagaggactcaccgaagcgacagacccttcaaatgtaatcagtgtgggaagtgtttcattcagagctctcacctcatccggcaccagataactcacaccagagaggagcagccccatgggcgaagccggcggcgtgaacaatcctcgagcaggaactcacacctggttcagcatcaacacccgaactccagaaagagctctgcaggcggagcaaaggcagggcagccggaaagcagagccctggctttgtttgacatccaaaaaatcatgcaagagaaaaaccctgtgcacgttattggggtggaagagccttctgtgggtgcttccatgttatttgacatcagagaatccacataggagagaaactttgctgatgacttttaaccacaagtaaaaaatgtggtaagtccacatagtgtactcatggaaggaggggctgggggtagaaatgtcatgggtgacttctgactttctaaggaaatgatgcttcccaagcacccgaggttggttggtcccaaatctatcaaactcagtgccctctttagcgacatattttgtgacattccttccattacaccacagtgagttcacaggtaatataacctacccacctgtgtaatgtcaaaaaaaatcaatatgcggccccattttgtaaaggatcattaaaatgaaagtaatttatggtagagtaaattgtagagtaacgtgt

SEQ ID NO: 35368 - DNA, 1289 bp, Homo sapiens
  source 1..1289: mol_type = unassigned DNA
attgtccggcgttcggcgagtcgggtggtccctttggctggagtgcctctctggtctggggatcacctcaggcgctgtccttcactgggcgatccagcatggaccccgaggacgaaggggtagcgggagtgatgtctgtggggccgccggcggcccggcttcaggtaacaataacaacaataacgacggcggcgggctccgggcaagcgtctcccgcgcagactgaccctttcacctcgcggcgcgatgagagcggcaccgctgttaatgcccttgacacgtggggaaactcagacgcgggtcggggcgtggtgaccgtcctggctggtcagagagggggccgggattccaaccaggcgcctggcccccgaatgcgcatgctccacgcggctctgtcctccccagcaccgcggagcccctgccctggggcttgggcacaacctcttgggggcaatgatgggtcaccacgcactgagtgtgatgagagtgaccaccagggtcgtcccctgcgagactgtgggagaactgcagtgcagggcggtcagtgtttgcagggccatctggccatcagagctccactttctagacaaagtggttgcggcctgtgttctccataaagctgcctcgcgtggcaggaaacaacaataattatccttcctcaagctctgcaactttgaaattatacttttttttattttttgtcgttggtttgttcatggggatttgcattatttcagatttggtacacaaagtgagacttgataatcttaggttgcaggttttcagatgtgtgttgctccaaatttgcatgaaatgctaccacgttttattttgttcttgctgtggatgggggacaaggaatgagtcgtaagaaaggcttgagagaaagtgtattagttacctgttgctgtgtaactcaaaacttcgtgacctggaacaacaataaatatctcacgagttctgacaggagtaatggaatgtcctagctggtggttctggttcaggcccatgaagttacagtgaagatgtcagcatagctgttgtcacctgagacctgagtctggaggatccacctccaggatggctcactcacatgtctgttgataggagacctcagttgttctccatgtaggcctctctttggaactgctagggatccttgcaacatggcatctggcttcccacagaacaagtgatccaggagagggcaaggtagaaactgtaacaccttccatgacctggattcagaattcacactcttgtcacttccacggtgtcttactggttac

SEQ ID NO: 35369 - DNA, 1364 bp, Homo sapiens
  source 1..1364: mol_type = unassigned DNA
attgtccggcgttcggcgagtcgggtggtccctttggctggagtgcctctctggtctggggatcacctcaggcgctgtccttcactgggcgatccagcatggaccccgaggacgaaggggtagcgggagtgatgtctgtggggccgccggcggcccggcttcaggaaccagtgaccttccggtgaaaacagtgactgtcacagagattccagtcaggccattccaattacggaactcacaaaaagccaggtgcaggacaaaccctacaaatgtactgactgtgggaagtcgtttaaccataacgcacacctcaccgtgcacaagaggattcatacgggagaaagaccttatatgtgcaaggagtgtgggaaagccttcagccagaactcctccctcgtccagcatgagcgcatccacactggagacaagccctacaagtgtgccgaatgtgggaagtctttctgccatagtacacaccttaccgtccatcggaggattcacactggggagaagccctatgagtgtcaggactgtgggagggccttcaaccagaactcctccctggggcggcacaagaggacacacactggggagaagccatacacctgcagtgtgtgtgggaaatccttctctcggaccacttgccttttcctgcacctgagaactcacaccgaggagaggccctacgagtgtaaccactgcgggaagggcttcaggcacagctcatccctggcccagcaccagcggaagcacgcgggggagaagccctttgagtgccgccagaggctgatctttgagcagacgccagctctcacaaagcatgaatggacagaagccctgggctgtgacccacctttgagtcaagatgagaggactcaccgaagcgacagacccttcaaatgtaatcagtgtgggaagtgtttcattcagagctctcacctcatccggcaccagataactcacaccagagaggagcagccccatgggcgaagccggcggcgtgaacaatcctcgagcaggaactcacacctggttcagcatcaacacccgaactccagaaagagctctgcaggcggagcaaaggcagggcagccggaaagcagagccctggctttgtttgacatccaaaaaatcatgcaagagaaaaaccctgtgcacgttattggggtggaagagccttctgtgggtgcttccatgttatttgacatcagagaatccacataggagagaaactttgctgatgacttttaaccacaagtaaaaaatgtggtaagtccacatagtgtactcatggaaggaggggctgggggtagaaatgtcatgggtgacttctgactttctaaggaaatgatgcttcccaagca

SEQ ID NO: 35370 - DNA, 2555 bp, Homo sapiens
  source 1..2555: mol_type = unassigned DNA
gccggagccagcagtggcaacccgctggggtccctttccacactgtggaagctttgttctttcgctctttgcaataaatcttgctacttctcactctttgggtccacactgcttttaccagctgtaacactcaccgcaaacgtctgcagcttcactcctgaagccagcgagaccacgagcccaccgggaggaacgaacaactccagacgcgccgccttaagccttaagagctgtaacactcaccacgaaggtctgcagcttcactcctgagccagcgagaccacgaacccgccagaaggaagaaactccgaacacatccgaacatcagaaggaacaaactctagacgcgccaccttaagagctgtaacactcaccacaagggtccgcggcttcattcttgaagtcagtgagaccaagaacccaccaattccggacacagttggaaatgcagaagggcacttgagtttggctgcagtctcccacacggagaccttctggaggaagatgagccctaaacgcgatgggttggggacaggtgatggtctgcactcacaggttttacaggagcaggtctccacaggagacaatctccatgaatgtgactcccagggaccaagtaaagacactttggttcgtgaggggaagacctacaaatgcaaggaatgtgggagcgtgtttaacaaaaacagcctccttgttcgacatcagcagattcacactggggtgaagccttatgaatgccaggagtgtggaaaagcctttcctgaaaaggtcgacttcgttcgacccatgaggattcacacaggggagaagccctgtaagtgcgtggagtgcgggaaggtcttcaaccgcaggtcgcacctcctgtgctaccgccagattcacactggagagaagccctatgagtgcagcgagtgtggaaagaccttcagctatcactctgtcttcatccagcatcgtgtgacccacactggagaaaaactctttgggtgcaaagaatgtggaaaaaccttttactacaactcttccttaacccggcacatgaagattcacactggagagaagccctgcaagtgcagtgagtgcgggaagaccttcacctaccgctctgttttcttccgacatagtatgacccacactgcaggaaagccctacgagtgcaaagaatgtgggaaaggtttttactacagctattccctcactcgacatacaaggagtcacactggagagaaaccttatgagtgccttgaacatagaaaggactttggctaccactctgcttttgcccaacagagtaagatccactctggaggaaaaaacctttgagtgcaaatgatgtgggaatttgtgggttttctttttttttttttctttgatacatagagagccacactgaggagaagcactctgaattcagtggcagtaggaaagctgtgacctgcagctcatcctcacttggcattgaagaattccttccagagataaactctatgagatatgtgggaaggccttttgcaagtgggcccacatcagtcaacgtcagagaacttaaactgcgaaaagacattttgacaaaaactagtgaagaaaatcttttggccacaggaaatatcttcctcagcatctgagaatttttccaggagggagacctgttggttattgtgcacttaaaagaaccacccacacctctctccatagtttatatcactaagccacttcaggattttttttttttaagtaagaagggaactgtaaaagagaaaaaaagaaattcatgcatagcttctgtcagacttctctgaaagccatgcctatcaaaatttgaattcagttcttcattttgcagatggctgaaagggacgagagaatgatggtgaagctgtgttgctttcccaggtgagccttgattatttcctctgtgctttctcagcttctttggccttctgtaagaggggcttctccaagagcatgtcactagttttctagaagttaaacaagagctaagacaaacaaaacaaaacacagcttatctaatctaatgagaaactcagaaaaaaatgttttgatgaatacaatgtattaaaatataaaacatgtagatcctttgacatgttaattcaattctagaaatcctcagaaatgtttttatattatgcagagatgtgcgtgcaaagaataatcgctgcagttttgtttttatgtgtgaaacgttgagaacaatctaaatgtttatcagttggaagtaagttatggtacatctgttctatgaaatactgtgaaacaataaggtatctctgtatgtactgatatcaaaacatctctaagatacagtatttagtaaaagagaaagtttcaggaaataaaactacatctagaagtataagcataaaactgttaatagtggttttctgcaggaaatgggatggaccagggttatatgcaatgttcagtttttacttttatacttaagtattgtttatgtttgaaaaataaaaagcatttattgtttttgcaataaatgtttaaaatatttcaataaagatagcatgttagaa

SEQ ID NO: 35371 - DNA, 2939 bp, Homo sapiens
  source 1..2939: mol_type = unassigned DNA
gccggagccagcagtggcaacccgctggggtccctttccacactgtggaagctttgttctttcgctctttgcaataaatcttgctacttctcactctttgggtccacactgcttttaccagctgtaacactcaccgcaaacgtctgcagcttcactcctgaagccagcgagaccacgagcccaccgggaggaacgaacaactccagacgcgccgccttaagccttaagagctgtaacactcaccacgaaggtctgcagcttcactcctgagccagcgagaccacgaacccgccagaaggaagaaactccgaacacatccgaacatcagaaggaacaaactctagacgcgccaccttaagagctgtaacactcaccacaagggtccgcggcttcattcttgaagtcagtgagaccaagaacccaccaattccggacacagttggaaatgcagaagggcacttgagtttggctgcagtctcccacacggagaccttctggaggaagatgagccctaaacgcgatgggttggggacaggtgatggtctgcactcacaggttttacaggagcaggtctccacaggagacaatctccatgaatgtgactcccagggaccaagtaaagacactttggttcgtgaggggaagacctacaaatgcaaggaatgtgggagcgtgtttaacaaaaacagcctccttgttcgacatcagcagattcacactggggtgaagccttatgaatgccaggagtgtggaaaagcctttcctgaaaaggtcgacttcgttcgacccatgaggattcacacaggggagaagccctgtaagtgcgtggagtgcgggaaggtcttcaaccgcaggtcgcacctcctgtgctaccgccagattcacactggagagaagccctatgagtgcagcgagtgtggaaagaccttcagctatcactctgtcttcatccagcatcgtgtgacccacactggagaaaaactctttgggtgcaaagaatgtggaaaaaccttttactacaactcttccttaacccggcacatgaagattcacactggagagaagccctgcaagtgcagtgagtgcgggaagaccttcacctaccgctctgttttcttccgacatagtatgacccacactgcaggaaagccctacgagtgcaaagaatgtgggaaaggtttttactacagctattccctcactcgacatacaaggagtcacactggagagaaaccttatgagtgccttgaacatagaaaggactttggctaccactctgcttttgcccaacagagtaagatccactctggaggaaaaaacctttgagtgcaaatgatgtgggaatttgtgggttttctttttttttttttctttgatacatagagagccacactgaggagaagcactctgaattcagtggcagtaggaaagctgtgacctgcagctcatcctcacttggcattgaagaattccttccagagataaactctatgagatatgtgggaaggccttttgcaagtgggcccacatcagtcaacgtcagagaacttaaactgcgaaaagacattttgacaaaaactagtgaagaaaatcttttggccacaggaaatatcttcctcagcatctgagaatttttccaggagggagacctgttggttattgtgcacttaaaagaaccacccacacctctctccatagtttatatcactaagccacttcaggattttttttttttaagtaagaagggaactgtaaaagagaaaaaaagaaattcatgcatagcttctgtcagacttctctgaaagccatgcctatcaaaatttgaattcagttcttcattttgcagatggctgaaaggtacaaaggccttgcctcgttatttgtcctttatatgtattcactcctgtctacaggagaattgtcctctgtaaagattaactctgtaaagatttattgaatgcattctttgttctaaaacattgtactcctgaggaatgtaagtctttgtgagaaatatgaacgcttaagtaatggaatatgtgaaacttgtaagaacgtagaatataaaaatactgccatataaaatcctttcatatctgaggaggtaagtaaccacattgaatgggcatattttgctacatcatttaagactacttaaggctttaatttaacaaaaaacaattcttcatgtggttttgaacacccagtgctcaatatacttgtttgttttgatttattttctcagggacgagagaatgatggtgaagctgtgttgctttcccaggtgagccttgattatttcctctgtgctttctcagcttctttggccttctgtaagaggggcttctccaagagcatgtcactagttttctagaagttaaacaagagctaagacaaacaaaacaaaacacagcttatctaatctaatgagaaactcagaaaaaaatgttttgatgaatacaatgtattaaaatataaaacatgtagatcctttgacatgttaattcaattctagaaatcctcagaaatgtttttatattatgcagagatgtgcgtgcaaagaataatcgctgcagttttgtttttatgtgtgaaacgttgagaacaatctaaatgtttatcagttggaagtaagttatggtacatctgttctatgaaatactgtgaaacaataaggtatctctgtatgtactgatatcaaaacatctctaagatacagtatttagtaaaagagaaagtttcaggaaataaaactacatctagaagtataagcataaaactgttaatagtggttttctgcaggaaatgggatggaccagggttatatgcaatgttcagtttttacttttatacttaagtattgtttatgtttgaaaaataaaaagcatttattgtttttgcaataaatgtttaaaatatttcaataaagatagcatgtt

SEQ ID NO: 35372 - DNA, 4690 bp, Homo sapiens
  source 1..4690: mol_type = unassigned DNA
ggccgcgggtcccggcggcggggtgggcgggggaggcagcgggtgacagatgtactcctctgacagctctcagtatcagcccagtggctccctgccattggctcagtgcaatggaccggcaacgccgctcactataataacactcatgcctgccagcagcagcaactccgagtgcaggcgccgagcgcgggggatgctgccgccgccgccgcttctgctgccgcgcgggcggctcccgcagccccgctccgcccggccaccgcgcgggcactgactcccgctcggttccgtttcgccggcccggccccctcctaggctggaatcctcccgcggggctcgtcgtcccgacgcgaatctgaggagaaacaggagcgagagactgaggggagagcgcggcgagcatgcggaggcgggggagcctcggcgctcaccacagaggggtgcagtgagccagtctccagaggacgtgccgggggtggctgcgtgccctcgtggcgggttcccagcccaccgtcgccggccccggcgcgctgcggctgtgggcgcggggtgcgtggaagcggcggctgcggcggaggaggcggcggctgccccatggagtgttactacattgtcatcagctccacgcatctcagcaacggacactttcgcaacatcaagggagttttccggggccctctcagcaagaacgggaacaaaactctggactatgctgagaaggaaaataccatagcaaaagctctggaagatctgaaggcaaatttttactgtgaactctgtgacaagcagtactataagcaccaggagtttgacaatcacattaattcatatgaccatgctcacaagcagaggctcaaggaactgaaacaaagggaatttgctcgaaatgtagcatctaaatccaggaaagatgaaagaaaacaggaaaaggcactccaacgcctgcacaagctggctgagctaagaaaggaaactgtatgtgctcctggaagtggccccatgttcaaatcaacaactgttactgtgagagaaaactgtaatgaaatttcccaacgagttgttgtggattcagttaataaccagcaagatttcaaatatactttgattcatagtgaagagaatactaaagatgctaccactgttgctgaagatccagaaagtgcaaataattatacagcaaaaaataaccaagttggggatcaagcccaggggattcacagacacaaaatcggcttttcttttgcatttccaaagaaagcgtccgtgaagctagagtcctcagctgcagccttctctgaatacagtgatgatgcctcagtgggaaaaggatttagcagaaaaagtagatttgtccccagtgcttgtcatcttcaacaatcttcaccaacagatgtgcttttgagttctgaggagaaaactaactcttttcatccaccagaggcaatgtgcagagacaaagaaactgttcaaactcaagagataaaagaagtctctagtgaaaaagatgcattattattaccttcattttgcaagtttcaacttcagttatcttctgatgcagataattgtcaaaattcagtcccattagcagatcaaataccactagagagtgttgttattaatgaagacatacctgttagtggtaacagttttgagttgttaggaaataaatccacagttcttgacatgtctaatgattgcatatctgtgcaagctaccacagaggaaaatgttaagcataacgaggcatccacaactgaggttgaaaataaaaatggtcccgagacattggccccttcaaatactgaagaggttaacataactatacataagaaaacaaatttctgcaaaagacaatgtgagccatttgtacctgtccttaacaaacacagatctacagttcttcagtggccatcagaaatgctggtttatacaactacgaaaccatcaatttcctatagctgtaatcctctatgttttgacttcaagtctactaaagtaaataataatctagataaaaataagccagacttaaaagatctttgttctcagcagaagcaggaagacatttgcatgggaccactttcagattacaaggatgtatctacagaaggactcactgattatgaaattggaagtagcaaaaataaatgcagccaagtcactcctcttttggctgatgatattctctccagtagttgtgattctggaaaaaatgagaacacaggtcagaggtataaaaacatttcctgtaagatcagagaaacagaaaagtataattttactaaaagtcaaataaaacaggacactctagatgaaaaatacaacaaaataaggttgaaagagacccatgaatactggttccataaaagtagaagaaagaaaaaaagaaaaaagttatgtcagcatcatcatatggagaaaaccaaagaatcagaaactcgctgcaaaatggaagcagagaatagttacactgaaaatgctgggaaatatctattggaaccaatttcagaaaagcagtatttagctgcagagcaattattagactcacatcagttacttgataaaaggcccaaatcagaatccatatccttaagtgacaatgaagaaatgtgtaaaacatggaatactgaatacaacacttatgatactatcagttctaaaaaccactgtaaaaagaacacaatacttttaaatggacaatcaaatgcaacaatgatacattctgggaaacataatttaacatattctagaacttactgttgttggaaaaccaaaatgtcaagctgtagtcaggatcacagaagcttagttcttcaaaatgatatgaaacacatgagtcagaatcaggctgttaaaagaggttacaattctgtcatgaatgaatcagaaagattctatcgaaaacgtagacaacattcacattcttattcttcagatgaaagtttaaatcgacagaatcatttaccagaagaatttttgaggccaccaagtacttcagttgctccctgcaagcctaaaaagaaacggaggcgaaaaagaggcagattccaccccggatttgaaactttagaactcaaagaaaatacagattatcccgtgaaagacaattcttccttaaatcctctggataggttaataagtgaagacaaaaaagagaaaatgaaaccacaagaagttgcaaaaatcgaaaggaactcagaacaaacaaaccaattaagaaacaaactgtctttccaccctaacaatctccttccttctgaaaccaatggtgaaactgagcatttagaaatggagaccacttctggtgaattgtcagatgtttccaatgatcccaccacatctgtctgtgtagctagtgccccaacaaaagaagcaattgacaataccctgcttgaacacaaagaaagaagtgagaatataaatcttaatgaaaagcaaattccttttcaggtgcctaatattgaaaggaactttagacagtcacagcctaaatcctatctttgccattatgaactggctgaggcccttccacaaggaaagatgaatgagacaccaactgagtggctgcgttataattcaggaatccttaacacacaaccaccattaccattcaaagaagcacatgtcagtggtcatacttttgtaacagctgagcaaatcctggctccattagctttaccagagcaagcattattgatcccactagaaaaccatgacaaattcaaaaatgtaccatgtgaggtctaccagcacattctgcagccaaacatgctggccaacaaggttaaatttacctttcctccagctgccctcccaccccctagcacacctctgcagcctttgcctttgcagcagtccttatgttctacctctgtaaccactatccatcacactgttttgcagcagcacgctgcagctgctgcagctgcagctgcagccgcagctgcaggaacctttaaagtgcttcagccacaccaacagtttctttcccaaatcccagctctcaccagaacctcattacctcagctctcagtaggaccagtaggaccgaggctttgtcctgggaaccagccaacttttgttgctcctcctcagatgccaatcattccagcttccgttcttcatcctagccatctggctttcccatctttaccccatgcactctttccttcactgctttccccacaccctactgtcatccctttgcaacctctcttctagtcatcaccataatgggaaaaaaatactcttgtgaaaactattgctatatgcgttaagtgttcatctatgtgggtacatggctatttaactggtggaaataaactggccgatacatggcgtcattggtttgaaatcatttactgtaagtgcaatgatgcaaataaatccctaagtttctgatatataatattattaaagcactgaatagtttgaaaatcaatacaatatatgctatatattaaaatgatgtcttaagagtatgtataatgtacataaaatatatttatagtactctaatttatgttgtaaagtatgctcccttggtttttcttaatctttgtgtatttgcacctatttaatgtttagacaaagctgatggcactatgttttgtatcatgttccttgaaactgtaaattcagtgaaaaatatctcttgcaataaatttttgttaactatttaagtaaa

SEQ ID NO: 35373 - DNA, 610 bp, Homo sapiens
  source 1..610: mol_type = unassigned DNA
gttgtcaggaggattcgacgttcagtgcccagggatgtggaggtgatggggggccggggaggagtctcactctgtcacccaggctggagtgcagtttgtgtgatctcaactcactgcaacctctgcctcctgggttcaagcgattctcctgcctcagcctcccgagtagctggaattacagagttcttggagtctctgcggagtccctgggccagatctcacagtgaaagctgcaggatcttccttctgaccccagcagtccccgttgagtccaccgatcccactggaattataaagttgtcagcaagaaagccccagggctgaagtccaagtccgtcgggaacatgccagctaacgaggacgctccccagccaggggaacatggcagtgcctgtgaggtatcagtgtcatttgaggatgtgactgtggacttcagtagagaggagtggcagcaactggactctactcaaagacgcctgtaccaggatgtaatgttggagaactacagccacctgctctcagtgggtaaggacaaccatcctgtgaagttgtgaggagcctgttatgggttaaattgtgcccccaaataaaatatgttgaagtcctaata

SEQ ID NO: 35374 - DNA, 7859 bp, Homo sapiens
  source 1..7859: mol_type = unassigned DNA
ggaagcggctgcggttctcgccggttctcagccggggtttgatagttgtcaggaggattcgacgttcagtgcccagggatgtggagagttcttggagtctctgcggagtccctgggccagatctcacagtgaaagctgcaggatcttccttctgaccccagcagtccccgttgagtccaccgatcccactggaattataaagttgtcagcaagaaagccccagggctgaagtccaagtccgtcgggaacatgccagctaacgaggacgctccccagccaggggaacatggcagtgcctgtgaggtatcagtgtcatttgaggatgtgactgtggacttcagtagagaggagtggcagcaactggactctactcaaagacgcctgtaccaggatgtaatgttggagaactacagccacctgctctcagtggggttcgaagttcctaaaccagaggtcatcttcaagttggagcaaggagaggggccatggacattggaaggggaagccccacatcagagctgttcagatgggaaatttggaattaagccttcccagaggagaatttctgggaaatctacatttcatagtgaaatggagggtgaagacacaagagatgattcattatactctattttagaagaattgtggcaagatgctgaacagataaagagatgtcaggaaaaacacaacaaacttctgagtcgcactactttcctcaataagaaaatattgaatacagagtgggattatgaatataaagactttggaaaatttgttcatccaagcccaaatctcattctttcacagaaaagaccccataaacgtgattcatttgggaagagttttaagcataatttagacttacatattcataataaaagcaatgcagcaaagaacctggataaaactattgggcatggtcaagtttttacccagaactcttcttatagtcaccacgaaaatacacatacaggagtgaagttctgtgaacgtaatcaatgtggaaaagtcctcagcctcaaacactcactcagtcaaaatgtgaaatttcccattggagagaaagcaaacacatgtactgaatttgggaagatcttcacccagaggtcacatttctttgctcctcaaaaaattcatactgtggaaaaacctcatgagcttagcaaatgtgtaaatgtttttacacagaagccactactcagtatatatctgagagttcatagagatgaaaaactctacatatgtactaaatgtgggaaggccttcatccagaattcagaattaattatgcatgagaaaactcatactagagagaaaccctataaatgcaatgaatgtgggaaatcatttttccaggtgtcatctctactcaggcatcagacaactcatactggagaaaaactctttgaatgcagtgaatgtggtaaaggcttctccctgaactcagccctcaatatacatcagaaaattcacactggagagagacatcacaaatgcagtgagtgtgggaaagcctttacccaaaaatcaacactcaggatgcatcagagaattcatacaggagagaggtcctatatctgtactcaatgtgggcaggccttcatccagaaggcacacttgattgcacatcaaagaattcatactggagagaagccttatgaatgcagtgactgtgggaaatctttcccttctaagtcacaactccagatgcataagagaattcatacaggagagaaaccctatatatgcactgaatgtgggaaggctttcaccaacaggtcaaatctcaatactcaccagaagtctcatactggagaaaagtcttatatatgtgctgaatgtgggaaggccttcaccgacaggtcaaatttcaataaacaccagaccattcacactggagagaaaccctatgtttgtgctgattgtgggagggccttcatccagaagtcagagttgattacacatcagagaattcatactacagagaagccttataaatgtcctgactgtgagaaatccttctccaagaaaccacatctcaaagtacatcaacgaattcacacaggggagaaaccatatatatgtgcagaatgtgggaaagccttcactgataggtcaaatttcaataaacatcagacaattcatactggagataaaccgtataaatgcagcgactgtggaaaggggttcacccagaaatcagttctcagtatgcatcgcaatattcatacatgaaagtaatcctgtttcttgaaaatgagagccttataaggctgacaaaagtcaggtctaactatatattataaaattcatccaagacagatcctatatgaatacattgtataaggaaaagcatcaggctatctcacttgagatggaaaaaaattattcagaagaaactctcttaaaaatgcattgaaggagagagaatttgcacagcctcatgaaatatagtaaaagtcatactgggaaaaatgttgtcagtttggtgtgttaggaaaagccttcctatagaaagtattataagttaaattgttaccaaattctttataggaaggagagtgcaaaattatgtaaatgatggtcaggtttactgtgttatattaagcaatttaaagtgataacaaaatgaaaggtagtgcagcaaaataatataactggtgagtagacctactttcagttccatagggtgtttgtggcagaacacagtgcagaacaggaggaatattacattttttttcaaatttagaataattatgtccatcaaatgtttcttactgaatatgtctatcaaatatgtttcttattgaatatttctatcaagtgaatccacaatttaaaagtcactttggttttatatatacacacatctgcagatataattttataagaacacacaaatataatcctgtcattcgtactggtttccatgacatagtatcttgttttctttcattgtggtacaatgcaaagtagccacagattcctcccatcccaagtagcgtctctttgtctactacttgactttgaacttggccacgtgactttctttggccaatggaaattagcaaagagaatcaataagaagcttgagaagtgtgcaaagcctgccttgaagcttaccctctcttgctgctctttgcaaacctgaagaatctcaaattgccctactcgggggtgaggagccaccacatggagcagtggtgagccagccttgctgaggccccttagaccaagtagcctgccaattgtcagaattgggagtgaggttttccaagacctctagccccagctgagccagcctagcccagaagagccataccagttattccagctgatttacagaattgtgagataaataaaatgatgatagttttaagcaacatgagttttggggttagtttgttgtacagaaaatgctaagtaatatttgaaagtatatgtttgggggagggggcatagtggaccaaaacgtgacaagtggcattggctttgggtctgagtggcacgtagaaactggaaaaacagtgaggaaaactgtttttcctcaaataacaaaggttggatagttggcaacccatgttatttagtagggaaagatacagaaaaacagtcatcaccatactctgtgggaagatagagaatggaccaaacgaactggtggatctggctaaggagatttgcagcagaatatgggaagtatcagtttgcttcttttagctgcatatgatacgatacagaaagagagaaatgaactaaagaaataactgtttctttggcaagcagaattcagaagaaatatggaaaagccaaggattgctgggttgaaaaataatgctttcacatcactagtctctccagctatctaactattcgcaaggtaaaaaatggcctcagggtaaagatcaaatcatggttgtgtctgtaagactctttattacagtgtgtgaaatagttcagttggtgcttaggagaccatctcagctaaacttaagggcttctaaaaatcttcatgacgttgtcccatagaagcctgacatactactcaaagtggagagagacctatcttaaaaagaattgctgatgtggcatttggggaaaggagtagatccaaaccagattcataggaaactcacaaagtttttaatagagttttactagtaaaactacctccaggttggacttccagggactgaaacagttcaaaatgaaaagtggcctctggattcccctccctaacttctatgaataggatacaagctgagaaagttactcagatgcaaacacggtccatttcttatggaaaatgaagggcatctcagagggaagacccaagaacaatatattaaaatgagctggggagccgttcccagggagaactgtgccctaatcaagaaacgtatctgcccctggagccaagggaaccgacaacatttgctctgtgggatttcagaatcgttatggaacagtgactgatatgtgcctcatggtcctcctctttttgaatgggagtgtctattacagttatcctgtacctatcccaccattgtatatattgggtgtatgttggggggcatgtaacttgtcatttagctcacaggtatctggatcaagaaactgaaaaactgtacccaaggaacctcagccacacctgaacctgatacagaagacttgagattctggattggagcttgatgccacaattttggatgagaaatttggaggtcctggaataggggtgaacacattttgcatggggtggtaatgtgaatactttgtgaccagaagacacactgtgttaggtagaaaaatgctacagatgtcttcatccctgtatatgtgtccttcttcagtctttatttctctttgtgtttcagttaggataatttctattgatctgtcttcaaattcactgatgttttttctctcaccctggctttgtcaagtctactgctgaacccattgaaggcattcttcaactcagttatgttttatttttatttgtaatatttccatttgattcttacaattttcatatatctgctgaaattccccatcttttcatgcatgttcatgttttcccctttaccctttgtcttagtcagtttgagctgctataataaagcaccatagacttggtggcttataaacaacagaaatttattcctcacagttctggagcctggaagtctgagatcagaatctagcaaggttaggtcttggtgacggccctcttcaaggttgcaaactgctcacttcttgcattttcccatgtctacagctagagaactctttgggatcccttttataagggcaccaatcccattcatgagttctccacccacattacctaactaccacccaaaggctccacctcctaataccatcacattgaggattaggattttaacatatgaattttgggggggatgcaatcattcagcccataataccctctaacatattaatcatagttatttttaactccctgtctgatagttccaactactaggtcaactgagtctaggtctgttgttgtcttctcttgctcttttgcatctaataatttttggctgaatgtcacagatgttgtatgtaggacagtagaaactgaggtaaatagtaattattcctggaaacagccatggttgcccttttgataggccattagcatggggagattgaatccatctaatcaggagttgggctgagtttgtgtttctttgttgccagtgttacctttgctgtaccatagacttaaaattcctctattgttatcttatgcttgaggtaggcactggtttgcccagagaatttttatttttcccagaccacacttgcctttaggcctgtaggcctttcctgtgtgcctgcatctcagggagggtctctctccatgttgttgcctctatgttagtagtagacaactgttattacttggttcttgctgacctggtgagttggggggcaggggttgtcttgggccagcctcagtttttgtcaggccatgaatccctgggtcttgagggtgggattttttagtgatcctgccctcttccactggtagaaggcctttaatgatctgggcccaggatgatttcctgcccttttatcatgggtggaatttttttttccatttccctcactctagtcacagtgaatctttaactgtgtcctgagggcaacagggtttgctgcacttcttttagtggcttaaggattttgttctgtaggggagtagggtttcattggagctttgtgccatttctatgttaacagcagcccccttgcaggcctaccccatggaggtaggctttctccagtcttcttccttgtccccgtgtttcttgagagcactcagtggatgactatggagaagagcctgcaagcagagaccaactacccttaggtctacagctctcatgagtctcccgcactcagcctttagcaattcattaaaaattcttgttgaattcttactgcttgtatagtggcctcatcttccttcctgctgtaccacagatggcccaggagaggcacttgtcttttattatatttcaagctagttggttgctctgtaatcttagctctctgatgggttcgagaaaacttatgtttttgcagattacccagctttgttcttgttataaagatgggagcagtgttctttccagatgtctacatgctaggcagaaactagaagtctggacagtctccatggtctcctactatcagaatatgtgcccttttcagtgtgactttgccacttcacccatcaagaggtagaatctatttcttcaacccctgcaactgagcttggctattttgttggccaatgggacattaacaagtatgatacaagcagaggcttgagaagtgcctgcacaatgaggcttgcccacttttgcagctctttggaatcctgaacccatgtgtggaaaagcctgaactgtgctgttggaaaatgagagcgatcacatggagcagtaatggagcaaagaccagccatcccagttgagataccctacaccaaccagattttcaactgctggacatatgaatgaagctatcctaggcatgcagtcttggtcaaggcaactttggctggcagtctctgagatgaccctgaatgatccccacctcctggtattctcactcttatataatcccctcctcttgagtttggactggaattagtgacttggttctagtgaatagaatgaggcagaggtaatgggatgtcatgttcaagattggttacaaaaagactgtggcttccattttgggtgcttgcttactctctcagatggctcatcataggggaaacctgctgctacatcatgagatagccctgtggaaaggtccacatgagtgaactttgaagcatatcctcccccagtttagcctttagatgaggaccacagccaaatagcttgactgtaagccagatagcttgactcatgagggaccttcagccagaggcatcttttgagccatacgaattcctgacccatagaaactgcaagacaataaatgttgttttaagttgctaaattttagggtaatttgttacacagtaataggttaataatacactggcccagattaggaaggttctgccatccatcccagccatcccaaacaactaccagaataatggattaaaacgttaactgttttaagtcactaagttttgggcagcatgataacaacccagcaaaaagctaactgatacattgattatttattgcatttcttcctccactattcttctctaacagatgaccaatactaataaactactgtgaacactttcatgttttaatctctgctctgtgctcataatcatatatagacat

SEQ ID NO: 35375 - DNA, 492 bp, Homo sapiens
  source 1..492: mol_type = unassigned DNA
gtgcccagggatgtggagagttcttggagtctctgcggagtccctgggccagatctcacagtgaaagctgcaggatcttccttctgaccccagcagtccccgttgagtccaccgatcccactggaattataaagttgtcagcaagaaagccccagggctgaagtccaagtccgtcgggaacatgccagctaacgaggacgctccccagccaggggaacatggcagtgcctgtgaggtatcagtgtcatttgaggatgtgactgtggacttcagtagagaggagtggcagcaactggactctactcaaagacgcctgtaccaggatgtaatgttggagaactacagccacctgctctcagtggggttcgaagttcctaaaccagaggtcatcttcaagttggagcaaggagaggggccatggacattggaaggggaagccccacatcagagctgttcagggatttccacatatttcgtcacatccacagtaaa

SEQ ID NO: 35376 - DNA, 7933 bp, Homo sapiens
  source 1..7933: mol_type = unassigned DNA
ggaagcggctgcggttctcgccggttctcagccggggtttgatagttgtcaggaggattcgacgttcagtgcccagggatgtggagagtctcactctgtcacccaggctggagtgcagtttgtgtgatctcaactcactgcaacctctgcctcctgggttcaagcgattctcctgcctcagcctcccgagtagctggaattacagagttcttggagtctctgcggagtccctgggccagatctcacagtgaaagctgcaggatcttccttctgaccccagcagtccccgttgagtccaccgatcccactggaattataaagttgtcagcaagaaagccccagggctgaagtccaagtccgtcgggaacatgccagctaacgaggacgctccccagccaggggaacatggcagtgcctgtgaggtatcagtgtcatttgaggatgtgactgtggacttcagtagagaggagtggcagcaactggactctactcaaagacgcctgtaccaggatgtaatgttggagaactacagccacctgctctcagtggggttcgaagttcctaaaccagaggtcatcttcaagttggagcaaggagaggggccatggacattggaaggggaagccccacatcagagctgttcagatgggaaatttggaattaagccttcccagaggagaatttctgggaaatctacatttcatagtgaaatggagggtgaagacacaagagatgattcattatactctattttagaagaattgtggcaagatgctgaacagataaagagatgtcaggaaaaacacaacaaacttctgagtcgcactactttcctcaataagaaaatattgaatacagagtgggattatgaatataaagactttggaaaatttgttcatccaagcccaaatctcattctttcacagaaaagaccccataaacgtgattcatttgggaagagttttaagcataatttagacttacatattcataataaaagcaatgcagcaaagaacctggataaaactattgggcatggtcaagtttttacccagaactcttcttatagtcaccacgaaaatacacatacaggagtgaagttctgtgaacgtaatcaatgtggaaaagtcctcagcctcaaacactcactcagtcaaaatgtgaaatttcccattggagagaaagcaaacacatgtactgaatttgggaagatcttcacccagaggtcacatttctttgctcctcaaaaaattcatactgtggaaaaacctcatgagcttagcaaatgtgtaaatgtttttacacagaagccactactcagtatatatctgagagttcatagagatgaaaaactctacatatgtactaaatgtgggaaggccttcatccagaattcagaattaattatgcatgagaaaactcatactagagagaaaccctataaatgcaatgaatgtgggaaatcatttttccaggtgtcatctctactcaggcatcagacaactcatactggagaaaaactctttgaatgcagtgaatgtggtaaaggcttctccctgaactcagccctcaatatacatcagaaaattcacactggagagagacatcacaaatgcagtgagtgtgggaaagcctttacccaaaaatcaacactcaggatgcatcagagaattcatacaggagagaggtcctatatctgtactcaatgtgggcaggccttcatccagaaggcacacttgattgcacatcaaagaattcatactggagagaagccttatgaatgcagtgactgtgggaaatctttcccttctaagtcacaactccagatgcataagagaattcatacaggagagaaaccctatatatgcactgaatgtgggaaggctttcaccaacaggtcaaatctcaatactcaccagaagtctcatactggagaaaagtcttatatatgtgctgaatgtgggaaggccttcaccgacaggtcaaatttcaataaacaccagaccattcacactggagagaaaccctatgtttgtgctgattgtgggagggccttcatccagaagtcagagttgattacacatcagagaattcatactacagagaagccttataaatgtcctgactgtgagaaatccttctccaagaaaccacatctcaaagtacatcaacgaattcacacaggggagaaaccatatatatgtgcagaatgtgggaaagccttcactgataggtcaaatttcaataaacatcagacaattcatactggagataaaccgtataaatgcagcgactgtggaaaggggttcacccagaaatcagttctcagtatgcatcgcaatattcatacatgaaagtaatcctgtttcttgaaaatgagagccttataaggctgacaaaagtcaggtctaactatatattataaaattcatccaagacagatcctatatgaatacattgtataaggaaaagcatcaggctatctcacttgagatggaaaaaaattattcagaagaaactctcttaaaaatgcattgaaggagagagaatttgcacagcctcatgaaatatagtaaaagtcatactgggaaaaatgttgtcagtttggtgtgttaggaaaagccttcctatagaaagtattataagttaaattgttaccaaattctttataggaaggagagtgcaaaattatgtaaatgatggtcaggtttactgtgttatattaagcaatttaaagtgataacaaaatgaaaggtagtgcagcaaaataatataactggtgagtagacctactttcagttccatagggtgtttgtggcagaacacagtgcagaacaggaggaatattacattttttttcaaatttagaataattatgtccatcaaatgtttcttactgaatatgtctatcaaatatgtttcttattgaatatttctatcaagtgaatccacaatttaaaagtcactttggttttatatatacacacatctgcagatataattttataagaacacacaaatataatcctgtcattcgtactggtttccatgacatagtatcttgttttctttcattgtggtacaatgcaaagtagccacagattcctcccatcccaagtagcgtctctttgtctactacttgactttgaacttggccacgtgactttctttggccaatggaaattagcaaagagaatcaataagaagcttgagaagtgtgcaaagcctgccttgaagcttaccctctcttgctgctctttgcaaacctgaagaatctcaaattgccctactcgggggtgaggagccaccacatggagcagtggtgagccagccttgctgaggccccttagaccaagtagcctgccaattgtcagaattgggagtgaggttttccaagacctctagccccagctgagccagcctagcccagaagagccataccagttattccagctgatttacagaattgtgagataaataaaatgatgatagttttaagcaacatgagttttggggttagtttgttgtacagaaaatgctaagtaatatttgaaagtatatgtttgggggagggggcatagtggaccaaaacgtgacaagtggcattggctttgggtctgagtggcacgtagaaactggaaaaacagtgaggaaaactgtttttcctcaaataacaaaggttggatagttggcaacccatgttatttagtagggaaagatacagaaaaacagtcatcaccatactctgtgggaagatagagaatggaccaaacgaactggtggatctggctaaggagatttgcagcagaatatgggaagtatcagtttgcttcttttagctgcatatgatacgatacagaaagagagaaatgaactaaagaaataactgtttctttggcaagcagaattcagaagaaatatggaaaagccaaggattgctgggttgaaaaataatgctttcacatcactagtctctccagctatctaactattcgcaaggtaaaaaatggcctcagggtaaagatcaaatcatggttgtgtctgtaagactctttattacagtgtgtgaaatagttcagttggtgcttaggagaccatctcagctaaacttaagggcttctaaaaatcttcatgacgttgtcccatagaagcctgacatactactcaaagtggagagagacctatcttaaaaagaattgctgatgtggcatttggggaaaggagtagatccaaaccagattcataggaaactcacaaagtttttaatagagttttactagtaaaactacctccaggttggacttccagggactgaaacagttcaaaatgaaaagtggcctctggattcccctccctaacttctatgaataggatacaagctgagaaagttactcagatgcaaacacggtccatttcttatggaaaatgaagggcatctcagagggaagacccaagaacaatatattaaaatgagctggggagccgttcccagggagaactgtgccctaatcaagaaacgtatctgcccctggagccaagggaaccgacaacatttgctctgtgggatttcagaatcgttatggaacagtgactgatatgtgcctcatggtcctcctctttttgaatgggagtgtctattacagttatcctgtacctatcccaccattgtatatattgggtgtatgttggggggcatgtaacttgtcatttagctcacaggtatctggatcaagaaactgaaaaactgtacccaaggaacctcagccacacctgaacctgatacagaagacttgagattctggattggagcttgatgccacaattttggatgagaaatttggaggtcctggaataggggtgaacacattttgcatggggtggtaatgtgaatactttgtgaccagaagacacactgtgttaggtagaaaaatgctacagatgtcttcatccctgtatatgtgtccttcttcagtctttatttctctttgtgtttcagttaggataatttctattgatctgtcttcaaattcactgatgttttttctctcaccctggctttgtcaagtctactgctgaacccattgaaggcattcttcaactcagttatgttttatttttatttgtaatatttccatttgattcttacaattttcatatatctgctgaaattccccatcttttcatgcatgttcatgttttcccctttaccctttgtcttagtcagtttgagctgctataataaagcaccatagacttggtggcttataaacaacagaaatttattcctcacagttctggagcctggaagtctgagatcagaatctagcaaggttaggtcttggtgacggccctcttcaaggttgcaaactgctcacttcttgcattttcccatgtctacagctagagaactctttgggatcccttttataagggcaccaatcccattcatgagttctccacccacattacctaactaccacccaaaggctccacctcctaataccatcacattgaggattaggattttaacatatgaattttgggggggatgcaatcattcagcccataataccctctaacatattaatcatagttatttttaactccctgtctgatagttccaactactaggtcaactgagtctaggtctgttgttgtcttctcttgctcttttgcatctaataatttttggctgaatgtcacagatgttgtatgtaggacagtagaaactgaggtaaatagtaattattcctggaaacagccatggttgcccttttgataggccattagcatggggagattgaatccatctaatcaggagttgggctgagtttgtgtttctttgttgccagtgttacctttgctgtaccatagacttaaaattcctctattgttatcttatgcttgaggtaggcactggtttgcccagagaatttttatttttcccagaccacacttgcctttaggcctgtaggcctttcctgtgtgcctgcatctcagggagggtctctctccatgttgttgcctctatgttagtagtagacaactgttattacttggttcttgctgacctggtgagttggggggcaggggttgtcttgggccagcctcagtttttgtcaggccatgaatccctgggtcttgagggtgggattttttagtgatcctgccctcttccactggtagaaggcctttaatgatctgggcccaggatgatttcctgcccttttatcatgggtggaatttttttttccatttccctcactctagtcacagtgaatctttaactgtgtcctgagggcaacagggtttgctgcacttcttttagtggcttaaggattttgttctgtaggggagtagggtttcattggagctttgtgccatttctatgttaacagcagcccccttgcaggcctaccccatggaggtaggctttctccagtcttcttccttgtccccgtgtttcttgagagcactcagtggatgactatggagaagagcctgcaagcagagaccaactacccttaggtctacagctctcatgagtctcccgcactcagcctttagcaattcattaaaaattcttgttgaattcttactgcttgtatagtggcctcatcttccttcctgctgtaccacagatggcccaggagaggcacttgtcttttattatatttcaagctagttggttgctctgtaatcttagctctctgatgggttcgagaaaacttatgtttttgcagattacccagctttgttcttgttataaagatgggagcagtgttctttccagatgtctacatgctaggcagaaactagaagtctggacagtctccatggtctcctactatcagaatatgtgcccttttcagtgtgactttgccacttcacccatcaagaggtagaatctatttcttcaacccctgcaactgagcttggctattttgttggccaatgggacattaacaagtatgatacaagcagaggcttgagaagtgcctgcacaatgaggcttgcccacttttgcagctctttggaatcctgaacccatgtgtggaaaagcctgaactgtgctgttggaaaatgagagcgatcacatggagcagtaatggagcaaagaccagccatcccagttgagataccctacaccaaccagattttcaactgctggacatatgaatgaagctatcctaggcatgcagtcttggtcaaggcaactttggctggcagtctctgagatgaccctgaatgatccccacctcctggtattctcactcttatataatcccctcctcttgagtttggactggaattagtgacttggttctagtgaatagaatgaggcagaggtaatgggatgtcatgttcaagattggttacaaaaagactgtggcttccattttgggtgcttgcttactctctcagatggctcatcataggggaaacctgctgctacatcatgagatagccctgtggaaaggtccacatgagtgaactttgaagcatatcctcccccagtttagcctttagatgaggaccacagccaaatagcttgactgtaagccagatagcttgactcatgagggaccttcagccagaggcatcttttgagccatacgaattcctgacccatagaaactgcaagacaataaatgttgttttaagttgctaaattttagggtaatttgttacacagtaataggttaataatacactggcccagattaggaaggttctgccatccatcccagccatcccaaacaactaccagaataatggattaaaacgttaactgttttaagtcactaagttttgggcagcatgataacaacccagcaaaaagctaactgatacattgattatttattgcatttcttcctccactattcttctctaacagatgaccaatactaataaactactgtgaacactt

SEQ ID NO: 35377 - DNA, 3573 bp, Homo sapiens
  source 1..3573: mol_type = unassigned DNA
ctgcctctgatcatatggacactgtctttccagagttcttggagtctctgcggagtccctgggccagatctcacagtgaaagctgcaggatcttccttctgaccccagcagtccccgttgagtccaccgatcccactggaattataaagttgtcagcaagaaagccccagggctgaagtccaagtccgtcgggaacatgccagctaacgaggacgctccccagccaggggaacatggcagtgcctgtgaggtatcagtgtcatttgaggatgtgactgtggacttcagtagagaggagtggcagcaactggactctactcaaagacgcctgtaccaggatgtaatgttggagaactacagccacctgctctcagtggggttcgaagttcctaaaccagaggtcatcttcaagttggagcaaggagaggggccatggacattggaaggggaagccccacatcagagctgttcagatgggaaatttggaattaagccttcccagaggagaatttctgggaaatctacatttcatagtgaaatggagggtgaagacacactgtgttaggtagaaaaatgctacagatgtcttcatccctgtatatgtgtccttcttcagtctttatttctctttgtgtttcagttaggataatttctattgatctgtcttcaaattcactgatgttttttctctcaccctggctttgtcaagtctactgctgaacccattgaaggcattcttcaactcagttatgttttatttttatttgtaatatttccatttgattcttacaattttcatatatctgctgaaattccccatcttttcatgcatgttcatgttttcccctttaccctttgtcttagtcagtttgagctgctataataaagcaccatagacttggtggcttataaacaacagaaatttattcctcacagttctggagcctggaagtctgagatcagaatctagcaaggttaggtcttggtgacggccctcttcaaggttgcaaactgctcacttcttgcattttcccatgtctacagctagagaactctttgggatcccttttataagggcaccaatcccattcatgagttctccacccacattacctaactaccacccaaaggctccacctcctaataccatcacattgaggattaggattttaacatatgaattttgggggggatgcaatcattcagcccataataccctctaacatattaatcatagttatttttaactccctgtctgatagttccaactactaggtcaactgagtctaggtctgttgttgtcttctcttgctcttttgcatctaataatttttggctgaatgtcacagatgttgtatgtaggacagtagaaactgaggtaaatagtaattattcctggaaacagccatggttgcccttttgataggccattagcatggggagattgaatccatctaatcaggagttgggctgagtttgtgtttctttgttgccagtgttacctttgctgtaccatagacttaaaattcctctattgttatcttatgcttgaggtaggcactggtttgcccagagaatttttatttttcccagaccacacttgcctttaggcctgtaggcctttcctgtgtgcctgcatctcagggagggtctctctccatgttgttgcctctatgttagtagtagacaactgttattacttggttcttgctgacctggtgagttggggggcaggggttgtcttgggccagcctcagtttttgtcaggccatgaatccctgggtcttgagggtgggattttttagtgatcctgccctcttccactggtagaaggcctttaatgatctgggcccaggatgatttcctgcccttttatcatgggtggaatttttttttccatttccctcactctagtcacagtgaatctttaactgtgtcctgagggcaacagggtttgctgcacttcttttagtggcttaaggattttgttctgtaggggagtagggtttcattggagctttgtgccatttctatgttaacagcagcccccttgcaggcctaccccatggaggtaggctttctccagtcttcttccttgtccccgtgtttcttgagagcactcagtggatgactatggagaagagcctgcaagcagagaccaactacccttaggtctacagctctcatgagtctcccgcactcagcctttagcaattcattaaaaattcttgttgaattcttactgcttgtatagtggcctcatcttccttcctgctgtaccacagatggcccaggagaggcacttgtcttttattatatttcaagctagttggttgctctgtaatcttagctctctgatgggttcgagaaaacttatgtttttgcagattacccagctttgttcttgttataaagatgggagcagtgttctttccagatgtctacatgctaggcagaaactagaagtctggacagtctccatggtctcctactatcagaatatgtgcccttttcagtgtgactttgccacttcacccatcaagaggtagaatctatttcttcaacccctgcaactgagcttggctattttgttggccaatgggacattaacaagtatgatacaagcagaggcttgagaagtgcctgcacaatgaggcttgcccacttttgcagctctttggaatcctgaacccatgtgtggaaaagcctgaactgtgctgttggaaaatgagagcgatcacatggagcagtaatggagcaaagaccagccatcccagttgagataccctacaccaaccagattttcaactgctggacatatgaatgaagctatcctaggcatgcagtcttggtcaaggcaactttggctggcagtctctgagatgaccctgaatgatccccacctcctggtattctcactcttatataatcccctcctcttgagtttggactggaattagtgacttggttctagtgaatagaatgaggcagaggtaatgggatgtcatgttcaagattggttacaaaaagactgtggcttccattttgggtgcttgcttactctctcagatggctcatcataggggaaacctgctgctacatcatgagatagccctgtggaaaggtccacatgagtgaactttgaagcatatcctcccccagtttagcctttagatgaggaccacagccaaatagcttgactgtaagccagatagcttgactcatgagggaccttcagccagaggcatcttttgagccatacgaattcctgacccatagaaactgcaagacaataaatgttgttttaagttgctaaattttagggtaatttgttacacagtaataggttaataatacactggcccagattaggaaggttctgccatccatcccagccatcccaaacaactaccagaataatggattaaaacgttaactgttttaagtcactaagttttgggcagcatgataacaacccagcaaaaagctaactgatacattgattatttattgcatttcttcctccactattcttctctaacagatgaccaatactaataaactactgtgaac

SEQ ID NO: 35378 - DNA, 2599 bp, Homo sapiens
  source 1..2599: mol_type = unassigned DNA
agacctggcttctgtactgcgcgcgcacatgcgcgcaaacccggaagcggattatgtggagtgaaagttacaccgtggcggattgacttctaaggactcttggtacatgaggaagaaacccggaaggggaagaggaaagcaaaggcgtcaggaatggttcttcctcaggtattttttctaaatgtgagatcaaggaattaccaccaaaaaaggagagtaatacaggagaaatattccagacagtaatgttggaaagacatgaaagccacgacatacaagatttttgcttcagagaaacccagaaaaatgtacatgactctcagtgtctgtggaaacatgattgaagacattataagcgagtgcgtgtgacctataaggaaagtctcattggtagaagagacatgcatgggagaaaggatgatgcacaaaagcagcctgttaaaaatcagcttggattaaacccgcagtcacatctaccagaactgcagctatttcaagctgaagggaaaatatataaatatgatcacatggaaaaatctgtcaacagtagttccttagtttccccaccccaacgtatttcttctactgtcaaaacccacatttctcatacatatgaatgtaattttgtggattcattattcacacaaaaagagaaagcaaatattgggacagaacactacaaatgtagtgagcgtggcaaggcctttcatcaaggcttacattttactatacatcaaataatccatactaaagagacgcaatttaaatgtgatatatgtggcaagatcttcaataaaaaatcaaaccttgcaagtcatcaaagaattcatactggagagaagccatataaatgtaatgaatgtggcaaggtcttccataatatgtcacaccttgcacagcatcgcaggattcatactggagagaaaccatataaatgtaatgaatgtggcaaggtctttaatcaaatttcacaccttgcacaacatcaaagaattcataccggagagaaaccttataaatgtaatgaatgtggaaaggtcttccatcaaatttcacaccttgcacaacatcggacaattcatactggagaaaaaccttacgaatgtaacaaatgtggcaaggtgttcagtcgcaattcctaccttgtacaacatctgatcattcatactggagagaaaccttacagatgtaatgtatgtggaaaggtcttccatcatatttcacaccttgcacaacatcagagaatccacactggagagaaaccttacaaatgtaatgagtgtggcaaggtcttcagtcacaagtcatccctagtaaatcactggagaattcatactggagagaaaccttacaaatgtaatgagtgtggcaaggtcttcagtcacaagtcatccctagtaaatcactggagaatccacactggagagaaaccttacaaatgtaatgaatgtggcaaggtcttcagtcgcaattcataccttgcccaacatctgataattcatgccggtgagaaaccttataagtgtgatgaatgtgacaaagcattcagtcaaaattcacatcttgtacaacatcacagaatccatactggagagaaaccttacaaatgtgatgaatgtggcaaagtcttcagtcaaaattcataccttgcatatcattggagaattcatactggagaaaaagcttataaatgtaatgaatgtgggaaggtcttcggtctaaactcatccctagcacatcatcggaaaattcacactggagagaaacctttcaaatgtaatgaatgtggcaaagcttttagtatgcgttcaagcctcactaatcatcatgcgatccacactggagagaaacatttcaaatgtaatgaatgtggcaaactcttccgcgacaattcatatcttgtacgtcatcagagatttcatgccggaaagaaatctaacacatgtaattaatgtggcagagtgttcagttagcattaaagccttgtaagacatacaataatttatactggagaaaaactttgcaagtataatgaatgtagcagagcctttagtttttgttcaaggcttaataaccgttagctagaccatagaggacagaaactttactaatgtactgaatgtggcaaggtcttaaggtaaaatctgagaccaggattcttcaaagaattcttgctggtgagaaacctaacaaatgtaatgaatgtggcaaggtcttctggcacaattctcacattgtacaatattgcaaaaattcatgcttgagagaaacaaaaacactgagagtgggaaaccattatgacttcaaacattcatcaacatcagagaatccatactaaagagcatttataataattatatgtgatagagattttccgcaggccaaagtctcactaggcatcaaaaacttttttgatgaaaccatacaaatgtaacgtgcatgcttaagcttttacccaggcatcaaaaccggaacatcacagggtttatactggagagtaactacacaaagataatgtaataagcctttcagtgtaatattcatgattttgtcgtgagagatccactcaataaaaaccaggcaaatgtagtgaatctgg

SEQ ID NO: 35379 - DNA, 1467 bp, Homo sapiens
  source 1..1467: mol_type = unassigned DNA
atgcatgggagaaaggatgatgcacaaaagcagcctgttaaaaatcagcttggattaaacccgcagtcacatctaccagaactgcagctatttcaagctgaagggaaaatatataaatatgatcacatggaaaaatctgtcaacagtagttccttagtttccccaccccaacgtatttcttctactgtcaaaacccacatttctcatacatatgaatgtaattttgtggattcattattcacacaaaaagagaaagcaaatattgggacagaacactacaaatgtagtgagcgtggcaaggcctttcatcaaggcttacattttactatacatcaaataatccatactaaagagacgcaatttaaatgtgatatatgtggcaagatcttcaataaaaaatcaaaccttgcaagtcatcaaagaattcatactggagagaagccatataaatgtaatgaatgtggcaaggtcttccataatatgtcacaccttgcacagcatcgcaggattcatactggagagaaaccatataaatgtaatgaatgtggcaaggtctttaatcaaatttcacaccttgcacaacatcaaagaattcataccggagagaaaccttataaatgtaatgaatgtggaaaggtcttccatcaaatttcacaccttgcacaacatcggacaattcatactggagaaaaaccttacgaatgtaacaaatgtggcaaggtgttcagtcgcaattcctaccttgtacaacatctgatcattcatactggagagaaaccttacagatgtaatgtatgtggaaaggtcttcagtcacaagtcatccctagtaaatcactggagaattcatactggagagaaaccttacaaatgtaatgagtgtggcaaggtcttcagtcacaagtcatccctagtaaatcactggagaatccacactggagagaaaccttacaaatgtaatgaatgtggcaaggtcttcagtcgcaattcataccttgcccaacatctgataattcatgccggtgagaaaccttataagtgtgatgaatgtgacaaagcattcagtcaaaattcacatcttgtacaacatcacagaatccatactggagagaaaccttacaaatgtgatgaatgtggcaaagtcttcagtcaaaattcataccttgcatatcattggagaattcatactggagaaaaagcttataaatgtaatgaatgtgggaaggtcttcggtctaaactcatccctagcacatcatcggaaaattcacactggagagaaacctttcaaatgtaatgaatgtggcaaagcttttagtatgcgttcaagcctcactaatcatcatgcgatccacactggagagaaacatttcaaatgtaatgaatgtggcaaactcttccgcgacaattcatatcttgtacgtcatcagagatttcatgccggaaagaaatctaacacatgtaattaa

SEQ ID NO: 35380 - DNA, 2806 bp, Homo sapiens
  source 1..2806: mol_type = unassigned DNA
gcaaatctggaagcggatcgcgtggagtgacggtcacaccgcggcgaattaatttccaaagactcatgttacatgagaaagccaccaagaagaccaaagaaaaggagacaaggatggctcttcctcagggatgcttgactttcagggatgtggctatagaattctctttggaggagtggaaatgcctgaaccctgcacagagggctttatacagggccgtgatgttggagaactacaggaacctggagtctgtgggattgacttctaaggactcttggtacatgaggaagaaacccggaaggggaagaggaaagcaaaggcgtcaggaatggttcttcctcagggtctattgacattcagggatgtggccatagaattctctcaggaggagtggaaatgcctggaccctgctcagaggactctatacagagatgtgatgttggagaattataggaacctggtctccctgggtattttttctaaatgtgagatcaaggaattaccaccaaaaaaggagagtaatacaggagaaatattccagacagtaatgttggaaagacatgaaagccacgacatacaagatttttgcttcagagaaacccagaaaaatgtacatgactctcagtgtctgtggaaacatgattgaagacattataagcgagtgcgtgtgacctataaggaaagtctcattggtagaagagacatgcatgggagaaaggatgatgcacaaaagcagcctgttaaaaatcagcttggattaaacccgcagtcacatctaccagaactgcagctatttcaagctgaagggaaaatatataaatatgatcacatggaaaaatctgtcaacagtagttccttagtttccccaccccaacgtatttcttctactgtcaaaacccacatttctcatacatatgaatgtaattttgtggattcattattcacacaaaaagagaaagcaaatattgggacagaacactacaaatgtagtgagcgtggcaaggcctttcatcaaggcttacattttactatacatcaaataatccatactaaagagacgcaatttaaatgtgatatatgtggcaagatcttcaataaaaaatcaaaccttgcaagtcatcaaagaattcatactggagagaagccatataaatgtaatgaatgtggcaaggtcttccataatatgtcacaccttgcacagcatcgcaggattcatactggagagaaaccatataaatgtaatgaatgtggcaaggtctttaatcaaatttcacaccttgcacaacatcaaagaattcataccggagagaaaccttataaatgtaatgaatgtggaaaggtcttccatcaaatttcacaccttgcacaacatcggacaattcatactggagaaaaaccttacgaatgtaacaaatgtggcaaggtgttcagtcgcaattcctaccttgtacaacatctgatcattcatactggagagaaaccttacagatgtaatgtatgtggcaaggtcttcagtcacaagtcatccctagtaaatcactggagaattcatactggagagaaaccttacaaatgtaatgagtgtggcaaggtcttcagtcacaagtcatccctagtaaatcactggagaatccacactggagagaaaccttacaaatgtaatgaatgtggcaaggtcttcagtcgcaattcataccttgcccaacatctgataattcatgccggtgagaaaccttataagtgtgatgaatgtgacaaagcattcagtcaaaattcacatcttgtacaacatcacagaatccatactggagagaaaccttacaaatgtgatgaatgtggcaaagtcttcagtcaaaattcataccttgcatatcattggagaattcatactggagaaaaagcttataaatgtaatgaatgtgggaaggtcttcggtctaaactcatccctagcacatcatcggaaaattcacactggagagaaacctttcaaatgtaatgaatgtggcaaagcttttagtatgcgttcaagcctcactaatcatcatgcgatccacactggagagaaacatttcaaatgtaatgaatgtggcaaactcttccgcgacaattcatatcttgtacgtcatcagagatttcatgccggaaagaaatctaacacatgtaattaatgtggcagagtgttcagttagcattaaagccttgtaagacatacaataatttatactggagaaaaactttgcaagtataatgaatgtagcagagcctttagtttttgttcaaggcttaataaccgttagctagaccatagaggacagaaactttactaatgtactgaatgtggcaaggtcttaaggtaaaatctgagaccaggattcttcaaagaattcttgctggtgagaaacctaacaaatgtaatgaatgtggcaaggtcttctggcacaattctcacattgtacaatattgcaaaaattcatgcttgagagaaacaaaaacactgagagtgggaaaccattatgacttcaaacattcatcaacatcagagaatccatactaaagagcatttataataattatatgtgatagagattttccgcaggccaaagtctcactaggcatcaaaaacttttttgatgaaaccatacaaatgtaacgtgcatgcttaagcttttacccaggcatcaaaaccggaacatcacagggtttatactggagagtaactacacaaagataatgtaataagcctttcagtgtaatattcatgattttgtcgtgagagatccactcaataaaaaccaggcaaatgt

SEQ ID NO: 35381 - DNA, 2824 bp, Homo sapiens
  source 1..2824: mol_type = unassigned DNA
agacctggcttctgtactgcgcgcgcacatgcgcgcaaacccggaagcggattatgtggagtgaaagttacaccgtggcggattgacttctaaggactcttggtacatgaggaagaaacccggaaggggaagaggaaagcaaaggcgtcaggaatggttcttcctcagggtctattgacattcagggatgtggccatagaattctctcaggaggagtggaaatgcctggaccctgctcagaggactctatacagagatgtgatgttggagaattataggaacctggtctccctgggctggagtgcagtggcacaatctcggctcaccaccacctccgcctcccgggttcaagcgattctcccgcctcagcctcagaagttgctggaattacaggtattttttctaaatgtgagatcaaggaattaccaccaaaaaaggagagtaatacaggagaaatattccagacagtaatgttggaaagacatgaaagccacgacatacaagatttttgcttcagagaaacccagaaaaatgtacatgactctcagtgtctgtggaaacatgattgaagacattataagcgagtgcgtgtgacctataaggaaagtctcattggtagaagagacatgcatgggagaaaggatgatgcacaaaagcagcctgttaaaaatcagcttggattaaacccgcagtcacatctaccagaactgcagctatttcaagctgaagggaaaatatataaatatgatcacatggaaaaatctgtcaacagtagttccttagtttccccaccccaacgtatttcttctactgtcaaaacccacatttctcatacatatgaatgtaattttgtggattcattattcacacaaaaagagaaagcaaatattgggacagaacactacaaatgtagtgagcgtggcaaggcctttcatcaaggcttacattttactatacatcaaataatccatactaaagagacgcaatttaaatgtgatatatgtggcaagatcttcaataaaaaatcaaaccttgcaagtcatcaaagaattcatactggagagaagccatataaatgtaatgaatgtggcaaggtcttccataatatgtcacaccttgcacagcatcgcaggattcatactggagagaaaccatataaatgtaatgaatgtggcaaggtctttaatcaaatttcacaccttgcacaacatcaaagaattcataccggagagaaaccttataaatgtaatgaatgtggaaaggtcttccatcaaatttcacaccttgcacaacatcggacaattcatactggagaaaaaccttacgaatgtaacaaatgtggcaaggtgttcagtcgcaattcctaccttgtacaacatctgatcattcatactggagagaaaccttacagatgtaatgtatgtggaaaggtcttccatcatatttcacaccttgcacaacatcagagaatccacactggagagaaaccttacaaatgtaatgagtgtggcaaggtcttcagtcacaagtcatccctagtaaatcactggagaattcatactggagagaaaccttacaaatgtaatgagtgtggcaaggtcttcagtcacaagtcatccctagtaaatcactggagaatccacactggagagaaaccttacaaatgtaatgaatgtggcaaggtcttcagtcgcaattcataccttgcccaacatctgataattcatgccggtgagaaaccttataagtgtgatgaatgtgacaaagcattcagtcaaaattcacatcttgtacaacatcacagaatccatactggagagaaaccttacaaatgtgatgaatgtggcaaagtcttcagtcaaaattcataccttgcatatcattggagaattcatactggagaaaaagcttataaatgtaatgaatgtgggaaggtcttcggtctaaactcatccctagcacatcatcggaaaattcacactggagagaaacctttcaaatgtaatgaatgtggcaaagcttttagtatgcgttcaagcctcactaatcatcatgcgatccacactggagagaaacatttcaaatgtaatgaatgtggcaaactcttccgcgacaattcatatcttgtacgtcatcagagatttcatgccggaaagaaatctaacacatgtaattaatgtggcagagtgttcagttagcattaaagccttgtaagacatacaataatttatactggagaaaaactttgcaagtataatgaatgtagcagagcctttagtttttgttcaaggcttaataaccgttagctagaccatagaggacagaaactttactaatgtactgaatgtggcaaggtcttaaggtaaaatctgagaccaggattcttcaaagaattcttgctggtgagaaacctaacaaatgtaatgaatgtggcaaggtcttctggcacaattctcacattgtacaatattgcaaaaattcatgcttgagagaaacaaaaacactgagagtgggaaaccattatgacttcaaacattcatcaacatcagagaatccatactaaagagcatttataataattatatgtgatagagattttccgcaggccaaagtctcactaggcatcaaaaacttttttgatgaaaccatacaaatgtaacgtgcatgcttaagcttttacccaggcatcaaaaccggaacatcacagggtttatactggagagtaactacacaaagataatgtaataagcctttcagtgtaatattcatgattttgtcgtgagagatccactcaataaaaaccaggcaaatgtagtgaatctgg

SEQ ID NO: 35382 - DNA, 3125 bp, Homo sapiens
  source 1..3125: mol_type = unassigned DNA
tttgtatttctgaccacctcaatatccacagtactcagtccccatgctactctcaccatgtaaggaaagacacttgcttatctgtaggacggctttctcagaacacagcctaaaccgatgtctgctctgtacgatggtggacataccgctgtctaggaaggattaccaagtgacatggtcagcaacacaaccccgttcttgtagctcccttgaaatgattcctttctatgcatctatttgccatgtcgtgtcgtgttgtgcaggtttgtcgtgtgggtatatgtgtgccgtggtggtttgctgcacccatcaacccatcatctaggttttaagccctgcatgcattaggtatctttcccaatgttctccctccccttgccccctaccccctgataggccctgctctatgttgcttccctccctgtgaccatgtgttctaatcgttcaactcccacttatgagtgagaacatgcggtgtttggttttctgttcctgtgttagtttgctgagaacgatggcttccagctccatccatgtccctacaaaggacatgatctcattcttttttttctttttccgagatggagtttttgctcttgttgcccaggctggagtgcagtggcacaatctcggctcaccaccacctccgcctcccgggttcaagcgattctcccgcctcagcctcagaagttgctggaattacaggtattttttctaaatgtgagatcaaggaattaccaccaaaaaaggagagtaatacaggagaaatattccagacagtaatgttggaaagacatgaaagccacgacatacaagatttttgcttcagagaaacccagaaaaatgtacatgactctcagtgtctgtggaaacatgattgaagacattataagcgagtgcgtgtgacctataaggaaagtctcattggtagaagagacatgcatgggagaaaggatgatgcacaaaagcagcctgttaaaaatcagcttggattaaacccgcagtcacatctaccagaactgcagctatttcaagctgaagggaaaatatataaatatgatcacatggaaaaatctgtcaacagtagttccttagtttccccaccccaacgtatttcttctactgtcaaaacccacatttctcatacatatgaatgtaattttgtggattcattattcacacaaaaagagaaagcaaatattgggacagaacactacaaatgtagtgagcgtggcaaggcctttcatcaaggcttacattttactatacatcaaataatccatactaaagagacgcaatttaaatgtgatatatgtggcaagatcttcaataaaaaatcaaaccttgcaagtcatcaaagaattcatactggagagaagccatataaatgtaatgaatgtggcaaggtcttccataatatgtcacaccttgcacagcatcgcaggattcatactggagagaaaccatataaatgtaatgaatgtggcaaggtctttaatcaaatttcacaccttgcacaacatcaaagaattcataccggagagaaaccttataaatgtaatgaatgtggaaaggtcttccatcaaatttcacaccttgcacaacatcggacaattcatactggagaaaaaccttacgaatgtaacaaatgtggcaaggtgttcagtcgcaattcctaccttgtacaacatctgatcattcatactggagagaaaccttacagatgtaatgtatgtggaaaggtcttccatcatatttcacaccttgcacaacatcagagaatccacactggagagaaaccttacaaatgtaatgagtgtggcaaggtcttcagtcacaagtcatccctagtaaatcactggagaattcatactggagagaaaccttacaaatgtaatgagtgtggcaaggtcttcagtcacaagtcatccctagtaaatcactggagaatccacactggagagaaaccttacaaatgtaatgaatgtggcaaggtcttcagtcgcaattcataccttgcccaacatctgataattcatgccggtgagaaaccttataagtgtgatgaatgtgacaaagcattcagtcaaaattcacatcttgtacaacatcacagaatccatactggagagaaaccttacaaatgtgatgaatgtggcaaagtcttcagtcaaaattcataccttgcatatcattggagaattcatactggagaaaaagcttataaatgtaatgaatgtgggaaggtcttcggtctaaactcatccctagcacatcatcggaaaattcacactggagagaaacctttcaaatgtaatgaatgtggcaaagcttttagtatgcgttcaagcctcactaatcatcatgcgatccacactggagagaaacatttcaaatgtaatgaatgtggcaaactcttccgcgacaattcatatcttgtacgtcatcagagatttcatgccggaaagaaatctaacacatgtaattaatgtggcagagtgttcagttagcattaaagccttgtaagacatacaataatttatactggagaaaaactttgcaagtataatgaatgtagcagagcctttagtttttgttcaaggcttaataaccgttagctagaccatagaggacagaaactttactaatgtactgaatgtggcaaggtcttaaggtaaaatctgagaccaggattcttcaaagaattcttgctggtgagaaacctaacaaatgtaatgaatgtggcaaggtcttctggcacaattctcacattgtacaatattgcaaaaattcatgcttgagagaaacaaaaacactgagagtgggaaaccattatgacttcaaacattcatcaacatcagagaatccatactaaagagcatttataataattatatgtgatagagattttccgcaggccaaagtctcactaggcatcaaaaacttttttgatgaaaccatacaaatgtaacgtgcatgcttaagcttttacccaggcatcaaaaccggaacatcacagggtttatactggagagtaactacacaaagataatgtaataagcctttcagtgtaatattcatgattttgtcgtgagagatccactcaataaaaaccaggcaaatgt

SEQ ID NO: 35383 - DNA, 2940 bp, Homo sapiens
  source 1..2940: mol_type = unassigned DNA
agacctggcttctgtactgcgcgcgcacatgcgcgcaaacccggaagcggattatgtggagtgaaagttacaccgtggcggattgacttctaaggactcttggtacatgaggaagaaacccggaaggggaagaggaaagcaaaggcgtcaggaatggttcttcctcagggtctattgacattcagggatgtggccatagaattctctcaggaggagtggaaatgcctggaccctgctcagaggactctatacagagatgtgatgttggagaattataggaacctggtctccctgggacggctttctcagaacacagcctaaaccgatgtctgctctgtacgatggtggacataccgctgtctaggaaggattaccaagtgacatgatggagtttttgctcttgttgcccaggctggagtgcagtggcacaatctcggctcaccaccacctccgcctcccgggttcaagcgattctcccgcctcagcctcagaagttgctggaattacaggtattttttctaaatgtgagatcaaggaattaccaccaaaaaaggagagtaatacaggagaaatattccagacagtaatgttggaaagacatgaaagccacgacatacaagatttttgcttcagagaaacccagaaaaatgtacatgactctcagtgtctgtggaaacatgattgaagacattataagcgagtgcgtgtgacctataaggaaagtctcattggtagaagagacatgcatgggagaaaggatgatgcacaaaagcagcctgttaaaaatcagcttggattaaacccgcagtcacatctaccagaactgcagctatttcaagctgaagggaaaatatataaatatgatcacatggaaaaatctgtcaacagtagttccttagtttccccaccccaacgtatttcttctactgtcaaaacccacatttctcatacatatgaatgtaattttgtggattcattattcacacaaaaagagaaagcaaatattgggacagaacactacaaatgtagtgagcgtggcaaggcctttcatcaaggcttacattttactatacatcaaataatccatactaaagagacgcaatttaaatgtgatatatgtggcaagatcttcaataaaaaatcaaaccttgcaagtcatcaaagaattcatactggagagaagccatataaatgtaatgaatgtggcaaggtcttccataatatgtcacaccttgcacagcatcgcaggattcatactggagagaaaccatataaatgtaatgaatgtggcaaggtctttaatcaaatttcacaccttgcacaacatcaaagaattcataccggagagaaaccttataaatgtaatgaatgtggaaaggtcttccatcaaatttcacaccttgcacaacatcggacaattcatactggagaaaaaccttacgaatgtaacaaatgtggcaaggtgttcagtcgcaattcctaccttgtacaacatctgatcattcatactggagagaaaccttacagatgtaatgtatgtggaaaggtcttccatcatatttcacaccttgcacaacatcagagaatccacactggagagaaaccttacaaatgtaatgagtgtggcaaggtcttcagtcacaagtcatccctagtaaatcactggagaattcatactggagagaaaccttacaaatgtaatgagtgtggcaaggtcttcagtcacaagtcatccctagtaaatcactggagaatccacactggagagaaaccttacaaatgtaatgaatgtggcaaggtcttcagtcgcaattcataccttgcccaacatctgataattcatgccggtgagaaaccttataagtgtgatgaatgtgacaaagcattcagtcaaaattcacatcttgtacaacatcacagaatccatactggagagaaaccttacaaatgtgatgaatgtggcaaagtcttcagtcaaaattcataccttgcatatcattggagaattcatactggagaaaaagcttataaatgtaatgaatgtgggaaggtcttcggtctaaactcatccctagcacatcatcggaaaattcacactggagagaaacctttcaaatgtaatgaatgtggcaaagcttttagtatgcgttcaagcctcactaatcatcatgcgatccacactggagagaaacatttcaaatgtaatgaatgtggcaaactcttccgcgacaattcatatcttgtacgtcatcagagatttcatgccggaaagaaatctaacacatgtaattaatgtggcagagtgttcagttagcattaaagccttgtaagacatacaataatttatactggagaaaaactttgcaagtataatgaatgtagcagagcctttagtttttgttcaaggcttaataaccgttagctagaccatagaggacagaaactttactaatgtactgaatgtggcaaggtcttaaggtaaaatctgagaccaggattcttcaaagaattcttgctggtgagaaacctaacaaatgtaatgaatgtggcaaggtcttctggcacaattctcacattgtacaatattgcaaaaattcatgcttgagagaaacaaaaacactgagagtgggaaaccattatgacttcaaacattcatcaacatcagagaatccatactaaagagcatttataataattatatgtgatagagattttccgcaggccaaagtctcactaggcatcaaaaacttttttgatgaaaccatacaaatgtaacgtgcatgcttaagcttttacccaggcatcaaaaccggaacatcacagggtttatactggagagtaactacacaaagataatgtaataagcctttcagtgtaatattcatgattttgtcgtgagagatccactcaataaaaaccaggcaaatgtagtgaatctgg

SEQ ID NO: 35384 - DNA, 2633 bp, Homo sapiens
  source 1..2633: mol_type = unassigned DNA
ggcttctgtactgcgcgcgcacatgcgcgcaaacccggaagcggattatgtggagtgaaagttacaccgtggcggaatggggtgtattgattctgagcaataaacaacatatttttaacattcaggattgacttctaaggactcttggtacatgaggaagaaacccggaaggggaagaggaaagcaaaggcgtcaggaatggttcttcctcaggtattttttctaaatgtgagatcaaggaattaccaccaaaaaaggagagtaatacaggagaaatattccagacagtaatgttggaaagacatgaaagccacgacatacaagatttttgcttcagagaaacccagaaaaatgtacatgactctcagtgtctgtggaaacatgattgaagacattataagcgagtgcgtgtgacctataaggaaagtctcattggtagaagagacatgcatgggagaaaggatgatgcacaaaagcagcctgttaaaaatcagcttggattaaacccgcagtcacatctaccagaactgcagctatttcaagctgaagggaaaatatataaatatgatcacatggaaaaatctgtcaacagtagttccttagtttccccaccccaacgtatttcttctactgtcaaaacccacatttctcatacatatgaatgtaattttgtggattcattattcacacaaaaagagaaagcaaatattgggacagaacactacaaatgtagtgagcgtggcaaggcctttcatcaaggcttacattttactatacatcaaataatccatactaaagagacgcaatttaaatgtgatatatgtggcaagatcttcaataaaaaatcaaaccttgcaagtcatcaaagaattcatactggagagaagccatataaatgtaatgaatgtggcaaggtcttccataatatgtcacaccttgcacagcatcgcaggattcatactggagagaaaccatataaatgtaatgaatgtggcaaggtctttaatcaaatttcacaccttgcacaacatcaaagaattcataccggagagaaaccttataaatgtaatgaatgtggaaaggtcttccatcaaatttcacaccttgcacaacatcggacaattcatactggagaaaaaccttacgaatgtaacaaatgtggcaaggtgttcagtcgcaattcctaccttgtacaacatctgatcattcatactggagagaaaccttacagatgtaatgtatgtggaaaggtcttccatcatatttcacaccttgcacaacatcagagaatccacactggagagaaaccttacaaatgtaatgagtgtggcaaggtcttcagtcacaagtcatccctagtaaatcactggagaattcatactggagagaaaccttacaaatgtaatgagtgtggcaaggtcttcagtcacaagtcatccctagtaaatcactggagaatccacactggagagaaaccttacaaatgtaatgaatgtggcaaggtcttcagtcgcaattcataccttgcccaacatctgataattcatgccggtgagaaaccttataagtgtgatgaatgtgacaaagcattcagtcaaaattcacatcttgtacaacatcacagaatccatactggagagaaaccttacaaatgtgatgaatgtggcaaagtcttcagtcaaaattcataccttgcatatcattggagaattcatactggagaaaaagcttataaatgtaatgaatgtgggaaggtcttcggtctaaactcatccctagcacatcatcggaaaattcacactggagagaaacctttcaaatgtaatgaatgtggcaaagcttttagtatgcgttcaagcctcactaatcatcatgcgatccacactggagagaaacatttcaaatgtaatgaatgtggcaaactcttccgcgacaattcatatcttgtacgtcatcagagatttcatgccggaaagaaatctaacacatgtaattaatgtggcagagtgttcagttagcattaaagccttgtaagacatacaataatttatactggagaaaaactttgcaagtataatgaatgtagcagagcctttagtttttgttcaaggcttaataaccgttagctagaccatagaggacagaaactttactaatgtactgaatgtggcaaggtcttaaggtaaaatctgagaccaggattcttcaaagaattcttgctggtgagaaacctaacaaatgtaatgaatgtggcaaggtcttctggcacaattctcacattgtacaatattgcaaaaattcatgcttgagagaaacaaaaacactgagagtgggaaaccattatgacttcaaacattcatcaacatcagagaatccatactaaagagcatttataataattatatgtgatagagattttccgcaggccaaagtctcactaggcatcaaaaacttttttgatgaaaccatacaaatgtaacgtgcatgcttaagcttttacccaggcatcaaaaccggaacatcacagggtttatactggagagtaactacacaaagataatgtaataagcctttcagtgtaatattcatgattttgtcgtgagagatccactcaataaaaaccaggcaaatgt

SEQ ID NO: 35385 - DNA, 9404 bp, Homo sapiens
  source 1..9404: mol_type = unassigned DNA
atggaggttccagaacccacctgccctgcccctcctgcgagggaccagccagctcccactcctggccctccaggggccccaggtggccaggcctcacctcacctgaccctgggccctgtccttctgccgccagagcagggcctggccccccccactgtgttcctgaaggccctgcccatcccactgtaccacacggtgcctcccgggggcctccagccccgcgccccgctagtgacgggcagcctagatgggggcaacgtgcccttcatactcagccctgtgctgcagcctgaagggcctggccccacccaggtggggaagccggcggcccctacgctgacggtgaacatcgtgggcactctgcctgtcctgtcgccgggcctgggccccacgctgggcagcccaggcaaggtgcggaatgcgggcaagtacctgtgtccgcactgtggtcgcgactgcctgaagcccagtgttctagagaagcacatccggtcccacacgggtgagaggcccttcccgtgtgccacctgcggcatcgcctttaagacccagagcaatctctacaagcacaggcggacgcagacgcacctcaacaactcccggctgtcctcagagtccgagggcgccgggggcggcctcctggaggaaggggacaaggccggagagccccccagaccagagggcaggggcgagagcaggtgccaggggatgcacgaaggcgcctcggagagacccctttctccgggtgcccacgtgcccctacttgccaagaacctggatgtgaggaccgaagctgctccctgtccagggtccgcatttgccgacagagaggctccttgggactctgcccccatggcgtcacctgggctcccagcggccagcacacaaccctggcgtaagttgccagagcagaagtcgccgaccgccgggaagccgtgcgccctgcagcggcagcaggcgacggcagcggagaagccctgggatgccaaggcccccgagggccggctgcggaagtgtgagagcaccgactcggggtacctgtcgcgctccgacagcgcggagcagccgcatgcgccctgcagccccctgcacagcctttcggagcacagcgccgagtccgagggggagggcggcccgggcccggggccaggggtcgcaggggccgagcccggggcgcgagaagccggcctggagctggagaagaagcggctggaggagcgcatcgcccagctcatctcccacaaccaggcggtggtggacgatgcccagctggacaacgtgcggccccggaagaccgggctgtccaaacagggcagcatcgacctgcccacgccctacacctacaaggactccttccactttgacatccgcgcgctggagccaggccgtaggagggccccgggccccgtgcgctccacctggacgcccccagacaagtctcggcccctcttcttccactccgtccccactcagctctccaccaccgtggaatgtgtccccgtcaccaggagcaactcgctgcccttcgtcgagggctccaggacgtggctggagcccagggagccccgggacccctggtccaggacgcagaagcctctgagccccaggcccggcccagcccgcctgggctgccgctcgggactaagctcgactgacgttcccagtgggcatccccgggccctggtcagacaggccgcggtggaggacctgccaggcacccccattggcgatgccctggtgcccgcagaggacacagacgcaaagagaactgctgcgcgggaggccatggccggcaagggcagagcgggcggcaggaagtgcggccagagaaggctgaagatgttctcccaggagaagtggcaggtgtacggggatgagacgttcaaaaggatctaccagaaaatgaaagccagtccccatggaggcaagaaagccagggaggtgggaatgggcagtggggcagaactgggctttcctctgcagaaagaggcagcagggagctcaggcacagtccccacccaagacaggaggacccctgtccatgaggacatatccgcaggggcaacgccagagccttggggaaatccaccagccctggaggcctccttggtgactgaacccactaagcatggggagacggtggccaggagaggagacagtgaccgacccagggtggaagaggctgtgtcatcccctgcactgggtggcagagacagtccctgttcaggcagtaggagccccctggtctctccaaatgggaggctggaactggggtggcagatgcccccagcacctggccccctcaaagggggtgatgtagaggctcccaggccagtttggccggaccccaagctggaaggaggtgcccgaggtgtgggggatgttcaggagacctgcctgtgggcccagactgtcctgagatggcccagcaggggctcaggggaggacaagctcccctcagagaggaagaagctgaaagtggaggacctgcacagctggaagcaaccagagcctgtgagcgcagagaccccaggtgggcccacgcagcctgcctctttgtcatcccagaagcaggatgccgatcccggggaggtgccagggggctcaaaggagagtgccaggcaggtgggcgagcctctggagtcctctggagcctccttggctgctgcttctgttgccctgaagagggtggggccaagggacaaggctaccccactgcatcctgcagccccagcccccgcagagcacccctcgctggccaccccacctcaggctcctagagtgctctctgccctggcagataatgccttttcccccaagtacctcctcaggttacctcaggcagagacccccttaccactgcccattccctggggaccaaggcacagccaggactctctctgcagcagtgggtggcctgaagaacgggcatcatttgttgggtcaggactggggacccctctttctcccagcccagcctcaggcccctccccaggtgaggcggacagcatcctggaggaccccagctgttccaggccacaggatgggagaaaaggggcacagttggggggggacaagggggacaggatggccactagcaggccagcagccagggagttgcccatctcagcaccaggggctcccagggaggctacctcctccccgcccactccaacgtgtgaggcacacttagttcaggacatggagggtgacagccaccgtatccatcgcctctgcatgggcagcactttggcaagggccaggctctctggggatgtcctgaatccctgggtacccaactgggagctgggggagcctcctgggaatgccccagaagatccttcttcagggcccctggtgggccccgacccgtgttcccccctccagcctggctccttcctcactgccctcactcggcctcagggtgtgcccccaggctggccagagctggccttgtcttcccactcagggacgtcccggagccacagcacccgcagtccccacagcacccaaaacccctttccctcactgaaggctgagccgcggctcacgtggtgttgcctgagccgcagtgtccctctgcccgcggagcagaaggcaaaggcggcatctgtgtacttggcggtgcactttcctggtagcagcctccgagatgagggtcccaatggccctcctgggagcaatggaggatggacctggacaagccctggagaaggagggccggcgcagatgtccaagttctcctacccaacagtcccaggggtgatgccccagcaccaggtgtctgagccagaatggaagaaaggcctgccttggagggcaaagatgtctcgtgggaacagcaagcagagaaaactgaagatcaaccctaaaaggtacaaagggaatttcttgcagagctgtgttcagctgagagccagtagacttcgcacaccaacctgggtgcgaagaagaagccgccaccctcccgcacttgagggactgaagccatgcaggacccctgggcagacctcttcagaaatagcaggtctgaatctgcaagaggagccatcttgtgccacctcagaatcacctccttgttgtgggaaggaagagaagaaggaaggtgactgcagacaaaccttaggaaccctctctcttggtacaagttcaagaattgtcagggaaatggacaaacgaactgtgaaggatatttctccatctgctggtgagcatggtgactgtactactcacagcactgctgccacatcaggattatctctgcaatctgacacctgcctggcagtggttaatgacgtgcctctaccccctggcaaaggtcttgaccttgggttgctggagactcagctgctggcctcccaggattcagtctcaacagatcccaaaccatacatcttctcagatgctcaaaggccttcttcctttgggtccaaaggaacttttccccaccatgacattgctacctctgtggctgccgtttgtatttctctgccagtgagaacagatcacatagcccaggaaattcacagtgctgaatcacgagaccacagccagactgcagggaggactctgacatcaagctccccagacagcaaagtcacagaagagggcagagcacagaccctcttgccagggagaccttcatctggacaaagaatttcagattcggttccactggagtcaactgaaaaaactcatcttgaaataccagcttcaggaccaagttcagctagttcacaccacaaggaagggagacacaagacgttttttccttccagaggccagtatgggtgtggggaaatgactgtcccctgcccctctttaggaagtgacggtaggaaacgtcaggtatctggattaatcactcggaaagattctgtggttccttctaagccagagcagcccatagaaattcctgaagccccttctaaatccctcaagaagaggagtctggaaggaatgagaaagcaaactcgagtagagttcagtgacaccagcagcgacgatgaagaccgattagttatagaaatatgaagcttccagagaaacatggtgtctggtcaaaaagactgttgacgcttcacaagtaaatgttgtcaggctggcggaagaactaaactctatctgtgaaacacctacagattaggaaagccattttgagttatttacaagccaactccaaccaacttctgacccccaactcagccgcagcgttccccagctccccttgggagtgctctgctcatcttcaaatggtgccaggcagggcagacatggcaaggaagcaaactctgcaaatggtcaacgtgcacagtgactgggccttgactcccagcctcgtcttctgcacctgtcccccactgcctctctgcaatcaaatggcactaaccaagaaagccaccatcaacacatttctccacaagtggaccccacacagtcgaggcaactggctttctccattagtaaactgaggatttgcttccaaggtggagagcacacttgggataattggagtagcttgacaaagagacgggggtgtgaactgggcacaaagatacttctgttcattttggagacaaaattcagatacattaaaaaactgaagcttgttcagagtaattcacgtccttggtggagttgtaaatacacttcaaaatgcctatgatccggtgacatgctgattacttttaaatgttgcacaaatggtcaatgcttatttatggtcagatgatgcaagcacatgctcttgtgcctggtgcgtttgctgtggagatctctgagactgtcggtttttctagttcttgcaaaggaacggtgttaaaagttaatagaactgtctctctgtaatgagtcattttttgagagggaaaaattcacttattttcctctgattcttcttgtcatattgtgctctgagcaatttcaattagagggttacattttagtaatctgtacagcttcaactgatgcctgctcgtcgtgacgggagccttttagatttccttcagaagcttcaaggatacaaaactaattggagttttgacgctgttttacatctcggtaattttattttcggggcttagtgttactttgctgtcaaattaaatcagcctctgtattgtgcacgtcagaactgcacagagaaaattccccagtattccaagccggtgcgcccctgtgcagaagaaaacagatctacgtcagccagcccggggggcaaagcctcagttccactgccttcctctccctctccttccacgggagaggagaaacttaaagaggtttacattgctgcatttcaataaaattttatacttgcttttggtatgattttgtacaatttgaaatttgtagctgagctcttttggtgtaactttgatgtaatgatgttcatatgacatcttgtacttcagagacacagcagcaatgcagagcatctcacacatgtgaatacacttcagtcagtctgtgcctgtgactaagtatggtcaaatttcaagtatcttcatgtgaattttccaattttggtgtttttcatagaaaacttcaatgccagaccagcttccctggttacttagcatatatttgtgaccatttcatatgcactcataaatatccaaggatttcaggcccagccaagaaaaacataagaagggaggtaaaaaggatgttggacattgacttagtgtactttttaaacccaacaaaagcgatgtggtgattatctcccttttcgaaggattcatgccactgtaatgagagaggcagtgtaggcaaatggtctgagccttggatggagattgaagtcctgactttagctgggaaatcttggttaagagtctttctgtaccttagtttccctaagtgagaataagagagttggacaagacgaatgtatctccaggttccaatttttctgagaatggttgatagagaagctgctctctccttaaaatgcatggactcaatggcttgaagatattccccatggggaaccattgccacggaggccttgcatgcaagaagtttgggtggggacagtgaggaactgaaacacaagcaccttccaccaattattgctgtgaagaacctgagcctgaagaagctccatctaattttttccccagagttccagattttagggtgcaatcatccagcctatacatgtggctcatagttcaaaaaattaaaagcaaaaccagaactctccagtaggaatggagaaaacctatctgtaggctgaactggctcctttgtcttaggaggcactggtcaggggaaaaaagctgtcttccagacccctcctttctgggtggctactgtggaatcaacggggtcactggctgtaaatcagtaagtcatagctccaaacagcaccaacttcaggatgatggtggaagctctgtccctataggagccaccgttgccagctgtcacatcccaacctaggtcaaatatggcggaatattgatttcgtctctaactccctgtatctcttacaaaggtaaagcaggtagcgaagccaccttgcttccctggtctttgcctagtggctggcaatgtttacaagtgtaccttactttatatcaacatgaatttgtgaaaaagctgtatgtcaatggattttttaaaaattaaaaatgtattttgaatgaccctaagggagctggctctttaaaagcatcctaaggtaaagattttttttaaatgaagaatctttttataaagcaatgaacaatctctgattttataaatcttaattttcctatgggttttcttaaagtgaaatacaattataagaatacattttaagggtaacattaacaacctagaacccagtttgggttactaaaaataaaatgtcagtattatcaattgataactaccacagttttatactctgcaagtgtgtactgcatgatggttaaggaaaaacaaatttattttagaacaaagcaaaccagagtttaaagatcagggatttccttctttccccagtgctaattttcccagtgttaattttattatatctttaggtaagggtcttaaccaactgatgcctcagtttcttccacagagaatagttagagggatgctgtcatgaactaagggaagggcactgaatttttttttgccaatatcaaaagtgacatttccccatgatgttcaagactcaccaggtttctctctccacctgtacctacacccagctagatcttgtcgttaaagatgtatggagggaagaggtttcaatccttccctccttggcaacctacattgttaagtgactcaaagtcatgtgatttttggtggacaactggaatcctccttcttgtaaaacacattgaaaaacagctcatctctcctgttaggcttaacccttgagatttgagacaaagctaataatcccctttggttcacatctcacagtaaccaggagaacctatggttcatttgccaagtgattaaaaaaaaagatggaggagggtgtctctgaattttaatggaaacactgccaatagcatggtgggtaacctagggcaagacagactttttcttcctgaaatcactcttctaaagctgagaccggaagaggaaccttgcagaagtgcactgtgaccacagttcttggcatgaaagataaacaatttgcagtctcatgccaaaaagtatttccttgcatttacattcattacttagaatgatcacattattcatttttttccccagcacagaaatttgcattttgcacagaatttgcctggtgcagcagatctttatagttatggaaactgtcatcattatcggaatgtgctgctgctcaactccccagacataatttaatatggtgaggagaatatgacctgcctggctctatgggtgatcatatttctactgctgcagcaagctgggcttgtgtatttttcctcacttcagttgttcttcccatagttcatgtagggaggcactttggcttttgaaacactacatttctcaatatttaagcacaatttattgtccttatttttcagaacccattaaatataagggtcagaacctagaaaatcttatgtgctggatttctaccctgtatgattcttttcatccatgctttgcacttacgtaggaatatacataatttggtctgaagaagtataggaacagttgagcacattacttcaccactggaagaataggaaccagggaaaaacatcagcctctgccacttggagcactagaggatgacggaatgtcttgtatatgcggtcaactgttcaggatttactactcaattggttgttcacaatcagggaaatgattggcttcttggttgtttgttgaactttctttctttatatggttaaattattttgttttgataaaaataaaacttaaaatgcaaa

SEQ ID NO: 35386 - DNA, 1529 bp, Homo sapiens
  source 1..1529: mol_type = unassigned DNA
gctctaggtcttgttttccctgctttgtgttttctgctcgtggacgcccagcctctgtggccctgtggcctgcaggtattgggagatccacagctaagacgccgggaccccctggaagcctagaaatgggaccattgacatttagggatgtggccatagaattctctctgaaggagtggcaatgcctggacactgcacagcggaatttatatagaaatgtgatgttagagaactacagaaacctggtcttcctgggtattactgtttctaagccagacctgatcacttgtctggagcaagggaaagaggcctggagtatgaagagacatgagatcatggtggccaaacccacagaatcttactctgtcacccagtctggaatgcagtagcaagattttggcccactgcagcctcaaccttctggggtcaagtgattgttccacctcagcctcccgagtagcttggactacagacatgcagtactatgcctggctaattttttgattatttgtagagacagagtctcactttgttgcccagtctagtctcaaacttctggctccaaatgatcctcctaccttggtctcccaaagtgttgggattataggtatgagcctgttcacccagccagtattcttaaatttaataagatttgttatgtgtcctaacagaatacacaaggtgcaaataagaatgttgtgtattctcttgcttttgactgaaaagttttgtacatgtctgttaatcctagttggtctgtgatgtggtttagatgttcgtgttcttcaaatcttatgctgcaatgtaatcctcactgttggatgtggaacctggtgggagatgtttagatcatggggcaaatttctcatgaatggctttgtactatcctcttggtaatcaaaaagtttacactctgttaattcagatgagagctgcctcattaaaagaacctggccccttcacctcacatttggttctgtcttttactatgtgatatgtccagttactgttggccttccaccattgtggaagcttactgaaaccttccaccagaggcagatgccggcacacacttcttgtacagtctgcccaacgatgaaccaaacaagcctttttatttataaattatccactctcaggtattcctctatgtgcaaaataatatattctgtaacgttgtctaagttttctgttttcttattgatcttttgtctgaattttctatttattattaaaaatggggtcttgatgtctacaattattatgttgctatgtatttcttgtttcacttttgtcaatatttgctttacgtattttggagccctaatgttgtatatacatatacacataaataaataggcataatagttttagattcctggtaaattgatccattttactattgtataatatcagtctttgtctcatgctagtacttgacttaaagcatataatgtctaatataattatgagtgtcttactcaattgtggttatatttgcatgtaataaaaagtttttccattctgtt

SEQ ID NO: 35387 - DNA, 2331 bp, Homo sapiens
  source 1..2331: mol_type = unassigned DNA
ctttgtctctcgctgcagcctgagctctaggtcttgttttccctgctttgtgttttctgctcgtggacgcccagcctctgtggccctgtggcctgcaggtattgggagatccacagctaagacgccgggaccccctggaagcctagaaatgggaccattgacatttagggatgtggccatagaattctctctgaaggagtggcaatgcctggacactgcacagcggaatttatatagaaatgtgatgttagagaactacagaaacctggtcttcctgggtattactgtttctaagccagacctgatcacttgtctggagcaagggaaagaggcctggagtatgaagagacatgagatcatggtggccaaacccacagttatgtgttctcattttgcccaagacctttggccggagcagaatataaaagattctttccaaaaagtgacactgaaaagatatggaaaatgtagacatgaaaatttaccattaagaaaaggctgtgaaagtatggatgagtgtaagatgcacaaaggaggttgtaatggacttaaccaatgtctcacagctacccagagcaaaatatttcaatgtgataaatatgtaaaagtcgctcataaattttcaaattcaaacagacatgagataagacatactaaaaagaaacctttcaaatgtacaaaatgtggcaaatcatttggcatgatttcatgcctaactgaacatagcagaattcatactagagtaaatttctacaaatgtgaagaatgtggaaaagcctttaactggtcctcaacccttactaaacataagagaattcatacgggagagaaaccttacaaatgtgaagaatgtggtaaagcctttaaccagtcctcaaaccttattaaacataagaaaattcatactggagagaaaccctacaaatgtgaagaatgtggcaaaacttttaaccgattctcaactcttactacccataagataattcatactggagagaaaccctacaaatgtaaagaatgtggtaaagcttttaaccgatcttcaacccttactacccatagaaaaattcatactggagagaaaccttacaaatgtgaagaatgtggcaaagcctttaagcagtcctcaaaccttactacacataagataattcatactggagagaaaccctacaaatgtaaaaaatgtggaaaagcctttaaccagtctgcacaccttaccacacatgaggtaattcatactggagagaaaccctacaaatgtgaaaaatgtggaaaagcctttaatcatttctcacaccttactacacataagataattcatactggagagaaaccttacaaatgtaaagaatgtggtaaagcttttaaacactcttcaacccttactaaacataagataattcatactggagagaagccttacaaatgtaaagaatgtgaaaaagcttttaaccaatcctcaaaacttactgaacataagaaaattcatactggagagaaaccctatgaatgtgaaaaatgtggcaaagcttttaaccagtcctcaaatcttactagacataagaaaagtcatacagaagagaaaccttacaaatgtgaagaatgtggcaaaggttttaaatggccctcaacccttactatccataagataattcatactggagagaaaccatacaaatgtgaagaatgtggcaaagcttttaaccaatcctcaaaacttaccaaacataagaaaattcatactggagagaaaccctacacatgtgaagaatgtggcaaagcctttaaccagtcctcaaaccttactaaacataagagaattcatactggagaaaaaccttacaaatgtgaagaatgtgacaaagcttttaaatggtcctcagtccttactaaacataagataattcataccggagaaaaattacaaatatgaaaattatggcaaagctttaatcaatttacaagtcttactaaacataagaaaatttatactggagagaaactactaacctgaaagatgtgacaataattttgacaacacctcagacttataaaagtaatcatactggtgagaaattctaaaaatgtgaagactatggcaaagtctttaaatggttgtcacactttaggtaagataattcatattggaacaaactacaagtgcaaacaatgtggcaaaacttaatttatgctcacaccttactgcacagaaaagaatttttagttgagaaaaagtatacaaatataaagaatgtggaaaagccgttaatatctgctcacatcttactcagcatcagaaagtacttaataaaagcattataaatggaa

SEQ ID NO: 35388 - DNA, 1814 bp, Homo sapiens
  source 1..1814: mol_type = unassigned DNA
gctctaggtcttgttttccctgctttgtgttttctgctcgtggacgcccagcctctgtggccctgtggcctgcaggtattgggagatccacagctaagacgccgggaccccctggaagcctagaaatgggaccattgacatttagggatgtggccatagaattctctctgaaggagtggcaatgcctggacactgcacagcggaatttatatagaaatgtgatgttagagaactacagaaacctggtcttcctggttatgtgttctcattttgcccaagacctttggccggagcagaatataaaagattctttccaaaaagtgacactgaaaagatatggaaaatgtagacatgaaaatttaccattaagaaaaggctgtgaaagtatggatgagtgtaagatgcacaaaggaggttgtaatggacttaaccaatgtctcacagctacccagagcaaaatatttcaatgtgataaatatgtaaaagtcgctcataaattttcaaattcaaacagacatgagataagacatactaaaaagaaacctttcaaatgtacaaaatgtggcaaatcatttggcatgatttcatgcctaactgaacatagcagaattcatactagagtaaatttctacaaatgtgaagaatgtggaaaagcctttaactggtcctcaacccttactaaacataagagaattcatacgggagagaaaccttacaaatgtgaagaatgtggtaaagcctttaaccagtcctcaaaccttattaaacataagaaaattcatactggagagaaaccctacaaatgtgaagaatgtggcaaaacttttaaccgattctcaactcttactacccataagataattcatactggagagaaaccctacaaatgtaaagaatgtggtaaagcttttaaccgatcttcaacccttactacccatagaaaaattcatactggagagaaaccttacaaatgtgaagaatgtggcaaagcctttaagcagtcctcaaaccttactacacataagataattcatactggagagaaaccctacaaatgtaaaaaatgtggaaaagcctttaaccagtctgcacaccttaccacacatgaggtaattcatactggagagaaaccctacaaatgtgaaaaatgtggaaaagcctttaatcatttctcacaccttactacacataagataattcatactggagagaaaccttacaaatgtaaagaatgtggtaaagcttttaaacactcttcaacccttactaaacataagataattcatactggagagaagccttacaaatgtaaagaatgtgaaaaagcttttaaccaatcctcaaaacttactgaacataagaaaattcatactggagagaaaccctatgaatgtgaaaaatgtggcaaagcttttaaccagtcctcaaatcttactagacataagaaaagtcatacagaagagaaaccttacaaatgtgaagaatgtggcaaaggttttaaatggccctcaacccttactatccataagataattcatactggagagaaaccatacaaatgtgaagaatgtggcaaagcttttaaccaatcctcaaaacttaccaaacataagaaaattcatactggagagaaaccctacacatgtgaagaatgtggcaaagcctttaaccagtcctcaaaccttactaaacataagagaattcatactggagaaaaaccttacaaatgtgaagaatgtgacaaagcttttaaatggtcctcagtccttactaaacataagataattcataccggagaaaaattacaaatatga

SEQ ID NO: 35389 - DNA, 2656 bp, Homo sapiens
  source 1..2656: mol_type = unassigned DNA
gctgagaaaggtaaaaacacctccagataaggaataggaacaggctatgacctaatgcttgcttggaccagtataagcatgccagggcaaatatttaggctaaaatgtgggagctaagaacacaaagtacattgatttctttatcacggctagcagatatctaagaatgtcagcacaggtgtttgaatacattttgcttctaagagaagttactatttattcctaattacacgaggaggaaagtccctttgaaaaggaacctctatttcacattttacgatgagcacaatatagttttgcattggtgtatatgaatttgaatgagcaaacagctcttcaagtttttggggtttttttgtttgttttgttttttgggtttttgttttttgtttttgagacggagtctcactctgtcatcaggctggagtgcagtggcacgatctcggctcactgcaacctccgcctcctgcgttcaagtattcccctgcctcagcctcccaagtagctgtgactaaagccgtgcaccacaacgtctggccaattttttgtattttagtagagacgaagtttcaccatattggccaggcgagtctcaaactcctgacctcgtgatccacccacctcagcctcccaaagtgcttggattatagacatgagcctcagcgcccagccctcttcaagtttttataaaccagtttcagaagttatgtgttctcattttgcccaagacctttggccggagcagaatataaaagattctttccaaaaagtgacactgaaaagatatggaaaatgtagacatgaaaatttaccattaagaaaaggctgtgaaagtatggatgagtgtaagatgcacaaaggaggttgtaatggacttaaccaatgtctcacagctacccagagcaaaatatttcaatgtgataaatatgtaaaagtcgctcataaattttcaaattcaaacagacatgagataagacatactaaaaagaaacctttcaaatgtacaaaatgtggcaaatcatttggcatgatttcatgcctaactgaacatagcagaattcatactagagtaaatttctacaaatgtgaagaatgtggaaaagcctttaactggtcctcaacccttactaaacataagagaattcatacgggagagaaaccttacaaatgtgaagaatgtggtaaagcctttaaccagtcctcaaaccttattaaacataagaaaattcatactggagagaaaccctacaaatgtgaagaatgtggcaaaacttttaaccgattctcaactcttactacccataagataattcatactggagagaaaccctacaaatgtaaagaatgtggtaaagcttttaaccgatcttcaacccttactacccatagaaaaattcatactggagagaaaccttacaaatgtgaagaatgtggcaaagcctttaagcagtcctcaaaccttactacacataagataattcatactggagagaaaccctacaaatgtaaaaaatgtggaaaagcctttaaccagtctgcacaccttaccacacatgaggtaattcatactggagagaaaccctacaaatgtgaaaaatgtggaaaagcctttaatcatttctcacaccttactacacataagataattcatactggagagaaaccttacaaatgtaaagaatgtggtaaagcttttaaacactcttcaacccttactaaacataagataattcatactggagagaagccttacaaatgtaaagaatgtgaaaaagcttttaaccaatcctcaaaacttactgaacataagaaaattcatactggagagaaaccctatgaatgtgaaaaatgtggcaaagcttttaaccagtcctcaaatcttactagacataagaaaagtcatacagaagagaaaccttacaaatgtgaagaatgtggcaaaggttttaaatggccctcaacccttactatccataagataattcatactggagagaaaccatacaaatgtgaagaatgtggcaaagcttttaaccaatcctcaaaacttaccaaacataagaaaattcatactggagagaaaccctacacatgtgaagaatgtggcaaagcctttaaccagtcctcaaaccttactaaacataagagaattcatactggagaaaaaccttacaaatgtgaagaatgtgacaaagcttttaaatggtcctcagtccttactaaacataagataattcataccggagaaaaattacaaatatgaaaattatggcaaagctttaatcaatttacaagtcttactaaacataagaaaatttatactggagagaaactactaacctgaaagatgtgacaataattttgacaacacctcagacttataaaagtaatcatactggtgagaaattctaaaaatgtgaagactatggcaaagtctttaaatggttgtcacactttaggtaagataattcatattggaacaaactacaagtgcaaacaatgtggcaaaacttaatttatgctcacaccttactgcacagaaaagaatttttagttgagaaaaagtatacaaatataaagaatgtggaaaagccgttaatatctgctcacatcttactcagcatcagaaagtacttaataaaagcattataaatgg

SEQ ID NO: 35390 - DNA, 2310 bp, Homo sapiens
  source 1..2310: mol_type = unassigned DNA
ggtgctccaaatctggtcttagctgcttcgtgtcttcttctccagcctctgtggccctgtgacctgcaggtattgggagatccacagctgagggacccccggaagcctagaaatgggaccattggaatttagagatgtggccatagaattctctctggaggagtggcattgcctggacactgcacagcagaatttatatagggatgtgatgttagagaactacagacacctggtcttccttggtattgttgtcactaagccagacctgatcacctgtctggagcaaggaaaaaaacccttcactgtgaagagacatgagatgattgccaaatccccagttatgtgttttcattttgcccaagacctttgtccagagcagagcctaaaagattccttccaaaaagtgatagtgacaagatatgaaaaacgtgaatatggcaatttagagttaaaaaaaggttgtgaaagtgtggatgagggtaaagtacacaaaagaggttataatggacttaaccaatgtttgacagctacccagagcaaagtatttcaatgtgatacatatgtgaaagtctctcatatattttcaaattcaaacagacataagataagagatactggaaaaaaacctttcaaatgtatagaatgtggcaaagctttcaaccagtcctcaacccttgctacacataagaaaattcatactggagagataacctgcaaatgtgaagaatgtggcaaagccttcaacaggtcctcacaccttacttcacataagagaattcatactggagagaaacggtacaaatgtgaagattgtggcaaagaattaaagtattcctctacccttactgcacataagagaattcatactggagagaaacggtacaaatgtgaagattgtggcaaagaattaaagtattcctctacccttactgcacataagagaattcatactggagagaaaccctacaagtgtgataaatgtggcagagcatttatttcatcctcgatcctttatgtacataagataagtcatactgaagagaaaccctacaaatgtgaagaatgtggcaaagccttcaagctctcctcaatccttagtacacataagagaatccatactggagagaaaccctacaaatgtgaagaatgtggcaaagccttcaggcgctccttagtccttcgtacacataagagaattcatactggagagaaaccctacaagtgtgataaatgtggcaaagcatttatttcatcctcactcctttataaacataagataagtcatagtgaaaagaaaccctacaaatgtgaagaatgtggcaaagccttcaagcgctcctcaacacttactatacataagataagtcatactgaagagaaaccctacaaatgtcaagaatgtgacaaagtcttcaaacgctcctcagcccttagcacacataagataattcatagtggagagaaaccctacaaatgtgaagaatgtggcaaagccttcaagcgctcctcaaaccttactacacataagataagtcatactgaagagaaactctacaaatgtcaagaatgtgacaaagccttcaagtactcctcagcccttagcacacataagataattcacagtggagagaatccctacaaatgtgaagaatgtggcaaagccttcaagcgctcctcagtccttagtaaacataagataattcatactggagcgaaaccctacaaatgtgaagaatgtggcaaagcctttaagcgctcctcacagcttactagtcataagataagtcatactggagagaaaccctacaaatgtgaagaatgtggcaaagcttttaacttgtcctcagaccttaatacacataagaggattcatattggacagaaagcctacatagtgaagaacatggcaaatctttgaaatattcctcaacccttaataaacataagataattcatactggagagaaaccgtataaatgtgatgactgttggaaagcctttgaccacccctctactcttactaaatatgagaatttatatgaaacataactcctacaaaaataaagaatgtgacaaatcattttaaggaagttctcaacccttactacacataattcatactggacggaaactctacaggtgtgaaaaatgcagcaaagcctataacaagttctcaattctttttttttttttttaagaaggagtttcatgcttctcacccagcctggagtgcaatggcacgatctctgctcactgcaacctcttcctcctggttcaagccattaacctgcttcagcctccaccaccatg

SEQ ID NO: 35391 - DNA, 2843 bp, Homo sapiens
  source 1..2843: mol_type = unassigned DNA
gaataatattcttgcaaaaaagaaaccctataagtgtgataaatgtagaaaagcctttattcatagatcatcgcttactaaacatgagaaaacacataaaggagagggagctttccctaatggaacagatcaaggaatttatcctggaaagaaacaccatgaatgtaccgactgtgggaaaacctttctctggaagacacagcttactgagcatcagagaattcacactggggagaagccctatgaatgtaatgaatgtgggagagccttccgaaaaaaaaccaacctgcatgatcatcagagaattcatactggagaaaaaccctattcttgtaaggaatgtgggaaaaacttcagccgaagttcagctcttactaaacaccagagaattcatactcgaaataaactctaggaaccgtgaaattaaggaatttgcagaatgctttagctaaaatgttctgattcaggatcagaggattcttagagagcttgggaatgtaatgaattacgtgtgtgtttatacgttgtgtgtggagaaaactgccagtagacagattttttttttttaacataaagacacattctcagatctgattacagactagtgtaaaaacagctacatgtatgtagctggttggggatgatatgcctgtatgttggactttgcttttgaatatatgtatgcaggatatcatcaagtttcaacatcttgacttgtgacccccaatgtcaacagcttttttaaaaagcaaattcctgcagtaatgaccaaaacccattttaaaaattgcttgacaactgcactcaactgcagctcttacattaacttcaccatggaaaccagttccaactccaggaagtcaccattcaaagaattagatcaactagcccaaccacttcattgtacagatgaagactgaaagccaaagatgtgaagtggtttccacagtatgatacagcctataagggtaaagctgggttaaaaatgcaggtttcctggatttggggccccatggccttgccagtgaaaaggttatttttggactcagagggctttaaaataaattttaagatgtatcagatacacaaacatttaatgggcacctatgggttggacactttgagaattcttaaaagtataagtgggagcaaaatgtatgcaaatttatcacaaactatttaaagcaacttcttggaggcttacaaaccacaatttaacagaaactgtagatggttgaactactagtgacttttttccccttttcccagttacaattatactttcagctaacatatgccagtttcacagaactattaagtccccttattgtactttttatggcatgcccatgaaaaagcactttcttaagcctacagtatcagatcaatgggaaaacaacagaaaactaagaggagaattttcccgttaattttcttgcagaaaagttaagtctaattgcccattgccataaattttgccttgtactcagagaagcaacatgcactggctcattttatgtgcaaagaaaagatttcaccattaaaaaaattaacttggctaggtatggtgtctcacacctgtaatcccagcactttgggtggctaaggcagatagactgcttgaacccaggagttcaagaccagcctggacaacatggtgaaaccccatctctttaaaaaaaaaaaaaaatccaaaaattagctgggcatggtggcatgcagtggtagtcccagctactcaggaggctgaggtgggaggatcactggaacccgggagcagagactgcagtgagctgagatcacactactgcattccagcctgagcaacagagcaagacacacacacatcaatttattttagttgtataatgcttttctattagtaaagcatcagctaagcttcagtggcctgctccatcccctaatgactcccatgggctatcctaaaggaacttccagaacctttgttggtgtgttgacattgaccatgcagaccaatttgggcacaactggacattgattccttttacacaagagctgcctcccaaagatagataaattttcccagccctaaatatgaatcatggggcaagatattggtcgtattgatggtgaacctttcctactggattctttgcatgccacatagcaggattcattgcctttctctcatcatggatggcatgcagcagcacccaagtattcttcattctttgcagggaaaaaattgtgcatgggggctgaaatgtaatatgtgtagctcaattagtctctcctctgtgatgcaaaatggaatattcaatggcagatctgcccttctgagatgctgaccatccaaaacaccttgtttatggtgcaccatgattagctcacacacaatgccaaggctgtgcttctattatctgatacatagtttgacaatgggtaattctactcagaccctccctactgattggctaggatgcctgtcaggaactcattatgctactggttgtttggggatccccatagtggactactttcaggaatggcatgaattgtaaccaactgagtgctgcccccactgttacggaagtttataaaaccttagttccagaagacccaaaggagagtactggtttgtgtttggtgcttggcctagatccagccaccactctgaaactcagcacatcttcattgacagggagggagcccaggacatatgtgtggctcattgaccagaaggctttcttagtcccaacagccatgaaccatgcacttatggatacccagccttttagggctacgtgaaatgcatccttgtaacatcattgtattctttcaataaatagccttctgagttg

SEQ ID NO: 35392 - DNA, 4384 bp, Homo sapiens
  source 1..4384: mol_type = unassigned DNA
ctcctgccccggagccgggccctggcgaggcaggaatggccccgaggcctccgaccgccgcgccccaggaatcagtgacattcaaagatgtgtctgtggacttcacccaggaagaatggtaccatgtcgaccctgctcagaggagcttatacagggatgtgatgctggagaactatagccacctggtttctcttggatatcaagtttccaagccagaggtgatcttcaaattggagcaaggagaagagccatggatatcagagggagaaatccaacgacctttctatccagactggaagaccaggcctgaagtcaaatcatcacatttgcagcaggatgtatcagaagtatcccactgcacacatgatctcttacatgctacattagaagactcctgggatgttagcagccagttagacaggcaacaggaaaactggaagagacatctgggatcagaggcatccacccagaagaaaataattacaccacaagaaaattttgagcaaaataaatttggtgaaaattctagattgaacaccaatttggttacacaactgaacattcctgcaagaataaggcctagtgaatgtgagacccttggaagcaatttgggacataatgcagacttacttaatgagaataatattcttgcaaaaaagaaaccctataagtgtgataaatgtagaaaagcctttattcatagatcatcgcttactaaacatgagaaaacacataaaggagagggagctttccctaatggaacagatcaaggaatttatcctggaaagaaacaccatgaatgtaccgactgtgggaaaacctttctctggaagacacagcttactgagcatcagagaattcacactggggagaaaccctttgaatgcaatgtatgtggaaaggccttcaggcatagctcatctcttggtcagcatgagaatgctcataccggagagaaaccctatcagtgtagtctctgtgggaaagccttccagcgcagctcctcccttgttcaacaccagcgaattcacactggagagaaaccctatcgatgtaatctatgtgggaggtcctttaggcatggcacatccctcactcaacacgaggtcacacacagtggagagaagcccttccagtgtaaggaatgtgggaaagcctttagtcgatgttcttcccttgtccaacatgagaggactcatactggagagaaaccttttgaatgtagcatatgtgggagggcttttggtcagagcccatccctttataaacatatgaggattcataagagaggcaaaccttaccaaagcagtaactacagcatagatttcaagcacagcacatctctcactcaagatgaaagcactcttaccgaagtgaaatcctaccattgtaatgactgtggggaagactttagtcacattacagactttactgaccatcagaggatccatactgcagagaacccctatgattgtgagcaggcttttagtcagcaagctatttctcatcctggagagaaaccctatcaatgtaatgtatgtgggaaagctttcaaaaggagtacaagtttcatagagcatcacagaattcatactggagagaaaccctatgaatgtaatgagtgtggagaagcctttagtcgacgctcatcgcttactcaacatgagagaacccacactggagagaaaccctatgaatgtattgactgtgggaaagcctttagtcaaagttcatctctcattcagcatgagagaactcatactggagagaagccctatgaatgtaatgaatgtgggagagccttccgaaaaaaaaccaacctgcatgatcatcagagaattcatactggagaaaaaccctattcttgtaaggaatgtgggaaaaacttcagccgaagttcagctcttactaaacaccagagaattcatactcgaaataaactctaggaaccgtgaaattaaggaatttgcagaatgctttagctaaaatgttctgattcaggatcagaggattcttagagagcttgggaatgtaatgaattacgtgtgtgtttatacgttgtgtgtggagaaaactgccagtagacagattttttttttttaacataaagacacattctcagatctgattacagactagtgtaaaaacagctacatgtatgtagctggttggggatgatatgcctgtatgttggactttgcttttgaatatatgtatgcaggatatcatcaagtttcaacatcttgacttgtgacccccaatgtcaacagcttttttaaaaagcaaattcctgcagtaatgaccaaaacccattttaaaaattgcttgacaactgcactcaactgcagctcttacattaacttcaccatggaaaccagttccaactccaggaagtcaccattcaaagaattagatcaactagcccaaccacttcattgtacagatgaagactgaaagccaaagatgtgaagtggtttccacagtatgatacagcctataagggtaaagctgggttaaaaatgcaggtttcctggatttggggccccatggccttgccagtgaaaaggttatttttggactcagagggctttaaaataaattttaagatgtatcagatacacaaacatttaatgggcacctatgggttggacactttgagaattcttaaaagtataagtgggagcaaaatgtatgcaaatttatcacaaactatttaaagcaacttcttggaggcttacaaaccacaatttaacagaaactgtagatggttgaactactagtgacttttttccccttttcccagttacaattatactttcagctaacatatgccagtttcacagaactattaagtccccttattgtactttttatggcatgcccatgaaaaagcactttcttaagcctacagtatcagatcaatgggaaaacaacagaaaactaagaggagaattttcccgttaattttcttgcagaaaagttaagtctaattgcccattgccataaattttgccttgtactcagagaagcaacatgcactggctcattttatgtgcaaagaaaagatttcaccattaaaaaaattaacttggctaggtatggtgtctcacacctgtaatcccagcactttgggtggctaaggcagatagactgcttgaacccaggagttcaagaccagcctggacaacatggtgaaaccccatctctttaaaaaaaaaaaaaaatccaaaaattagctgggcatggtggcatgcagtggtagtcccagctactcaggaggctgaggtgggaggatcactggaacccgggagcagagactgcagtgagctgagatcacactactgcattccagcctgagcaacagagcaagacacacacacatcaatttattttagttgtataatgcttttctattagtaaagcatcagctaagcttcagtggcctgctccatcccctaatgactcccatgggctatcctaaaggaacttccagaacctttgttggtgtgttgacattgaccatgcagaccaatttgggcacaactggacattgattccttttacacaagagctgcctcccaaagatagataaattttcccagccctaaatatgaatcatggggcaagatattggtcgtattgatggtgaacctttcctactggattctttgcatgccacatagcaggattcattgcctttctctcatcatggatggcatgcagcagcacccaagtattcttcattctttgcagggaaaaaattgtgcatgggggctgaaatgtaatatgtgtagctcaattagtctctcctctgtgatgcaaaatggaatattcaatggcagatctgcccttctgagatgctgaccatccaaaacaccttgtttatggtgcaccatgattagctcacacacaatgccaaggctgtgcttctattatctgatacatagtttgacaatgggtaattctactcagaccctccctactgattggctaggatgcctgtcaggaactcattatgctactggttgtttggggatccccatagtggactactttcaggaatggcatgaattgtaaccaactgagtgctgcccccactgttacggaagtttataaaaccttagttccagaagacccaaaggagagtactggtttgtgtttggtgcttggcctagatccagccaccactctgaaactcagcacatcttcattgacagggagggagcccaggacatatgtgtggctcattgaccagaaggctttcttagtcccaacagccatgaaccatgcacttatggatacccagccttttagggctacgtgaaatgcatccttgtaacatcattgtattctttcaataaatagccttctgagttgaatggga

SEQ ID NO: 35393 - DNA, 5393 bp, Homo sapiens
  source 1..5393: mol_type = unassigned DNA
ctcgctgccgccggagtttccaggtctcgacttcactgctctgtgtcctctgctccaggaggcccagcctgtgtggccctgtgacctgcaggtattggagagccacagctaagatgccaggaacccctggaagcctagaaatgggactgttgacatttagggatgtggccatagaattctctccggaggagtggcaatgtctggacactgcacagcagaatttatataggaatgtgatgttagagaactacagaaacctggccttcctgggtattgctctctctaagccagacctgattacttatctggagcaaggaaaagagccctggaatatgaagcaacatgagatggtggatgaacccacaggtatatgtcctcattttcctcaagacttttggccagagcagagcatggaagattcttttcaaaaagtattactgagaaaatatgaaaaatgtggacatgagaatttacagttaagaaaaggttgtaaaagtgtggatgagtgtaaggtgcacaaagaaggttataataaacttaaccagtgtctcacaactgcccagagcaaagtatttcaatgtgggaaatatttgaaagtcttctataaatttttaaattcaaacagacatacgataagacatactggaaagaaatgcttcaaatgtaaaaaatgtgtcaagtcattttgcatccgtttacacaaaacccaacataaatgcgtttatattacagagaagtcctgtaaatgtaaagaatgtgaaaaaacctttcattggtcctcaacccttactaatcataaggaaattcatactgaagataaaccctacaaatgtgaagaatgtggcaaagcttttaagcagctctcaacccttactacacataaaataatctgtgctaaagagaaaatctacaagtgtgaagaatgtggcaaagcatttctatggtcctcaaccctaactagacataagaggatacacactggagagaaaccctacaaatgtgaagaatgtggcaaagcttttagccattcttcaacccttgctaaacataagagaattcatactggagagaaaccctacaaatgtgaagaatgtggcaaagcttttagccgttcttcaacccttgctaaacataagagaattcatactggagagaaaccctacaaatgtaaagaatgtggcaaagcttttagcaattcctcaacccttgctaatcataagataactcatactgaagagaaaccctacaaatgtaaagaatgtgacaaagcttttaagcgactctcaacccttactaaacataaaataatacatgctggagagaaactctacaaatgtgaagaatgtggcaaagcttttaatcgatcttcaaatcttactatacataagtttattcatactggagagaaaccttacaagtgtgaagaatgtggcaaagcatttaactggtcctcaagccttactaaacataaaagatttcatactagagagaaacccttcaaatgtaaagaatgtggcaaagcatttatatggtcttcaaccctaactagacataagaggatacacactggagagaagccctacaaatgtgaagaatgtggcaaagcttttaggcaatcctcaacccttactaaacataagataattcatactggagagaaaccctacaaatttgaagaatgtggcaaagcttttagacaatccttaacccttaataaacataagataattcatagtagagagaaaccctacaaatgtaaagaatgtggcaaagcttttaagcaattctcaacccttactacacataaaataattcatgctggaaagaaactctacaaatgtgaagaatgtggcaaagcttttaatcattcctcaagtctttctacacataagataattcatactggagagaagtcttacaagtgtgaagaatgtggcaaagcatttctatggtcctcaaccctaagaagacataagaggatacacactggagagaaaccctacaaatgtgaagaatgtggcaaagcttttagccattcttcagcccttgctaaacataagagaattcatactggagagaaaccctacaaatgtaaagaatgtggcaaagcttttagcaattcctcaacccttgctaatcataagataactcatactgaagagaaaccctacaaatgtaaagaatgtgacaaaacttttaagcgactctcaacccttactaaacataaaataatacatgctggagagaaactctacaaatgtgaagaatgtggcaaagcttttaatcgatcttcaaatcttactatacataagtttattcatactggagagaaaccttacaagtgtgaagaatgtggcaaagcatttaactggtcctcaagccttactaaacataaaagaattcatactagagagaaacccttcaaatgtaaagaatgtggcaaagcatttatatggtcttcaaccctaactagacataagaggatacacactggagagaagccctacaaatgtgaagaatgtggcaaagcttttagccgttcctcaacccttactaagcataagacaattcatactggagagaaaccctacaaatgtaaagaatgtggcaaagcttttaagcactcctcagcccttgctaaacataaaataatacatgctggagagaaactctacaaatgtgaggaatgtggcaaagcttttaatcaatcttcaaatcttacgacacataagataattcatactaaagagaaaccttccaagagtgaagaatgtgacaaagcatttatctggtcctcaacccttactgaacataagagaattcataccagagagaaaacctacaaatgtgaagaatgtggcaaagcatttagccagccttcacaccttactacacataagaggatgcacactggagagaaaccctacaaatgtgaagaatgtggcaaagcttttagccaatcctcaacccttactacacataagataattcatactggagagaaaccctacaaatgtgaagaatgtggcaaagcttttaggaaatcttcaactcttactgaacataagataattcatactggagagaaaccctacaaatgtgaagaatgtggcaaagcatttagccaatcctcaaccctaactagacatacgaggatgcacactggagagaaaccatacaaatgtgaagaatgtggcaaagcttttaatcgatcctcaaagcttactacacataagataattcatactggagagaaaccttacaagtgtgaagaatgtggcaaagcatttatatcatcctcaaccctaaatggacataagagaattcatactagagagaaaccctacaaatgtgaagaatgtggcaaagcatttagccaatcttcaaccctaactagacataagaggttgcacaccggagagaaaccctacaaatgtggagaatgtggcaaagcctttaaagagtcctcagctcttactaaacataagataattcacactggagagaaaccctacaaatgtgaaaaatgtggcaaagcctttaaccagtcttcaatccttactaaccataagaaaattcatactatcacacctgtaatcccactactttgggaggccgaggcgggcggatcacgaggtcaggagatggagaccatcctggctaacacagtgaaaccccttctctactaaaaaatacaaaaaattagccgggcgtggtggcgggcgcctgtagtcccagctatgcgagaggctgaggcaggagaatggcgtgaacccgggaggcggagcttgcagtgagccgagatcacgccactgcactcaagcctgggcgacagagcgagactccgtctcaaaaaaaaaaaaaagaaaattcatactagagagaaaccctacaaatataaagaatgtggcaaatcttttaaccggtcttcaacctttactaaacataaggtaattcatactggagtaaaactctacaaatgtgaagaatgtggcaaatcctttttctggtcctcagccctaaccagacataagaaaattcatactggacagcaaccctacaaacaggaaaaatttggcaaagcctttaaccagttttcacaccttactacagataagataactcatattggagagaaatcttacaagtgtgaataatgtggtaaagtctataaaaagtcctgaattcttaacagacataatattattcatactggagagaaactctacaaacctgaaagatgtgccaacgcttttgacaagtcaaacttttctaaacatcaagaaaatcatgctgctgagaaatcctagaaatgtgaagaatgtgacaaagcctctaaatgattgtcacacttgatcgtaggtaagataattcatactggagaaaactaccagtgtgaacaatgtggccaagctttgaactaatgctcacaccttaatgcataggaaagcatttatgcttgagaaaaagtgaacaaatatagacaaaaagccattaatacctgctcacatcgtactcaaattcagagcgttcatactaaataagaagtgtaattactgtcaaacgactgatcagaaaatatgtctttaaagtacagaagagtattttgaaaaagcattacaaatatgaagaggcattatttatgaccttttctatggaaaggtaaggacattaaaaatgtaagatgcatgatgaaaatttaagtagagaggatctttatggttaacttataatatcgagtgatgcatgaggtagatgttcagattaatattctgcattattatgaaagaaaaacattcttaattttagttaaagtttagtatgatttattgtatttttatgaaatatatgtagcatatttttaaattataaattgcatgtgaacttttcaaccaaacagttttaacatgttaaatactatcatgaattcaatgaagtgttattatgccagtaactttaacctattccaccttactcaagggtgtaggtaaaagatggtaaaaatacactatttggtaagataatggactgacatctctagtgattttttttgccagtgagttttaattgccattaagttaaagaatattgttcccataggctaaatttttatttttattttctcatttaaatgtatttgacttaatttttgtggatacctaatatgtgtacatattatgccatatgtggcatattttgatacggacacacaatatataacaatcgcattagactaaatgcggtctccattacctctagcatttattctttgtattacaaataattcaattctacagttttagttatttttaaatgtacaattaaattgttgttgactacaggattatttttatggtcataataaaacttatatacaaacataagtaaaatcc

SEQ ID NO: 35394 - DNA, 3572 bp, Homo sapiens
  source 1..3572: mol_type = unassigned DNA
aggtctcgacttcactgctctgtgtcctctgctccaggaggcccagcctgtgtggccctgtgacctgcaggtattggagagccacagctaagatgccaggaacccctggaagcctagaaatgggactgttgacatttagggatgtggccatagaattctctccggaggagtggcaatgtctggacactgcacagcagaatttatataggaatgtgatgttagagaactacagaaacctggccttcctgggtatatgtcctcattttcctcaagacttttggccagagcagagcatggaagattcttttcaaaaagtattactgagaaaatatgaaaaatgtggacatgagaatttacagttaagaaaaggttgtaaaagtgtggatgagtgtaaggtgcacaaagaaggttataataaacttaaccagtgtctcacaactgcccagagcaaagtatttcaatgtgggaaatatttgaaagtcttctataaatttttaaattcaaacagacatacgataagacatactggaaagaaatgcttcaaatgtaaaaaatgtgtcaagtcattttgcatccgtttacacaaaacccaacataaatgcgtttatattacagagaagtcctgtaaatgtaaagaatgtgaaaaaacctttcattggtcctcaacccttactaatcataaggaaattcatactgaagataaaccctacaaatgtgaagaatgtggcaaagcttttaagcagctctcaacccttactacacataaaataatctgtgctaaagagaaaatctacaagtgtgaagaatgtggcaaagcatttctatggtcctcaaccctaactagacataagaggatacacactggagagaaaccctacaaatgtgaagaatgtggcaaagcttttagccattcttcaacccttgctaaacataagagaattcatactggagagaaaccctacaaatgtgaagaatgtggcaaagcttttagccgttcttcaacccttgctaaacataagagaattcatactggagagaaaccctacaaatgtaaagaatgtggcaaagcttttagcaattcctcaacccttgctaatcataagataactcatactgaagagaaaccctacaaatgtaaagaatgtgacaaagcttttaagcgactctcaacccttactaaacataaaataatacatgctggagagaaactctacaaatgtgaagaatgtggcaaagcttttaatcgatcttcaaatcttactatacataagtttattcatactggagagaaaccttacaagtgtgaagaatgtggcaaagcatttaactggtcctcaagccttactaaacataaaagatttcatactagagagaaacccttcaaatgtaaagaatgtggcaaagcatttatatggtcttcaaccctaactagacataagaggatacacactggagagaagccctacaaatgtgaagaatgtggcaaagcttttaggcaatcctcaacccttactaaacataagataattcatactggagagaaaccctacaaatttgaagaatgtggcaaagcttttagacaatccttaacccttaataaacataagataattcatagtagagagaaaccctacaaatgtaaagaatgtggcaaagcttttaagcaattctcaacccttactacacataaaataattcatgctggaaagaaactctacaaatgtgaagaatgtggcaaagcttttaatcattcctcaagtctttctacacataagataattcatactggagagaagtcttacaagtgtgaagaatgtggcaaagcatttctatggtcctcaaccctaagaagacataagaggatacacactggagagaaaccctacaaatgtgaagaatgtggcaaagcttttagccattcttcagcccttgctaaacataagagaattcatactggagagaaaccctacaaatgtaaagaatgtggcaaagcttttagcaattcctcaacccttgctaatcataagataactcatactgaagagaaaccctacaaatgtaaagaatgtgacaaaacttttaagcgactctcaacccttactaaacataaaataatacatgctggagagaaactctacaaatgtgaagaatgtggcaaagcttttaatcgatcttcaaatcttactatacataagtttattcatactggagagaaaccttacaagtgtgaagaatgtggcaaagcatttaactggtcctcaagccttactaaacataaaagaattcatactagagagaaacccttcaaatgtaaagaatgtggcaaagcatttatatggtcttcaaccctaactagacataagaggatacacactggagagaagccctacaaatgtgaagaatgtggcaaagcttttagccgttcctcaacccttactaagcataagacaattcatactggagagaaaccctacaaatgtaaagaatgtggcaaagcttttaagcactcctcagcccttgctaaacataaaataatacatgctggagagaaactctacaaatgtgaggaatgtggcaaagcttttaatcaatcttcaaatcttacgacacataagataattcatactaaagagaaaccttccaagagtgaagaatgtgacaaagcatttatctggtcctcaacccttactgaacataagagaattcataccagagagaaaacctacaaatgtgaagaatgtggcaaagcatttagccagccttcacaccttactacacataagaggatgcacactggagagaaaccctacaaatgtgaagaatgtggcaaagcttttagccaatcctcaacccttactacacataagataattcatactggagagaaaccctacaaatgtgaagaatgtggcaaagcttttaggaaatcttcaactcttactgaacataagataattcatactggagagaaaccctacaaatgtgaagaatgtggcaaagcatttagccaatcctcaaccctaactagacatacgaggatgcacactggagagaaaccatacaaatgtgaagaatgtggcaaagcttttaatcgatcctcaaagcttactacacataagataattcatactggagagaaaccttacaagtgtgaagaatgtggcaaagcatttatatcatcctcaaccctaaatggacataagagaattcatactagagagaaaccctacaaatgtgaagaatgtggcaaagcatttagccaatcttcaaccctaactagacataagaggttgcacaccggagagaaaccctacaaatgtggagaatgtggcaaagcctttaaagagtcctcagctcttactaaacataagataattcacactggagagaaaccctacaaatgtgaaaaatgtggcaaagcctttaaccagtcttcaatccttactaaccataagaaaattcatactatcacacctgtaatcccactactttgggaggccgaggcgggcggatcacgaggtcaggagatggagaccatcctggctaacacagtgaaaccccttctctactaa

SEQ ID NO: 35395 - DNA, 3210 bp, Homo sapiens
  source 1..3210: mol_type = unassigned DNA
aatcaggcacgcaactggagcggacagcacagcttccgggatttggcggggcctttgtctctcgctgcagccggcgctccacgtctagtcttcactgctctgcgtcctgtgctgataaaggctcgccgctgtgaccctgttacctgcaagaacttggaggttcacagctaagacgccaggaccccctggaagcctagaaatgggaccactgacatttagggatgtgaaaatagaattctctctagaggaatggcaatgcctggacactgcgcagcggaatttatatagagatgtgatgttagagaactacagaaacctggtcttccttggtattgctgtctctaagccagacctgatcacctggctggagcaaggaaaagagccctggaatctgaagagacatgagatggtagacaaaaccccagttatgtgttctcattttgcccaagatgtttggccagagcacagcataaaagattctttccaaaaagtgatactgagaacatatggaaaatatggacatgagaatttacagctaagaaaagaccataaaagtgtggatgcatgtaaggtgtacaaaggaggttataatggacttaaccagtgtttgacaactactgacagcaagatatttcagtgtgataaatatgtgaaagtctttcataaatttccaaatgtaaatagaaataagataagacatactggaaagaaacctttcaaatgtaaaaaccgtggcaaatcattttgcatgctttcacaattaactcaacataagaaaattcatactagagagtattcttacaaatgtgaagaatgtggtaaagcctttaactggtcctcaacccttactaaacataagataattcatactggagaaaaaccctacaaatgtgaagaatgtggcaaagcttttaaccggtcctcaaatcttactaaacataaaataattcatactggagagaaaccctacaaatgtgaagaatgtggcaaagcttttaaccggtcctcaacccttactaaacataaaagaattcatacagaagagaaaccctacaaatgtgaagaatgtggcaaggcctttaaccagttctcgattcttaataaacataagagaattcatatggaagataaaccctacaaatgtgaagaatgtggcaaagcctttagagtattctcaattcttaaaaaacataagataatccatactggggaaaaaccatacaaatgtgaagaatgtggcaaagcctttaaccagttctcaaaccttactaaacataagataattcatactggagagaaaccctacaaatgtgatgaatgtggcaaagcctttaaccagtcctcaacccttactaaacataaaagaattcatacgggagaaaaaccctacaaatgtgaagaatgtggcaaagcttttaaacagtcctcaacccttactgaacataagataattcatactggagagaaaccctacaaatgtgaaaaatgtggcaaggcctttagctggtcctcagcttttactaaacataagagaaatcatatggaagataaaccctacaaatgtgaagaatgtggcaaagcctttagtgtattctcaacccttactaaacataaaataattcatactagagaaaaaccctacaaatgtgaagaatgtggcaaagcctttaaccagtcctcaatttttactaaacataagataattcacactgaagggaaatcctacaaatgtgaaaaatgtggcaatgcttttaaccagtcctcaaaccttactgcacgtaagataatttatactggagagaaaccctacaaatatgaagaatgtgacaaagcctttaacaagttctcaacccttattacacatcagataatttatactggagagaaaccctgcaaacatgaatgtggcagagcctttaacaaatcctcaaattatactaaagagaaactacaaacctgaaagatgtgacaatgattttcactacacctcaaacttttctaaacataaaccatattggtgccctagaaatgtgaggaatatgacaaggactttaaatggttgtcacgcttgattgtaggtaagataatttatattggagaaaaatcctccaagtatgaagaatgtggcaaacttttaaccaatcctcacaccttattgcacaggaaagcatttatacttgagaaaaattgtataaagaatatggaaaagccatttatatctgctcacatgtaaaaacatcagttcatacttaataaaatgcaattaccgtcaaatctttcagaaaatataagcctttaatacgaggaagagtattcttaagatgaacattacaaatagaaagagggttgtagtacctttagttttatgatagatcttattgtacacattttgtaccagaggaaaaccctaaagcattagttgctcaaactttgttcgacatcagggaatttgtattggagaaaaaccctgcaaatgtaataaatatggaaaaacattttttcaaaaactacagcttggaaaacatcagagagttcatactaaaatatatttttgcagatgcagtaaatatgaaaaatatttaatcccaaattaagtctatgtaaatatcagaattcacagtagaaatcataaggcataaggcactgatacttcagacattacactaaattagagtgttgagtataggagatccaaaactaaaattgttaggtaagttatttatatataactttaaaagaagtagaagattttttggagatttataattacattcaaagtatacttttttcttgaaaaaaattacagattttttgaaaagcaattgatgtaatttaactctcaaattcatgtttttcttcattcctattatattcacatgtgaaagcaagtgatctgttgttgctgaatcagagatatgagagattcttttttataggtgggcattatttatgcccctttctgtggaagagtaagaaaattaaaatacaagatgcatgaggaaaatgtagagatgctctttgtgattaacttagaatattaagtgctacttgaggtacatgttcagactaacattcttttgcagtatagtgagaaaaaaacattttaaaattaattatcattttgttgattgtgcttttatgtaataaaatgcagtactttaaaacatttagattgtgtgtgaacttaattttgtaattaaacattttttt

SEQ ID NO: 35396 - DNA, 3017 bp, Homo sapiens
  source 1..3017: mol_type = unassigned DNA
gtctctcgctgcagccggcgctccacgtctagtcttcactgctctgcgtcctgtgctgataaaggctcgccgctgtgaccctgttacctgcaagaacttggaggttcacagctaagacgccaggaccccctggaagcctagaaatgggaccactgacatttagggatgtgaaaatagaattctctctagaggaatggcaatgcctggacactgcgcagcggaatttatatagagatgtgatgttagagaactacagaaacctggtcttccttgttatgtgttctcattttgcccaagatgtttggccagagcacagcataaaagattctttccaaaaagtgatactgagaacatatggaaaatatggacatgagaatttacagctaagaaaagaccataaaagtgtggatgcatgtaaggtgtacaaaggaggttataatggacttaaccagtgtttgacaactactgacagcaagatatttcagtgtgataaatatgtgaaagtctttcataaatttccaaatgtaaatagaaataagataagacatactggaaagaaacctttcaaatgtaaaaaccgtggcaaatcattttgcatgctttcacaattaactcaacataagaaaattcatactagagagtattcttacaaatgtgaagaatgtggtaaagcctttaactggtcctcaacccttactaaacataagataattcatactggagaaaaaccctacaaatgtgaagaatgtggcaaagcttttaaccggtcctcaaatcttactaaacataaaataattcatactggagagaaaccctacaaatgtgaagaatgtggcaaagcttttaaccggtcctcaacccttactaaacataaaagaattcatacagaagagaaaccctacaaatgtgaagaatgtggcaaggcctttaaccagttctcgattcttaataaacataagagaattcatatggaagataaaccctacaaatgtgaagaatgtggcaaagcctttagagtattctcaattcttaaaaaacataagataatccatactggggaaaaaccatacaaatgtgaagaatgtggcaaagcctttaaccagttctcaaaccttactaaacataagataattcatactggagagaaaccctacaaatgtgatgaatgtggcaaagcctttaaccagtcctcaacccttactaaacataaaagaattcatacgggagaaaaaccctacaaatgtgaagaatgtggcaaagcttttaaacagtcctcaacccttactgaacataagataattcatactggagagaaaccctacaaatgtgaaaaatgtggcaaggcctttagctggtcctcagcttttactaaacataagagaaatcatatggaagataaaccctacaaatgtgaagaatgtggcaaagcctttagtgtattctcaacccttactaaacataaaataattcatactagagaaaaaccctacaaatgtgaagaatgtggcaaagcctttaaccagtcctcaatttttactaaacataagataattcacactgaagggaaatcctacaaatgtgaaaaatgtggcaatgcttttaaccagtcctcaaaccttactgcacgtaagataatttatactggagagaaaccctacaaatatgaagaatgtgacaaagcctttaacaagttctcaacccttattacacatcagataatttatactggagagaaaccctgcaaacatgaatgtggcagagcctttaacaaatcctcaaattatactaaagagaaactacaaacctgaaagatgtgacaatgattttcactacacctcaaacttttctaaacataaaccatattggtgccctagaaatgtgaggaatatgacaaggactttaaatggttgtcacgcttgattgtaggtaagataatttatattggagaaaaatcctccaagtatgaagaatgtggcaaacttttaaccaatcctcacaccttattgcacaggaaagcatttatacttgagaaaaattgtataaagaatatggaaaagccatttatatctgctcacatgtaaaaacatcagttcatacttaataaaatgcaattaccgtcaaatctttcagaaaatataagcctttaatacgaggaagagtattcttaagatgaacattacaaatagaaagagggttgtagtacctttagttttatgatagatcttattgtacacattttgtaccagaggaaaaccctaaagcattagttgctcaaactttgttcgacatcagggaatttgtattggagaaaaaccctgcaaatgtaataaatatggaaaaacattttttcaaaaactacagcttggaaaacatcagagagttcatactaaaatatatttttgcagatgcagtaaatatgaaaaatatttaatcccaaattaagtctatgtaaatatcagaattcacagtagaaatcataaggcataaggcactgatacttcagacattacactaaattagagtgttgagtataggagatccaaaactaaaattgttaggtaagttatttatatataactttaaaagaagtagaagattttttggagatttataattacattcaaagtatacttttttcttgaaaaaaattacagattttttgaaaagcaattgatgtaatttaactctcaaattcatgtttttcttcattcctattatattcacatgtgaaagcaagtgatctgttgttgctgaatcagagatatgagagattcttttttataggtgggcattatttatgcccctttctgtggaagagtaagaaaattaaaatacaagatgcatgaggaaaatgtagagatgctctttgtgattaacttagaatattaagtgctacttgaggtacatgttcagactaacattcttttgcagtatagtgagaaaaaaacattttaaaattaattatcattttgttgattgtgcttttatgtaataaaatgcagtactttaaaacattt

SEQ ID NO: 35397 - DNA, 2957 bp, Homo sapiens
  source 1..2957: mol_type = unassigned DNA
gtctagtcttcactgctctgcgtcctgtgctgataaaggctcgccgctgtgaccctgttacctgcaagaacttggaggttcacagctaagacgccaggaccccctggaagcctagaaatggtattgctgtctctaagccagacctgatcacctggctggagcaaggaaaagagccctggaatctgaagagacatgagatggtagacaaaaccccagttatgtgttctcattttgcccaagatgtttggccagagcacagcataaaagattctttccaaaaagtgatactgagaacatatggaaaatatggacatgagaatttacagctaagaaaagaccataaaagtgtggatgcatgtaaggtgtacaaaggaggttataatggacttaaccagtgtttgacaactactgacagcaagatatttcagtgtgataaatatgtgaaagtctttcataaatttccaaatgtaaatagaaataagataagacatactggaaagaaacctttcaaatgtaaaaaccgtggcaaatcattttgcatgctttcacaattaactcaacataagaaaattcatactagagagtattcttacaaatgtgaagaatgtggtaaagcctttaactggtcctcaacccttactaaacataagataattcatactggagaaaaaccctacaaatgtgaagaatgtggcaaagcttttaaccggtcctcaaatcttactaaacataaaataattcatactggagagaaaccctacaaatgtgaagaatgtggcaaagcttttaaccggtcctcaacccttactaaacataaaagaattcatacagaagagaaaccctacaaatgtgaagaatgtggcaaggcctttaaccagttctcgattcttaataaacataagagaattcatatggaagataaaccctacaaatgtgaagaatgtggcaaagcctttagagtattctcaattcttaaaaaacataagataatccatactggggaaaaaccatacaaatgtgaagaatgtggcaaagcctttaaccagttctcaaaccttactaaacataagataattcatactggagagaaaccctacaaatgtgatgaatgtggcaaagcctttaaccagtcctcaacccttactaaacataaaagaattcatacgggagaaaaaccctacaaatgtgaagaatgtggcaaagcttttaaacagtcctcaacccttactgaacataagataattcatactggagagaaaccctacaaatgtgaaaaatgtggcaaggcctttagctggtcctcagcttttactaaacataagagaaatcatatggaagataaaccctacaaatgtgaagaatgtggcaaagcctttagtgtattctcaacccttactaaacataaaataattcatactagagaaaaaccctacaaatgtgaagaatgtggcaaagcctttaaccagtcctcaatttttactaaacataagataattcacactgaagggaaatcctacaaatgtgaaaaatgtggcaatgcttttaaccagtcctcaaaccttactgcacgtaagataatttatactggagagaaaccctacaaatatgaagaatgtgacaaagcctttaacaagttctcaacccttattacacatcagataatttatactggagagaaaccctgcaaacatgaatgtggcagagcctttaacaaatcctcaaattatactaaagagaaactacaaacctgaaagatgtgacaatgattttcactacacctcaaacttttctaaacataaaccatattggtgccctagaaatgtgaggaatatgacaaggactttaaatggttgtcacgcttgattgtaggtaagataatttatattggagaaaaatcctccaagtatgaagaatgtggcaaacttttaaccaatcctcacaccttattgcacaggaaagcatttatacttgagaaaaattgtataaagaatatggaaaagccatttatatctgctcacatgtaaaaacatcagttcatacttaataaaatgcaattaccgtcaaatctttcagaaaatataagcctttaatacgaggaagagtattcttaagatgaacattacaaatagaaagagggttgtagtacctttagttttatgatagatcttattgtacacattttgtaccagaggaaaaccctaaagcattagttgctcaaactttgttcgacatcagggaatttgtattggagaaaaaccctgcaaatgtaataaatatggaaaaacattttttcaaaaactacagcttggaaaacatcagagagttcatactaaaatatatttttgcagatgcagtaaatatgaaaaatatttaatcccaaattaagtctatgtaaatatcagaattcacagtagaaatcataaggcataaggcactgatacttcagacattacactaaattagagtgttgagtataggagatccaaaactaaaattgttaggtaagttatttatatataactttaaaagaagtagaagattttttggagatttataattacattcaaagtatacttttttcttgaaaaaaattacagattttttgaaaagcaattgatgtaatttaactctcaaattcatgtttttcttcattcctattatattcacatgtgaaagcaagtgatctgttgttgctgaatcagagatatgagagattcttttttataggtgggcattatttatgcccctttctgtggaagagtaagaaaattaaaatacaagatgcatgaggaaaatgtagagatgctctttgtgattaacttagaatattaagtgctacttgaggtacatgttcagactaacattcttttgcagtatagtgagaaaaaaacattttaaaattaattatcattttgttgattgtgcttttatgtaataaaatgcagtactttaaaaca

SEQ ID NO: 35398 - DNA, 2794 bp, Homo sapiens
  source 1..2794: mol_type = unassigned DNA
gaacagggcggcttctggtttggcgggtcctttgtctctcggtgcagccggagctccaggtctcctcttcactactctgtgtcctgtgctcctacaggcccagcctctgtggccctgtgacctgcaggtattgggagatccacagctaagacaccaggacccctggaagcctagaaatgggaccattgcaatttagagatgtggccatagaattctctctggaggagtggcattgcctggacactgcacagcggaatctatataggaatgtgatgttagagaactacagtaacctggtcttccttggtattgttgtctctaagccagacctgatcgcccatctggagcaaggaaaaaaacctttgactatgaagagacatgagatggtagccaacccctcagttatatgttctcattttgcccaagatctttggccagagcagaacataaaagattctttccaaaaagtgatactgagaagatatgaaaaacgtggacatggaaatttacagttaataaaaaggtgtgaaagtgtagatgagtgtaaggtgcacacaggaggttataatggacttaaccagtgtagtacaactacccagagcaaagtatttcaatgtgataaatatgggaaagtctttcataaattttcaaattcaaatagacataatataagacatactgaaaaaaaacctttcaaatgcatagaatgtggcaaagcttttaaccagttctcaacccttataacacataagaaaattcatactggagagaaaccctacatttgtgaagaatgtggcaaagcctttaagtactcctctgcccttaatacacataagagaattcatactggagagaaaccatacaagtgtgataaatgtgacaaagcctttattgcatcctcaacccttagtaaacatgagatcattcatactggaaagaaaccctacaagtgtgaagaatgtggcaaagcttttaaccaatcctcgacacttactaaacataagaaaattcatactggagagaaaccctacaaatgtgaagaatgtggcaaagcttttaaccaatcctcaacacttactaaacataagaaaattcatactggagagaagccctacgtttgtgaagaatgtggcaaagcctttaagtactcccgtatccttactacacataagagaattcatactggagagaaaccatacaagtgtaataaatgtggcaaagcctttattgcatcctcaacccttagtagacatgagttcattcatatgggaaagaaacattacaaatgtgaagaatgtggcaaagccttcatttggtcctcagtcctaactagacataagagagttcatactggagagaagccctacaaatgtgaagaatgtggcaaagcctttaagtactcctctacccttagttcacataagagaagtcatactggagagaaaccctacaaatgtgaagaatgtggcaaagcctttgttgcatcctcaacccttagtaaacatgagatcattcatactggaaagaaaccctacaagtgtgaagaatgtggcaaagcttttaaccagtcctcatcccttactaaacataagaaaattcatactggagagaaaccctacaaatgtgaagaatgtggcaaagcttttaaccagtcctcttcccttactaaacataagaaaattcatactggagagaaaccctacaaatgtgaagaatgtggcaaagcttttaaccagtcctcaacccttattaaacataagaaaattcatactagagagaaaccctacaaatgtgaagaatgtggcaaagcttttcacctatccacacaccttactacacataagatacttcatactggagagaaaccttatagatgtagagaatgtggcaaagcttttaaccattctgcaaccctttcttcacataagaaaatccattctggagagaaaccatacgagtgtgataaatgtggcaaagcctttatttcaccctcaagccttagtagacatgagataattcatactggggagaaaccctagaagtgtgaagaatgtggcaaagccttcaagtggtcctcacaccttactatacactgagagttctgaacttactctgtaaccatcccaaactcctcccaggcacagtctggcagaggtcctgccatttcggagacctggaggaagtggcccatttacagccatgtaggcaggcctgcagaccttggcctttactacggtacctgaagtggttcaatgactcagtttcagttacctgagccacagcttaaggtcagttctgcctatatagaaacccacacagttaacctgaggaaatgctctctggtactcactgaaagccacactcatccacatcctgatacaaggcccaccatatgcagacctgactgccaaaacatgccctagtgtctgccgtacagagtgaagtcctgaaggatatttagtctgtccaaaactaaaatgaagatttcaactccccaaccccctctaacaagccagctaaaggtggactatagtgcagacccagcaaccttgtgaccaggctaaaacccctcatcactacaaattcagagggcatctcatcaccctaagggcccaacgaaagatctttaccttctaacatcagtttatgaaaacttgaaaaggtgtttgctccatcaaattcagacaccagtacaaaactatattatgcccattgtctggttctattttaatgtagcactggaagtgtgtggcagaagaattagtcaaagaaataaaaatagccattgaaattg

SEQ ID NO: 35399 - DNA, 1955 bp, Homo sapiens
  source 1..1955: mol_type = unassigned DNA
gaacagggcggcttctggtttggcgggtcctttgtctctcggtgcagccggagctccaggtctcctcttcactactctgtgtcctgtgctcctacaggcccagcctctgtggccctgtgacctgcaggtattgggagatccacagctaagacaccaggacccctggaagcctagaaatgggaccattgcaatttagagatgtggccatagaattctctctggaggagtggcattgcctggacactgcacagcggaatctatataggaatgtgatgttagagaactacagtaacctggtcttccttggtattgttgtctctaagccagacctgatcgcccatctggagcaaggaaaaaaacctttgactatgaagagacatgagatggtagccaacccctcagttatatgttctcattttgcccaagatctttggccagagcagaacataaaagattctttccaaaaagtgatactgagaagatatgaaaaacgtggacatggaaatttacagttaataaaaaggtgtgaaagtgtagatgagtgtaaggtgcacacaggaggttataatggacttaaccagtgtagtacaactacccagagcaaagtatttcaatgtgataaatatgggaaagtctttcataaattttcaaattcaaatagacataatataagacatactgaaaaaaaacctttcaaatgcatagaatgtggcaaagcttttaaccagttctcaacccttataacacataagaaaattcatactggagagaaaccctacatttgtgaagaatgtggcaaagcctttaagtactcctctgcccttaatacacataagagaattcatactggagagaaaccatacaagtgtgataaatgtgacaaagcctttattgcatcctcaacccttagtaaacatgagatcattcatactggaaagaaaccctacaagtgtgaagaatgtggcaaagcttttaaccaatcctcgacacttactaaacataagaaaattcatactggagagaaaccctacaaatgtgaagaatgtggcaaagcttttaaccaatcctcaacacttactaaacataagaaaattcatactggagagaagccctacgtttgtgaagaatgtggcaaagcctttaagtactcccgtatccttactacacataagagaattcatactggagagaaaccatacaagtgtaataaatgtggcaaagcctttattgcatcctcaacccttagtagacatgagttcattcatatgggaaagaaacattacaaatgtgaagaatgtggcaaagccttcatttggtcctcagtcctaactagacataagagagttcatactggagagaagccctacaaatgtgaagaatgtggcaaagcctttgttgcatcctcaacccttagtaaacatgagatcattcatactggaaagaaaccctacaagtgtgaagaatgtggcaaagcttttaaccagtcctcatcccttactaaacataagaaaattcatactggagagaaaccctacaaatgtgaagaatgtggcaaagcttttaaccagtcctcttcccttactaaacataagaaaattcatactggagagaaaccctacaaatgtgaagaatgtggcaaagcttttaaccagtcctcaacccttattaaacataagaaaattcatactagagagaaaccctacaaatgtgaagaatgtggcaaagcttttcacctatccacacaccttactacacataagatacttcatactggagagaaaccttatagatgtagagaatgtggcaaagcttttaaccattctgcaaccctttcttcacataagaaaatccattctggagagaaaccatacgagtgtgataaatgtggcaaagcctttatttcaccctcaagccttagtagacatgagataattcatactggggagaaaccctag

SEQ ID NO: 35400 - DNA, 530 bp, Homo sapiens
  source 1..530: mol_type = unassigned DNA
gtctctcggtgcagccggagctccaggtctcctcttcactactctgtgtcctgtgctcctacaggcccagcctctgtggccctgtgacctgcaggtattgggagatccacagctaagacaccaggacccctggaagcctagaaatgggaccattgcaatttagagatgtggccatagaattctctctggaggagtggcattgcctggacactgcacagcggaatctatataggaatgtgatgttagagaactacagtaacctggtcttccttggtattgttgtctctaagccagacctgatcgcccatctggagcaaggaaaaaaacctttgactatgaagagacatgagatggtagccaacccctcagttatatgttctcattttgcccaagatctttggccagagcagaacataaaagattctttccaaaaagtgatactgagaagatatgaaaaacgtggacatggaaatttacagttaataaaaaggtgtgaaagtactccatctgaaaaagaaaaaaaaaagaaa

SEQ ID NO: 35401 - DNA, 2260 bp, Homo sapiens
  source 1..2260: mol_type = unassigned DNA
gtctttgtctctcgctgcagccggagttcctggtctcgtcttcgcccttctgtgtcctctgctcgtagaggcccagcctctgtggccctgtgacctgcaggtattgggaatccacagctaagatgccaggaccccttggaagcctagaaatgggagtgttgacatttagggatgtggccttagaattctctctggaggagtggcaatgcctggacaccgcacagcagaatttatataggaatgtgatgttagagaactacagaaacctggtctttgtgggtattgctgcctctaagccagacctgatcacctgtctggagcaaggaaaagaaccttggaatgtgaagagacatgagatggtaactgaacccccagttgtatattcttattttgcccaagacctttggccaaagcagggcaaaaaaaattatttccaaaaagtgatactgagaacatataaaaaatgtggacgtgaaaatttacagttaagaaaatactgtaaaagcatggatgagtgtaaggtgcacaaagaatgttacaatggacttaaccagtgtttgacaactacccagaacaaaatatttcaatatgacaaatatgtgaaagtctttcataaattttcaaattcaaacagacataagataggacatactggaaagaaatctttcaagtgtaaagaatgtgaaaagtcattttgcatgctttcacacttagctcaacataaaagaattcatagtggagagaaaccctacaaatgtaaagaatgtgggaaagcctataatgaggcctcaaacctttctacacataaaagaattcatactggaaagaaaccctacaaatgcgaagagtgtggaaaagcctttaaccggctctcacaccttactacacataagataattcatactggaaagaaaccctacaaatgtgaggagtgtggcaaagcttttaaccaatctgcaaaccttactacacataagagaattcatactggagagaaaccctacaaatgtgaagaatgtggcagagcttttagccagtcctcaacccttactgcacataagataattcatgctggagagaaaccttacaaatgtgaagaatgtggcaaagcttttagccagtcctcaacccttactacacataagataattcatactggagagaaattctacaaatgtgaagaatgtggtaaggcctttagccggttatcccaccttactacacataagagaattcattctggagagaaaccctacaagtgtgaagaatgtggcaaagcttttaaacaatcctcaacccttactacacataagagaattcatgctggagagaaattctacaaatgtgaagtatgtagcaaagcctttagccggttctcacaccttactacacataagagaattcatactggagagaagccctacaaatgtgaagaatgtggcaaagcttttaacctatcatcacaacttactacacataagataattcatactggagagaaaccctacaaatgtgaagaatgtggcaaagcttttaaccagtcctcaactctttctaaacataaggtaattcatactggagagaagccctacaaatgtgaagaatgtggcaaagcttttaaccagtcctcacaccttactacacataagatgattcatactggagagaaaccctacaagtgtgaagaatgcggcaaagcctttaacaactcctctattcttaacagacataagatgattcatactggagagaaactctacaaacctgaaagttgtaacaatgcttgtgacaacattgcaaagatttccaaatataaaagaaattgtgctggtgagaaataatagaaatatgaatgtgacaaagcctttaaatggttatcacactggattgtaggtaaggtaattcattctggagaaaacttctacaagtgtgaacagtgtggcaaaacttacacaatgctcaaaccttattgcacaggaaagcctttatacttgatgagaacaaatgtacaaatataaagaaagtaaaaaagtgattaatatctgcacacatcttattcagcatcagagaatttatacttaatagcattaaaggtgcaattactgtcaaaagagttcagaaaatataagcatttaaagtgctgaagaggatttattttgaagacaaacattacaaatataaacgaagttgtggtaactttacttgtaacacagatcttgttgtattcattctgtattagagcaaaccctgaggcaattgc

SEQ ID NO: 35402 - DNA, 3114 bp, Homo sapiens
  source 1..3114: mol_type = unassigned DNA
atgtctttttggtctgaaaaatgtacaagacttattctgtatgatttaaaaatagcactcaaaaatggatcgttgacattttgggatgtgaccatagaattcgctctggaggagtggcaatgcctggacatggctcagcagaatttatataggaatgttatgttagagaactacagaaacctggtcttcctgggtatcgctgtctctaagctagacttgataacttgtctgaagcaagggaaagagccttggaatatgaagagacatgagatggtaactaaacccccagttattagttctcattttacacaagacttttggccagatcagagcataaaagattctttccaagaaataatattgagaacatatgcaagatgtggacataagaatttacgattaagaaaagattgtgaaagtgtcaatgagggtaagatgcacgaagaagcttataataaacttaaccaatgttggacaactacccagggaaaaatatttcagtgtaacaaatatgtgaaagtctttcataaatattcaaattcaaatagatataagataattcatactgggaagaaaccatataaatgtgaagaatgtggcaaagcttttaagcaatcctcacaccttactagacataaagcaattcatactggagagaaaccctacaaatgcgaagaatgtggcaaagcttttaaccatttctcagcccttagaaaacatcagataattcatactggaaagaaaccctacaaatgtgaagaatgtggcaaagcttttagccagtcctcaacccttagaaaacatgagataattcatactgaagagaaaccctacaaatatgaagaatgcggcaaagcttttagcaatttgtcagcccttagaaaacatgagataattcatactggacagaaaccctacaaatgtgaagaatgtggtaaagcttttaagtggtcctcaaaacttactgtacataaggtaattcatactgcagagaaaccctgcaaatgtgaagaatgtggcaaagcttttaagcgtttctcagcccttagaaaacataagataattcatactggaaagcaaccctacaaatgtgaagaatgcagcaaagcttttagcaatttttcagcccttagaaaacatgagataattcatactggagagaaaccctacaaatgtgaagaatgtggtaaagcttttaagtggtcctcaaaacttactgtacataaggtaattcatatggaagagaaaccttgcaaatgtgaagaatgtggcaaagcttttaagcatttctcagcccttagaaaacataagataattcatactggaaagaaaccctacaaatgtgaagaatgtggcaaagcttttaacaattcctcaacccttatgaaacataagataattcatactgggaagaaaccatacaaatgtgaagaatgtggcaaagcttttaagcaatcttcacatcttactagacataaagcaattcatactggggagaaaccctacaaatgtgaagaatgtggcaaagcttttaaccacttctcagcccttagaaaacatcagataattcatactggaaagaaaccctacaaatgtgaagaatgtggcaaagcttttagccagtcctcaacccttagaaaacatgagataattcatactggagagaaaccctacaaatgtgaagaatgtggtaaagcttttaagtggtcctcacaccttactagacataaagtaattcatactgaagagaaaccctacaaatgtgaagaatgtggcaaggcttttaaccatttctcagcccttaggaaacataagataattcatactggaaagaaaccctacaaatgtgaagaatgtggcaaagcttttagccagtcctcaactcttagaaaacatgagataattcatactggagagaaaccctacaaatgtgaagaatgtggtaaagcttttaagtggtcctcaaaacttactgtacataaggtaattcatactgcagagaaaccctgcaaatgtgaagaatgtggcaaagcttttaagcatttctcagcccttagaaaacataagataattcatactggaaagaaaccctataaatgtgaagaatgtggcaaagcttttaacaattcctcaacccttagaaaacatgagataattcatactggagagaaatcctacaaatgtgaagaatgtgcccttagaaaacatgagataattcatactggaaagaaaccctacaaatgtgaagaatgtggcaaagcttttaacaattcctcaacccttaggaaacataagataatttatactgggaagaaaccatacaaatgtgaagaatgtggcaaagcttttaagcagtcctcacaccttactagacataaagcagttcatactggggagaagccctacaaatgtggagaatgtggaaaagcttttaacaattcctcaacccttaagaaacataagctaattcatactagggagaaatcgtacaaatgtgaagaatgtggcaaagcttttagcaatttctcagcccttaggaaacataagataattcatactggggagaaaccatacaaatgtgaagaatgtgaatgtggcaaagcttttaacaattcctcaacccttatgaaacataagataattcatactggggagaaaccgtacaaatgtgaagaatgtggcaaaggttttaacaatttctcgacccttatgaaacataagataattcatactggggagaaaccgtacaaatgtgaagaatgtggcaaagcttttaagcaatcctcacaccttactaaacataaatcaattcatactggagagaaaccctacaaatgtgaagaacgtggcaaagcttttagccatttctcacgccttactaaacataggataattcatactggaaagaaaccctacaaatgtgaagagtgtggagagaaaccctacaaatgtgaagaatgtggcaaagcctttaaccagtcctcacaccttactcaacataaaacaattcatactggagggaaaacctacaaatgtgaagaatgtggcaaagcttttaaccatctttcagcccttactaaacataagataattcatactggggagaagccctaa

SEQ ID NO: 35403 - DNA, 3345 bp, Homo sapiens
  source 1..3345: mol_type = unassigned DNA
cgccgctcgccgcccgcgggttccattgagaaaagccgagcggccgcggcggcggcggcgagtgcgcgggagcggaggagccggcacccgcccgtcgggcagtccgcgcgcccgcaacgcaggaccgtggcctctcgggcctccgcggcagctccagcggctccggggctgggcgcgcgggctgggggcgcgggccggggcggccgcggagaccgggggccgggggcatgagcggccccgcggccccgccgcgcccccgccgcccgccgccgcccgcccggggctagaggcggccgccgggagggcgcgcggcgccggagacatgtccaggcggaaacagagcaacccccggcagatcaagcgttccctcggagacatggaggccagagaggaggtgcagttggtgggtgccagccacatggagcaaaaggccacggcacctgaagccccgagccctcccagcgcagatgttaactcacccccaccgctgccgccccccacatccccaggaggccccaaggagctggaaggacaggaaccagaacccaggcccacggaggaagagccgggcagtccctggagcgggccagacgagctggagccggtggtgcaggatgggcagaggcgcatacgggcccgactcagcctcgccacgggcctgtcctggggcccgttccatgggagtgtccagaccagagcctcatcccccaggcaggcggagccgagcccagccctgaccctgctgctggtggacgaggcctgctggctgaggacgctgccccaggccctgactgaggccgaggccaacacagagatccacaggaaggatgacgcactctggtgcagggtcaccaagccggtgcctgcggggggactcctgagcgtgctcctcacggccgagccccacagcacccccggccaccctgtgaagaaggagccagcagagcccacgtgcccggcccctgcacacgacctccagctcctgccccagcaggccgggatggcctccatccttgccaccgcagtgatcaacaaagacgtcttcccctgcaaggactgtggcatctggtaccgcagcgagcgcaacctgcaggcgcacctgctctactactgcgccagccgccagggcaccggctccccggccgcagccgccacagacgagaagcccaaagagacctaccccaacgagcgcgtctgccccttcccccagtgccgcaagagctgccccagcgccagctccctggagatccacatgcgcagccacagcggagagcggcccttcgtgtgcctgatctgcctgtcggccttcaccaccaaggccaactgcgagcggcacctcaaggtgcacacggacacgctgagcggtgtctgccacagctgtggcttcatctccaccacaagggacatcctctacagccacttggtcaccaaccacatggtctgccagcctggctccaagggtgagatctactcgccaggggccggacacccagcaaccaagctgcccccagacagtctgggcagcttccagcagcagcacacggccctgcaaggccccctggcctccgcggacctgggcctggcgcccaccccatcgccaggactggacagaaaggccctggccgaggccaccaacggagaggccagagcggagcctctggcccagaatggaggcagcagcgagcccccggcggcccccaggagcatcaaggtggaggcggtggaggagccggaggcggcccccatcctgggccccggagagcctgggccccaggccccgtcgcggacgccgtcgccgcgcagccccgccccggccagggtcaaggccgagctgtccagccccacgccgggctccagcccggtgcccggcgagctgggcctggccggggccctgttccttccgcagtacgtgttcgggcccgacgcggcgccccccgcctcggagatcctggccaagatgtccgagctggtgcacagccggctgcagcagggcgcgggcgcgggcgccggcggcgcgcagaccgggctcttccccggggcccccaagggcgctacgtgcttcgagtgcgagatcaccttcagcaacgtcaacaactactacgtgcacaagcgcctctactgttcaggccgccgtgcgcccgaggacgcgcctgccgcgcgcaggcccaaggcgccccccggcccggcccgcgcgccccccggccagcccgccgaacccgacgcgccgcgctcgtccccgggccccggagcgcgcgaggagggggctgggggcgcggccacgcccgaggacggcgcgggcggccggggcagcgagggcagccagagcccgggtagctccgtggacgacgcggaggacgaccccagccgcacgctgtgcgaggcctgcaacatccgcttcagccgccacgagacctacaccgtgcacaagcggtactactgcgcctcgcgccacgacccgccgccgcgccgaccggccgcgcccccgggaccccctgggccggccgcgcccccggccccctctcccgccgcgcctgtgcgcacgcgcagacgccgcaagctctacgagctgcacgcggccggcgccccgccccccccgccgcccggccacgcccccgcgcccgagtcgccgcggcccggaagcggaagcggaagcggccccggcctcgcccctgcgcgctcgcccggccccgcggccgacggccccatcgacctgagcaagaagccgcggcgcccgctccccggagccccggcaccggcgctggccgactaccacgagtgcacggcctgccgcgtgagcttccacagcctcgaggcctacctggcgcacaagaagtactcgtgccccgctgcgccaccgcccggcgcgctcggcctgcccgccgccgcctgcccctactgccccccgaacggcccggtgcgcggggacctgctggagcatttccgcctggcgcacggcctgctgctcggcgcgcccctggccggcccgggggtcgaggcccggacgccggccgaccgcggcccctcgcccgctcccgcccccgccgcctccccgcagcccgggtcccgtggcccccgggacggcctcggcccggagccccaggagccgccgcccggcccgcccccgtccccggccgccgcgcccgaggccgtgccgcccccgccggcgcccccctcctactcggacaagggcgtccagactcccagcaagggcacgccggcgccgctgcccaacggcaaccaccggtactgccgtctttgcaacatcaagttcagcagcctgtccaccttcatcgcccacaagaagtattactgctcctcgcacgccgccgagcacgtgaagtgagc

SEQ ID NO: 35404 - DNA, 3268 bp, Homo sapiens
  source 1..3268: mol_type = unassigned DNA
agggggtcagctttggtgtacaactacgaaggccatctctgagggtgaagagctaattgcctttgtggtggattttgactcaaggctacaagctgccagtcagatgactctcacagaagggatgtaccctgcacgcctgctggactcaattcagctgcttcctcagcaagctgccatggcttctattttgcccacagctattgtcaataaatgacacttcatatgacacaaaatcagtcgtctggagtcccaagatctgtgttctagccatatctgatttttatctagctctatgaaaacacatgagtagcagacacatcttaagaggagaatagattctgaagttagtagaaatatcagattccacatgtctaacgtgaacatgtgccactgtttgcctggcttagtcccattgtacatttttatctggcatccctctggatggtgactcctttcctctacgaaagtcctgagtttgcacaatacaagaggatatattcccttgcaagtcctgtggcatctggtatcggagtgagcggaatctgcaggcccatttgatgtactactgcagtgggaggcaaagagaagctgctccggtgtcagaggaaaatgaagacagtgcccatcagatttccagcctgtgccccttcccacagtgcaccaagagcttttcaaatgctcgagctctagaaatgcacctgaattcacacagtggagtgaaaatggaagaattcctgccccctggtgctagtctaaaatgcaccgtctgtagctacactgctgattccgtgatcaactttcaccaacacctgttctcccatctcactcaagctgccttccgatgtaatcactgccatttcggcttccagactcagagggagttattgcagcaccaggagctccatgtccctagcggcaaacttcccagagaaagtgacatggaacactctccaagtgcaactgaagacagcttacagccagccacagacttattgaccagaagcgaacttccccagagccaaaaggccatgcagactaaagatgcgagctctgacacagagctggacaagtgtgagaaaaagactcagctctttctcacgaaccagagaccagagatacagcctacaacaaataaacaaagcttttcttacacaaaaataaagtctgagccctctagcccaagacttgcctcatctccagttcagcctaatattgggccttctttccctgtgggccctttcctatctcagttttctttcccccaagatatcaccatggtccctcaagcttcagagatcttagctaagatgtctgaactggtgcatcggcgactgaggcatggcagtagtagctaccctcccgtcatttacagccctttgatgcccaagggggctacttgttttgagtgtaacataacattcaataatttggataattatctagtgcacaaaaagcattattgcagcagccgatggcagcagatggctaagtccccagagttccctagtgtgtcagaaaagatgcctgaagctttgagtcccaacactggccaaacctccataaaccttctcaacccagctgctcattctgctgatcctgagaatccacttcttcaaacatcttgcatcaattcttccactgtcttagatttaattgggccaaatgggaagggccatgacaaggacttttccactcaaactaagaagctctccacctccagtaacaatgatgacaaaattaatggaaaacctgttgatgtgaaaaatcccagtgtccccttagtggatggggaaagtgacccaaataagactacctgtgaagcttgcaacattaccttcagccggcacgaaacatacatggtccacaaacagtattactgtgctacacgccacgaccctccactgaagaggtctgcttccaacaaagtgcctgccatgcagagaaccatgcgcacacgcaagcgcagaaagatgtatgagatgtgcctacctgagcaggaacaaaggcctccactggttcagcagagatttcttgacgtagccaacctcaataatccttgtacctccactcaagaacccacagaagggctaggagagtgctaccacccaagatgtgatatctttccaggaattgtctctaaacacttggaaacttctctgacgatcaacaagtgtgttccagtttccaaatgtgatactactcattccagtgtttcctgcctagagatggacgtgcccatagatctcagcaaaaagtgtttatctcagtctgagcggacgaccacgtctcccaaaaggctgctggactatcacgagtgcactgtgtgcaagatcagtttcaataaggtagaaaactatctggcccacaagcagaatttctgcccggttactgcacatcagcgtaatgacctgggtcaactggacggcaaagtgtttccgaatccagaaagcgaacgaaacagccctgatgtcagctacgaaagaagcataataaaatgtgagaaaaatgggaatttgaagcagccttcccccaatggaaacttattttcatcccacctagcaaccctgcaaggcttgaaggtctttagtgaagctgctcagctcattgctacaaaagaagaaaacagacatttgtttcttccacaatgcctttaccctggagcaataaagaaagcaaaaggagccgaccagctttctccatattatggaatcaagccaagtgattatatttctggttctcttgtcatccataacactgacatcgagcaaagcagaaatgcagaaaatgaatctcctaaaggccaggcttcctcaaatgggtgtgctgcgctgaagaaagattctctgccattgttgcccaaaaatcgaggaatggtaatagtgaatggtggactgaaacaagatgagagacctgctgccaacccacagcaagagaacatttcccagaatcctcagcacgaagacgaccacaaatctccctcgtggatctctgagaacccattagctgccaatgagaatgtctcaccaggaattccctcagcagaggaacagttgtctagtatagcaaaaggtgtgaatggttccagccaggctccaaccagtgggaaatattgccggctatgtgatatccagttcaacaacctttcaaactttataactcacaagaagttttattgctcatcacatgcagcagaacatgtcaaatgaactaactaaacatcagtcacctttggtatcagtgtttagtatgttgttctaaccagtccaga

SEQ ID NO: 35405 - DNA, 4700 bp, Homo sapiens
  source 1..4700: mol_type = unassigned DNA
ctctccccctcccctcctcactgtcacactctctgtgcccccgtctctcttctctcatttgcttgctcatctccgaacgtgaatccgcggctcccggaggagcccagcgcccggagcacctggagtccggccggcggcgggccgagcctggccagcggcggcggcggcggcggcggcggcgggagccgagggagcggcagccgcgaccgcgggcaccgcgggagccccagcggcagcagccgccgccgagatgtcccggcgaaagcaaagcaaaccccggcagatcaaacggccgcttgaagatgccattgaagatgaggaagaagaatgtccatcagaggaaacagacatcatctccaaaggagactttccattggaggaaagcttttccacagaatttgggcctgaaaatctgagctgcgaagaagtggaatacttttgtaacaaaggtgatgatgaaggaatccaggagacagcagaatcagatggggacacacagtcagagaaaccggggcaacctggagttgagacagacgactgggatggaccaggagagctggaggtgtttcagaaagatggggaacgaaaaattcagagtcgacagcaacttccagtgggaacaacctgggggccgtttcctgggaagatggacttgaataataattctttgaagacaaaggctcaggtcccaatggtgctgactgctggtcccaagtggttgctggatgtgacttggcaaggagtggaagacaacaaaaacaactgcattgtgtacagcaaagggggtcagctttggtgtacaactacgaaggccatctctgagggtgaagagctaattgcctttgtggtggattttgactcaaggctacaagctgccagtcagatgactctcacagaagggatgtaccctgcacgcctgctggactcaattcagctgcttcctcagcaagctgccatggcttctattttgcccacagctattgtcaataaggatatattcccttgcaagtcctgtggcatctggtatcggagtgagcggaatctgcaggcccatttgatgtactactgcagtgggaggcaaagagaagctgctccggtgtcagaggaaaatgaagacagtgcccatcagatttccagcctgtgccccttcccacagtgcaccaagagcttttcaaatgctcgagctctagaaatgcacctgaattcacacagtggagtgaaaatggaagaattcctgccccctggtgctagtctaaaatgcaccgtctgtagctacactgctgattccgtgatcaactttcaccaacacctgttctcccatctcactcaagctgccttccgatgtaatcactgccatttcggcttccagactcagagggagttattgcagcaccaggagctccatgtccctagcggcaaacttcccagagaaagtgacatggaacactctccaagtgcaactgaagacagcttacagccagccacagacttattgaccagaagcgaacttccccagagccaaaaggccatgcagactaaagatgcgagctctgacacagagctggacaagtgtgagaaaaagactcagctctttctcacgaaccagagaccagagatacagcctacaacaaataaacaaagcttttcttacacaaaaataaagtctgagccctctagcccaagacttgcctcatctccagttcagcctaatattgggccttctttccctgtgggccctttcctatctcagttttctttcccccaagatatcaccatggtccctcaagcttcagagatcttagctaagatgtctgaactggtgcatcggcgactgaggcatggcagtagtagctaccctcccgtcatttacagccctttgatgcccaagggggctacttgttttgagtgtaacataacattcaataatttggataattatctagtgcacaaaaagcattattgcagcagccgatggcagcagatggctaagtccccagagttccctagtgtgtcagaaaagatgcctgaagctttgagtcccaacactggccaaacctccataaaccttctcaacccagctgctcattctgctgatcctgagaatccacttcttcaaacatcttgcatcaattcttccactgtcttagatttaattgggccaaatgggaagggccatgacaaggacttttccactcaaactaagaagctctccacctccagtaacaatgatgacaaaattaatggaaaacctgttgatgtgaaaaatcccagtgtccccttagtggatggggaaagtgacccaaataagactacctgtgaagcttgcaacattaccttcagccggcacgaaacatacatggtccacaaacagtattactgtgctacacgccacgaccctccactgaagaggtctgcttccaacaaagtgcctgccatgcagagaaccatgcgcacacgcaagcgcagaaagatgtatgagatgtgcctacctgagcaggaacaaaggcctccactggttcagcagagatttcttgacgtagccaacctcaataatccttgtacctccactcaagaacccacagaagggctaggagagtgctaccacccaagatgtgatatctttccaggaattgtctctaaacacttggaaacttctctgacgatcaacaagtgtgttccagtttccaaatgtgatactactcattccagtgtttcctgcctagagatggacgtgcccatagatctcagcaaaaagtgtttatctcagtctgagcggacgaccacgtctcccaaaaggctgctggactatcacgagtgcactgtgtgcaagatcagtttcaataaggtagaaaactatctggcccacaagcagaatttctgcccggttactgcacatcagcgtaatgacctgggtcaactggacggcaaagtgtttccgaatccagaaagcgaacgaaacagccctgatgtcagctacgaaagaagcataataaaatgtgagaaaaatgggaatttgaagcagccttcccccaatggaaacttattttcatcccacctagcaaccctgcaaggcttgaaggtctttagtgaagctgctcagctcattgctacaaaagaagaaaacagacatttgtttcttccacaatgcctttaccctggagcaataaagaaagcaaaaggagccgaccagctttctccatattatggaatcaagccaagtgattatatttctggttctcttgtcatccataacactgacatcgagcaaagcagaaatgcagaaaatgaatctcctaaaggccaggcttcctcaaatgggtgtgctgcgctgaagaaagattctctgccattgttgcccaaaaatcgaggaatggtaatagtgaatggtggactgaaacaagatgagagacctgctgccaacccacagcaagagaacatttcccagaatcctcagcacgaagacgaccacaaatctccctcgtggatctctgagaacccattagctgccaatgagaatgtctcaccaggaattccctcagcagaggaacagttgtctagtatagcaaaaggtgtgaatggttccagccaggctccaaccagtgggaaatattgccggctatgtgatatccagttcaacaacctttcaaactttataactcacaagaagttttattgctcatcacatgcagcagaacatgtcaaatgaactaactaaacatcagtcacctttggtatcagtgtttagtatgttgttctaaccagtccagaaaaaaaaataagctgtttgaattacatctgggcaatcaggagataattcattatggctgagttgaagacttaaggtgtaatttcattacagtccattagtaaagtgtattattggtgccattttcaaaaaaattaatttattttaccagcagtattcatagctgtggttatgttattttttatttaaaaactttatattaaagtcatttgtaatgttattgtatagttattgtgtagcacatatggtttgcactgtatagtagcttttaaagaaaatagtcacaatacagaaaagcattttagaaatagcttcaaaagcacttgtgtatcttgattttttcttatatgctgttgcagatatatgtatatgctaaaatataacttgcaaagatgttctaaatacacatgctataagttcgccttaagatttcaattcttggataatcaggctctgtttgcactttatattttagcagatacagtctcttagtcactaggctttgcatttgtatgtagctgtatgtttccgtccattttcttaatcctgaacctgtatgttaaatgaagatggcaatttttttcttgtatagtacttgtattttctttcgctgatgcagctctgtctcaatttttaaacctttgctgttaaatgcaatactttataaagaatgaacaaaattactggaagcagtattgtaagtaatgaggtagtattaatcagttttatcttttgaaaggcacagtctaaatcgaaaccctaaactcaatgctgcaagtatgaatttaattcatatataagatctatttaaatataagagtagcaatactgcacctggtgatcacaaagataatgttctacttctgatagaaataatttctcaacaaatgttgttactatgcatgtatatggatggaataaaattccagattgt

SEQ ID NO: 35406 - DNA, 3300 bp, Homo sapiens
  source 1..3300: mol_type = unassigned DNA
agattcttagaagacccttcagagtctgaagtaaagaaagttttgaacctgttttttcattctactgtagggcttctgaaaacaaggagagctggaggtgtttcagaaagatggggaacgaaaaattcagagtcgacagcaacttccagtgggaacaacctgggggccgtttcctgggaagatggacttgaataataattctttgaagacaaaggctcaggtcccaatggtgctgactgctggtcccaagtggttgctggatgtgacttggcaaggagtggaagacaacaaaaacaactgcattgtgtacagcaaagggggtcagctttggtgtacaactacgaaggccatctctgagggtgaagagctaattgcctttgtggtggattttgactcaaggctacaagctgccagtcagatgactctcacagaagggatgtaccctgcacgcctgctggactcaattcagctgcttcctcagcaagctgccatggcttctattttgcccacagctattgtcaataaggatatattcccttgcaagtcctgtggcatctggtatcggagtgagcggaatctgcaggcccatttgatgtactactgcagtgggaggcaaagagaagctgctccggtgtcagaggaaaatgaagacagtgcccatcagatttccagcctgtgccccttcccacagtgcaccaagagcttttcaaatgctcgagctctagaaatgcacctgaattcacacagtggagtgaaaatggaagaattcctgccccctggtgctagtctaaaatgcaccgtctgtagctacactgctgattccgtgatcaactttcaccaacacctgttctcccatctcactcaagctgccttccgatgtaatcactgccatttcggcttccagactcagagggagttattgcagcaccaggagctccatgtccctagcggcaaacttcccagagaaagtgacatggaacactctccaagtgcaactgaagacagcttacagccagccacagacttattgaccagaagcgaacttccccagagccaaaaggccatgcagactaaagatgcgagctctgacacagagctggacaagtgtgagaaaaagactcagctctttctcacgaaccagagaccagagatacagcctacaacaaataaacaaagcttttcttacacaaaaataaagtctgagccctctagcccaagacttgcctcatctccagttcagcctaatattgggccttctttccctgtgggccctttcctatctcagttttctttcccccaagatatcaccatggtccctcaagcttcagagatcttagctaagatgtctgaactggtgcatcggcgactgaggcatggcagtagtagctaccctcccgtcatttacagccctttgatgcccaagggggctacttgttttgagtgtaacataacattcaataatttggataattatctagtgcacaaaaagcattattgcagcagccgatggcagcagatggctaagtccccagagttccctagtgtgtcagaaaagatgcctgaagctttgagtcccaacactggccaaacctccataaaccttctcaacccagctgctcattctgctgatcctgagaatccacttcttcaaacatcttgcatcaattcttccactgtcttagatttaattgggccaaatgggaagggccatgacaaggacttttccactcaaactaagaagctctccacctccagtaacaatgatgacaaaattaatggaaaacctgttgatgtgaaaaatcccagtgtccccttagtggatggggaaagtgacccaaataagactacctgtgaagcttgcaacattaccttcagccggcacgaaacatacatggtccacaaacagtattactgtgctacacgccacgaccctccactgaagaggtctgcttccaacaaagtgcctgccatgcagagaaccatgcgcacacgcaagcgcagaaagatgtatgagatgtgcctacctgagcaggaacaaaggcctccactggttcagcagagatttcttgacgtagccaacctcaataatccttgtacctccactcaagaacccacagaagggctaggagagtgctaccacccaagatgtgatatctttccaggaattgtctctaaacacttggaaacttctctgacgatcaacaagtgtgttccagtttccaaatgtgatactactcattccagtgtttcctgcctagagatggacgtgcccatagatctcagcaaaaagtgtttatctcagtctgagcggacgaccacgtctcccaaaaggctgctggactatcacgagtgcactgtgtgcaagatcagtttcaataaggtagaaaactatctggcccacaagcagaatttctgcccggttactgcacatcagcgtaatgacctgggtcaactggacggcaaagtgtttccgaatccagaaagcgaacgaaacagccctgatgtcagctacgaaagaagcataataaaatgtgagaaaaatgggaatttgaagcagccttcccccaatggaaacttattttcatcccacctagcaaccctgcaaggcttgaaggtctttagtgaagctgctcagctcattgctacaaaagaagaaaacagacatttgtttcttccacaatgcctttaccctggagcaataaagaaagcaaaaggagccgaccagctttctccatattatggaatcaagccaagtgattatatttctggttctcttgtcatccataacactgacatcgagcaaagcagaaatgcagaaaatgaatctcctaaaggccaggcttcctcaaatgggtgtgctgcgctgaagaaagattctctgccattgttgcccaaaaatcgaggaatggtaatagtgaatggtggactgaaacaagatgagagacctgctgccaacccacagcaagagaacatttcccagaatcctcagcacgaagacgaccacaaatctccctcgtggatctctgagaacccattagctgccaatgagaatgtctcaccaggaattccctcagcagaggaacagttgtctagtatagcaaaaggtgtgaatggttccagccaggctccaaccagtgggaaatattgccggctatgtgatatccagttcaacaacctttcaaactttataactcacaagaagttttattgctcatcacatgcagcagaacatgtcaaatgaactaactaaacatcagtcacctttggtatcagtgtttagtatgttgttctaaccagtcc

SEQ ID NO: 35407 - DNA, 3960 bp, Homo sapiens
  source 1..3960: mol_type = unassigned DNA
gtaaaagttcgcgcctctgcggcgggcggccgtgcgtctctgccctgcgggcgcgggctggtggctggcaggtcgtgtcctgggacttcgggcgggtccggctcacgccgccaggacgctcagccgagcggggattcgggtggtgtctggccctggtggcgcgcggagtcctccctgggaggggccgccagtcacttcccagcgcggaagctggccgcttgaagatgccattgaagatgaggaagaagaatgtccatcagaggaaacagacatcatctccaaaggagactttccattggaggaaagcttttccacagaatttgggcctgaaaatctgagctgcgaagaagtggaatacttttgtaacaaaggtgatgatgaaggaatccaggagacagcagaatcagatggggacacacagtcagagaaaccggggcaacctggagttgagacagacgactgggatggaccaggagagctggaggtgtttcagaaagatggggaacgaaaaattcagagtcgacagcaacttccagtgggaacaacctgggggccgtttcctgggaagatggacttgaataataattctttgaagacaaaggctcaggtcccaatggtgctgactgctggtcccaagtggttgctggatgtgacttggcaaggagtggaagacaacaaaaacaactgcattgtgtacagcaaagggggtcagctttggtgtacaactacgaaggccatctctgagggtgaagagctaattgcctttgtggtggattttgactcaaggctacaagctgccagtcagatgactctcacagaagggatgtaccctgcacgcctgctggactcaattcagctgcttcctcagcaagctgccatggcttctattttgcccacagctattgtcaataaggatatattcccttgcaagtcctgtggcatctggtatcggagtgagcggaatctgcaggcccatttgatgtactactgcagtgggaggcaaagagaagctgctccggtgtcagaggaaaatgaagacagtgcccatcagatttccagcctgtgccccttcccacagtgcaccaagagcttttcaaatgctcgagctctagaaatgcacctgaattcacacagtggagtgaaaatggaagaattcctgccccctggtgctagtctaaaatgcaccgtctgtagctacactgctgattccgtgatcaactttcaccaacacctgttctcccatctcactcaagctgccttccgatgtaatcactgccatttcggcttccagactcagagggagttattgcagcaccaggagctccatgtccctagcggcaaacttcccagagaaagtgacatggaacactctccaagtgcaactgaagacagcttacagccagccacagacttattgaccagaagcgaacttccccagagccaaaaggccatgcagactaaagatgcgagctctgacacagagctggacaagtgtgagaaaaagactcagctctttctcacgaaccagagaccagagatacagcctacaacaaataaacaaagcttttcttacacaaaaataaagtctgagccctctagcccaagacttgcctcatctccagttcagcctaatattgggccttctttccctgtgggccctttcctatctcagttttctttcccccaagatatcaccatggtccctcaagcttcagagatcttagctaagatgtctgaactggtgcatcggcgactgaggcatggcagtagtagctaccctcccgtcatttacagccctttgatgcccaagggggctacttgttttgagtgtaacataacattcaataatttggataattatctagtgcacaaaaagcattattgcagcagccgatggcagcagatggctaagtccccagagttccctagtgtgtcagaaaagatgcctgaagctttgagtcccaacactggccaaacctccataaaccttctcaacccagctgctcattctgctgatcctgagaatccacttcttcaaacatcttgcatcaattcttccactgtcttagatttaattgggccaaatgggaagggccatgacaaggacttttccactcaaactaagaagctctccacctccagtaacaatgatgacaaaattaatggaaaacctgttgatgtgaaaaatcccagtgtccccttagtggatggggaaagtgacccaaataagactacctgtgaagcttgcaacattaccttcagccggcacgaaacatacatggtccacaaacagtattactgtgctacacgccacgaccctccactgaagaggtctgcttccaacaaagtgcctgccatgcagagaaccatgcgcacacgcaagcgcagaaagatgtatgagatgtgcctacctgagcaggaacaaaggcctccactggttcagcagagatttcttgacgtagccaacctcaataatccttgtacctccactcaagaacccacagaagggctaggagagtgctaccacccaagatgtgatatctttccaggaattgtctctaaacacttggaaacttctctgacgatcaacaagtgtgttccagtttccaaatgtgatactactcattccagtgtttcctgcctagagatggacgtgcccatagatctcagcaaaaagtgtttatctcagtctgagcggacgaccacgtctcccaaaaggctgctggactatcacgagtgcactgtgtgcaagatcagtttcaataaggtagaaaactatctggcccacaagcagaatttctgcccggttactgcacatcagcgtaatgacctgggtcaactggacggcaaagtgtttccgaatccagaaagcgaacgaaacagccctgatgtcagctacgaaagaagcataataaaatgtgagaaaaatgggaatttgaagcagccttcccccaatggaaacttattttcatcccacctagcaaccctgcaaggcttgaaggtctttagtgaagctgctcagctcattgctacaaaagaagaaaacagacatttgtttcttccacaatgcctttaccctggagcaataaagaaagcaaaaggagccgaccagctttctccatattatggaatcaagccaagtgattatatttctggttctcttgtcatccataacactgacatcgagcaaagcagaaatgcagaaaatgaatctcctaaaggccaggcttcctcaaatgggtgtgctgcgctgaagaaagattctctgccattgttgcccaaaaatcgaggaatggtaatagtgaatggtggactgaaacaagatgagagacctgctgccaacccacagcaagagaacatttcccagaatcctcagcacgaagacgaccacaaatctccctcgtggatctctgagaacccattagctgccaatgagaatgtctcaccaggaattccctcagcagaggaacagttgtctagtatagcaaaaggtgtgaatggttccagccaggctccaaccagtgggaaatattgccggctatgtgatatccagttcaacaacctttcaaactttataactcacaagaagttttattgctcatcacatgcagcagaacatgtcaaatgaactaactaaacatcagtcacctttggtatcagtgtttagtatgttgttctaaccagtccagaaaaaaaaataagctgtttgaattacatctgggcaatcaggagataattcattatggctgagttgaagacttaaggtgtaatttcattacagtccattagtaaagtgtattattggtgccattttcaaaaaaattaatttattttaccagcagtattcatagctgtggttatgttattttttatttaaaaactttatattaaagtcatttgtaatgttattgtatagttattgtgtagcacatatggtttgcactgtatagtagcttttaa

SEQ ID NO: 35408 - DNA, 2996 bp, Homo sapiens
  source 1..2996: mol_type = unassigned DNA
gtccggttcttgctatattgccccaggctggtctcgaactcctgggctcaagccgttctcccgcctcccactgcccgcctgtcactgccgtctgttccctgagctgtgctttacgctgggaaagacatagaagaactattaagaagatagaattgttttgctgcgcagtacagcaacagtggatgttcaagattaagattagagtcaagttgtgtgattaagacaggagctgtgactgatgagaattaaaggccatggatgaagatgggcttgaattacaacaagagccaaactcattttttgatgcaacaggagctgatggtacacacatggatggtgatcaaattgttgtggaagtacaagaaactgtttttgtttcagatgttgtggattcagacataactgtgcataactttgttcctgatgacccagattcagttgtaatccaagatgttattgaggacgttgttatagaagatgttcagtgcccagatatcatggaagaagcagatgtgtctgaaacggtcatcattcctgagcaagtgctggactcagatgtaactgaagaagtttctttagcacattgcacagtcccagatgatgttttagcttctgacattacttcagcctcaatgtctatgccagaacacgtcttgacgggtgattctatacatgtgtctgacgttggacatgttggacatgttggacatgttgaacatgtggttcatgatagtgtagtggaagcagaaattgtcactgatcctctgactaccgacgtagtttcagaagaagtattggtagcagactgtgcctctgaagcagtcatagatgccaatgggatccctgtggaccagcaggatgatgacaaaggcaactgtgaggactaccttatgatttccttggatgatgctggcaaaatagaacacgatggttcttctggaatgaccatggacacagagtcggaaattgatccttgtaaagtggatggcacttgccctgaggtcatcaaggtgtacatttttaaagctgaccctggagaagatgacttaggtggaactgtagacattgtggagagtgagcctgagaatgatcatggagttgaactgcttgatcagaacagcagtattcgtgttcccagggaaaagatggtttatatgactgtcaatgactctcagccagaagatgaagatttaaatgttgctgaaatcgctgacgaagtttatatggaagtgatcgtaggagaggaggatgctgcagcagcagcggcagccgccgccgtgcacgagcagcaaatggatgacaatgaaatcaaaaccttcatgccgattgcatgggcagcagcttatggtaataattctgatggaattgaaaaccggaatggcactgcaagtgccctcttgcacatagatgagtctgctggcctcggcagactggctaaacaaaaaccaaagaaaaggagaagacctgattccaggcagtaccaaacagcaataattattggccctgatggacatcctttgactgtctatccttgcatgatttgtgggaagaagtttaagtcgagaggttttttgaaaaggcacatgaaaaaccatcccgaacaccttgccaagaagaaataccgctgtactgactgtgattacactaccaacaagaagataagtttacacaaccacctggagagccacaagctgaccagcaaggcagagaaggccattgaatgcgatgagtgtgggaagcatttctctcatgcaggggctttgtttactcacaaaatggtgcataaggaaaaaggagccaacaaaatgcacaagtgtaaattctgtgaatacgagacagctgaacaagggttattgaatcgccacctcttggcagtccacagcaagaactttcctcatatttgtgtggagtgtggtaagggttttcgtcacccgtcagagctcaaaaagcacatgagaatccatactggggagaagccgtaccaatgccagtactgcgaatataggtctgcagactcttctaacttgaaaacgcatgtcaaaactaagcatagtaaagagatgccattcaagtgtgacatttgtcttctgactttctcggataccaaagaggtgcagcaacatgctcttatccaccaagaaagcaaaacacaccagtgtttgcattgcgaccacaagagttcgaactcaagtgatttgaaacgacacataatttcagttcacacgaaagactacccccataagtgtgacatgtgtgataaaggctttcacaggccttcagaactcaagaaacacgtggctgcccacaagggcaaaaaaatgcaccagtgtagacattgtgactttaagattgcagatccatttgttctaagtcgccatattctctcagttcacacaaaggatcttccatttaggtgcaagagatgtagaaagggatttaggcaacagagtgagcttaaaaagcatatgaagacacacagtggcaggaaagtgtatcagtgtgagtactgtgagtatagcactacagatgcctcaggctttaaacggcacgttatttccattcacacgaaagactatcctcaccggtgtgagtactgcaagaaaggcttccgaagaccttcagaaaagaaccagcacataatgcgacatcataaagaagttggcctgccctaacaatacttctacagaacgtttgtagagatattggccttgaagcagaaaattcattttaaagccaatcagtctcattcacatacaatactgtatattgatttatgctgtgtacaaatagaattattacttctagttgacttttttttaaatatacattttgctcagtagtgtgttctgaattctattcagtttgtttaataaatagggaaaactggcaacatgctagttacttttaataaagtaatccctgattctataccgaagttttatatcttagaattttatatttatttaaatatttaccttgcttaccttgatggtact

SEQ ID NO: 35409 - DNA, 2906 bp, Homo sapiens
  source 1..2906: mol_type = unassigned DNA
gagctgtgactgatgagaattaaaggccatggatgaagatgggcttgaattacaacaagagccaaactcattttttgatgcaacaggagctgatggtacacacatggatggtgatcaaattgttgtggaagtacaagaaactgtttttgtttcagatgttgtggattcagacataactgtgcataactttgttcctgatgacccagattcagttgtaatccaagatgttattgaggacgttgttatagaagatgttcagtgcccagatatcatggaagaagcagatgtgtctgaaacggtcatcattcctgagcaagtgctggactcagatgtaactgaagaagtttctttagcacattgcacagtcccagatgatgttttagcttctgacattacttcagcctcaatgtctatgccagaacacgtcttgacgggtgattctatacatgtgtctgacgttggacatgttggacatgttggacatgttgaacatgtggttcatgatagtgtagtggaagcagaaattgtcactgatcctctgactaccgacgtagtttcagaagaagtattggtagcagactgtgcctctgaagcagtcatagatgccaatgggatccctgtggaccagcaggatgatgacaaaggcaactgtgaggactaccttatgatttcctgtggaactgtagacattgtggagagtgagcctgagaatgatcatggagttgaactgcttgatcagaacagcagtattcgtgttcccagggaaaagatggtttatatgactgtcaatgactctcagccagaagatgaagatttaaatgttgctgaaatcgctgacgaagtttatatggaagtgatcgtaggagaggaggatgctgcagcagcagcggcagccgccgccgtgcacgagcagcaaatggatgacaatgaaatcaaaaccttcatgccgattgcatgggcagcagcttatggtaataattctgatggaattgaaaaccggaatggcactgcaagtgccctcttgcacatagatgagtctgctggcctcggcagactggctaaacaaaaaccaaagaaaaggagaagacctgattccaggcagtaccaaacagcaataattattggccctgatggacatcctttgactgtctatccttgcatgatttgtgggaagaagtttaagtcgagaggttttttgaaaaggcacatgaaaaaccatcccgaacaccttgccaagaagaaataccgctgtactgactgtgattacactaccaacaagaagataagtttacacaaccacctggagagccacaagctgaccagcaaggcagagaaggccattgaatgcgatgagtgtgggaagcatttctctcatgcaggggctttgtttactcacaaaatggtgcataaggaaaaaggagccaacaaaatgcacaagtgtaaattctgtgaatacgagacagctgaacaagggttattgaatcgccacctcttggcagtccacagcaagaactttcctcatatttgtgtggagtgtggtaagggttttcgtcacccgtcagagctcaaaaagcacatgagaatccatactggggagaagccgtaccaatgccagtactgcgaatataggtctgcagactcttctaacttgaaaacgcatgtcaaaactaagcatagtaaagagatgccattcaagtgtgacatttgtcttctgactttctcggataccaaagaggtgcagcaacatgctcttatccaccaagaaagcaaaacacaccagtgtttgcattgcgaccacaagagttcgaactcaagtgatttgaaacgacacataatttcagttcacacgaaagactacccccataagtgtgacatgtgtgataaaggctttcacaggccttcagaactcaagaaacacgtggctgcccacaagggcaaaaaaatgcaccagtgtagacattgtgactttaagattgcagatccatttgttctaagtcgccatattctctcagttcacacaaaggatcttccatttaggtgcaagagatgtagaaagggatttaggcaacagagtgagcttaaaaagcatatgaagacacacagtggcaggaaagtgtatcagtgtgagtactgtgagtatagcactacagatgcctcaggctttaaacggcacgttatttccattcacacgaaagactatcctcaccggtgtgagtactgcaagaaaggcttccgaagaccttcagaaaagaaccagcacataatgcgacatcataaagaagttggcctgccctaacaatacttctacagaacgtttgtagagatattggccttgaagcagaaaattcattttaaagccaatcagtctcattcacatacaatactgtatattgatttatgctgtgtacaaatagaattattacttctagttgacttttttttaaatatacattttgctcagtagtgtgttctgaattctattcagtttgtttaataaatagggaaaactggcaacatgctagttacttttaataaagtaatccctgattctataccgaagttttatatcttagaattttatatttatttaaatatttaccttgcttaccttgatggtactcttctaagaccattaacttaaggtaactttatattggtaactctgaaagtattcatgttgactcatttttttccccatacatttctcacaataaaattgtcagagacatctactaatataaatgggagattttacagtcaggtctaattatcataacatggaagtcatttacttgtcttgcttaatattttcagaccacttgacagtgaaagtttccatttgagctgttgcgtccctggctttgctgagtaaagagcagtggctgggttcgtgtttacttttcaaa

SEQ ID NO: 35410 - DNA, 7558 bp, Homo sapiens
  source 1..7558: mol_type = unassigned DNA
gccggcctgcagcacccgccaccgtcgccggccgcccgcacgtccgtccggttcttgctatattgccccaggctggtctcgaactcctgggctcaagccgttctcccgcctcccactgcccgcctgtcactgccgtctgttccctgagctgtgctttacgctgggaaagacatagaagaactattaagaagatagaattgttttgctgcgcagtacagcaacagtggatgttcaagattaagattagagtcaagttgtgtgattaagacagacagtcttcctctgtcatccaggctggaatgcagtgcagtggtgcaaatttggctcactgcagcctctgccttctgtgttcaagtgattcttcttctgcctcagcctctcgagtagctgggattacaggagctgtgactgatgagaattaaaggccatggatgaagatgggcttgaattacaacaagagccaaactcattttttgatgcaacaggagctgatggtacacacatggatggtgatcaaattgttgtggaagtacaagaaactgtttttgtttcagatgttgtggattcagacataactgtgcataactttgttcctgatgacccagattcagttgtaatccaagatgttattgaggacgttgttatagaagatgttcagtgcccagatatcatggaagaagcagatgtgtctgaaacggtcatcattcctgagcaagtgctggactcagatgtaactgaagaagtttctttagcacattgcacagtcccagatgatgttttagcttctgacattacttcagcctcaatgtctatgccagaacacgtcttgacgggtgattctatacatgtgtctgacgttggacatgttggacatgttggacatgttgaacatgtggttcatgatagtgtagtggaagcagaaattgtcactgatcctctgactaccgacgtagtttcagaagaagtattggtagcagactgtgcctctgaagcagtcatagatgccaatgggatccctgtggaccagcaggatgatgacaaaggcaactgtgaggactaccttatgatttccttggatgatgctggcaaaatagaacacgatggttcttctggaatgaccatggacacagagtcggaaattgatccttgtaaagtggatggcacttgccctgaggtcatcaaggtgtacatttttaaagctgaccctggagaagatgacttaggtggaactgtagacattgtggagagtgagcctgagaatgatcatggagttgaactgcttgatcagaacagcagtattcgtgttcccagggaaaagatggtttatatgactgtcaatgactctcagccagaagatgaagatttaaatgttgctgaaatcgctgacgaagtttatatggaagtgatcgtaggagaggaggatgctgcagcagcagcggcagccgccgccgtgcacgagcagcaaatggatgacaatgaaatcaaaaccttcatgccgattgcatgggcagcagcttatggtaataattctgatggaattgaaaaccggaatggcactgcaagtgccctcttgcacatagatgagtctgctggcctcggcagactggctaaacaaaaaccaaagaaaaggagaagacctgattccaggcagtaccaaacagcaataattattggccctgatggacatcctttgactgtctatccttgcatgatttgtgggaagaagtttaagtcgagaggttttttgaaaaggcacatgaaaaaccatcccgaacaccttgccaagaagaaataccgctgtactgactgtgattacactaccaacaagaagataagtttacacaaccacctggagagccacaagctgaccagcaaggcagagaaggccattgaatgcgatgagtgtgggaagcatttctctcatgcaggggctttgtttactcacaaaatggtgcataaggaaaaaggagccaacaaaatgcacaagtgtaaattctgtgaatacgagacagctgaacaagggttattgaatcgccacctcttggcagtccacagcaagaactttcctcatatttgtgtggagtgtggtaagggttttcgtcacccgtcagagctcaaaaagcacatgagaatccatactggggagaagccgtaccaatgccagtactgcgaatataggtctgcagactcttctaacttgaaaacgcatgtcaaaactaagcatagtaaagagatgccattcaagtgtgacatttgtcttctgactttctcggataccaaagaggtgcagcaacatgctcttatccaccaagaaagcaaaacacaccagtgtttgcattgcgaccacaagagttcgaactcaagtgatttgaaacgacacataatttcagttcacacgaaagactacccccataagtgtgacatgtgtgataaaggctttcacaggccttcagaactcaagaaacacgtggctgcccacaagggcaaaaaaatgcaccagtgtagacattgtgactttaagattgcagatccatttgttctaagtcgccatattctctcagttcacacaaaggatcttccatttaggtgcaagagatgtagaaagggatttaggcaacagagtgagcttaaaaagcatatgaagacacacagtggcaggaaagtgtatcagtgtgagtactgtgagtatagcactacagatgcctcaggctttaaacggcacgttatttccattcacacgaaagactatcctcaccggtgtgagtactgcaagaaaggcttccgaagaccttcagaaaagaaccagcacataatgcgacatcataaagaagttggcctgccctaacaatacttctacagaacgtttgtagagatattggccttgaagcagaaaattcattttaaagccaatcagtctcattcacatacaatactgtatattgatttatgctgtgtacaaatagaattattacttctagttgacttttttttaaatatacattttgctcagtagtgtgttctgaattctattcagtttgtttaataaatagggaaaactggcaacatgctagttacttttaataaagtaatccctgattctataccgaagttttatatcttagaattttatatttatttaaatatttaccttgcttaccttgatggtactcttctaagaccattaacttaaggtaactttatattggtaactctgaaagtattcatgttgactcatttttttccccatacatttctcacaataaaattgtcagagacatctactaatataaatgggagattttacagtcaggtctaattatcataacatggaagtcatttacttgtcttgcttaatattttcagaccacttgacagtgaaagtttccatttgagctgttgcgtccctggctttgctgagtaaagagcagtggctgggttcgtgtttacttttcaaatatacttcttttggctttctttggattatttacatcttttgtcagcgtagcaaacttttagaaaaccttattgaaaaactgtgcttgctcatgttgtattttgattattctgtctgtgcggcttcatcttggaatggttgtgtgctacaaatgacacttactgaggactgcattttggaatctcctagaggtaactcatggcttataggatcttttgcaactttatgtatgtaaatgtaccctgaattatatatatacacatatatatcatgtacctgtgtgtattgcttattttacatatttatacacacaaccccaagtagtagttgtttaaaatctataatgaaaagtattaaatttacaataacatgaaagatccagggatgcatgagagagcattttgtaagtcatgctcttcagagagactactcaggtgaagaattagaaggaaaataaggacactagtatttttaaagagtaaagatattttcttttaaatatctttggtaattgaaacatagaggttaagatgtttctaggtagaatgttttcatacaatttcacctccatgtctttatgtttttctgaaaagcaaatgagtatccagacatgactcccacagttctctttgagaagcctgagagggaactctgtcttacctagtgagggggatggaaaagaagtgatggctctgtggaccagagaacgggtgctaattatgacttcacactcggcaagttcaggctgatctgttatttctcagttacagttagcaaactttaaaaacttaacactcaagttggctttgattaaaaggtaaagatgtgttttaagtggataaggaaagtctgaggccttatttggaacatcactaagtcttccacaggttttttgtttgtttgtttttttttgttgtttttttttcttaagacggagtcttgctctgttgcccaggctggactgcagtggtgtgatcactgcaacctctgcagctcactgcaacctctgcttcctgggttcaagcaattatctgcctcagcctctcgagtagctgggattacaggcgcccaccaccacgcccggctaattttttgtatttttaatagagatggggtttcaccatcttggccaggctggtcttgaaccctgacctcgtgatccacctgcctcggccttccatagtgctgggtttacaggcgtgagccaccgtgcccagacaccacataggtctgaatcagtgtcatacattcataaaacaaactcggttaattagaacttggttatgttaagacgaatctgggagaacagaaaacagtttttggggtcccttcagttggctattggtccgtatgcatctagcacattgtaggagatttagaaattgtcttcccacccgatagctgccttgtcacctcattatggtgctccatcccctgtgtgcttaggtttttacctttcatctttctctttgccattgatgtttgtattcaagagttatatttttagggttagaaatcaaaatatttggtgtttggcaaacctctgaagtgctagactgatttagtctagttttaaaccaagtgctttaggcaggtgtgaactccagcccaaatgccagtcaaagtcaaggcatgggttttcctagcctatcttataggaaattcctgtaccttcttggcccccataatgtgttttttttttttttttttttttaaactaacttacaattttgtgatccgtgattcattgccctgcgattcttgaaagctctgtctgtttttttgtgagaacctttaaaatctcccttaatttttattttcccagaaataatgtaaaaacacttaaatgaaagtggaaatgtattaattttaaatcctataaaattaatacagaaaatataaatgattgggtcatttaactatatttttttaaataaactgaaagataaagaacacaacacttcacacattttatatttctcttacatactccggaatcatacacagttctttttaaagcacaacattaaaacctttaaaaggtatttaagggtttggtcaagtgaatatgataaaacatacttgtctgtataaagagaaaatgaaattgtagtcactgttatgtactgacattagttacaacctagttttaattcttaaaacaattttgattagcaaagctaaaaaaaaatggatgtttcagttaaatgttttaaagaggtacagatttttacaaggacataatataagttattgttctgtagaaatatcctattaaatattgtatgtccctccctctgtacactttgtaaagaaagtaaaatacataaaaagaaaatcatatagggatgtgtgacattattgtaattgtgtacttgagaataacgtgcaaaaataaaaatcagaatattttcctgttattgaatgtttagtctatttgataccagtactaagttaatgctttttctcaaggaaaaaaaatgtacagtttttgtaaacctaataaacatcaaaagcagtggattattttcatccccccatttcttaatttctttttcacagcagtggaatgcaaagtgcttgattgctttgaattttgtgactcggatgcaaatactggtaatatttcagttctgtgaatttgcaagtaatatttcagagaagttaagaggtgattggtgagtcctttgatgagcatgtccttggaattcattttttcttttatcttcataaaggatttgttttattagcatctccaattcccctgagataaattactcatgcataaagtggtttttgagagcacttaaagttcatttcagtattaatttacagcatatttaatcagtggggactgttaccacctccacaacagaaatcatgccctcgagttaccccactgcgcccagtttagaggactagtagatgctaacatactagggaatggtcattgccacagttaaaaatcggcagttaagtaaatgtcaggagtcaaaagagatagagttgtgccatctttgattttatagacaagattctgcagttcttccaactgtatgaacaaacgtttgcctaatagttgaaacaataaattaaaattttaggtaaatgacgaagggaatgtggtgaatgtcactgtccagagccataaatcagacaaaaccatacatagcatgctgaaaaacttttgtaatggaacacccaacaaatgacacctaacctgtctgtgatccaacaagtccgataacatgctgctgtatttgtattctctgggaatctcagtattaataatttcatttcccacaaattctagcattcatgtaaggaaaaacatggctaatcaatatcttaaaggggcaatctttcagagcagtggttttcaaagtatggccggacagcattggcagcatcttaatctcctgggactttgttaaaaatgcaaattctcagccccaccctagtcctactgaattgggaaactggcgtgggacccagcagtctttgttttaacatgttctccaagtgattctgatgcctgttcaaacttgggaaacacttttagagcacttgaggaacctaaaagatgactggttcagcattttgtgtggtagataagaaagaaattatcacaaaaaatcagaaatgaacagtgagagaaaaataggaccccagacagtttataccttccatttgctgttttaaaagtgtgagcctgccaagtcaacaagtatgcctttagcgcacatgtaaatagcctgcacttcctaaatctcgtgtggcctcccatggttacattcttcaaaggtaaactgagttgagaggaagattcagcatttaaaagagaagggttgaaaaagattgtgtgtgtgtgtgtgtgtgtttaattggcccagggttacttaaataaatcataaccattttgccacattctgtaactgtttagctaaggtcaaattaagtttaccctatggattttgtttcatcttttgtttcgtgtatatactgtttgcctttttcataaaaatcttggatttgttatatattgttcctgttatttttgacatctttgctattgtaaataaattactattttgttttaagtta

SEQ ID NO: 35411 - DNA, 7396 bp, Homo sapiens
  source 1..7396: mol_type = unassigned DNA
ggcccagtgctccagagaaaggccggcctgcagcacccgccaccgtcgccggccgcccgcacgtccgtccggagctgtgactgatgagaattaaaggccatggatgaagatgggcttgaattacaacaagagccaaactcattttttgatgcaacaggagctgatggtacacacatggatggtgatcaaattgttgtggaagtacaagaaactgtttttgtttcagatgttgtggattcagacataactgtgcataactttgttcctgatgacccagattcagttgtaatccaagatgttattgaggacgttgttatagaagatgttcagtgcccagatatcatggaagaagcagatgtgtctgaaacggtcatcattcctgagcaagtgctggactcagatgtaactgaagaagtttctttagcacattgcacagtcccagatgatgttttagcttctgacattacttcagcctcaatgtctatgccagaacacgtcttgacgggtgattctatacatgtgtctgacgttggacatgttggacatgttggacatgttgaacatgtggttcatgatagtgtagtggaagcagaaattgtcactgatcctctgactaccgacgtagtttcagaagaagtattggtagcagactgtgcctctgaagcagtcatagatgccaatgggatccctgtggaccagcaggatgatgacaaaggcaactgtgaggactaccttatgatttccttggatgatgctggcaaaatagaacacgatggttcttctggaatgaccatggacacagagtcggaaattgatccttgtaaagtggatggcacttgccctgaggtcatcaaggtgtacatttttaaagctgaccctggagaagatgacttaggtggaactgtagacattgtggagagtgagcctgagaatgatcatggagttgaactgcttgatcagaacagcagtattcgtgttcccagggaaaagatggtttatatgactgtcaatgactctcagccagaagatgaagatttaaatgttgctgaaatcgctgacgaagtttatatggaagtgatcgtaggagaggaggatgctgcagcagcagcggcagccgccgccgtgcacgagcagcaaatggatgacaatgaaatcaaaaccttcatgccgattgcatgggcagcagcttatggtaataattctgatggaattgaaaaccggaatggcactgcaagtgccctcttgcacatagatgagtctgctggcctcggcagactggctaaacaaaaaccaaagaaaaggagaagacctgattccaggcagtaccaaacagcaataattattggccctgatggacatcctttgactgtctatccttgcatgatttgtgggaagaagtttaagtcgagaggttttttgaaaaggcacatgaaaaaccatcccgaacaccttgccaagaagaaataccgctgtactgactgtgattacactaccaacaagaagataagtttacacaaccacctggagagccacaagctgaccagcaaggcagagaaggccattgaatgcgatgagtgtgggaagcatttctctcatgcaggggctttgtttactcacaaaatggtgcataaggaaaaaggagccaacaaaatgcacaagtgtaaattctgtgaatacgagacagctgaacaagggttattgaatcgccacctcttggcagtccacagcaagaactttcctcatatttgtgtggagtgtggtaagggttttcgtcacccgtcagagctcaaaaagcacatgagaatccatactggggagaagccgtaccaatgccagtactgcgaatataggtctgcagactcttctaacttgaaaacgcatgtcaaaactaagcatagtaaagagatgccattcaagtgtgacatttgtcttctgactttctcggataccaaagaggtgcagcaacatgctcttatccaccaagaaagcaaaacacaccagtgtttgcattgcgaccacaagagttcgaactcaagtgatttgaaacgacacataatttcagttcacacgaaagactacccccataagtgtgacatgtgtgataaaggctttcacaggccttcagaactcaagaaacacgtggctgcccacaagggcaaaaaaatgcaccagtgtagacattgtgactttaagattgcagatccatttgttctaagtcgccatattctctcagttcacacaaaggatcttccatttaggtgcaagagatgtagaaagggatttaggcaacagagtgagcttaaaaagcatatgaagacacacagtggcaggaaagtgtatcagtgtgagtactgtgagtatagcactacagatgcctcaggctttaaacggcacgttatttccattcacacgaaagactatcctcaccggtgtgagtactgcaagaaaggcttccgaagaccttcagaaaagaaccagcacataatgcgacatcataaagaagttggcctgccctaacaatacttctacagaacgtttgtagagatattggccttgaagcagaaaattcattttaaagccaatcagtctcattcacatacaatactgtatattgatttatgctgtgtacaaatagaattattacttctagttgacttttttttaaatatacattttgctcagtagtgtgttctgaattctattcagtttgtttaataaatagggaaaactggcaacatgctagttacttttaataaagtaatccctgattctataccgaagttttatatcttagaattttatatttatttaaatatttaccttgcttaccttgatggtactcttctaagaccattaacttaaggtaactttatattggtaactctgaaagtattcatgttgactcatttttttccccatacatttctcacaataaaattgtcagagacatctactaatataaatgggagattttacagtcaggtctaattatcataacatggaagtcatttacttgtcttgcttaatattttcagaccacttgacagtgaaagtttccatttgagctgttgcgtccctggctttgctgagtaaagagcagtggctgggttcgtgtttacttttcaaatatacttcttttggctttctttggattatttacatcttttgtcagcgtagcaaacttttagaaaaccttattgaaaaactgtgcttgctcatgttgtattttgattattctgtctgtgcggcttcatcttggaatggttgtgtgctacaaatgacacttactgaggactgcattttggaatctcctagaggtaactcatggcttataggatcttttgcaactttatgtatgtaaatgtaccctgaattatatatatacacatatatatcatgtacctgtgtgtattgcttattttacatatttatacacacaaccccaagtagtagttgtttaaaatctataatgaaaagtattaaatttacaataacatgaaagatccagggatgcatgagagagcattttgtaagtcatgctcttcagagagactactcaggtgaagaattagaaggaaaataaggacactagtatttttaaagagtaaagatattttcttttaaatatctttggtaattgaaacatagaggttaagatgtttctaggtagaatgttttcatacaatttcacctccatgtctttatgtttttctgaaaagcaaatgagtatccagacatgactcccacagttctctttgagaagcctgagagggaactctgtcttacctagtgagggggatggaaaagaagtgatggctctgtggaccagagaacgggtgctaattatgacttcacactcggcaagttcaggctgatctgttatttctcagttacagttagcaaactttaaaaacttaacactcaagttggctttgattaaaaggtaaagatgtgttttaagtggataaggaaagtctgaggccttatttggaacatcactaagtcttccacaggttttttgtttgtttgtttttttttgttgtttttttttcttaagacggagtcttgctctgttgcccaggctggactgcagtggtgtgatcactgcaacctctgcagctcactgcaacctctgcttcctgggttcaagcaattatctgcctcagcctctcgagtagctgggattacaggcgcccaccaccacgcccggctaattttttgtatttttaatagagatggggtttcaccatcttggccaggctggtcttgaaccctgacctcgtgatccacctgcctcggccttccatagtgctgggtttacaggcgtgagccaccgtgcccagacaccacataggtctgaatcagtgtcatacattcataaaacaaactcggttaattagaacttggttatgttaagacgaatctgggagaacagaaaacagtttttggggtcccttcagttggctattggtccgtatgcatctagcacattgtaggagatttagaaattgtcttcccacccgatagctgccttgtcacctcattatggtgctccatcccctgtgtgcttaggtttttacctttcatctttctctttgccattgatgtttgtattcaagagttatatttttagggttagaaatcaaaatatttggtgtttggcaaacctctgaagtgctagactgatttagtctagttttaaaccaagtgctttaggcaggtgtgaactccagcccaaatgccagtcaaagtcaaggcatgggttttcctagcctatcttataggaaattcctgtaccttcttggcccccataatgtgttttttttttttttttttttttaaactaacttacaattttgtgatccgtgattcattgccctgcgattcttgaaagctctgtctgtttttttgtgagaacctttaaaatctcccttaatttttattttcccagaaataatgtaaaaacacttaaatgaaagtggaaatgtattaattttaaatcctataaaattaatacagaaaatataaatgattgggtcatttaactatatttttttaaataaactgaaagataaagaacacaacacttcacacattttatatttctcttacatactccggaatcatacacagttctttttaaagcacaacattaaaacctttaaaaggtatttaagggtttggtcaagtgaatatgataaaacatacttgtctgtataaagagaaaatgaaattgtagtcactgttatgtactgacattagttacaacctagttttaattcttaaaacaattttgattagcaaagctaaaaaaaaatggatgtttcagttaaatgttttaaagaggtacagatttttacaaggacataatataagttattgttctgtagaaatatcctattaaatattgtatgtccctccctctgtacactttgtaaagaaagtaaaatacataaaaagaaaatcatatagggatgtgtgacattattgtaattgtgtacttgagaataacgtgcaaaaataaaaatcagaatattttcctgttattgaatgtttagtctatttgataccagtactaagttaatgctttttctcaaggaaaaaaaatgtacagtttttgtaaacctaataaacatcaaaagcagtggattattttcatccccccatttcttaatttctttttcacagcagtggaatgcaaagtgcttgattgctttgaattttgtgactcggatgcaaatactggtaatatttcagttctgtgaatttgcaagtaatatttcagagaagttaagaggtgattggtgagtcctttgatgagcatgtccttggaattcattttttcttttatcttcataaaggatttgttttattagcatctccaattcccctgagataaattactcatgcataaagtggtttttgagagcacttaaagttcatttcagtattaatttacagcatatttaatcagtggggactgttaccacctccacaacagaaatcatgccctcgagttaccccactgcgcccagtttagaggactagtagatgctaacatactagggaatggtcattgccacagttaaaaatcggcagttaagtaaatgtcaggagtcaaaagagatagagttgtgccatctttgattttatagacaagattctgcagttcttccaactgtatgaacaaacgtttgcctaatagttgaaacaataaattaaaattttaggtaaatgacgaagggaatgtggtgaatgtcactgtccagagccataaatcagacaaaaccatacatagcatgctgaaaaacttttgtaatggaacacccaacaaatgacacctaacctgtctgtgatccaacaagtccgataacatgctgctgtatttgtattctctgggaatctcagtattaataatttcatttcccacaaattctagcattcatgtaaggaaaaacatggctaatcaatatcttaaaggggcaatctttcagagcagtggttttcaaagtatggccggacagcattggcagcatcttaatctcctgggactttgttaaaaatgcaaattctcagccccaccctagtcctactgaattgggaaactggcgtgggacccagcagtctttgttttaacatgttctccaagtgattctgatgcctgttcaaacttgggaaacacttttagagcacttgaggaacctaaaagatgactggttcagcattttgtgtggtagataagaaagaaattatcacaaaaaatcagaaatgaacagtgagagaaaaataggaccccagacagtttataccttccatttgctgttttaaaagtgtgagcctgccaagtcaacaagtatgcctttagcgcacatgtaaatagcctgcacttcctaaatctcgtgtggcctcccatggttacattcttcaaaggtaaactgagttgagaggaagattcagcatttaaaagagaagggttgaaaaagattgtgtgtgtgtgtgtgtgtgtttaattggcccagggttacttaaataaatcataaccattttgccacattctgtaactgtttagctaaggtcaaattaagtttaccctatggattttgtttcatcttttgtttcgtgtatatactgtttgcctttttcataaaaatcttggatttgttatatattgttcctgttatttttgacatctttgctattgtaaataaattactattttgttttaagttaccctagtggagtgttggctatagacaaggtatatactcgaaacgaggagacttaaatcacacagttaatgaattcccaacttgtttgaagctggaggtgattcgactcccttcagtggttcaacactaataatagcaccaaggaacatgtcactggtgcatatagg

SEQ ID NO: 35412 - DNA, 300 bp, Homo sapiens
  source 1..300: mol_type = unassigned DNA
agtgctccagagaaaggccggcctgcagcacccgccaccgtcgccggccgcccgcacgtccgtccgctgggaaagacatagaagaactattaagaagatagaattgttttgctgcgcagtacagcaacagtggatgttcaagattaagattagagtcaagttgtgtgattaagacaggagctgtgactgatgagaattaaaggccatggatgaagatgggcttgaattacaacaagagccaaactcattttttgatgcaacaggagctgatggtacacacatggatggtgatcaaattgt

SEQ ID NO: 35413 - DNA, 600 bp, Homo sapiens
  source 1..600: mol_type = unassigned DNA
gacggcgggcccgtgccggggagctgggccgctttttgtcagctccgagctcggcccctcctccctccctccgcccgccccaccagccggagcccggcccagtgctccagagaaaggccggcctgcagcacccgccaccgtcgccggccgcccgcacgtccgtccggagctgtgactgatgagaattaaaggccatggatgaagatgggcttgaattacaacaagagccaaactcattttttgatgcaacaggagctgatggtacacacatggatggtgatcaaattgttgtggaagtacaagaaactgtttttgtttcagatgttgtggattcagacataactgtgcataactttgttcctgatgacccagattcagttgtaatccaagatgttattgaggacgttgttatagaagatgttcagtgcccagatatcatggaagaagcagatgtgtctgaaacggtcatcattcctgagcaagtgctggactcagatgtaactgaagaagtttctttagcacattgcacagtcccagatgatgttttagcttctgacattacttcagcctcaatgtctatgccagaacacgtcttgacgg

SEQ ID NO: 35414 - DNA, 7463 bp, Homo sapiens
  source 1..7463: mol_type = unassigned DNA
agagaaaggccggcctgcagcacccgccaccgtcgccggccgcccgcacgtccgtccggttcttgctatattgccccaggctggtctcgaactcctgggctcaagccgttctcccgcctcccactgcccgcctgtcactgccgtctgttccctgagctgtgctttacgctgggaaagacatagaagaactattaagaagatagaattgttttgctgcgcagtacagcaacagtggatgttcaagattaagattagagtcaagttgtgtgattaagacaggagctgtgactgatgagaattaaaggccatggatgaagatgggcttgaattacaacaagagccaaactcattttttgatgcaacaggagctgatggtacacacatggatggtgatcaaattgttgtggaagtacaagaaactgtttttgtttcagatgttgtggattcagacataactgtgcataactttgttcctgatgacccagattcagttgtaatccaagatgttattgaggacgttgttatagaagatgttcagtgcccagatatcatggaagaagcagatgtgtctgaaacggtcatcattcctgagcaagtgctggactcagatgtaactgaagaagtttctttagcacattgcacagtcccagatgatgttttagcttctgacattacttcagcctcaatgtctatgccagaacacgtcttgacgggtgattctatacatgtgtctgacgttggacatgttggacatgttggacatgttgaacatgtggttcatgatagtgtagtggaagcagaaattgtcactgatcctctgactaccgacgtagtttcagaagaagtattggtagcagactgtgcctctgaagcagtcatagatgccaatgggatccctgtggaccagcaggatgatgacaaaggcaactgtgaggactaccttatgatttccttggatgatgctggcaaaatagaacacgatggttcttctggaatgaccatggacacagagtcggaaattgatccttgtaaagtggatggcacttgccctgaggtcatcaaggtgtacatttttaaagctgaccctggagaagatgacttaggtggaactgtagacattgtggagagtgagcctgagaatgatcatggagttgaactgcttgatcagaacagcagtattcgtgttcccagggaaaagatggtttatatgactgtcaatgactctcagccagaagatgaagatttaaatgttgctgaaatcgctgacgaagtttatatggaagtgatcgtaggagaggaggatgctgcagcagcagcggcagccgccgccgtgcacgagcagcaaatggatgacaatgaaatcaaaaccttcatgccgattgcatgggcagcagcttatgcaataattattggccctgatggacatcctttgactgtctatccttgcatgatttgtgggaagaagtttaagtcgagaggttttttgaaaaggcacatgaaaaaccatcccgaacaccttgccaagaagaaataccgctgtactgactgtgattacactaccaacaagaagataagtttacacaaccacctggagagccacaagctgaccagcaaggcagagaaggccattgaatgcgatgagtgtgggaagcatttctctcatgcaggggctttgtttactcacaaaatggtgcataaggaaaaaggagccaacaaaatgcacaagtgtaaattctgtgaatacgagacagctgaacaagggttattgaatcgccacctcttggcagtccacagcaagaactttcctcatatttgtgtggagtgtggtaagggttttcgtcacccgtcagagctcaaaaagcacatgagaatccatactggggagaagccgtaccaatgccagtactgcgaatataggtctgcagactcttctaacttgaaaacgcatgtcaaaactaagcatagtaaagagatgccattcaagtgtgacatttgtcttctgactttctcggataccaaagaggtgcagcaacatgctcttatccaccaagaaagcaaaacacaccagtgtttgcattgcgaccacaagagttcgaactcaagtgatttgaaacgacacataatttcagttcacacgaaagactacccccataagtgtgacatgtgtgataaaggctttcacaggccttcagaactcaagaaacacgtggctgcccacaagggcaaaaaaatgcaccagtgtagacattgtgactttaagattgcagatccatttgttctaagtcgccatattctctcagttcacacaaaggatcttccatttaggtgcaagagatgtagaaagggatttaggcaacagagtgagcttaaaaagcatatgaagacacacagtggcaggaaagtgtatcagtgtgagtactgtgagtatagcactacagatgcctcaggctttaaacggcacgttatttccattcacacgaaagactatcctcaccggtgtgagtactgcaagaaaggcttccgaagaccttcagaaaagaaccagcacataatgcgacatcataaagaagttggcctgccctaacaatacttctacagaacgtttgtagagatattggccttgaagcagaaaattcattttaaagccaatcagtctcattcacatacaatactgtatattgatttatgctgtgtacaaatagaattattacttctagttgacttttttttaaatatacattttgctcagtagtgtgttctgaattctattcagtttgtttaataaatagggaaaactggcaacatgctagttacttttaataaagtaatccctgattctataccgaagttttatatcttagaattttatatttatttaaatatttaccttgcttaccttgatggtactcttctaagaccattaacttaaggtaactttatattggtaactctgaaagtattcatgttgactcatttttttccccatacatttctcacaataaaattgtcagagacatctactaatataaatgggagattttacagtcaggtctaattatcataacatggaagtcatttacttgtcttgcttaatattttcagaccacttgacagtgaaagtttccatttgagctgttgcgtccctggctttgctgagtaaagagcagtggctgggttcgtgtttacttttcaaatatacttcttttggctttctttggattatttacatcttttgtcagcgtagcaaacttttagaaaaccttattgaaaaactgtgcttgctcatgttgtattttgattattctgtctgtgcggcttcatcttggaatggttgtgtgctacaaatgacacttactgaggactgcattttggaatctcctagaggtaactcatggcttataggatcttttgcaactttatgtatgtaaatgtaccctgaattatatatatacacatatatatcatgtacctgtgtgtattgcttattttacatatttatacacacaaccccaagtagtagttgtttaaaatctataatgaaaagtattaaatttacaataacatgaaagatccagggatgcatgagagagcattttgtaagtcatgctcttcagagagactactcaggtgaagaattagaaggaaaataaggacactagtatttttaaagagtaaagatattttcttttaaatatctttggtaattgaaacatagaggttaagatgtttctaggtagaatgttttcatacaatttcacctccatgtctttatgtttttctgaaaagcaaatgagtatccagacatgactcccacagttctctttgagaagcctgagagggaactctgtcttacctagtgagggggatggaaaagaagtgatggctctgtggaccagagaacgggtgctaattatgacttcacactcggcaagttcaggctgatctgttatttctcagttacagttagcaaactttaaaaacttaacactcaagttggctttgattaaaaggtaaagatgtgttttaagtggataaggaaagtctgaggccttatttggaacatcactaagtcttccacaggttttttgtttgtttgtttttttttgttgtttttttttcttaagacggagtcttgctctgttgcccaggctggactgcagtggtgtgatcactgcaacctctgcagctcactgcaacctctgcttcctgggttcaagcaattatctgcctcagcctctcgagtagctgggattacaggcgcccaccaccacgcccggctaattttttgtatttttaatagagatggggtttcaccatcttggccaggctggtcttgaaccctgacctcgtgatccacctgcctcggccttccatagtgctgggtttacaggcgtgagccaccgtgcccagacaccacataggtctgaatcagtgtcatacattcataaaacaaactcggttaattagaacttggttatgttaagacgaatctgggagaacagaaaacagtttttggggtcccttcagttggctattggtccgtatgcatctagcacattgtaggagatttagaaattgtcttcccacccgatagctgccttgtcacctcattatggtgctccatcccctgtgtgcttaggtttttacctttcatctttctctttgccattgatgtttgtattcaagagttatatttttagggttagaaatcaaaatatttggtgtttggcaaacctctgaagtgctagactgatttagtctagttttaaaccaagtgctttaggcaggtgtgaactccagcccaaatgccagtcaaagtcaaggcatgggttttcctagcctatcttataggaaattcctgtaccttcttggcccccataatgtgttttttttttttttttttttttaaactaacttacaattttgtgatccgtgattcattgccctgcgattcttgaaagctctgtctgtttttttgtgagaacctttaaaatctcccttaatttttattttcccagaaataatgtaaaaacacttaaatgaaagtggaaatgtattaattttaaatcctataaaattaatacagaaaatataaatgattgggtcatttaactatatttttttaaataaactgaaagataaagaacacaacacttcacacattttatatttctcttacatactccggaatcatacacagttctttttaaagcacaacattaaaacctttaaaaggtatttaagggtttggtcaagtgaatatgataaaacatacttgtctgtataaagagaaaatgaaattgtagtcactgttatgtactgacattagttacaacctagttttaattcttaaaacaattttgattagcaaagctaaaaaaaaatggatgtttcagttaaatgttttaaagaggtacagatttttacaaggacataatataagttattgttctgtagaaatatcctattaaatattgtatgtccctccctctgtacactttgtaaagaaagtaaaatacataaaaagaaaatcatatagggatgtgtgacattattgtaattgtgtacttgagaataacgtgcaaaaataaaaatcagaatattttcctgttattgaatgtttagtctatttgataccagtactaagttaatgctttttctcaaggaaaaaaaatgtacagtttttgtaaacctaataaacatcaaaagcagtggattattttcatccccccatttcttaatttctttttcacagcagtggaatgcaaagtgcttgattgctttgaattttgtgactcggatgcaaatactggtaatatttcagttctgtgaatttgcaagtaatatttcagagaagttaagaggtgattggtgagtcctttgatgagcatgtccttggaattcattttttcttttatcttcataaaggatttgttttattagcatctccaattcccctgagataaattactcatgcataaagtggtttttgagagcacttaaagttcatttcagtattaatttacagcatatttaatcagtggggactgttaccacctccacaacagaaatcatgccctcgagttaccccactgcgcccagtttagaggactagtagatgctaacatactagggaatggtcattgccacagttaaaaatcggcagttaagtaaatgtcaggagtcaaaagagatagagttgtgccatctttgattttatagacaagattctgcagttcttccaactgtatgaacaaacgtttgcctaatagttgaaacaataaattaaaattttaggtaaatgacgaagggaatgtggtgaatgtcactgtccagagccataaatcagacaaaaccatacatagcatgctgaaaaacttttgtaatggaacacccaacaaatgacacctaacctgtctgtgatccaacaagtccgataacatgctgctgtatttgtattctctgggaatctcagtattaataatttcatttcccacaaattctagcattcatgtaaggaaaaacatggctaatcaatatcttaaaggggcaatctttcagagcagtggttttcaaagtatggccggacagcattggcagcatcttaatctcctgggactttgttaaaaatgcaaattctcagccccaccctagtcctactgaattgggaaactggcgtgggacccagcagtctttgttttaacatgttctccaagtgattctgatgcctgttcaaacttgggaaacacttttagagcacttgaggaacctaaaagatgactggttcagcattttgtgtggtagataagaaagaaattatcacaaaaaatcagaaatgaacagtgagagaaaaataggaccccagacagtttataccttccatttgctgttttaaaagtgtgagcctgccaagtcaacaagtatgcctttagcgcacatgtaaatagcctgcacttcctaaatctcgtgtggcctcccatggttacattcttcaaaggtaaactgagttgagaggaagattcagcatttaaaagagaagggttgaaaaagattgtgtgtgtgtgtgtgtgtgtttaattggcccagggttacttaaataaatcataaccattttgccacattctgtaactgtttagctaaggtcaaattaagtttaccctatggattttgtttcatcttttgtttcgtgtatatactgtttgcctttttcataaaaatcttggatttgttatatattgttcctgttatttttgacatctttgctattgtaaataaattactattttgttttaagttaccctagtggagtgttggctatagacaaggtatatactcgaaacgaggagacttaaatcacacagttaatgaattcccaacttgtttgaagctggaggtgattcgactcccttcagtggttcaacactaataatagcaccaaggaacatgtcactggtgcatatagg

SEQ ID NO: 35415 - DNA, 7157 bp, Homo sapiens
  source 1..7157: mol_type = unassigned DNA
agagaaaggccggcctgcagcacccgccaccgtcgccggccgcccgcacgtccgtccggttcttgctatattgccccaggctggtctcgaactcctgggctcaagccgttctcccgcctcccactgcccgcctgtcactgccgtctgttccctgagctgtgctttacgctgggaaagacatagaagaactattaagaagatagaattgttttgctgcgcagtacagcaacagtggatgttcaagattaagattagagtcaagttgtgtgattaagacaggagctgtgactgatgagaattaaaggccatggatgaagatgggcttgaattacaacaagagccaaactcattttttgatgcaacaggagctgatggtacacacatggatggtgatcaaattgttgtggaagtacaagaaactgtttttgtttcagatgttgtggattcagacataactgtgcataactttgttcctgatgacccagattcagttgtaatccaagatgttattgaggacgttgttatagaagatgttcagtgcccagatatcatggaagaagcagatgtgtctgaaacggtcatcattcctgagcaagtgctggactcagatgtaactgaagaagtttctttagcacattgcacagtcccagatgatgttttagcttctgacattacttcagcctcaatgtctatgccagaacacgtcttgacgggtgattctatacatgtgtctgacgttggacatgttggacatgttggacatgttgaacatgtggttcatgatagtgtagtggaagcagaaattgtcactgatcctctgactaccgacgtagtttcagaagaagtattggtagcagactgtgcctctgaagcagtcatagatgccaatgggatccctgtggaccagcaggatgatgacaaaggcaactgtgaggactaccttatgatttcctgtaataattctgatggaattgaaaaccggaatggcactgcaagtgccctcttgcacatagatgagtctgctggcctcggcagactggctaaacaaaaaccaaagaaaaggagaagacctgattccaggcagtaccaaacagcaataattattggccctgatggacatcctttgactgtctatccttgcatgatttgtgggaagaagtttaagtcgagaggttttttgaaaaggcacatgaaaaaccatcccgaacaccttgccaagaagaaataccgctgtactgactgtgattacactaccaacaagaagataagtttacacaaccacctggagagccacaagctgaccagcaaggcagagaaggccattgaatgcgatgagtgtgggaagcatttctctcatgcaggggctttgtttactcacaaaatggtgcataaggaaaaaggagccaacaaaatgcacaagtgtaaattctgtgaatacgagacagctgaacaagggttattgaatcgccacctcttggcagtccacagcaagaactttcctcatatttgtgtggagtgtggtaagggttttcgtcacccgtcagagctcaaaaagcacatgagaatccatactggggagaagccgtaccaatgccagtactgcgaatataggtctgcagactcttctaacttgaaaacgcatgtcaaaactaagcatagtaaagagatgccattcaagtgtgacatttgtcttctgactttctcggataccaaagaggtgcagcaacatgctcttatccaccaagaaagcaaaacacaccagtgtttgcattgcgaccacaagagttcgaactcaagtgatttgaaacgacacataatttcagttcacacgaaagactacccccataagtgtgacatgtgtgataaaggctttcacaggccttcagaactcaagaaacacgtggctgcccacaagggcaaaaaaatgcaccagtgtagacattgtgactttaagattgcagatccatttgttctaagtcgccatattctctcagttcacacaaaggatcttccatttaggtgcaagagatgtagaaagggatttaggcaacagagtgagcttaaaaagcatatgaagacacacagtggcaggaaagtgtatcagtgtgagtactgtgagtatagcactacagatgcctcaggctttaaacggcacgttatttccattcacacgaaagactatcctcaccggtgtgagtactgcaagaaaggcttccgaagaccttcagaaaagaaccagcacataatgcgacatcataaagaagttggcctgccctaacaatacttctacagaacgtttgtagagatattggccttgaagcagaaaattcattttaaagccaatcagtctcattcacatacaatactgtatattgatttatgctgtgtacaaatagaattattacttctagttgacttttttttaaatatacattttgctcagtagtgtgttctgaattctattcagtttgtttaataaatagggaaaactggcaacatgctagttacttttaataaagtaatccctgattctataccgaagttttatatcttagaattttatatttatttaaatatttaccttgcttaccttgatggtactcttctaagaccattaacttaaggtaactttatattggtaactctgaaagtattcatgttgactcatttttttccccatacatttctcacaataaaattgtcagagacatctactaatataaatgggagattttacagtcaggtctaattatcataacatggaagtcatttacttgtcttgcttaatattttcagaccacttgacagtgaaagtttccatttgagctgttgcgtccctggctttgctgagtaaagagcagtggctgggttcgtgtttacttttcaaatatacttcttttggctttctttggattatttacatcttttgtcagcgtagcaaacttttagaaaaccttattgaaaaactgtgcttgctcatgttgtattttgattattctgtctgtgcggcttcatcttggaatggttgtgtgctacaaatgacacttactgaggactgcattttggaatctcctagaggtaactcatggcttataggatcttttgcaactttatgtatgtaaatgtaccctgaattatatatatacacatatatatcatgtacctgtgtgtattgcttattttacatatttatacacacaaccccaagtagtagttgtttaaaatctataatgaaaagtattaaatttacaataacatgaaagatccagggatgcatgagagagcattttgtaagtcatgctcttcagagagactactcaggtgaagaattagaaggaaaataaggacactagtatttttaaagagtaaagatattttcttttaaatatctttggtaattgaaacatagaggttaagatgtttctaggtagaatgttttcatacaatttcacctccatgtctttatgtttttctgaaaagcaaatgagtatccagacatgactcccacagttctctttgagaagcctgagagggaactctgtcttacctagtgagggggatggaaaagaagtgatggctctgtggaccagagaacgggtgctaattatgacttcacactcggcaagttcaggctgatctgttatttctcagttacagttagcaaactttaaaaacttaacactcaagttggctttgattaaaaggtaaagatgtgttttaagtggataaggaaagtctgaggccttatttggaacatcactaagtcttccacaggttttttgtttgtttgtttttttttgttgtttttttttcttaagacggagtcttgctctgttgcccaggctggactgcagtggtgtgatcactgcaacctctgcagctcactgcaacctctgcttcctgggttcaagcaattatctgcctcagcctctcgagtagctgggattacaggcgcccaccaccacgcccggctaattttttgtatttttaatagagatggggtttcaccatcttggccaggctggtcttgaaccctgacctcgtgatccacctgcctcggccttccatagtgctgggtttacaggcgtgagccaccgtgcccagacaccacataggtctgaatcagtgtcatacattcataaaacaaactcggttaattagaacttggttatgttaagacgaatctgggagaacagaaaacagtttttggggtcccttcagttggctattggtccgtatgcatctagcacattgtaggagatttagaaattgtcttcccacccgatagctgccttgtcacctcattatggtgctccatcccctgtgtgcttaggtttttacctttcatctttctctttgccattgatgtttgtattcaagagttatatttttagggttagaaatcaaaatatttggtgtttggcaaacctctgaagtgctagactgatttagtctagttttaaaccaagtgctttaggcaggtgtgaactccagcccaaatgccagtcaaagtcaaggcatgggttttcctagcctatcttataggaaattcctgtaccttcttggcccccataatgtgttttttttttttttttttttttaaactaacttacaattttgtgatccgtgattcattgccctgcgattcttgaaagctctgtctgtttttttgtgagaacctttaaaatctcccttaatttttattttcccagaaataatgtaaaaacacttaaatgaaagtggaaatgtattaattttaaatcctataaaattaatacagaaaatataaatgattgggtcatttaactatatttttttaaataaactgaaagataaagaacacaacacttcacacattttatatttctcttacatactccggaatcatacacagttctttttaaagcacaacattaaaacctttaaaaggtatttaagggtttggtcaagtgaatatgataaaacatacttgtctgtataaagagaaaatgaaattgtagtcactgttatgtactgacattagttacaacctagttttaattcttaaaacaattttgattagcaaagctaaaaaaaaatggatgtttcagttaaatgttttaaagaggtacagatttttacaaggacataatataagttattgttctgtagaaatatcctattaaatattgtatgtccctccctctgtacactttgtaaagaaagtaaaatacataaaaagaaaatcatatagggatgtgtgacattattgtaattgtgtacttgagaataacgtgcaaaaataaaaatcagaatattttcctgttattgaatgtttagtctatttgataccagtactaagttaatgctttttctcaaggaaaaaaaatgtacagtttttgtaaacctaataaacatcaaaagcagtggattattttcatccccccatttcttaatttctttttcacagcagtggaatgcaaagtgcttgattgctttgaattttgtgactcggatgcaaatactggtaatatttcagttctgtgaatttgcaagtaatatttcagagaagttaagaggtgattggtgagtcctttgatgagcatgtccttggaattcattttttcttttatcttcataaaggatttgttttattagcatctccaattcccctgagataaattactcatgcataaagtggtttttgagagcacttaaagttcatttcagtattaatttacagcatatttaatcagtggggactgttaccacctccacaacagaaatcatgccctcgagttaccccactgcgcccagtttagaggactagtagatgctaacatactagggaatggtcattgccacagttaaaaatcggcagttaagtaaatgtcaggagtcaaaagagatagagttgtgccatctttgattttatagacaagattctgcagttcttccaactgtatgaacaaacgtttgcctaatagttgaaacaataaattaaaattttaggtaaatgacgaagggaatgtggtgaatgtcactgtccagagccataaatcagacaaaaccatacatagcatgctgaaaaacttttgtaatggaacacccaacaaatgacacctaacctgtctgtgatccaacaagtccgataacatgctgctgtatttgtattctctgggaatctcagtattaataatttcatttcccacaaattctagcattcatgtaaggaaaaacatggctaatcaatatcttaaaggggcaatctttcagagcagtggttttcaaagtatggccggacagcattggcagcatcttaatctcctgggactttgttaaaaatgcaaattctcagccccaccctagtcctactgaattgggaaactggcgtgggacccagcagtctttgttttaacatgttctccaagtgattctgatgcctgttcaaacttgggaaacacttttagagcacttgaggaacctaaaagatgactggttcagcattttgtgtggtagataagaaagaaattatcacaaaaaatcagaaatgaacagtgagagaaaaataggaccccagacagtttataccttccatttgctgttttaaaagtgtgagcctgccaagtcaacaagtatgcctttagcgcacatgtaaatagcctgcacttcctaaatctcgtgtggcctcccatggttacattcttcaaaggtaaactgagttgagaggaagattcagcatttaaaagagaagggttgaaaaagattgtgtgtgtgtgtgtgtgtgtttaattggcccagggttacttaaataaatcataaccattttgccacattctgtaactgtttagctaaggtcaaattaagtttaccctatggattttgtttcatcttttgtttcgtgtatatactgtttgcctttttcataaaaatcttggatttgttatatattgttcctgttatttttgacatctttgctattgtaaataaattactattttgttttaagttaccctagtggagtgttggctatagacaaggtatatactcgaaacgaggagacttaaatcacacagttaatgaattcccaacttgtttgaagctggaggtgattcgactcccttcagtggttcaacactaataatagcaccaaggaacatgtcactggtgcatatagg

SEQ ID NO: 35416 - DNA, 6801 bp, Homo sapiens
  source 1..6801: mol_type = unassigned DNA
cggggagctgggccgctttttgtcagctccgagctcggcccctcctccctccctccgcccgccccaccagccggagcccggcccagtgctccagagaaaggccggcctgcagcacccgccaccgtcgccggccgcccgcacgtccgtccgtggatgatgctggcaaaatagaacacgatggttcttctggaatgaccatggacacagagtcggaaattgatccttgtaaagtggatggcacttgccctgaggtcatcaaggtgtacatttttaaagctgaccctggagaagatgacttaggtggaactgtagacattgtggagagtgagcctgagaatgatcatggagttgaactgcttgatcagaacagcagtattcgtgttcccagggaaaagatggtttatatgactgtcaatgactctcagccagaagatgaagatttaaatgttgctgaaatcgctgacgaagtttatatggaagtgatcgtaggagaggaggatgctgcagcagcagcggcagccgccgccgtgcacgagcagcaaatggatgacaatgaaatcaaaaccttcatgccgattgcatgggcagcagcttatggtaataattctgatggaattgaaaaccggaatggcactgcaagtgccctcttgcacatagatgagtctgctggcctcggcagactggctaaacaaaaaccaaagaaaaggagaagacctgattccaggcagtaccaaacagcaataattattggccctgatggacatcctttgactgtctatccttgcatgatttgtgggaagaagtttaagtcgagaggttttttgaaaaggcacatgaaaaaccatcccgaacaccttgccaagaagaaataccgctgtactgactgtgattacactaccaacaagaagataagtttacacaaccacctggagagccacaagctgaccagcaaggcagagaaggccattgaatgcgatgagtgtgggaagcatttctctcatgcaggggctttgtttactcacaaaatggtgcataaggaaaaaggagccaacaaaatgcacaagtgtaaattctgtgaatacgagacagctgaacaagggttattgaatcgccacctcttggcagtccacagcaagaactttcctcatatttgtgtggagtgtggtaagggttttcgtcacccgtcagagctcaaaaagcacatgagaatccatactggggagaagccgtaccaatgccagtactgcgaatataggtctgcagactcttctaacttgaaaacgcatgtcaaaactaagcatagtaaagagatgccattcaagtgtgacatttgtcttctgactttctcggataccaaagaggtgcagcaacatgctcttatccaccaagaaagcaaaacacaccagtgtttgcattgcgaccacaagagttcgaactcaagtgatttgaaacgacacataatttcagttcacacgaaagactacccccataagtgtgacatgtgtgataaaggctttcacaggccttcagaactcaagaaacacgtggctgcccacaagggcaaaaaaatgcaccagtgtagacattgtgactttaagattgcagatccatttgttctaagtcgccatattctctcagttcacacaaaggatcttccatttaggtgcaagagatgtagaaagggatttaggcaacagagtgagcttaaaaagcatatgaagacacacagtggcaggaaagtgtatcagtgtgagtactgtgagtatagcactacagatgcctcaggctttaaacggcacgttatttccattcacacgaaagactatcctcaccggtgtgagtactgcaagaaaggcttccgaagaccttcagaaaagaaccagcacataatgcgacatcataaagaagttggcctgccctaacaatacttctacagaacgtttgtagagatattggccttgaagcagaaaattcattttaaagccaatcagtctcattcacatacaatactgtatattgatttatgctgtgtacaaatagaattattacttctagttgacttttttttaaatatacattttgctcagtagtgtgttctgaattctattcagtttgtttaataaatagggaaaactggcaacatgctagttacttttaataaagtaatccctgattctataccgaagttttatatcttagaattttatatttatttaaatatttaccttgcttaccttgatggtactcttctaagaccattaacttaaggtaactttatattggtaactctgaaagtattcatgttgactcatttttttccccatacatttctcacaataaaattgtcagagacatctactaatataaatgggagattttacagtcaggtctaattatcataacatggaagtcatttacttgtcttgcttaatattttcagaccacttgacagtgaaagtttccatttgagctgttgcgtccctggctttgctgagtaaagagcagtggctgggttcgtgtttacttttcaaatatacttcttttggctttctttggattatttacatcttttgtcagcgtagcaaacttttagaaaaccttattgaaaaactgtgcttgctcatgttgtattttgattattctgtctgtgcggcttcatcttggaatggttgtgtgctacaaatgacacttactgaggactgcattttggaatctcctagaggtaactcatggcttataggatcttttgcaactttatgtatgtaaatgtaccctgaattatatatatacacatatatatcatgtacctgtgtgtattgcttattttacatatttatacacacaaccccaagtagtagttgtttaaaatctataatgaaaagtattaaatttacaataacatgaaagatccagggatgcatgagagagcattttgtaagtcatgctcttcagagagactactcaggtgaagaattagaaggaaaataaggacactagtatttttaaagagtaaagatattttcttttaaatatctttggtaattgaaacatagaggttaagatgtttctaggtagaatgttttcatacaatttcacctccatgtctttatgtttttctgaaaagcaaatgagtatccagacatgactcccacagttctctttgagaagcctgagagggaactctgtcttacctagtgagggggatggaaaagaagtgatggctctgtggaccagagaacgggtgctaattatgacttcacactcggcaagttcaggctgatctgttatttctcagttacagttagcaaactttaaaaacttaacactcaagttggctttgattaaaaggtaaagatgtgttttaagtggataaggaaagtctgaggccttatttggaacatcactaagtcttccacaggttttttgtttgtttgtttttttttgttgtttttttttcttaagacggagtcttgctctgttgcccaggctggactgcagtggtgtgatcactgcaacctctgcagctcactgcaacctctgcttcctgggttcaagcaattatctgcctcagcctctcgagtagctgggattacaggcgcccaccaccacgcccggctaattttttgtatttttaatagagatggggtttcaccatcttggccaggctggtcttgaaccctgacctcgtgatccacctgcctcggccttccatagtgctgggtttacaggcgtgagccaccgtgcccagacaccacataggtctgaatcagtgtcatacattcataaaacaaactcggttaattagaacttggttatgttaagacgaatctgggagaacagaaaacagtttttggggtcccttcagttggctattggtccgtatgcatctagcacattgtaggagatttagaaattgtcttcccacccgatagctgccttgtcacctcattatggtgctccatcccctgtgtgcttaggtttttacctttcatctttctctttgccattgatgtttgtattcaagagttatatttttagggttagaaatcaaaatatttggtgtttggcaaacctctgaagtgctagactgatttagtctagttttaaaccaagtgctttaggcaggtgtgaactccagcccaaatgccagtcaaagtcaaggcatgggttttcctagcctatcttataggaaattcctgtaccttcttggcccccataatgtgttttttttttttttttttttttaaactaacttacaattttgtgatccgtgattcattgccctgcgattcttgaaagctctgtctgtttttttgtgagaacctttaaaatctcccttaatttttattttcccagaaataatgtaaaaacacttaaatgaaagtggaaatgtattaattttaaatcctataaaattaatacagaaaatataaatgattgggtcatttaactatatttttttaaataaactgaaagataaagaacacaacacttcacacattttatatttctcttacatactccggaatcatacacagttctttttaaagcacaacattaaaacctttaaaaggtatttaagggtttggtcaagtgaatatgataaaacatacttgtctgtataaagagaaaatgaaattgtagtcactgttatgtactgacattagttacaacctagttttaattcttaaaacaattttgattagcaaagctaaaaaaaaatggatgtttcagttaaatgttttaaagaggtacagatttttacaaggacataatataagttattgttctgtagaaatatcctattaaatattgtatgtccctccctctgtacactttgtaaagaaagtaaaatacataaaaagaaaatcatatagggatgtgtgacattattgtaattgtgtacttgagaataacgtgcaaaaataaaaatcagaatattttcctgttattgaatgtttagtctatttgataccagtactaagttaatgctttttctcaaggaaaaaaaatgtacagtttttgtaaacctaataaacatcaaaagcagtggattattttcatccccccatttcttaatttctttttcacagcagtggaatgcaaagtgcttgattgctttgaattttgtgactcggatgcaaatactggtaatatttcagttctgtgaatttgcaagtaatatttcagagaagttaagaggtgattggtgagtcctttgatgagcatgtccttggaattcattttttcttttatcttcataaaggatttgttttattagcatctccaattcccctgagataaattactcatgcataaagtggtttttgagagcacttaaagttcatttcagtattaatttacagcatatttaatcagtggggactgttaccacctccacaacagaaatcatgccctcgagttaccccactgcgcccagtttagaggactagtagatgctaacatactagggaatggtcattgccacagttaaaaatcggcagttaagtaaatgtcaggagtcaaaagagatagagttgtgccatctttgattttatagacaagattctgcagttcttccaactgtatgaacaaacgtttgcctaatagttgaaacaataaattaaaattttaggtaaatgacgaagggaatgtggtgaatgtcactgtccagagccataaatcagacaaaaccatacatagcatgctgaaaaacttttgtaatggaacacccaacaaatgacacctaacctgtctgtgatccaacaagtccgataacatgctgctgtatttgtattctctgggaatctcagtattaataatttcatttcccacaaattctagcattcatgtaaggaaaaacatggctaatcaatatcttaaaggggcaatctttcagagcagtggttttcaaagtatggccggacagcattggcagcatcttaatctcctgggactttgttaaaaatgcaaattctcagccccaccctagtcctactgaattgggaaactggcgtgggacccagcagtctttgttttaacatgttctccaagtgattctgatgcctgttcaaacttgggaaacacttttagagcacttgaggaacctaaaagatgactggttcagcattttgtgtggtagataagaaagaaattatcacaaaaaatcagaaatgaacagtgagagaaaaataggaccccagacagtttataccttccatttgctgttttaaaagtgtgagcctgccaagtcaacaagtatgcctttagcgcacatgtaaatagcctgcacttcctaaatctcgtgtggcctcccatggttacattcttcaaaggtaaactgagttgagaggaagattcagcatttaaaagagaagggttgaaaaagattgtgtgtgtgtgtgtgtgtgtttaattggcccagggttacttaaataaatcataaccattttgccacattctgtaactgtttagctaaggtcaaattaagtttaccctatggattttgtttcatcttttgtttcgtgtatatactgtttgcctttttcataaaaatcttggatttgttatatattgttcctgttatttttgacatctttgctattgtaaataaattactattttgttttaagttaccctagtggagtgttggctatagacaaggtatatactcgaaacgaggagacttaaatcacacagttaatgaattcccaacttgtttgaagctggaggtgattcgactcccttcagtggttcaacactaataatagcaccaaggaacatgtcactggtgcatatagg

SEQ ID NO: 35417 - DNA, 2936 bp, Homo sapiens
  source 1..2936: mol_type = unassigned DNA
gcctgtcactgccgtctgttccctgagctgtgctttacgctgggaaagacatagaagaactattaagaagatagaattgttttgctgcgcagtacagcaacagtggatgttcaagattaagattagagtcaagttgtgtgattaagacaggagctgtgactgatgagaattaaaggccatggatgaagatgggcttgaattacaacaagagccaaactcattttttgatgcaacagacagggtctcgttctgtcacccaggctggagcacagtggcgccatctgggtccactgcaacctccgcctcccaggctcaagtgatctgctcagcttcccgagtaactggggctacaggagctgatggtacacacatggatggtgatcaaattgttgtggaagtacaagaaactgtttttgtttcagatgttgtggattcagacataactgtgcataactttgttcctgatgacccagattcagttgtaatccaagatgttattgaggacgttgttatagaagatgttcagtgcccagatatcatggaagaagcagatgtgtctgaaacggtcatcattcctgagcaagtgctggactcagatgtaactgaagaagtttctttagcacattgcacagtcccagatgatgttttagcttctgacattacttcagcctcaatgtctatgccagaacacgtcttgacgggtgattctatacatgtgtctgacgttggacatgttggacatgttggacatgttgaacatgtggttcatgatagtgtagtggaagcagaaattgtcactgatcctctgactaccgacgtagtttcagaagaagtattggtagcagactgtgcctctgaagcagtcatagatgccaatgggatccctgtggaccagcaggatgatgacaaaggcaactgtgaggactaccttatgatttccttggatgatgctggcaaaatagaacacgatggttcttctggaatgaccatggacacagagtcggaaattgatccttgtaaagtggatggcacttgccctgaggtcatcaaggtgtacatttttaaagctgaccctggagaagatgacttaggtggaactgtagacattgtggagagtgagcctgagaatgatcatggagttgaactgcttgatcagaacagcagtattcgtgttcccagggaaaagatggtttatatgactgtcaatgactctcagccagaagatgaagatttaaatgttgctgaaatcgctgacgaagtttatatggaagtgatcgtaggagaggaggatgctgcagcagcagcggcagccgccgccgtgcacgagcagcaaatggatgacaatgaaatcaaaaccttcatgccgattgcatgggcagcagcttatggtaataattctgatggaattgaaaaccggaatggcactgcaagtgccctcttgcacatagatgagtctgctggcctcggcagactggctaaacaaaaaccaaagaaaaggagaagacctgattccaggcagtaccaaacagcaataattattggccctgatggacatcctttgactgtctatccttgcatgatttgtgggaagaagtttaagtcgagaggttttttgaaaaggcacatgaaaaaccatcccgaacaccttgccaagaagaaataccgctgtactgactgtgattacactaccaacaagaagataagtttacacaaccacctggagagccacaagctgaccagcaaggcagagaaggccattgaatgcgatgagtgtgggaagcatttctctcatgcaggggctttgtttactcacaaaatggtgcataaggaaaaaggagccaacaaaatgcacaagtgtaaattctgtgaatacgagacagctgaacaagggttattgaatcgccacctcttggcagtccacagcaagaactttcctcatatttgtgtggagtgtggtaagggttttcgtcacccgtcagagctcaaaaagcacatgagaatccatactggggagaagccgtaccaatgccagtactgcgaatataggtctgcagactcttctaacttgaaaacgcatgtcaaaactaagcatagtaaagagatgccattcaagtgtgacatttgtcttctgactttctcggataccaaagaggtgcagcaacatgctcttatccaccaagaaagcaaaacacaccagtgtttgcattgcgaccacaagagttcgaactcaagtgatttgaaacgacacataatttcagttcacacgaaagactacccccataagtgtgacatgtgtgataaaggctttcacaggccttcagaactcaagaaacacgtggctgcccacaagggcaaaaaaatgcaccagtgtagacattgtgactttaagattgcagatccatttgttctaagtcgccatattctctcagttcacacaaaggatcttccatttaggtgcaagagatgtagaaagggatttaggcaacagagtgagcttaaaaagcatatgaagacacacagtggcaggaaagtgtatcagtgtgagtactgtgagtatagcactacagatgcctcaggctttaaacggcacgttatttccattcacacgaaagactatcctcaccggtgtgagtactgcaagaaaggcttccgaagaccttcagaaaagaaccagcacataatgcgacatcataaagaagttggcctgccctaacaatacttctacagaacgtttgtagagatattggccttgaagcagaaaattcattttaaagccaatcagtctcattcacatacaatactgtatattgatttatgctgtgtacaaatagaattattacttctagttgacttttttttaaatatacattttgctcagtagtgtgttctgaattctattcagtttgtttaataaatagggaaaactggcaacatgc

SEQ ID NO: 35418 - DNA, 2026 bp, Homo sapiens
  source 1..2026: mol_type = unassigned DNA
ggaggttgcagtcaatatctgttactatttgtggatgatgctggcaaaatagaacacgatggttcttctggaatgaccatggacacagagtcggaaattgatccttgtaaagtggatggcacttgccctgaggtcatcaaggtgtacatttttaaagctgaccctggagaagatgacttaggtggaactgtagacattgtggagagtgagcctgagaatgatcatggagttgaactgcttgatcagaacagcagtattcgtgttcccagggaaaagatggtttatatgactgtcaatgactctcagccagaagatgaagatttaaatgttgctgaaatcgctgacgaagtttatatggaagtgatcgtaggagaggaggatgctgcagcagcagcggcagccgccgccgtgcacgagcagcaaatggatgacaatgaaatcaaaaccttcatgccgattgcatgggcagcagcttatggtaataattctgatggaattgaaaaccggaatggcactgcaagtgccctcttgcacatagatgagtctgctggcctcggcagactggctaaacaaaaaccaaagaaaaggagaagacctgattccaggcagtaccaaacagcaataattattggccctgatggacatcctttgactgtctatccttgcatgatttgtgggaagaagtttaagtcgagaggttttttgaaaaggcacatgaaaaaccatcccgaacaccttgccaagaagaaataccgctgtactgactgtgattacactaccaacaagaagataagtttacacaaccacctggagagccacaagctgaccagcaaggcagagaaggccattgaatgcgatgagtgtgggaagcatttctctcatgcaggggctttgtttactcacaaaatggtgcataaggaaaaaggagccaacaaaatgcacaagtgtaaattctgtgaatacgagacagctgaacaagggttattgaatcgccacctcttggcagtccacagcaagaactttcctcatatttgtgtggagtgtggtaagggttttcgtcacccgtcagagctcaaaaagcacatgagaatccatactggggagaagccgtaccaatgccagtactgcgaatataggtctgcagactcttctaacttgaaaacgcatgtcaaaactaagcatagtaaagagatgccattcaagtgtgacatttgtcttctgactttctcggataccaaagaggtgcagcaacatgctcttatccaccaagaaagcaaaacacaccagtgtttgcattgcgaccacaagagttcgaactcaagtgatttgaaacgacacataatttcagttcacacgaaagactacccccataagtgtgacatgtgtgataaaggctttcacaggccttcagaactcaagaaacacgtggctgcccacaagggcaaaaaaatgcaccagtgtagacattgtgactttaagattgcagatccatttgttctaagtcgccatattctctcagttcacacaaaggatcttccatttaggtgcaagagatgtagaaagggatttaggcaacagagtgagcttaaaaagcatatgaagacacacagtggcaggaaagtgtatcagtgtgagtactgtgagtatagcactacagatgcctcaggctttaaacggcacgttatttccattcacacgaaagactatcctcaccggtgtgagtactgcaagaaaggcttccgaagaccttcagaaaagaaccagcacataatgcgacatcataaagaagttggcctgccctaacaatacttctacagaacgtttgtagagatattggccttgaagcagaaaattcattttaaagccaatcagtctcattcacatacaatactgtatattgatttatgctgtgtacaaatagaattattacttctagttgacttttttttaaatatacattttgctcagtagtgtgttctgaattctattcagtttgtttaataaatagggaaaactggcaacatgc

SEQ ID NO: 35419 - DNA, 5239 bp, Homo sapiens
  source 1..5239: mol_type = unassigned DNA
gcctagtgcgcgcgcagtaacctgtttgtggcctggtcggcgtcccgtagggcgccctcccgcgctaggccggccggcgtggcgctcggcgccgaacaggccccgaggaggccgcagttaggcctagtgattatccagttgccctgagcggctgcggaggtgcgctccataagcgggcagggtgggaaaagttcgcccgtttgtccggaaggcagttgatggacctggggtcgacaccactgcggacgcagggcacggcacgggggcgagaaggcgaaggctgcaggcgtgaggagctgtgactaatgagaattaaaggccatggatgaagatgaatttgaattgcagccacaagagccaaactcattttttgatggaataggagctgatgctacacacatggatggtgatcagattgttgtggaaatacaagaagcagtttttgtttctaatattgtggattctgacataactgtgcataactttgttcctgatgacccagactcagttgtaatccaagatgttgttgaagatgttgtcatagaggaggatgttcagtgctcagatatcttagaagaggcagatgtatctgaaaatgtcatcattcctgagcaagtgctggactcagatgtaactgaagaagtttctttaccacactgcacagtcccagatgatgttttagcttctgacattacttcaacctcaatgtctatgccagaacatgttttaacgagtgaatccatgcatgtgtgtgacattggacatgttgaacatatggtgcatgatagtgtagtggaagcagaaatcattactgatcctctgacgagtgacatagtttcagaagaagtattggtagcagactgtgcccctgaagcagtcatagatgccagcgggatctcagtggaccagcaagataatgacaaagccagctgtgaggactacctaatgatttcgttggatgatgctggcaaaatagaacatgatggttccactggagtgaccatcgatgcagaatcagaaatggatccttgtaaagtggatagcacttgtcctgaagtcatcaaggtgtacatttttaaagctgaccctggagaagatgacttaggtggaactgtagacattgtggagagtgaacctgaaaatgatcatggagttgaactacttgatcagaacagcagtattcgtgttcccagggaaaagatggtttatatgactgtcaatgactctcaacaagaagatgaagatttaaatgttgctgaaattgctgatgaagtttatatggaagtgatcgtaggagaggaggatgctgctgttgcagcagcagcagctgctgtgcatgagcagcaaattgatgaggatgaaatgaaaaccttcgtaccaattgcatgggcagcagcttatggtaataattctgatggaattgaaaaccggaatggcactgcaagtgccctcttgcacatagatgagtctgctggccttggcagactggctaaacagaaaccaaagaaaaagagaagacctgattccaggcagtaccaaacagcaataattattggccctgatggtcatcctttgactgtctatccttgcatgatttgtgggaagaagtttaagtcgaggggttttttgaaaagacacatgaaaaaccatcctgaacaccttgccaagaagaagtaccactgtactgactgtgattacactaccaataagaagataagtttacataaccacctggagagccacaagctgaccagcaaggcagagaaggccattgaatgtgatgagtgtgggaagcatttttctcatgcaggggctttgtttactcacaaaatggtgcataaggaaaaaggggccaacaaaatgcacaagtgtaaattctgtgaatatgagacagctgaacaggggttattgaatcgccacctcttggcagtccacagcaagaactttcctcatatttgtgtggagtgtggtaaaggtttccgacacccgtcggaactgagaaagcacatgcgaatccataccggcgagaagccataccaatgccagtactgtgaatataggtctgcagactcttctaacttgaaaacacatataaaaacaaagcatagtaaagagatgccattcaagtgtgacatttgtcttctgactttctcagataccaaagaagtgcagcaacatactcttgtccaccaagaaagcaaaacacatcagtgtttgcattgcgaccacaagagttcaaactcaagtgatttgaaacgacatgtaatttcagttcatacgaaagactatcctcataagtgtgagatgtgcgagaaaggctttcacaggccttcagaacttaagaaacatgtggctgtccacaaaggtaaaaaaatgcaccaatgtagacattgtgactttaagattgcagacccatttgttctaagtcgccatattctctcagttcacacaaaggatcttccatttaggtgtaagagatgtagaaagggatttaggcaacaaaatgagcttaaaaagcatatgaagacacacagtggcaggaaagtatatcagtgtgagtactgtgagtatagcactacagatgcctcaggctttaaacggcacgttatttccattcatacaaaagactatcctcatcggtgtgagtactgcaagaaaggcttccgaagaccttcagaaaagaaccagcacataatgagacaccataaagaagttggtctgccctaacagtgtgtctacaagcttgtaaagatgttggccttgaagcagaaaattcattttttaaagccagtcttgttcacatccattactatacattgaattatgctgtgtaaaaatagaattattgcttctagtccacttttctttacattttattcaatacgctgtcctgaatcctattcagtttctttaatagatgaggaaaaatagcaacaagcaagttgcttataataaaataatttgtgattctatactgaattttcagtcataaaagctttactatttatttacatatttattcatgttcatggtactcttctaagacaaaatcagattgataactatgaaagtaacatttttgacccatttcctcctacacaagtgtttcacattggagacatctgctaatataaatgggaggttttactgtcaagtccaattagcaaaacgtggtaataatttttttgtcagtattttcagattacatgataaaattttacatttgagcttctagcattgattaatataggatattgaccacgtttatgtttaaatttcattttgttcagcagacaaaatgtacttcccttaactttcattaatagtgtttacatcttttgtcagcacagcaaacttttagaaagtaatagttttacttatttttatcttctgttttctctttgtactgctttgtcttgcattgtgttccaacacatgagacttactgctcactgaattttggagtcttttagaggtaaattgtggactcaggattttttgaaacttggtgtgtaactctaaatcttgtatatgcatctttgttgcttattacatatttacacacacaaccacaaattttaaacttatgatgaaaatttacaataacctgaaagatccagagatgtatgagagcattttgtaacttgttattcagttactaaatttgaggtgaataattaaaaagaaaaggacattaggagagtgaaaatcttctcttcaaataatctttgatagataaaaatggaaggtaagatgtttctagatagaatgttttcatacaatttcagcttcatatcataaatttttctggaaagctatttcagacatagatttcatagtatttttctgagaatcctgtgaaggaacgctgtctctttgcaaagtaaggaggactaagggaaaatgatggtaccatgtaacagaatgagagctaattccaaattagcaacttcatcctgctttctattttacattgagtaaagttttaaaaagacaacagtcaagttgattttgattagaagataaaagtacataatgaaaatccatggccttatttggaatatatatcactttccaaattttattatttatttgagagttaataagttaatgttattaagcagttaataatttatatgtatggatataatataaaatgaattcatataattaaaaagaatttggttaataagaatttggagaatggaaaatacatttttaggttccttaatttggctgttggtacctgtgtatttggaatattttaggggattcgaattttttttaacccacattacagctaccttctagctttagtatggtagtgcttcattcaacttttgctgtcaggtttttattttcacctttttctgtgccaccaattcaaaagttataggattaggaaatataaatttatatttggtgattggcagcctctgaaatgttagattaatttgatctagttctaaagtgctttagtcatatatgaatttaaacctagtaccatccaaaaccatgtaatggattttaagaatctgttaggccttcttagcctttatacatgtccctacctgatttttactgtccttcatgatcctgttcttgaaaacttcagtttgtatttgagaatcctttaaatctccttccaatttgttttctccctgaagtaatataaaaggaagtatttaagtgaaagtttaagagttttaaaacattctttaaaattaatacagatagttagctatttatcttttaaaaataaactaaggtaaaaaacgtgacactttacatatttcatatttttcatatagtctggaggtatacacagttgttttgtttttaaccacggtattgaaacctttaaaaggtaattaagcatttggtcaagtaaatatagaacatttgtataaagaaagaaatgaaattgtgcttaatgttatatactgttattatttgcaggctggttttaattcttaatttgattagcaaagctaaaaaagtggatgttgaagttgaaagttttaaagaggtacaaaatcttacaaggacataaattattatttggttgaaaaatagcctattagatattgtatgtcccttcctctgtacaaattgtaaaatacttaaaataactatgaagaattcatataggaagtgtgatactattgtaaatgtgtatttgagaatatgcaaaaataaaaataatattttactgttaataaatgtttacttgtatatg

SEQ ID NO: 35420 - DNA, 5113 bp, Homo sapiens
  source 1..5113: mol_type = unassigned DNA
gacggcgggcccgtgccggggagctgggccgctttttgtcagctccgaactcggcccctcctccctccctccgcccgccctaccagccggagcccggcccagtgctccagagaaaggccgtcctgcagcacccgccgctgtcgccgaccgcccgcacatccgtcgggagctgtgactaatgagaattaaaggccatggatgaagatgaatttgaattgcagccacaagagccaaactcattttttgatggaataggagctgatgctacacacatggatggtgatcagattgttgtggaaatacaagaagcagtttttgtttctaatattgtggattctgacataactgtgcataactttgttcctgatgacccagactcagttgtaatccaagatgttgttgaagatgttgtcatagaggaggatgttcagtgctcagatatcttagaagaggcagatgtatctgaaaatgtcatcattcctgagcaagtgctggactcagatgtaactgaagaagtttctttaccacactgcacagtcccagatgatgttttagcttctgacattacttcaacctcaatgtctatgccagaacatgttttaacgagtgaatccatgcatgtgtgtgacattggacatgttgaacatatggtgcatgatagtgtagtggaagcagaaatcattactgatcctctgacgagtgacatagtttcagaagaagtattggtagcagactgtgcccctgaagcagtcatagatgccagcgggatctcagtggaccagcaagataatgacaaagccagctgtgaggactacctaatgatttcgttggatgatgctggcaaaatagaacatgatggttccactggagtgaccatcgatgcagaatcagaaatggatccttgtaaagtggatagcacttgtcctgaagtcatcaaggtgtacatttttaaagctgaccctggagaagatgacttaggtggaactgtagacattgtggagagtgaacctgaaaatgatcatggagttgaactacttgatcagaacagcagtattcgtgttcccagggaaaagatggtttatatgactgtcaatgactctcaacaagaagatgaagatttaaatgttgctgaaattgctgatgaagtttatatggaagtgatcgtaggagaggaggatgctgctgttgcagcagcagcagctgctgtgcatgagcagcaaattgatgaggatgaaatgaaaaccttcgtaccaattgcatgggcagcagcttatggtaataattctgatggaattgaaaaccggaatggcactgcaagtgccctcttgcacatagatgagtctgctggccttggcagactggctaaacagaaaccaaagaaaaagagaagacctgattccaggcagtaccaaacagcaataattattggccctgatggtcatcctttgactgtctatccttgcatgatttgtgggaagaagtttaagtcgaggggttttttgaaaagacacatgaaaaaccatcctgaacaccttgccaagaagaagtaccactgtactgactgtgattacactaccaataagaagataagtttacataaccacctggagagccacaagctgaccagcaaggcagagaaggccattgaatgtgatgagtgtgggaagcatttttctcatgcaggggctttgtttactcacaaaatggtgcataaggaaaaaggggccaacaaaatgcacaagtgtaaattctgtgaatatgagacagctgaacaggggttattgaatcgccacctcttggcagtccacagcaagaactttcctcatatttgtgtggagtgtggtaaaggtttccgacacccgtcggaactgagaaagcacatgcgaatccataccggcgagaagccataccaatgccagtactgtgaatataggtctgcagactcttctaacttgaaaacacatataaaaacaaagcatagtaaagagatgccattcaagtgtgacatttgtcttctgactttctcagataccaaagaagtgcagcaacatactcttgtccaccaagaaagcaaaacacatcagtgtttgcattgcgaccacaagagttcaaactcaagtgatttgaaacgacatgtaatttcagttcatacgaaagactatcctcataagtgtgagatgtgcgagaaaggctttcacaggccttcagaacttaagaaacatgtggctgtccacaaaggtaaaaaaatgcaccaatgtagacattgtgactttaagattgcagacccatttgttctaagtcgccatattctctcagttcacacaaaggatcttccatttaggtgtaagagatgtagaaagggatttaggcaacaaaatgagcttaaaaagcatatgaagacacacagtggcaggaaagtatatcagtgtgagtactgtgagtatagcactacagatgcctcaggctttaaacggcacgttatttccattcatacaaaagactatcctcatcggtgtgagtactgcaagaaaggcttccgaagaccttcagaaaagaaccagcacataatgagacaccataaagaagttggtctgccctaacagtgtgtctacaagcttgtaaagatgttggccttgaagcagaaaattcattttttaaagccagtcttgttcacatccattactatacattgaattatgctgtgtaaaaatagaattattgcttctagtccacttttctttacattttattcaatacgctgtcctgaatcctattcagtttctttaatagatgaggaaaaatagcaacaagcaagttgcttataataaaataatttgtgattctatactgaattttcagtcataaaagctttactatttatttacatatttattcatgttcatggtactcttctaagacaaaatcagattgataactatgaaagtaacatttttgacccatttcctcctacacaagtgtttcacattggagacatctgctaatataaatgggaggttttactgtcaagtccaattagcaaaacgtggtaataatttttttgtcagtattttcagattacatgataaaattttacatttgagcttctagcattgattaatataggatattgaccacgtttatgtttaaatttcattttgttcagcagacaaaatgtacttcccttaactttcattaatagtgtttacatcttttgtcagcacagcaaacttttagaaagtaatagttttacttatttttatcttctgttttctctttgtactgctttgtcttgcattgtgttccaacacatgagacttactgctcactgaattttggagtcttttagaggtaaattgtggactcaggattttttgaaacttggtgtgtaactctaaatcttgtatatgcatctttgttgcttattacatatttacacacacaaccacaaattttaaacttatgatgaaaatttacaataacctgaaagatccagagatgtatgagagcattttgtaacttgttattcagttactaaatttgaggtgaataattaaaaagaaaaggacattaggagagtgaaaatcttctcttcaaataatctttgatagataaaaatggaaggtaagatgtttctagatagaatgttttcatacaatttcagcttcatatcataaatttttctggaaagctatttcagacatagatttcatagtatttttctgagaatcctgtgaaggaacgctgtctctttgcaaagtaaggaggactaagggaaaatgatggtaccatgtaacagaatgagagctaattccaaattagcaacttcatcctgctttctattttacattgagtaaagttttaaaaagacaacagtcaagttgattttgattagaagataaaagtacataatgaaaatccatggccttatttggaatatatatcactttccaaattttattatttatttgagagttaataagttaatgttattaagcagttaataatttatatgtatggatataatataaaatgaattcatataattaaaaagaatttggttaataagaatttggagaatggaaaatacatttttaggttccttaatttggctgttggtacctgtgtatttggaatattttaggggattcgaattttttttaacccacattacagctaccttctagctttagtatggtagtgcttcattcaacttttgctgtcaggtttttattttcacctttttctgtgccaccaattcaaaagttataggattaggaaatataaatttatatttggtgattggcagcctctgaaatgttagattaatttgatctagttctaaagtgctttagtcatatatgaatttaaacctagtaccatccaaaaccatgtaatggattttaagaatctgttaggccttcttagcctttatacatgtccctacctgatttttactgtccttcatgatcctgttcttgaaaacttcagtttgtatttgagaatcctttaaatctccttccaatttgttttctccctgaagtaatataaaaggaagtatttaagtgaaagtttaagagttttaaaacattctttaaaattaatacagatagttagctatttatcttttaaaaataaactaaggtaaaaaacgtgacactttacatatttcatatttttcatatagtctggaggtatacacagttgttttgtttttaaccacggtattgaaacctttaaaaggtaattaagcatttggtcaagtaaatatagaacatttgtataaagaaagaaatgaaattgtgcttaatgttatatactgttattatttgcaggctggttttaattcttaatttgattagcaaagctaaaaaagtggatgttgaagttgaaagttttaaagaggtacaaaatcttacaaggacataaattattatttggttgaaaaatagcctattagatattgtatgtcccttcctctgtacaaattgtaaaatacttaaaataactatgaagaattcatataggaagtgtgatactattgtaaatgtgtatttgagaatatgcaaaaataaaaataatattttactgttaataaatgtttacttgtatatga

SEQ ID NO: 35421 - DNA, 4749 bp, Homo sapiens
  source 1..4749: mol_type = unassigned DNA
agtggtgacggcgggcgcgcggagaaaaggaacgttgtgacggaaactccagctgccggagaccccaccgcagtgaggtcactggactccccggactcggggcgtgaccggcgccgacccggggcgccgagaggcccaccgggcggagggggcccaactaccatcccgcattttcctgggtctctctcccgggcggtgacgtgacgtgctgacggcgggcccgtgccggggagctgggccgctttttgtcagctccgaactcggcccctcctccctccctccgcccgccctaccagccggagcccggcccagtgctccagagaaaggccgtcctgcagcacccgccgctgtcgccgaccgcccgcacatccgtcgggagctgtgactaatgagaattaaaggccatggatgaagatgaatttgaattgcagccacaagagccaaactcattttttgatggaatagtggatgatgctggcaaaatagaacatgatggttccactggagtgaccatcgatgcagaatcagaaatggatccttgtaaagtggatagcacttgtcctgaagtcatcaaggtgtacatttttaaagctgaccctggagaagatgacttaggtggaactgtagacattgtggagagtgaacctgaaaatgatcatggagttgaactacttgatcagaacagcagtattcgtgttcccagggaaaagatggtttatatgactgtcaatgactctcaacaagaagatgaagatttaaatgttgctgaaattgctgatgaagtttatatggaagtgatcgtaggagaggaggatgctgctgttgcagcagcagcagctgctgtgcatgagcagcaaattgatgaggatgaaatgaaaaccttcgtaccaattgcatgggcagcagcttatggtaataattctgatggaattgaaaaccggaatggcactgcaagtgccctcttgcacatagatgagtctgctggccttggcagactggctaaacagaaaccaaagaaaaagagaagacctgattccaggcagtaccaaacagcaataattattggccctgatggtcatcctttgactgtctatccttgcatgatttgtgggaagaagtttaagtcgaggggttttttgaaaagacacatgaaaaaccatcctgaacaccttgccaagaagaagtaccactgtactgactgtgattacactaccaataagaagataagtttacataaccacctggagagccacaagctgaccagcaaggcagagaaggccattgaatgtgatgagtgtgggaagcatttttctcatgcaggggctttgtttactcacaaaatggtgcataaggaaaaaggggccaacaaaatgcacaagtgtaaattctgtgaatatgagacagctgaacaggggttattgaatcgccacctcttggcagtccacagcaagaactttcctcatatttgtgtggagtgtggtaaaggtttccgacacccgtcggaactgagaaagcacatgcgaatccataccggcgagaagccataccaatgccagtactgtgaatataggtctgcagactcttctaacttgaaaacacatataaaaacaaagcatagtaaagagatgccattcaagtgtgacatttgtcttctgactttctcagataccaaagaagtgcagcaacatactcttgtccaccaagaaagcaaaacacatcagtgtttgcattgcgaccacaagagttcaaactcaagtgatttgaaacgacatgtaatttcagttcatacgaaagactatcctcataagtgtgagatgtgcgagaaaggctttcacaggccttcagaacttaagaaacatgtggctgtccacaaaggtaaaaaaatgcaccaatgtagacattgtgactttaagattgcagacccatttgttctaagtcgccatattctctcagttcacacaaaggatcttccatttaggtgtaagagatgtagaaagggatttaggcaacaaaatgagcttaaaaagcatatgaagacacacagtggcaggaaagtatatcagtgtgagtactgtgagtatagcactacagatgcctcaggctttaaacggcacgttatttccattcatacaaaagactatcctcatcggtgtgagtactgcaagaaaggcttccgaagaccttcagaaaagaaccagcacataatgagacaccataaagaagttggtctgccctaacagtgtgtctacaagcttgtaaagatgttggccttgaagcagaaaattcattttttaaagccagtcttgttcacatccattactatacattgaattatgctgtgtaaaaatagaattattgcttctagtccacttttctttacattttattcaatacgctgtcctgaatcctattcagtttctttaatagatgaggaaaaatagcaacaagcaagttgcttataataaaataatttgtgattctatactgaattttcagtcataaaagctttactatttatttacatatttattcatgttcatggtactcttctaagacaaaatcagattgataactatgaaagtaacatttttgacccatttcctcctacacaagtgtttcacattggagacatctgctaatataaatgggaggttttactgtcaagtccaattagcaaaacgtggtaataatttttttgtcagtattttcagattacatgataaaattttacatttgagcttctagcattgattaatataggatattgaccacgtttatgtttaaatttcattttgttcagcagacaaaatgtacttcccttaactttcattaatagtgtttacatcttttgtcagcacagcaaacttttagaaagtaatagttttacttatttttatcttctgttttctctttgtactgctttgtcttgcattgtgttccaacacatgagacttactgctcactgaattttggagtcttttagaggtaaattgtggactcaggattttttgaaacttggtgtgtaactctaaatcttgtatatgcatctttgttgcttattacatatttacacacacaaccacaaattttaaacttatgatgaaaatttacaataacctgaaagatccagagatgtatgagagcattttgtaacttgttattcagttactaaatttgaggtgaataattaaaaagaaaaggacattaggagagtgaaaatcttctcttcaaataatctttgatagataaaaatggaaggtaagatgtttctagatagaatgttttcatacaatttcagcttcatatcataaatttttctggaaagctatttcagacatagatttcatagtatttttctgagaatcctgtgaaggaacgctgtctctttgcaaagtaaggaggactaagggaaaatgatggtaccatgtaacagaatgagagctaattccaaattagcaacttcatcctgctttctattttacattgagtaaagttttaaaaagacaacagtcaagttgattttgattagaagataaaagtacataatgaaaatccatggccttatttggaatatatatcactttccaaattttattatttatttgagagttaataagttaatgttattaagcagttaataatttatatgtatggatataatataaaatgaattcatataattaaaaagaatttggttaataagaatttggagaatggaaaatacatttttaggttccttaatttggctgttggtacctgtgtatttggaatattttaggggattcgaattttttttaacccacattacagctaccttctagctttagtatggtagtgcttcattcaacttttgctgtcaggtttttattttcacctttttctgtgccaccaattcaaaagttataggattaggaaatataaatttatatttggtgattggcagcctctgaaatgttagattaatttgatctagttctaaagtgctttagtcatatatgaatttaaacctagtaccatccaaaaccatgtaatggattttaagaatctgttaggccttcttagcctttatacatgtccctacctgatttttactgtccttcatgatcctgttcttgaaaacttcagtttgtatttgagaatcctttaaatctccttccaatttgttttctccctgaagtaatataaaaggaagtatttaagtgaaagtttaagagttttaaaacattctttaaaattaatacagatagttagctatttatcttttaaaaataaactaaggtaaaaaacgtgacactttacatatttcatatttttcatatagtctggaggtatacacagttgttttgtttttaaccacggtattgaaacctttaaaaggtaattaagcatttggtcaagtaaatatagaacatttgtataaagaaagaaatgaaattgtgcttaatgttatatactgttattatttgcaggctggttttaattcttaatttgattagcaaagctaaaaaagtggatgttgaagttgaaagttttaaagaggtacaaaatcttacaaggacataaattattatttggttgaaaaatagcctattagatattgtatgtcccttcctctgtacaaattgtaaaatacttaaaataactatgaagaattcatataggaagtgtgatactattgtaaatgtgtatttgagaatatgcaaaaataaaaataatattttactgttaataaatgtttacttgtatatg

SEQ ID NO: 35422 - DNA, 567 bp, Homo sapiens
  source 1..567: mol_type = unassigned DNA
tggcctggtcggcgtcccgtagggcgccctcccgcgctaggccggccggcgtggcgctcggcgccgaacaggccccgaggaggccgcagttaggcctagtgattatccagttgccctgagcggctgcggaggtgcgctccataagcgggcagggtgggaaaagttcgcccgtttgtccggaaggcagttgatggacctggggtcgacaccactgcggacgcagggcacggcacgggggcgagaaggcgaaggctgcaggcgtgaggagctgtgactaatgagaattaaaggccatggatgaagatgaatttgaattgcagccacaagagccaaactcattttttgatggaataggagctgatgctacacacatggatggtgatcagattgttgtggaaatacaagaagcagtttttgtttctaatattgtggattctgacataactgtgcataactttgttcctgatgacccagactcagttgtaatccaagatgttgttgaagatgttgtcatagaggaggatgttcagtgctcagatatcttagaagaggcagatgtatctgaaa

SEQ ID NO: 35423 - DNA, 4997 bp, Homo sapiens
  source 1..4997: mol_type = unassigned DNA
gcctagtgcgcgcgcagtaacctgtttgtggcctggtcggcgtcccgtagggcgccctcccgcgctaggccggccggcgtggcgctcggcgccgaacaggccccgaggaggccgcagttaggcctagtgattatccagttgccctgagcggctgcggaggtgcgctccataagcgggcagggtgggaaaagttcgcccgtttgtccggaaggcagttgatggacctggggtcgacaccactgcggacgcagggcacggcacgggggcgagaaggcgaaggctgcaggcgtgaggagctgatgctacacacatggatggtgatcagattgttgtggaaatacaagaagcagtttttgtttctaatattgtggattctgacataactgtgcataactttgttcctgatgacccagactcagttgtaatccaagatgttgttgaagatgttgtcatagaggaggatgttcagtgctcagatatcttagaagaggcagatgtatctgaaaatgtcatcattcctgagcaagtgctggactcagatgtaactgaagaagtttctttaccacactgcacagtcccagatgatgttttagcttctgacattacttcaacctcaatgtctatgccagaacatgttttaacgagtgaatccatgcatgtgtgtgacattggacatgttgaacatatggtgcatgatagtgtagtggaagcagaaatcattactgatcctctgacgagtgacatagtttcagaagaagtattggtagcagactgtgcccctgaagcagtcatagatgccagcgggatctcagtggaccagcaagataatgacaaagccagctgtgaggactacctaatgatttcgttggatgatgctggcaaaatagaacatgatggttccactggagtgaccatcgatgcagaatcagaaatggatccttgtaaagtggatagcacttgtcctgaagtcatcaaggtgtacatttttaaagctgaccctggagaagatgacttaggtggaactgtagacattgtggagagtgaacctgaaaatgatcatggagttgaactacttgatcagaacagcagtattcgtgttcccagggaaaagatggtttatatgactgtcaatgactctcaacaagaagatgaagatttaagtaataattctgatggaattgaaaaccggaatggcactgcaagtgccctcttgcacatagatgagtctgctggccttggcagactggctaaacagaaaccaaagaaaaagagaagacctgattccaggcagtaccaaacagcaataattattggccctgatggtcatcctttgactgtctatccttgcatgatttgtgggaagaagtttaagtcgaggggttttttgaaaagacacatgaaaaaccatcctgaacaccttgccaagaagaagtaccactgtactgactgtgattacactaccaataagaagataagtttacataaccacctggagagccacaagctgaccagcaaggcagagaaggccattgaatgtgatgagtgtgggaagcatttttctcatgcaggggctttgtttactcacaaaatggtgcataaggaaaaaggggccaacaaaatgcacaagtgtaaattctgtgaatatgagacagctgaacaggggttattgaatcgccacctcttggcagtccacagcaagaactttcctcatatttgtgtggagtgtggtaaaggtttccgacacccgtcggaactgagaaagcacatgcgaatccataccggcgagaagccataccaatgccagtactgtgaatataggtctgcagactcttctaacttgaaaacacatataaaaacaaagcatagtaaagagatgccattcaagtgtgacatttgtcttctgactttctcagataccaaagaagtgcagcaacatactcttgtccaccaagaaagcaaaacacatcagtgtttgcattgcgaccacaagagttcaaactcaagtgatttgaaacgacatgtaatttcagttcatacgaaagactatcctcataagtgtgagatgtgcgagaaaggctttcacaggccttcagaacttaagaaacatgtggctgtccacaaaggtaaaaaaatgcaccaatgtagacattgtgactttaagattgcagacccatttgttctaagtcgccatattctctcagttcacacaaaggatcttccatttaggtgtaagagatgtagaaagggatttaggcaacaaaatgagcttaaaaagcatatgaagacacacagtggcaggaaagtatatcagtgtgagtactgtgagtatagcactacagatgcctcaggctttaaacggcacgttatttccattcatacaaaagactatcctcatcggtgtgagtactgcaagaaaggcttccgaagaccttcagaaaagaaccagcacataatgagacaccataaagaagttggtctgccctaacagtgtgtctacaagcttgtaaagatgttggccttgaagcagaaaattcattttttaaagccagtcttgttcacatccattactatacattgaattatgctgtgtaaaaatagaattattgcttctagtccacttttctttacattttattcaatacgctgtcctgaatcctattcagtttctttaatagatgaggaaaaatagcaacaagcaagttgcttataataaaataatttgtgattctatactgaattttcagtcataaaagctttactatttatttacatatttattcatgttcatggtactcttctaagacaaaatcagattgataactatgaaagtaacatttttgacccatttcctcctacacaagtgtttcacattggagacatctgctaatataaatgggaggttttactgtcaagtccaattagcaaaacgtggtaataatttttttgtcagtattttcagattacatgataaaattttacatttgagcttctagcattgattaatataggatattgaccacgtttatgtttaaatttcattttgttcagcagacaaaatgtacttcccttaactttcattaatagtgtttacatcttttgtcagcacagcaaacttttagaaagtaatagttttacttatttttatcttctgttttctctttgtactgctttgtcttgcattgtgttccaacacatgagacttactgctcactgaattttggagtcttttagaggtaaattgtggactcaggattttttgaaacttggtgtgtaactctaaatcttgtatatgcatctttgttgcttattacatatttacacacacaaccacaaattttaaacttatgatgaaaatttacaataacctgaaagatccagagatgtatgagagcattttgtaacttgttattcagttactaaatttgaggtgaataattaaaaagaaaaggacattaggagagtgaaaatcttctcttcaaataatctttgatagataaaaatggaaggtaagatgtttctagatagaatgttttcatacaatttcagcttcatatcataaatttttctggaaagctatttcagacatagatttcatagtatttttctgagaatcctgtgaaggaacgctgtctctttgcaaagtaaggaggactaagggaaaatgatggtaccatgtaacagaatgagagctaattccaaattagcaacttcatcctgctttctattttacattgagtaaagttttaaaaagacaacagtcaagttgattttgattagaagataaaagtacataatgaaaatccatggccttatttggaatatatatcactttccaaattttattatttatttgagagttaataagttaatgttattaagcagttaataatttatatgtatggatataatataaaatgaattcatataattaaaaagaatttggttaataagaatttggagaatggaaaatacatttttaggttccttaatttggctgttggtacctgtgtatttggaatattttaggggattcgaattttttttaacccacattacagctaccttctagctttagtatggtagtgcttcattcaacttttgctgtcaggtttttattttcacctttttctgtgccaccaattcaaaagttataggattaggaaatataaatttatatttggtgattggcagcctctgaaatgttagattaatttgatctagttctaaagtgctttagtcatatatgaatttaaacctagtaccatccaaaaccatgtaatggattttaagaatctgttaggccttcttagcctttatacatgtccctacctgatttttactgtccttcatgatcctgttcttgaaaacttcagtttgtatttgagaatcctttaaatctccttccaatttgttttctccctgaagtaatataaaaggaagtatttaagtgaaagtttaagagttttaaaacattctttaaaattaatacagatagttagctatttatcttttaaaaataaactaaggtaaaaaacgtgacactttacatatttcatatttttcatatagtctggaggtatacacagttgttttgtttttaaccacggtattgaaacctttaaaaggtaattaagcatttggtcaagtaaatatagaacatttgtataaagaaagaaatgaaattgtgcttaatgttatatactgttattatttgcaggctggttttaattcttaatttgattagcaaagctaaaaaagtggatgttgaagttgaaagttttaaagaggtacaaaatcttacaaggacataaattattatttggttgaaaaatagcctattagatattgtatgtcccttcctctgtacaaattgtaaaatacttaaaataactatgaagaattcatataggaagtgtgatactattgtaaatgtgtatttgagaatatgcaaaaataaaaataatattttactgttaataaatgtttacttgtatatg

SEQ ID NO: 35424 - DNA, 2294 bp, Homo sapiens
  source 1..2294: mol_type = unassigned DNA
agtggcttctgtgccccgccctgcgggtggtttgctagtttcaagcactttgtgagtatggggtgaatcggcgtcggccttccactgtggggttaaatctcatcccgcggctctcctcctgtcggtcctgcagttcttttgtccccgggtagagggatcttctgcagaaatagcgctggaagctagagtgaggcctgagtactgccttggcctaggatggctagagaattaagtgaaagcacagccctggatgcccagtctacagaagaccagatggagcttctggtcataaaggtggaggaagaagaagccggttttcccagtagcccagatctgggttctgagggctcccgcgagcgcttccgaggcttccgctacccggaggctgcaggcccccgcgaggcgctgagtcggctccgagagctctgccgacagtggctgcagcctgagatgcacagcaaggagcagatcctggagctgctggtgctggagcagttcctgaccatcctgccggggaatctgcagagctgggtgcgggagcagcatccagagagcggggaggaggtggtggtgctattggagtatttggagaggcagctggatgagccggcgccgcaggtttcaggtgttgaccaggggcaagaactgctctgttgcaagatggcactattgacaccagccccagggtcacaaagtagccaatttcagctaatgaaggctctgctcaagcatgaatctgtgggatcccagcctttacaagatagagttctccaggtccccgtgcttgcccatggaggatgctgcagagaagataaagtggtagcttctaggcttactccagagtcccaggggttgttgaaagtggaagatgtggccctgaccctcacccctgaatggacacagcaggattcatctcaggggaatctctgtagagatgaaaagcaggagaaccatggcagcctggtctccctgggtgatgaaaaacagactaagagcagggacttgcctccagctgaggagcttccagaaaaggagcatgggaagatatcgtgccacctgagagaagacattgcccagattcctacatgtgcagaagctggtgaacaggagggcaggctacaaagaaagcagaaaaatgccacaggagggaggcggcacatctgccatgaatgtggaaagagttttgctcaaagctcaggcctgagtaaacacaggagaatccacactggtgagaaaccctacgaatgtgaagagtgtggcaaagccttcattgggagctctgcccttgtcattcatcagagagtccacactggtgagaagccatatgagtgtgaagaatgtggtaaggccttcagtcatagctcagaccttatcaagcatcagagaacccacactggggagaagccctatgagtgtgatgactgtgggaagaccttcagccagagctgcagcctccttgaacatcacagaatccacactggggagaagccgtatcagtgcagtatgtgtggcaaagcctttaggcgaagttcacatctcctgagacatcagaggatccatactggggataaaaatgttcaggaacctgagcagggagaggcctggaaaagtaggatggaaagccagttggaaaatgttgaaactcccatgtcttataaatgtaatgagtgtgaaagaagtttcactcagaatacaggcctcattgaacatcaaaaaatccacactggtgagaaaccctatcagtgtaatgcgtgtggaaaaggcttcacccgaatttcataccttgttcaacatcagagaagccatgtagggaaaaacatcctatcacagtgacccatgccatacatgccagagttggtgctcatttgtcactgatctgaagccactccccctggagtctcaactatagaaattgtgggctgggctttatttaccactacacattatcaggtgttagaaaatgtagactgggttagacaaattatcttctaagttctagaaggggtttgtaatcaaaacatatttgataggaggctacgggagagttgtctagaagaggtaagacctgaaactgtttgttctctcccactagaattaaatggatgtttagactggctacttgccctaaaccagcacttggtgatgtctactgggtggatggttgtgatttgggggctgcttctctgaccattctttttgactgtaatgaatcctccacagttggtcagattcataaagtcttatatccccctctgtgccttttctgcaggtgctaataaatgtttattgaatgt

SEQ ID NO: 35425 - DNA, 1794 bp, Homo sapiens
  source 1..1794: mol_type = unassigned DNA
agtttcaagcactttgtgagtatggggtgaatcggcgtcggccttccactgtggggttaaatctcatcccgcggctctcctcctgtcggtcctgcagttcttttgtccccgggtagaggtttcaggtgttgaccaggggcaagaactgctctgttgcaagatggcactattgacaccagccccagggtcacaaagtagccaatttcagctaatgaaggctctgctcaagcatgaatctgtgggatcccagcctttacaagatagagttctccaggtccccgtgcttgcccatggaggatgctgcagagaagataaagtggtagcttctaggcttactccagagtcccaggggttgttgaaagtggaagatgtggccctgaccctcacccctgaatggacacagcaggattcatctcaggggaatctctgtagagatgaaaagcaggagaaccatggcagcctggtctccctgggtgatgaaaaacagactaagagcagggacttgcctccagctgaggagcttccagaaaaggagcatgggaagatatcgtgccacctgagagaagacattgcccagattcctacatgtgcagaagctggtgaacaggagggcaggctacaaagaaagcagaaaaatgccacaggagggaggcggcacatctgccatgaatgtggaaagagttttgctcaaagctcaggcctgagtaaacacaggagaatccacactggtgagaaaccctacgaatgtgaagagtgtggcaaagccttcattgggagctctgcccttgtcattcatcagagagtccacactggtgagaagccatatgagtgtgaagaatgtggtaaggccttcagtcatagctcagaccttatcaagcatcagagaacccacactggggagaagccctatgagtgtgatgactgtgggaagaccttcagccagagctgcagcctccttgaacatcacagaatccacactggggagaagccgtatcagtgcagtatgtgtggcaaagcctttaggcgaagttcacatctcctgagacatcagaggatccatactggggataaaaatgttcaggaacctgagcagggagaggcctggaaaagtaggatggaaagccagttggaaaatgttgaaactcccatgtcttataaatgtaatgagtgtgaaagaagtttcactcagaatacaggcctcattgaacatcaaaaaatccacactggtgagaaaccctatcagtgtaatgcgtgtggaaaaggcttcacccgaatttcataccttgttcaacatcagagaagccatgtagggaaaaacatcctatcacagtgacccatgccatacatgccagagttggtgctcatttgtcactgatctgaagccactccccctggagtctcaactatagaaattgtgggctgggctttatttaccactacacattatcaggtgttagaaaatgtagactgggttagacaaattatcttctaagttctagaaggggtttgtaatcaaaacatatttgataggaggctacgggagagttgtctagaagaggtaagacctgaaactgtttgttctctcccactagaattaaatggatgtttagactggctacttgccctaaaccagcacttggtgatgtctactgggtggatggttgtgatttgggggctgcttctctgaccattctttttgactgtaatgaatcctccacagttggtcagattcataaagtcttatatccccctctgtgccttttctgcaggtgctaataaatgtttattgaatgt

SEQ ID NO: 35426 - DNA, 2313 bp, Homo sapiens
  source 1..2313: mol_type = unassigned DNA
tcactccaggacatcctttgggaaccttactatgggattcaggtttggggtggtgtagaggattaagctgcagaaccactgaacatggagaaatttctgcagcagttccccagagatgtctctgggctcctgggcaggagagaagggactacttgcaagtttactggttaataatgatttcccacctttcagggatcttctgcagaaatagcgctggaagctagagtgaggcctgagtactgccttggcctaggatggctagagaattaagtgaaagcacagccctggatgcccagtctacagaagaccagatggagcttctggtcataaaggtggaggaagaagaagccggttttcccagtagcccagatctgggttctgagggctcccgcgagcgcttccgaggcttccgctacccggaggctgcaggcccccgcgaggcgctgagtcggctccgagagctctgccgacagtggctgcagcctgagatgcacagcaaggagcagatcctggagctgctggtgctggagcagttcctgaccatcctgccggggaatctgcagagctgggtgcgggagcagcatccagagagcggggaggaggtggtggtgctattggagtatttggagaggcagctggatgagccggcgccgcaggtttcaggtgttgaccaggggcaagaactgctctgttgcaagatggcactattgacaccagccccagggtcacaaagtagccaatttcagctaatgaaggctctgctcaagcatgaatctgtgggatcccagcctttacaagatagagttctccaggtccccgtgcttgcccatggaggatgctgcagagaagataaagtggtagcttctaggcttactccagagtcccaggggttgttgaaagtggaagatgtggccctgaccctcacccctgaatggacacagcaggattcatctcaggggaatctctgtagagatgaaaagcaggagaaccatggcagcctggtctccctgggtgatgaaaaacagactaagagcagggacttgcctccagctgaggagcttccagaaaaggagcatgggaagatatcgtgccacctgagagaagacattgcccagattcctacatgtgcagaagctggtgaacaggagggcaggctacaaagaaagcagaaaaatgccacaggagggaggcggcacatctgccatgaatgtggaaagagttttgctcaaagctcaggcctgagtaaacacaggagaatccacactggtgagaaaccctacgaatgtgaagagtgtggcaaagccttcattgggagctctgcccttgtcattcatcagagagtccacactggtgagaagccatatgagtgtgaagaatgtggtaaggccttcagtcatagctcagaccttatcaagcatcagagaacccacactggggagaagccctatgagtgtgatgactgtgggaagaccttcagccagagctgcagcctccttgaacatcacagaatccacactggggagaagccgtatcagtgcagtatgtgtggcaaagcctttaggcgaagttcacatctcctgagacatcagaggatccatactggggataaaaatgttcaggaacctgagcagggagaggcctggaaaagtaggatggaaagccagttggaaaatgttgaaactcccatgtcttataaatgtaatgagtgtgaaagaagtttcactcagaatacaggcctcattgaacatcaaaaaatccacactggtgagaaaccctatcagtgtaatgcgtgtggaaaaggcttcacccgaatttcataccttgttcaacatcagagaagccatgtagggaaaaacatcctatcacagtgacccatgccatacatgccagagttggtgctcatttgtcactgatctgaagccactccccctggagtctcaactatagaaattgtgggctgggctttatttaccactacacattatcaggtgttagaaaatgtagactgggttagacaaattatcttctaagttctagaaggggtttgtaatcaaaacatatttgataggaggctacgggagagttgtctagaagaggtaagacctgaaactgtttgttctctcccactagaattaaatggatgtttagactggctacttgccctaaaccagcacttggtgatgtctactgggtggatggttgtgatttgggggctgcttctctgaccattctttttgactgtaatgaatcctccacagttggtcagattcataaagtcttatatccccctctgtgccttttctgcaggtgcta

SEQ ID NO: 35427 - DNA, 3576 bp, Homo sapiens
  source 1..3576: mol_type = unassigned DNA
agtggcttctgtgccccgccctgcgggtggtttgctagtttcaagcactttgtgagtatggggtgaatcggcgtcggccttccactgtggggttaaatctcatcccgcggctctcctcctgtcggtcctgcagttcttttgtccccgggtagagggatcttctgcagaaatagcgctggaagctagagtgaggcctgagtactgccttggcctaggatggctagagaattaagtgaaagcacagccctggatgcccagtctacagaagaccagatggagcttctggtcataaaggtggaggaagaagaagccggttttcccagtagcccagatctgggttctgagggctcccgcgagcgcttccgaggcttccgctacccggaggctgcaggcccccgcgaggcgctgagtcggctccgagagctctgccgacagtggctgcagcctgagatgcacagcaaggagcagatcctggagctgctggtgctggagcagttcctgaccatcctgccggggaatctgcagagctgggtgcgggagcagcatccagagagcggggaggaggtggtggtgctattggagtatttggagaggcagctggatgagccggcgccgcaggtagaaagaacaggtttagtatctgagcgctgtggcctgtttcctcctgaaatcccagatcagagtgaggggcattcctttaacatccaggagttcttcatctcttttttgtaccgtgaacctccttggcagtaaggtgaagtccctggactccttctcagaataattttttttttaaaatacataaaccataaaggattacaaaagaacgcagtcatatcaacatacagtttgcaaagtattaactttgtattaaagtcatacttttttttattagtacactaaataataaaacctacggacagggcttataactggcaattacaaagcagtgataagtatctctttgcttggttgtaatgtgatgtaaaaacatctgcaggttctattggtgacaaagtcgtgggtactgcttatgctacattgatttgttgcttccattcataattggaaggaaatgctaactttctcttaaagactagttaaaaataagattagcttttgtcctgttcaagttcatggactacgtgggaaggagttcatggaccactggttatgaacctctggtagaaaatgggccgacttttacctccatgttcttccctgttttatgagactgtgtcctctttgcatcatcctgtgtccctgtgcacacaccctcagaggacctgtgtggccagagccttctaaatggtgagctggataccagggttcttgacttgggtctgttgcacccaaggcctgtaacagtggaaagtcagtgcgagtctcttagcttcattctttataaaggatgtgggaaattctgagctgcacatgagaaagtaacttgaaaactgtaattttataataactataaatgtctggaaggaaacctgcatacatatcgtatgccaggccatgttaggtgatttcacgtactgtgatgttgtttgggtcccccaaactccataaactagagattgtaatccccttttcagataataaaaggtattaatattctctgagaattttgcaccagtttccaatggattttcataaaagcacaaatgtatatatgaaggagcatagagtaatgataagaacgtgtgctctggcatcattctacctgagctcccatcctagcattgccactgattagctatttaaactggctgtgccttaatttccctatcagtaaaatgggtataataataatacctcccttataagattgttgttttctgcgttaaatgagttaacatttataatgctcttggaaatagtgccagccacctaggtagttctatggaagtgtttgatgaaaacatgaaaataagaacaaatgatttctaggtttcaggtgttgaccaggggcaagaactgctctgttgcaagatggcactattgacaccagccccagggtcacaaagtagccaatttcagctaatgaaggctctgctcaagcatgaatctgtgggatcccagcctttacaagatagagttctccaggtccccgtgcttgcccatggaggatgctgcagagaagataaagtggtagcttctaggcttactccagagtcccaggtgatgaaaaacagactaagagcagggacttgcctccagctgaggagcttccagaaaaggagcatgggaagatatcgtgccacctgagagaagacattgcccagattcctacatgtgcagaagctggtgaacaggagggcaggctacaaagaaagcagaaaaatgccacaggagggaggcggcacatctgccatgaatgtggaaagagttttgctcaaagctcaggcctgagtaaacacaggagaatccacactggtgagaaaccctacgaatgtgaagagtgtggcaaagccttcattgggagctctgcccttgtcattcatcagagagtccacactggtgagaagccatatgagtgtgaagaatgtggtaaggccttcagtcatagctcagaccttatcaagcatcagagaacccacactggggagaagccctatgagtgtgatgactgtgggaagaccttcagccagagctgcagcctccttgaacatcacagaatccacagttggtcagattcataaagtcttatatccccctctgtgccttttctgcaggtgctaataaatgtttattgaatgtaccagtgagattaccttcatagatctgaaaatctgatgttatccaggtttctgaagaacttctcgccaaggccatttgtgcttgtgtccaattctctgacctagattgtgactcaatctagtgtgtttcttaccaagtacataggcagagcagggttactgtgattgaaagaatccattttttttttggagacgtagtcttgctctgtcgcccaggctggagtgcagtggcacaatcttggctcactgcaacctccacctcctgggttcaagcgattctcctgcctcagcctcctgagtagctgggattacaggtgtgtgccaccatgcccggctaattttttatgtttttagtagagacgggattttaccgtgttagccaggatggtctcgatctcctaacctcatgatcctcctgcctcagcctaccaaagtgctgggattacaggcatgagccaccatgcccggccaagaatccatatttctttaccagactaggaattctattctagtgcaaatgccttaaaaagcttatcactaaatcattacgaatgtgtgccatccgtggaattgcttttttttttttttttttgtaaatatgaggtctcactatgttgcccaggctggtctcgaaatcctgggcaatcctcctgcctcaccctctcaagtactggaattacaggcgtgagccaccatacccagcccaaatttcactctttaatgttttcctgttgctattctttaaggaaaaaactttcctattcagacagtgtgaaaatcagtcatcaagtcagaataaaatgatgaatattct

SEQ ID NO: 35428 - DNA, 990 bp, Homo sapiens
  source 1..990: mol_type = unassigned DNA
cgccagcgcttccgaggcttccgctacccggaggctgcgggcccccgcgaggcgttgagccggctccgagaactctgcggacaatggctgcagcctgagatgcacagcaaggagcagatcctggagctgctggtgctggagcagttcctgaccatcctgccggggaatctgcagagctgggtgcgggagcagcatccagagagcggggaggaggtggtggtgctattggagtatttggagaggcagctggatgagccggcgccgcaggtagaaagaacaggtttagtatctgagcgctgtgcgaggggcattcctttaaggtccaggagttcttcatctctttttgtactagctttcctcccatggcagggcataacccacagttgccggccatttgttgtttcaggtggtgaaatacagactaagagcagggacttgcctccagtcaagaagcttccagaaaaggagcatgggaagatatgccacctgagggaagacattgcccagattcctacacatgcagaagctggtgaacaggagggcaggttacaaagaaagcagaaaaatgccatagggagtaggcgacattattgccatgaatgtggaaagagttttgctcaaagttcaggcctgactaaacacaggagaatccacactggtgagaaaccctatgaatgtgaagactgtggaaagaccttcattgggagctctgcccttgtcattcatcagagagtccacactggtgagaagccatatgagtgtgaagaatgtggtaaggtcttcagtcacagctcaaaccttatcaaacaccagagaacccacactggggagaagccctatgagtgtgatgactgtgggaagaccttcagccagagctgcagcctccttgaacatcacaaaattcatactggggagaagccataccagtgcaatatgtgtggcaaagcctttaggcggaattcacatctcctgagacatcagaggattcat

SEQ ID NO: 35429 - DNA, 2375 bp, Homo sapiens
  source 1..2375: mol_type = unassigned DNA
ccaaagacatcctttggtgatacttactgtgggattcagagtggggtgcagaggacgaccctgcaaaggcacggactataagagagatctgtgcagctgcgcctcagggggtgtcctgggcccctgggcatgacaggagggggaccacttgcagttctactggaaaatttaccacccttccagaatcctctgaagatatacaggtcgcaactagagtgagacccgagtactgccttgggtcagaatggctagagaaccgagaaaaaacgcagccctggacgcccagtctgcagaagaccagacggggctcctgaccgtgaaggtggagaaggaggaagcctccgccttgacggcggaggtgagagcaccctgcagccctgctcggggccccgaacgctcccgccagcgcttccgaggcttccgctacccggaggctgcgggcccccgcgaggcgttgagccggctccgagaactctgcggacaatggctgcagcctgagatgcacagcaaggagcagatcctggagctgctggtgctggagcagttcctgaccatcctgccggggaatctgcagagctgggtgcgggagcagcatccagagagcggggaggaggtggtggtgctattggagtatttggagaggcagctggatgagccggcgccgcaggttcccgttggtgaccaggggcaagaactgctctgttgcaagatggcactattgacacaaactcaagggtctcaaagtagccagtgccagccaatgaaggctctgttcaagcatgaatctctgggatcccagcccttacacgatagagttctccaggttcctgggcttgcccagggagggtgctgcagagaagatgcaatggtagcttccaggctcactccagggtcccagggtttgctgaaaatggaagatgtggccctgaccctcactcctgggtggacacagctggattcatctcaggtgaacctctacagagatgaaaagcaggagaaccatagcagcctggtctcccttggtggtgaaatacagactaagagcagggacttgcctccagtcaagaagcttccagaaaaggagcatgggaagatatgccacctgagggaagacattgcccagattcctacacatgcagaagctggtgaacaggagggcaggttacaaagaaagcagaaaaatgccatagggagtaggcgacattattgccatgaatgtggaaagagttttgctcaaagttcaggcctgactaaacacaggagaatccacactggtgagaaaccctatgaatgtgaagactgtggaaagaccttcattgggagctctgcccttgtcattcatcagagagtccacactggtgagaagccatatgagtgtgaagaatgtggtaaggtcttcagtcacagctcaaaccttatcaaacaccagagaacccacactggggagaagccctatgagtgtgatgactgtgggaagaccttcagccagagctgcagcctccttgaacatcacaaaattcatactggggagaagccataccagtgcaatatgtgtggcaaagcctttaggcggaattcacatctcctgagacatcagaggattcatggtgataaaaatgttcagaatcctgagcacggggagtcctgggaaagtcagggtaggacggaaagccagtgggaaaatactgaggctcccgtgtcttataaatgtaatgagtgtgagagaagtttcacacggaatagaagtcttattgaacatcagaaaatccacactggtgagaaaccctatcagtgtgacacatgtggaaaaggtttcactcgaacttcataccttgttcaacatcagagaagccatgtagggaaaaaaactctttcacagtgacccatggtattcatgccaacattggtgctcatttgtcactgaactgaagccaccctggagcccttaatggttacagaaattgtggaccagggctttatttaccactatacatcatcgggtattagaaaatgtagtctggctgagacgatgagttatcttctacattctagaaagtgattggaagaagtcatttgataagaggccatgggagagtggtctggaagttgtaggacctaaaatagtttgttctcacccagtgtatttaaatggccttctggacttgttaattgccctcagccagcactttaggacatctggttggatggctctgatgtggggggctgctgctctgaccattcattttgcctctaatgaatctttcacaaattggtcagatccatgaggtcttttactcttctttgtgccttgtatgataggtgctaataaacatttattaaatgtaccagtaaaatggcctttgtaccaaaaattt

SEQ ID NO: 35430 - DNA, 1472 bp, Homo sapiens
  source 1..1472: mol_type = unassigned DNA
gcgtgtgctatgtggggcgggccttggctgcgtgaaggcttcttgtgggaagtaggttcccgttggtgaccaggggcaagaactgctctgttgcaagatggcactattgacacaaactcaagggtctcaaagtagccagtgccagccaatgaaggctctgttcaagcatgaatctctgggatcccagcccttacacgatagagttctccaggttcctgggcttgcccagggagggtgctgcagagaagatgcaatggtagcttccaggctcactccagggtcccagggtttgctgaaaatggaagatgtggccctgaccctcactcctgggtggacacagctggattcatctcaggtgaacctctacagagatgaaaagcaggagaaccatagcagcctggtctcccttggtggtgaaatacagactaagagcagggacttgcctccagtcaagaagcttccagaaaaggagcatgggaagatatgccacctgagggaagacattgcccagattcctacacatgcagaagctggtgaacaggagggcaggttacaaagaaagcagaaaaatgccatagggagtaggcgacattattgccatgaatgtggaaagagttttgctcaaagttcaggcctgactaaacacaggagaatccacactggtgagaaaccctatgaatgtgaagactgtggaaagaccttcattgggagctctgcccttgtcattcatcagagagtccacactggtgagaagccatatgagtgtgaagaatgtggtaaggtcttcagtcacagctcaaaccttatcaaacaccagagaacccacactggggagaagccctatgagtgtgatgactgtgggaagaccttcagccagagctgcagcctccttgaacatcacaaaattcatactggggagaagccataccagtgcaatatgtgtggcaaagcctttaggcggaattcacatctcctgagacatcagaggattcatggtgataaaaatgttcagaatcctgagcacggggagtcctgggaaagtcagggtaggacggaaagccagtgggaaaatactgaggctcccgtgtcttataaatgtaatgagtgtgagagaagtttcacacggaatagaagtcttattgaacatcagaaaatccacactggtgagaaaccctatcagtgtgacacatgtggaaaaggtttcactcgaacttcataccttgttcaacatcagagaagccatgtagggaaaaaaactctttcacagtgacccatggtattcatgccaacattggtgctcatttgtcactgaactgaagccaccctggagcccttaatggttacagaaattgtggaccagggctttatttaccactatacatcatcgggtattagaaaatgtagtctggctgagacgatgagttatcttctacattctagaaagtgattggaagaagtcatttgataagagg

SEQ ID NO: 35431 - DNA, 498 bp, Homo sapiens
  source 1..498: mol_type = unassigned DNA
cctacacatgcagaagctggtgaacaggagggcaggttacaaagaaagcagaaaaatgccatagggagtaggcgacattattgccatgaatgtggaaagagttttgctcaaagttcaggcctgactaaacacaggagaatccacactggtgagaaaccctatgaatgtgaagactgtggaaagaccttcattgggagctctgcccttgtcattcatcagagagtccacactggtgagaagccatatgagtgtgaagaatgtggtaaggtcttcagtcacagctcaaaccttatcaaacaccagagaacccacactggggagaagccctatgagtgtgatgactgtgggaagaccttcagccagagctgcagcctccttgaacatcacaaaattcatactggggagaagccataccagtgcaatatgtgtggcaaagcctttaggcggaattcacatctcctgagacatcagaggattcatgtggttacagaaattgtg

SEQ ID NO: 35432 - DNA, 860 bp, Homo sapiens
  source 1..860: mol_type = unassigned DNA
agatccgggggctgcggataaatccccgtaggccgcgggcagcgagatgttgcgttccggtgtgggtgtgggtgtgcctccgacggcgtctcggtgccagtgtcgaggttctttctgcttagctacccggagccgactacggaggaggacacctgagtttacgtctcttccatctgctgctcacctcagctgcctgggtccccgacgagagccaggtgacacttaactccgccatctgcgttttgagcactgttctcataatggagtttcctgatttggggaagcattgttcagaaaagacttgcaagcagctagattttcttccagtaaaatgtgatgcatgtaaacaagatttctgtaaagatcattttccatacgctgcacataagtgtccgtttgcattccagaaggatgttcacgtcccagtatgcccactctgtaatacccccatcccagtaaaaaagggccagataccagacgtggtggttggtgatcacattgacagagactgtgactctcaccctgggaagaagaaagagaagatttttacataccgttgctcaaaagagggctgcaagaagaaagagatgctgcagatggtatgtgcccaatgtcacggcaacttctgtatccagcacagacaccctttggaccacagctgcagacacgggagtcgccccaccatcaaagctgggtgagaagagactccgctgcgatggctcggagcacgcagtagcatgcgtggaagcagcttacactctagtgggaagtggagccccattgagcaccatcccacactggctgctgatcttgtttgttgagggagatgggactataataaaattgaatgctgaagttga

SEQ ID NO: 35433 - DNA, 968 bp, Homo sapiens
  source 1..968: mol_type = unassigned DNA
agatccgggggctgcggataaatccccgtaggccgcgggcagcgagatgttgcgttccggtgtgggtgtgggtgtgcctccgacggcgtctcggtgccagtgtcgaggttctttctgcttagctacccggagccgactacggaggaggacacctgagtttacgtctcttccatctgctgctcacctcagctgcctgggtccccgacgagagccaggtgacacttaactccgccatctgcgttttgagcactgttctcataatggagtttcctgatttggggaagcattgttcagaaaagacttgcaagcagctagattttcttccagtaaaatgtgatgcatgtaaacaagatttctgtaaagatcattttccatacgctgcacataagtgtccgtttgcattccagaaggatgttcacgtcccagtatgcccactctgtaatacccccatcccagtaaaaaagggccagataccagacgtggtggttggtgatcacattgacagagactgtgactctcaccctgggaagaagaaagagaagatttttacataccgttgctcaaaagagggctgcaagaagaaagagatgctgcagatggtatgtgcccaatgtcacggcaacttctgtatccagcacagacaccctttggaccacagctgcagacacgggagtcgccccaccatcaaagctgggtgctcacccatgacagtctctgaatccaggccgttgggagatttcctcaccctggctcctggcgggctggcccagcgactcgggtactggttcacccggctcatgtgaacgcaatttcgtctgtgtggggtgctgcagctcttggttggtgaacacggaaaggttgctgtgtgtaactgcacagtgtgacgcgatgctccagtggtgcgacttcgtcaggatggatgaaggacacaggactgggaccccaagttacagaagcagctcgctcca

SEQ ID NO: 35434 - DNA, 1314 bp, Homo sapiens
  source 1..1314: mol_type = unassigned DNA
gcgcgcgccgagggaggagcgggcgccgggggccggctggcgcgggggctccggtaacccgggctgggcgggggagaggaaggggcggggcagggagcccgccagagtgcggggtcgcggtgcggacttcgagcacgagccctaaagacgctcagcactcgtcgcttctcctagcagaccctgcccggcttggcgatggagtttccggacctcggcgctcactgttcggagccgagctgtcagcgcttggattttctgccgcttaagtgtgatgcctgctcaggcatcttctgcgcagaccatgtggcctacgcccagcatcactgtggatctgcttaccaaaaggatatccaggtacctgtgtgccctctctgtaatgtgcctgtgcctgtggccagaggggagccccctgaccgtgctgtgggagagcacattgacagagactgtcgctctgatccagcacagcaaaaacgtaagatcttcaccaataagtgtgaacgcgctggctgccggcagcgagaaatgatgaaactgacctgtgaacgctgtagccgaaacttctgcatcaagcaccggcatccactggaccatgattgctctggggaggggcacccaaccagccgggcaggacttgctgccatctccagagcacaagctgtggcttctacaagcactgtccccagcccaagtcaaaccatgccttcctgtacctctcccagcagagccacaacccgatctccgtcctggacagcccctccagtgattgctttgcagaatggcctgagtgaggatgaagctctgcagcgggccctggaaatgtccctggcagaaaccaaaccccaggttccaagttgtcaggaggaagaagacctagctttagcacaagcactgtcagccagtgaggcagaataccagcggcagcaggcccagagccgcagctcgaagccgtccaactgcagcctgtgctagggccctgggcttggggagggaggttcacctgaggaggactgtggccctcacacctctagggtacacagggagaggaggcccggagcaccctggagggcagagacaagcgggagtgatgtggaggtcgccctgggagcctctggaaggccttgctagtgctccagctgcatggaagagagcggctagcaactgttccctggttgggccctcagtggatgctggccaggccctactcttagccccttcatcatgtcatctcccttatgctggagctgccccgatgtggagtgggcaggaaggggcctggaaaaaataaaggatcttggcagttgataaaacgtacaa

SEQ ID NO: 35435 - DNA, 1159 bp, Homo sapiens
  source 1..1159: mol_type = unassigned DNA
cagcgcgccgcgcgcgccgagggaggagcgggcgccgggggccggctggcgcgggggctccgaccctgcccggcttggcgatggagtttccggacctcggcgctcactgttcggagccgagctgtcagcgcttggattttctgccgcttaagtgtgatgcctgctcaggcatcttctgcgcagaccatgtggcctacgcccagcatcactgtggatctgcttaccaaaaggatatccaggtacctgtgtgccctctctgtaatgtgcctgtgcctgtggccagaggggagccccctgaccgtgctgtgggagagcacattgacagagactgtcgctctgatccagcacagcaaaaacgtaagatcttcaccaataagtgtgaacgcgctggctgccggcagcgagaaatgatgaaactgacctgtgaacgctgtagccgaaacttctgcatcaagcaccggcatccactggaccatgattgctctggggaggggcacccaaccagccgggcaggacttgctgccatctccagagcacaagctgtggcttctacaagcactgtccccagcccaagtcaaaccatgccttcctgtacctctcccagcaggtaggcctgcccgtttccctgctccccctttttccccttcacacctctgacctccacctcttcaatgtctgtcgtagagccacaacccgatctccgtcctggacagcccctccagtgattgctttgcagaatggcctggtgagttgggcagaggttggatggacagaaacaaacacacagagagtgaagtccaaggacgctggtcttctttctccctttgtagagtgaggatgaagctctgcagcgggccctggaaatgtccctggcagaaaccaaaccccaggttccaaggtaccttaccctcttgtgaaagagagcgcaagctgtgggcaagggcttggtctggaggcaggtaggtgggaccactctgacacaatgcaagataatcgctggcaacttggtctcaaaattaagatgaactatatgatctttgacaagttatttaacccatggagccttcatttcctctataaaacggggacaatactaatacccaccttgtagtgttgctatgaagattgagataatcctcagcagtgctcagcaccatga

SEQ ID NO: 35436 - DNA, 944 bp, Homo sapiens
  source 1..944: mol_type = unassigned DNA
gagcgggcgccgggggccggctggcgcgggggctccgcagaccctgcccggcttggcgatggagtttccggacctcggcgctcactgttcggagccgagctgtcagcgcttggattttctgccgcttaagtgtgatgcctgctcaggcatcttctgcgcagaccatgtggcctacgcccagcatcactgtggatctgcttaccaaaaggatatccaggtacctgtgtgccctctctgtaatgtgcctgtgcctgtggccagaggggagccccctgaccgtgctgtgggagagcacattgacagagactgtcgctctgatccagcacagcaaaaacgtaagatcttcaccaataagtgtgaacgcgctggctgccggcagcgagaaatgatgaaactgacctgtgaacgctgtagccgaaacttctgcatcaagcaccggcatccactggaccatgattgctctggggaggggcacccaaccagccgggcaggacttgctgccatctccagagcacaagctgtggcttctacaagcactgtccccagcccaagtcaaaccatgccttcctgtacctctcccagcagagccacaacccgatctccgtcctggacagcccctccagtgattgctttgcagaatggcctgagtgaggatgaagctctgcagcgggccctggaaatgtccctggcagaaaccaaaccccaggttccaagttgtcaggaggaagaagacctagctttagcacaagcactgtcagccagtgaggcagaataccagcggcagcaggcccagagccgcagctcgaagccgtccaactgcagcctgtgctagggccctgggcttggggagggaggttcacctgaggaggactgtggccctcacacctctagggtacacagggagaggaggcccggagcaccctggagggcagagacaagcggga

SEQ ID NO: 35437 - DNA, 2021 bp, Homo sapiens
  source 1..2021: mol_type = unassigned DNA
gcgcgcgccgagggaggagcgggcgccgggggccggctggcgcgggggctccggtaacccgggctgggcgggggagaggaaggggcggggcagggagcccgccagagtgcggggtcgcggtgcggacttcgagcacgagccctaaagacgctcagcactcgtcgcttctcctagcagaccctgcccggcttggcgatggagtttccggacctcggcgctcactgttcggagccgagctgtcagcgcttggattttctgccgcttaagtgtgatgcctgctcaggcatcttctgcgcagaccatgtggcctacgcccagcatcactgtggatctgcttaccaaaaggatatccaggtacctgtgtgccctctctgtaatgtgcctgtgcctgtggccagaggggagccccctgaccgtgctgtgggagagcacattgacagagactgtcgctctgatccagcacagcaaaaacgtaagatcttcaccaataagtgtgaacgcgctggctgccggcagcgagaaatgatgaaactgacctgtgaacgctgtagccgaaacttctgcatcaagcaccggcatccactggaccatgattgctctggggaggggcacccaaccagccgggcaggacttgctgccatctccagagcacaagctgtggcttctacaagcactgtccccagcccaagtcaaaccatgccttcctgtacctctcccagcaggtaggcctgcccgtttccctgctccccctttttccccttcacacctctgacctccacctcttcaatgtctgtcgtagagccacaacccgatctccgtcctggacagcccctccagtgattgctttgcagaatggcctggtgagttgggcagaggttggatggacagaaacaaacacacagagagtgaagtccaaggacgctggtcttctttctccctttgtagagtgaggatgaagctctgcagcgggccctggaaatgtccctggcagaaaccaaaccccaggttccaaggtaccttaccctcttgtgaaagagagcgcaagctgtgggcaagggcttggtctggaggcaggtaggtgggaccactctgacacaatgcaagataatcgctggcaacttggtctcaaaattaagatgaactatatgatctttgacaagttatttaacccatggagccttcatttcctctataaaacggggacaatactaatacccaccttgtagtgttgctatgaagattgagataatcctcagcagtgctcagcaccatgaggcccaacacacacagatcagatgttcaaatttcagatcttaccatcatccaacttaaactgtttctccctcccagttgtcaggaggaagaagacctagctttagcacaagcactgtcagccagtgaggcagaataccagcggcagcaggtatgaggctgggctgaagatatatgctgcagtggaagggaggaagaagtcagggatgggggttcttcctagtggtgcagagttttggaatggtggttatcgtctggttttcagtatgactccagcccatgctgagctctgaaatgagggctgtccctcatttccttgacgttgcactgtgtcttcccctccttcccctctctttgctctaggcccagagccgcagctcgaagccgtccaactgcagcctgtgctagggccctgggcttggggagggaggttcacctgaggaggactgtggccctcacacctctagggtacacagggagaggaggcccggagcaccctggagggcagagacaagcgggagtgatgtggaggtcgccctgggagcctctggaaggccttgctagtgctccagctgcatggaagagagcggctagcaactgttccctggttgggccctcagtggatgctggccaggccctactcttagccccttcatcatgtcatctcccttatgctggagctgccccgatgtggagtgggcaggaaggggcctggaaaaaataaaggatcttggcagttgataaaacgt

SEQ ID NO: 35438 - DNA, 741 bp, Homo sapiens
  source 1..741: mol_type = unassigned DNA
aaagacacccccctcctacctccccaccccccaaatatcccctggaggcaaaattgccctggtggatcaccactgatctaactgatagtaccctctggttatatgggaaaactgctaaacttggaagcaggaggcatctaaaatgagcttgtgtccgcaattggtgggttcttggtctcactgacttcaagaatgaagccgcagaccctcgcggtgagtgttacagctcttaagatggcgcgtgtggagtctgtcccttctgatgttcagatgtgttcggagtttcttccttctggtgggttcgtggtctcgctggctcagaagtgaagctgccgaccttcacggaagcaaggaggctacattggggaatggtgactttggtttgtgcgggcactctttttaaatcgtgggatgagaacatcacccagtgagaaagcccctgggctggtaatcagcacagagagcttagtcaggactataacccatcagtcagaaaaatatttgcctgggaagagagatactaccgtgagagcttcattcacttttatcgtggtcgctggggtctctgagcagaccctgcccggcttggcgatggagtttccggacctcggcgctcactgttcggagccgagctgtcagcgcttggattttctgccgcttaagtgtgatgcctgctcaggcatcttctgcgcagaccatgtggcctacgcccagcatcactgtggatctgcttaccaaaag

SEQ ID NO: 35439 - DNA, 1520 bp, Homo sapiens
  source 1..1520: mol_type = unassigned DNA
cagaccctgcccggcttggcgatggagtttccggacctcggcgctcactgttcggagccgagctgtcagcgcttggattttctgccgcttaagtgtgatgcctgctcaggcatcttctgcgcagaccatgtggcctacgcccagcatcactgtggatctgcttaccaaaaggatatccaggtacctgtgtgccctctctgtaatgtgcctgtgcctgtggccagaggggagccccctgaccgtgctgtgggagagcacattgacagagactgtcgctctgatccagcacagcaaaaacgtaagatcttcaccaataagtgtgaacgcgctggctgccggcagcgagaaatgatgaaactgacctgtgaacgctgtagccgaaacttctgcatcaagcaccggcatccactggaccatgattgctctggggaggggcacccaaccagccgggcaggacttgctgccatctccagagcacaagctgtggcttctacaagcactgtccccagcccaagtcaaaccatgccttcctgtacctctcccagcagagccacaacccgatctccgtcctggacagcccctccagtgattgctttgcagaatggcctggtgagttgggcagaggttggatggacagaaacaaacacacagagagtgaagtccaaggacgctggtcttctttctccctttgtagagtgaggatgaagctctgcagcgggccctggaaatgtccctggcagaaaccaaaccccaggttccaaggtaccttaccctcttgtgaaagagagcgcaagctgtgggcaagggcttggtctggaggcaggtaggtgggaccactctgacacaatgcaagataatcgctggcaacttggtctcaaaattaagatgaactatatgatctttgacaagttatttaacccatggagccttcatttcctctataaaacggggacaatactaatacccaccttgtagtgttgctatgaagattgagataatcctcagcagtgctcagcaccatgaggcccaacacacacagatcagatgttcaaatttcagatcttaccatcatccaacttaaactgtttctccctcccagttgtcaggaggaagaagacctagctttagcacaagcactgtcagccagtgaggcagaataccagcggcagcaggtatgaggctgggctgaagatatatgctgcagtggaagggaggaagaagtcagggatgggggttcttcctagtggtgcagagttttggaatggtggttatcgtctggttttcagtatgactccagcccatgctgagctctgaaatgagggctgtccctcatttccttgacgttgcactgtgtcttcccctccttcccctctctttgctctaggcccagagccgcagctcgaagccgtccaactgcagcctgtgctagggccctgggcttggggagggaggttcacctgaggaggactgtggccctcacacctctagggtacacagggagaggaggcccggagcaccct

SEQ ID NO: 35440 - DNA, 3366 bp, Homo sapiens
  source 1..3366: mol_type = unassigned DNA
gttacggagacagcagggcccggggcttcagagcggccgctgcgactccggagccggcggggggctccggtccttccctgcgccaccgcacaggacatctctctggctggggagcggcggtgagacccgccgagggcgtctgtgtccctcctcccccgcggtcctcggtgcgtccgcacgcccctcctcctcggctccctccttcttctctccgcgcctctccgccccctccccgtctccgcaggccgagtggtgcggcccgcctccagctgaccggcctggaatcccggctccgagccccggactcgcgcccgcccgcgcgcccgctccttccccctccccccgccccgagccccccgacgccgccgccaccgcctcctcagagcggggcccgggcccagccgccgccaccgctgccgccgccgagctccgccgccgccgagcaccatgggagacgctgggagcgagcgcagcaaagcgcccagcctgccgcctcgctgtccctgcggcttctgggggtccagcaagactatgaatctctgttccaaatgctttgctgattttcaaaagaaacagccagacgatgattccgctccaagtacaagtaacagccaatcagatttgttttccgaagagaccaccagtgacaacaacaatacctcgataaccacgccaactcttagtcccagccagcagccgcttccgacagaactgaatgtaacttcaccgagtaaagaggagtgtgggccatgcacagacacagctcatgtctcattaatcacaccaacaaaaagatcctgtggtacagattcacagtctgagaatgaggcttcaccagtaaaacggccacgactacttgagaatacggaacggtccgaggaaaccagtcgatctaaacagaagagtcgacgtcggtgcttccagtgccaaaccaaactggagctggtgcagcaggaattgggatcgtgtcgctgcggttatgtgttctgtatgttacatcgcctccccgagcagcacgactgcacattcgaccacatgggccgtggccgggaggaagccatcatgaaaatggtgaagctggaccggaaagtggggcgctcctgccagcgcatcggggaggggtgctcctgaaggccaggcatggccaccacgtgacgctgttcttagttcactaatgttagccttatttaggacaaagtcagccagacaccttgtactgggcacgcgtcagactgcagccagtccgtttcctttctttagccagccatcctggtactgtagtttaggggttgatggtggttgaaattgatttctggctggttactaaggtgcctgctagccattgtataaaattaaaacatgaagaatattttttttttgagcatggctagtggatttaaaacaacacatacctgtcactgctggagtcaaacttataaaaagccttaagtggaaagtgttccagacggagactctgagttaatagaggagtagaagctggtgttaaagttcccacgacgcacatggctttgccagaaactctgtttaatgatcggcctttcacctcttcacttatccttagtcccagtagccaggatacctgatggccacgtgtgccttggccacgggaggctgctgagattggccacgtggctgggctgggtggtggcctcactctcccacagagctggaaatggggggtgggggacagattcttacggaaatttttttacctgacttgctatgaaaaaactcatcacacaagaagagaaacagtaacctcactttgaaaattagctccactcaagactagtccacgaacgagacccgccttttctacacaggatccaaggtcacgagaagcagccagagtgccccgcctccgccggctctggtctgccattcgccagtgcagggatctggcacggaccagatgtggcgaatggcagcacagcgcggtggctgggtctgcacactggcctctgcagccagatttctatattgggagttttttaaaaagacatttcatagccaacaagaatcagtagaagtgctgggagcagcagctggggaagctgccgcccacgggctctgccccttccagctggagccgcccgtgcctccaggggccaagaggatgatgtcgtggcctccattctcgtttctatgcagccccatagtccaaggacacccagtccacatctaccatatagcaagtttagtaagggaaggcagcatacgtcccagggacagtgggtttggatctgtctagaacagcggtttgtggctgtggcccagctccgagagtgatatttgctctggtaggtgagggcctgagggtacatttctccacctgtgccccctcatgttcacagaggatttcagcagctgcaactgcgcacgccaggtggggaagggtgggggtgggcctggttgccccatgttaggaaatcactaccagtcaggtggggctggggctgggtggacaggatcaggattcccttgaaagcccaggcagggtgagcagtcccagtggtcctagtgccgcatcagatccaggtgggtgagggcaggaggcccctgcggaggcagcgtggatctgcccacacataggctactggaatagtttaacccagcaactttcctttttataaaacaacaaatggttcaactctgtctgcaaattaacagctgaacacctgcaactgcaaatgttttttgatccgacgtactgaaataggaagtcatgctcttcccaccctccacccaccagagtggaacccgctgcaaaatccccagccttaattcttgcttcaggacccagaccggtgtcttgctctagggcaacccagggcagaggggccaggtctgcccagcgtttaccactgctgtcaagccacagcccttggccaccatacgggccatcctcagtgaggcagccccccataggcttccgccaagctctggtcccgaagaggctgtgcgagcccttcccggccctccccagggccccccgccccctcctctgcctgctgcgtggaggcagccatgggaaggagcccaggggagctggcctgggggagcgaagcccatgttcgcttcctgacttagagctggggggggtggggggtggggcttgttcccctgcagtatctgttctgtgaagtttgttaaatgtaaggaaagcttaaattcttgtatctttaaaagagaaaatcttatttaacccttttgtgttctagatttacttacacacatagcctagagctcagttttagttttaacattgtgaaaatattaaaagaatcttgtaactttattcttttttctcctgctgaaaaaaaaaattaaaccaatcgtatgaaa

SEQ ID NO: 35441 - DNA, 5728 bp, Homo sapiens
  source 1..5728: mol_type = unassigned DNA
ctcttttccctcacagcccgggcgccgggcggcgagtgcgttagtcggccgggacgcggagctgtgtgcatctcctacgcgggctcgctcgctcccgggagccgcgcagcttccccggcggtggcaggagcggcgaagagcgccatcagcgggcccttacggccccaggcctcgcggcgcgcggtccgctcgccctcctcgtccgcccaacctgcggcctgtggaggcgtgaggcgacgacaggcgagcgcctcgagcagcgttagccgctgcggccgccggtcctccctccacctcctcctcggccccccctcgcttccctcctcccacttcccgagctccggcgtgtcccggccacgctcgacgctgctgcaggaacaaaggaagaccccgcggcggcggcggcgccacctccgcctgctgctccgacccgctcccggcccgcggcggcggcaccagggcgcccggctcagccttcccggaggcctcggcccggcctcatcgtgccggcttcgcgcgcgaacccggctttcgcatttgggaccctgcaggaaaaatatggctcaggagactaaccagaccccggggcccatgctgtgtagcacaggatgtggcttttatggaaatcctaggacaaatggaatgtgttcagtttgctacaaagaacatcttcagaggcagcaaaatagtggcagaatgagcccaatgggaacagctagtggttccaacagtcctacctcagattctgcatctgtacagagagcagacactagcttaaacaactgtgaaggtgctgctggcagcacatctgaaaaatcaagaaatgtgcctgtggctgccttgcctgtaactcagcaaatgacagaaatgagcatttcaagagaggacaaaataactaccccgaaaacagaggtgtcagagccagttgtcactcagcccagtccatcagtttctcagcccagtacttctcagagtgaagaaaaagctcctgaattgcccaaaccaaagaaaaacagatgtttcatgtgcagaaagaaagttggtcttacagggtttgactgccgatgtggaaatttgttttgtggacttcaccgttactctgacaagcacaactgtccgtatgattacaaagcagaagctgcagcaaaaatcagaaaagagaatccagttgttgtggctgaaaaaattcagagaatataaattacttcttgtgaagagactgaaactttgtttttattttaatatatcgtaggaaaacattaaagagcagatgcatggccatttttctttgatgttctccagagttttacattacacttgtctgtcttataattgatattttaggatgtttgggtgtttgttacaggcagaattggatagatacagccctacaaatgtatatgccctcccctgaaaaaaattggatgaaaatctgcacagcaaagtgaaacacacagataataggaacaaaatgtagttcccatgtgccaaacaaaataaatgaaatctctgcatgtttgcagcatatctgccttttgggaatgtaatcaaggtataatctttggctagtgttatgtgcctgtatttttttaaaatggtacaccagaaaaggactggcagtctacttctaccatagttaaacttcaccctctttaatttcacaacatattctttggaagcaggaagaaatgctcataaagaggatcagaccttctttcccgtgaaaccagtatttggcgccatatataagcctggttaaattggtcatctaaagctgtcaaataagacattctgtgaaaggtaaacatcgaaactggttataagtaaaaccatcaagccaacaacagggtcttgagataacctttgaagcttattgtactggcctgcaccagaagatgtctgcattactcattgctaaaaatgtgtagcacagaactgcactaggattaatttgtttacaagaagaaatttaaactctacgtttggttttcacatacagcagctctattgaataacatgcatctgaattttaagttgcaaaggtatctgaataatttttcatgtgcatcttttgtcgaatgttttggttcaagaaagaatgtttaaagctttttaaaagacttcagttcttaatgtaactgtacccttctgcatggaaaatcataaccaacatggctgcagtagacttcttagtggtatccagcaccacttgcagagggctgctttatcatattgtacttgggtgtaggactctagtgttcttgggtgtattgcatgggctgcattatctacagcattgtacaataacaactagaaaaggcagtatacttcactgatgcttgtctggtaataatcacttctgtgttataatggaaggttttttgtgatgtatgaaacttgtgttttttatatataaatgagtatagttagtgttgtggtaatgcctgttttcatctgtaaatagttaagtatgtacacgaggcactacttctgatttattgcaatgttcagtcctagtttttacttttattcttaaagcattcagttttgctttcaattttatgtaccttagttctgagttagacctgcagatgtgtacagatagttcatatttatgtattgcacataatcatgctattcagcattgatgctatattgtattatgtaaataataaaagccatgtacagagggaaacttcacttgttcattgggtttttaagccatagttggagtcctaaagggggaaaattagaaaatgttactttacatggctatataattttttttcctttgccatcgctgaacttgttcaagtgataatcaagagatattagaagcatttgcaggtatgatacctgataggcagtttatttttgaagaattcaataggcacctttgggattaaaacaattttaaaatttgagaaagatgaaatttgaacaattatggcctacctcgcttctccatgttgtaaaagatgatgttttatgacaattctgaagaagaaagtaggtatgacttagtttacaaaaagagttctgttttatttctgttttgggtttggctctaatacagagattcacccatggacttggtctctgtagcgtttatgccagatcataaagaacaaggggtgacaggtacatgttgactttacctggggtaaatgattaccagagtgcaactgttgcttctctgtgatggagtttggggtggaaataccctagttttatctgtcagttctttgcatgctgctacttttgcttcaagttagggaggtacatatgtatgtcaaagttcctatactgacatagggtagtatttctctgaatatgaaaagtcacaattgagttgaaaatttagaagttgaagatttagaagggcaacttaatttttcaagttaaaaatggaagtaagagtggtatagagaaggtaagatgagccctcggactccatcactctgaaggtctgagtagtagcaagagatagatttttgtttggccaggctgcagtgcaatggcgtaatcttggctcactgcaacctctgcctcctgggttcaagtgattctcctgcctctgcctcctaagtagctgggatcacaggcaccagccaccacgcccagctaatttttgtatttttaatagagacagtttctccatgttggtcaggctggtcttgaactcctgacctcaggtgagctgcccgcctcggcctcccaaagtgctgggattacaggcgtgaggcaccgcacccggccaatcagttttttttgttttttttttgtttgtttgttttacaagaaacattaaaccagatcagaacaaagatttgtcagggttgtccattgactggggagaaagggaatcagtgtgtaaggcacctgagaggactcagttctacccaaattcttgcattcaaacctgaatgcaaggccatgaagtcctttgaaatgtacagatattaagcaatttaataatataccatgtttcccttacataagcagacaaatatttacacccccatgacctgaagttttgttaggctgtgaccacatgaattcgcagtataaatgggtgagtcctttttgaaaacctcatcttcagtgtgcctgatctgtaaaactagagcctcaggtttgatcctaggtaggcttcccacaacgtggggaaaattagtttgtgagggaaagctgtttctgagcattatggcatagtgattaagatgagggaccctggaaccagcccgtgattttgggcaagttattttaggtccactttggactgcttcatctcttaaatgaagacagcaaccaccttcaggagtgtgaaggtgacaacacttaaaactgtgcctggcacattgtatttgctattgtcttaatgttctggaataatggtttccataacttgggaagaaaactttgagaacaggattggttacatcaagttgtatagtgaaaagataaagatttgttatttaaacttgcagtttaaagtcattagaatcattcttttccgtaaggctttctttgcaagagatctgcattaaataaagttgctaggaaataactaaaattggggaaataatctaataatagcaagatgttaagcatactattattgtattttgggggttggtaataacattcacatggatttatcaatacacactgagaagcaaagcctctcaagctgtcccatatcctccatttcaaaggcacacatacattttaggtaactcataatttagaaaggttatttaatcttttccacatgtaaatatttgaatatgtacaaagacttgatttgactcttgtctgtttttgttttgttttgtttgtttgagacagaggctccgtcgcccaggctggagtaaaatggcatggtctcagctcactgcaagttccgcctcccgggttcacgccattctcctggctcagcctccggagtagttgggactacaggcacccgtcaccacacctggctaatgttttttgttttttgggtttttttgtatttttagtagagagagggtttcaccgtgttagccagggtggtctcgatctcctgacctcatgatccgcccaccccggcctcccaaaatgctgggattacaggtgtgagccactgcgcctggccgactcttgtctgtttgaatgcaaagttctcaatagtggtttttgtccataagtattaacttataattttggagagtgataggtatggttgctggttgattagcaataagattatgtagccttaaactagctagaagagtttgcatgggtgaggcaacaggctgttaacaaaaagaaactggaaatacagtttcccctgtttgtttctcctgtttgtacaatctgctttaaaaacaagtgaacatgcaccatgtcagtcatggtgaatcggccaacagccagcccttgccagttgacatcacagtctaagatgggaaactggtacagatagacatgaagagagcttagcagtggttgaggtggtgactaaatatacagtcattgaataaataccgtgtagcaaatgtaaaaaaaaaaaaaaaagtacaacagaatacaaaagtgccatttaatattttatagctatttctatgcacaagtgctggttttaaatttatataaaagcaaagactgtttctgtgttttcttccagagtatttctgttacagccatagaagtaaagttaataaatgtaagactttttttgttt

SEQ ID NO: 35442 - DNA, 1073 bp, Homo sapiens
  source 1..1073: mol_type = unassigned DNA
ccggggcgccgcgggccaatggcgaagccggagcaggccgcggatggcggcgtccgggggaggggagcccgcccgccagcccaggaagcacaaagacggaggcgtcatcctgtcgtcgtggcccgagacctggctcccggcgtccctggctcgctccacagcacggccctgaaaaggagcctttaaaagtcaattctactccatttggcaaagagggaactgaaatctggaaagtaaggacttgcccaaggtcactgacttagtggcagactagagacttgaactcaggtctccattcccagcagaaaaatatggctcaggagactaaccagaccccggggcccatgctgtgtagcacaggatgtggcttttatggaaatcctaggacaaatggaatgtgttcagtttgctacaaagaacatcttcagaggcagcaaaatagtggcagaatgagcccaatgggaacagctagtggttccaacagtcctacctcagattctgcatctgtacagagagcagacactagcttaaacaactgtgaaggtgctgctggcagcacatctgaaaaatcaagaaatgtgcctgtggctgccttgcctgtaactcagcaaatgacagaaatgagcatttcaagagaggacaaaataactaccccgaaaacagaggtgtcagagccagttgtcactcagcccagtccatcagtttctcagcccagtacttctcagagtgaagaaaaagctcctgaattgcccaaaccaaagaaaaacagatgtttcatgtgcagaaagaaagttggtcttacagggtttgactgccgatgtggaaatttgttttgtggacttcaccgttactctgacaagcacaactgtccgtatgattacaaagcagaagctgcagcaaaaatcagaaaagagaatccagttgttgtggctgaaaaaattcagagaatataaattacttcttgtgaagagactgaaactttgtttttattttaatatatcgtaggaaaacattaaagagcagatgcatggccatttttctttgatgttctccagagttttacattacacttg

SEQ ID NO: 35443 - DNA, 690 bp, Homo sapiens
  source 1..690: mol_type = unassigned DNA
ggctccttgttgccgggccgggggcgggagtgaagggaccggggcgccgcgggccaatggcgaagccggagcaggccgcggatggcggcgtccgggggaggggagcccgcccgccagcccaggaagcacaaagacggaggcgtcatcctgtcgtcgtggcccgagacctggctcccggcgtccctggctcgctccacagcacgcagaaaaatatggctcaggagactaaccagaccccggggcccatgctgtgtagcacaggatgtggcttttatggaaatcctaggacaaatggaatgtgttcagtttgctacaaagaacatcttcagaggcagcaaaatagtggcagaatgagcccaatgggaacagctagtggttccaacagtcctacctcagattctgcatctgtacagagagcagacactagcttaaacaactgtgaaggtgctgctggcagcacatctgaaaaatcaagaaatgtgcctgtggctgccttgcctgtaactcagcaaatgacagaaatgagcatttcaagagaggacaaaataactaccccgaaaacagaggtgtcagagccagttgtcactcagcccagtccatcagtttctcagcccagtacttctcagagtgaagaaaaagctcctgaattgcccaaaccaaagaaaaacagatgtttcatgtgcagaaaga

SEQ ID NO: 35444 - DNA, 2686 bp, Homo sapiens
  source 1..2686: mol_type = unassigned DNA
acagcccgggcgccgggcggcgagtgcgttagtcggccgggacgcggagctgtgtgcatctcctacgcgggctcgctcgctcccgggagccgcgcagcttccccggcggtggcaggagcggcgaagagcgccatcagcgggcccttacggccccaggcctcgcggcgcgcggtccgctcgccctcctcgtccgcccaacctgcggcctgtggaggcgtgaggcgacgacaggcgagcgcctcgagcagcgttagccgctgcggccgccggtcctccctccacctcctcctcggccccccctcgcttccctcctcccacttcccgagctccggcgtgtcccggccacgctcgacgctgctgcaggaacaaaggaagaccccgcggcggcggcggcgccacctccgcctgctgctccgacccgctcccggcccgcggcggcggcaccagggcgcccggctcagccttcccggaggcctcggcccggcctcatcgtgccggcttcgcgcgcgaacccggctttcgcatttgggaccctgcaggcagaaaaatatggctcaggagactaaccagaccccggggcccatgctgtgtagcacaggatgtggcttttatggaaatcctaggacaaatggaatgtgttcagtttgctacaaagaacatcttcagaggcagcaaaatagtggcagaatgagcccaatgggaacagctagtggttccaacagtcctacctcagattctgcatctgtacagagagcagacactagcttaaacaactgtgaaggtgctgctggcagcacatctgaaaaatcaagaaatgtgcctgtggctgccttgcctgtaactcagcaaatgacagaaatgagcatttcaagagaggacaaaataactaccccgaaaacagaggtgtcagagccagttgtcactcagcccagtccatcagtttctcagcccagtacttctcagagtgaagaaaaagctcctgaattgcccaaaccaaagaaaaacagatgtttcatgtgcagaaagaaagttggtcttacagggtttgactgccgatgtggaaatttgttttgtggacttcaccgttactctgacaagcacaactgtccgtatgattacaaagcagaagctgcagcaaaaatcagaaaagagaatccagttgttgtggctgaaaaaattcagagaatataaattacttcttgtgaagagactgaaactttgtttttattttaatatatcgtaggaaaacattaaagagcagatgcatggccatttttctttgatgttctccagagttttacattacacttgtctgtcttataattgatattttaggatgtttgggtgtttgttacaggcagaattggatagatacagccctacaaatgtatatgccctcccctgaaaaaaattggatgaaaatctgcacagcaaagtgaaacacacagataataggaacaaaatgtagttcccatgtgccaaacaaaataaatgaaatctctgcatgtttgcagcatatctgccttttgggaatgtaatcaaggtataatctttggctagtgttatgtgcctgtatttttttaaaatggtacaccagaaaaggactggcagtctacttctaccatagttaaacttcaccctctttaatttcacaacatattctttggaagcaggaagaaatgctcataaagaggatcagaccttctttcccgtgaaaccagtatttggcgccatatataagcctggttaaattggtcatctaaagctgtcaaataagacattctgtgaaaggtaaacatcgaaactggttataagtaaaaccatcaagccaacaacagggtcttgagataacctttgaagcttattgtactggcctgcaccagaagatgtctgcattactcattgctaaaaatgtgtagcacagaactgcactaggattaatttgtttacaagaagaaatttaaactctacgtttggttttcacatacagcagctctattgaataacatgcatctgaattttaagttgcaaaggtatctgaataatttttcatgtgcatcttttgtcgaatgttttggttcaagaaagaatgtttaaagctttttaaaagacttcagttcttaatgtaactgtacccttctgcatggaaaatcataaccaacatggctgcagtagacttcttagtggtatccagcaccacttgcagagggctgctttatcatattgtacttgggtgtaggactctagtgttcttgggtgtattgcatgggctgcattatctacagcattgtacaataacaactagaaaaggcagtatacttcactgatgcttgtctggtaataatcacttctgtgttataatggaaggttttttgtgatgtatgaaacttgtgttttttatatataaatgagtatagttagtgttgtggtaatgcctgttttcatctgtaaatagttaagtatgtacacgaggcactacttctgatttattgcaatgttcagtcctagtttttacttttattcttaaagcattcagttttgctttcaattttatgtaccttagttctgagttagacctgcagatgtgtacagatagttcatatttatgtattgcacataatcatgctattcagcattgatgctatattgtattatgtaaataataaaagccatgtacagagggaaa

SEQ ID NO: 35445 - DNA, 2785 bp, Homo sapiens
  source 1..2785: mol_type = unassigned DNA
gggacgcggagctgtgtgcatctcctacgcgggctcgctcgctcccgggagccgcgcagcttccccggcggtggcaggagcggcgaagagcgccatcagcgggcccttacggccccaggcctcgcggcgcgcggtccgctcgccctcctcgtccgcccaacctgcggcctgtggaggcgtgaggcgacgacaggcgagcgcctcgagcagcgttagccgctgcggccgccggtcctccctccacctcctcctcggccccccctcgcttccctcctcccacttcccgagctccggcgtgtcccggccacgctcgacgctgctgcaggaacaaaggaagaccccgcggcggcggcggcgccacctccgcctgctgctccgacccgctcccggcccgcggcggcggcaccagggcgcccggctcagccttcccggaggcctcggcccggcctcatcgtgccggcttcgcgcgcgaacccggctttcgcatttgggaccctgcagggccctgaaaaggagcctttaaaagtcaattctactccatttggcaaagagggaactgaaatctggaaagtaaggacttgcccaaggtcactgacttagtggcagactagagacttgaactcaggtctccattcccagcagaaaaatatggctcaggagactaaccagaccccggggcccatgctgtgtagcacaggatgtggcttttatggaaatcctaggacaaatggaatgtgttcagtttgctacaaagaacatcttcagaggcagcaaaatagtggcagaatgagcccaatgggaacagctagtggttccaacagtcctacctcagattctgcatctgtacagagagcagacactagcttaaacaactgtgaaggtgctgctggcagcacatctgaaaaatcaagaaatgtgcctgtggctgccttgcctgtaactcagcaaatgacagaaatgagcatttcaagagaggacaaaataactaccccgaaaacagaggtgtcagagccagttgtcactcagcccagtccatcagtttctcagcccagtacttctcagagtgaagaaaaagctcctgaattgcccaaaccaaagaaaaacagatgtttcatgtgcagaaagaaagttggtcttacagggtttgactgccgatgtggaaatttgttttgtggacttcaccgttactctgacaagcacaactgtccgtatgattacaaagcagaagctgcagcaaaaatcagaaaagagaatccagttgttgtggctgaaaaaattcagagaatataaattacttcttgtgaagagactgaaactttgtttttattttaatatatcgtaggaaaacattaaagagcagatgcatggccatttttctttgatgttctccagagttttacattacacttgtctgtcttataattgatattttaggatgtttgggtgtttgttacaggcagaattggatagatacagccctacaaatgtatatgccctcccctgaaaaaaattggatgaaaatctgcacagcaaagtgaaacacacagataataggaacaaaatgtagttcccatgtgccaaacaaaataaatgaaatctctgcatgtttgcagcatatctgccttttgggaatgtaatcaaggtataatctttggctagtgttatgtgcctgtatttttttaaaatggtacaccagaaaaggactggcagtctacttctaccatagttaaacttcaccctctttaatttcacaacatattctttggaagcaggaagaaatgctcataaagaggatcagaccttctttcccgtgaaaccagtatttggcgccatatataagcctggttaaattggtcatctaaagctgtcaaataagacattctgtgaaaggtaaacatcgaaactggttataagtaaaaccatcaagccaacaacagggtcttgagataacctttgaagcttattgtactggcctgcaccagaagatgtctgcattactcattgctaaaaatgtgtagcacagaactgcactaggattaatttgtttacaagaagaaatttaaactctacgtttggttttcacatacagcagctctattgaataacatgcatctgaattttaagttgcaaaggtatctgaataatttttcatgtgcatcttttgtcgaatgttttggttcaagaaagaatgtttaaagctttttaaaagacttcagttcttaatgtaactgtacccttctgcatggaaaatcataaccaacatggctgcagtagacttcttagtggtatccagcaccacttgcagagggctgctttatcatattgtacttgggtgtaggactctagtgttcttgggtgtattgcatgggctgcattatctacagcattgtacaataacaactagaaaaggcagtatacttcactgatgcttgtctggtaataatcacttctgtgttataatggaaggttttttgtgatgtatgaaacttgtgttttttatatataaatgagtatagttagtgttgtggtaatgcctgttttcatctgtaaatagttaagtatgtacacgaggcactacttctgatttattgcaatgttcagtcctagtttttacttttattcttaaagcattcagttttgctttcaattttatgtaccttagttctgagttagacctgcagatgtgtacagatagttcatatttatgtattgcacataatcatgctattcagcattgatgctatattgtattatgtaaataataaaagccatgtacagagggaaa

SEQ ID NO: 35446 - DNA, 1814 bp, Homo sapiens
  source 1..1814: mol_type = unassigned DNA
aataattagcgggcgggcggggcccgcgcgtcagccgcgggagccggccaatccagtggctctcctccgcggtcgcgtcataggccgaacaaccaaacagaaaagtttaataaacagcggacggaggggccggcggtggcggagccggagcaagcaggggttcggcggcattacctgtacccattcaccggcggctaccggcggcggcgcgcagcgtgtcaggcggagagacccgccgccaggaatgaatctgaagtctgctgcagtaaaacacagaaggctttaaaatgttttcttgcataaaattcaaaacttttaagtagctgcttatgagaatagggaaggcagaaagctaatgtctgtctcaagatacaggacagctgtttgctcatcaacctcaactgtgtgtgcaactgaggaacatggctcaagaaactaatcacagccaagtgcctatgctttgttccactggctgtggattttatggaaaccctcgtacaaatggcatgtgttcagtatgctataaagaacatcttcaaagacagaatagtagtaatggtagaataagcccacctgcaacctctgtcagtagtctgtctgaatctttaccagttcaatgcacagatggcagtgtgccagaagcccagtcagcattagactctacatcttcatctatgcagcccagccctgtatcaaatcagtcacttttatcagaatctgtagcatcttctcaattggacagtacatctgtggacaaagcagtacctgaaacagaagatgtgcaggcttcagtatcagacacagcacagcagccatctgaagagcaaagcaagtctcttgaaaaaccgaaacaaaaaaagaatcgctgtttcatgtgcaggaagaaagtgggacttactgggtttgaatgccggtgtggaaatgtttactgtggtgtacaccgttactcagatgtacacaattgctcttacaattacaaagccgatgctgctgagaaaatcagaaaagaaaatccagtagttgttggtgaaaagatccaaaagatttgaactcctgctggaatacaaaattcttgagcatctgcaaactaaaaattgacttgaggttttttttttcctagtcattgggaatgtagagcagtgtatcttgcatgtcatcggaagaatagatttttgttttggttttgttttgaaaatgactctgaacatttatttccattgcaatttctgtggctgaggagacttaaactttacaagtattatccttttaagatcattttaattttagttgagtgcagagggcttttataacaaacgtgcagaaattttggagggctgtgatttttccagtattaaacatgcatgcattaatcttgcagtttattttctcattgtgtatgtatatatcgcttttctctgcagcacgatttctcttttgataatgccctttagggcacaactagttatcagtaactgaatgtatcttaatcattatggctgcttctgttttttcattaacaaaggttattcatatgttagcatatagtttctttgcacccactatttatgtctgaatcatttgtcacaagagagtgtgtgctgatgagattgtaagtttgtgtgtttaaacttttttttgagcgagggaagaaaaagctgtatgcatttcattgctgtctacaggtttctttcagattatgttcatgggtttgtgtgtatacaatatgaagaatgatctgaagtaattgtgctgtatttatgtttattcaccagtctttgattaaataaaaaggaaaaccagaatgctcccttgta

SEQ ID NO: 35447 - DNA, 1472 bp, Homo sapiens
  source 1..1472: mol_type = unassigned DNA
ggagcaagcaggggttcggcggcattacctgtacccattcaccggcggctaccggcggcggcgcgcagcgtgtcaggcggagagacccgccgccaggtgtgcaactgaggaacatggctcaagaaactaatcacagccaagtgcctatgctttgttccactggctgtggattttatggaaaccctcgtacaaatggcatgtgttcagtatgctataaagaacatcttcaaagacagaatagtagtaatggtagaataagcccacctgcaacctctgtcagtagtctgtctgaatctttaccagttcaatgcacagatggcagtgtgccagaagcccagtcagcattagactctacatcttcatctatgcagcccagccctgtatcaaatcagtcacttttatcagaatctgtagcatcttctcaattggacagtacatctgtggacaaagcagtacctgaaacagaagatgtgcaggcttcagtatcagacacagcacagcagccatctgaagagcaaagcaagtctcttgaaaaaccgaaacaaaaaaagaatcgctgtttcatgtgcaggaagaaagtgggacttactgggtttgaatgccggtgtggaaatgtttactgtggtgtacaccgttactcagatgtacacaattgctcttacaattacaaagccgatgctgctgagaaaatcagaaaagaaaatccagtagttgttggtgaaaagatccaaaagatttgaactcctgctggaatacaaaattcttgagcatctgcaaactaaaaattgacttgaggttttttttttcctagtcattgggaatgtagagcagtgtatcttgcatgtcatcggaagaatagatttttgttttggttttgttttgaaaatgactctgaacatttatttccattgcaatttctgtggctgaggagacttaaactttacaagtattatccttttaagatcattttaattttagttgagtgcagagggcttttataacaaacgtgcagaaattttggagggctgtgatttttccagtattaaacatgcatgcattaatcttgcagtttattttctcattgtgtatgtatatatcgcttttctctgcagcacgatttctcttttgataatgccctttagggcacaactagttatcagtaactgaatgtatcttaatcattatggctgcttctgttttttcattaacaaaggttattcatatgttagcatatagtttctttgcacccactatttatgtctgaatcatttgtcacaagagagtgtgtgctgatgagattgtaagtttgtgtgtttaaacttttttttgagcgagggaagaaaaagctgtatgcatttcattgctgtctacaggtttctttcagattatgttcatgggtttgtgtgtatacaatatgaagaatgatctgaagtaattgtgctgtatttatgtttattcaccagtctttgatt

SEQ ID NO: 35448 - DNA, 1559 bp, Homo sapiens
  source 1..1559: mol_type = unassigned DNA
cgcggtcgcgtcataggccgaacaaccaaacagaaaagtttaataaacagcggacggaggggccggcggtggcggagccggagcaagcaggggttcggcggcattacctgtacccattcaccggcggctaccggcggcggcgcgcagcgtgtcaggcggagagacccgccgccagatcaaaagacactgacttagctgcttaccagaaggggaacttgggtgtgcaactgaggaacatggctcaagaaactaatcacagccaagtgcctatgctttgttccactggctgtggattttatggaaaccctcgtacaaatggcatgtgttcagtatgctataaagaacatcttcaaagacagaatagtagtaatggtagaataagcccacctgttcaatgcacagatggcagtgtgccagaagcccagtcagcattagactctacatcttcatctatgcagcccagccctgtatcaaatcagtcacttttatcagaatctgtagcatcttctcaattggacagtacatctgtggacaaagcagtacctgaaacagaagatgtgcaggcttcagtatcagacacagcacagcagccatctgaagagcaaagcaagtctcttgaaaaaccgaaacaaaaaaagaatcgctgtttcatgtgcaggaagaaagtgggacttactgggtttgaatgccggtgtggaaatgtttactgtggtgtacaccgttactcagatgtacacaattgctcttacaattacaaagccgatgctgctgagaaaatcagaaaagaaaatccagtagttgttggtgaaaagatccaaaagatttgaactcctgctggaatacaaaattcttgagcatctgcaaactaaaaattgacttgaggttttttttttcctagtcattgggaatgtagagcagtgtatcttgcatgtcatcggaagaatagatttttgttttggttttgttttgaaaatgactctgaacatttatttccattgcaatttctgtggctgaggagacttaaactttacaagtattatccttttaagatcattttaattttagttgagtgcagagggcttttataacaaacgtgcagaaattttggagggctgtgatttttccagtattaaacatgcatgcattaatcttgcagtttattttctcattgtgtatgtatatatcgcttttctctgcagcacgatttctcttttgataatgccctttagggcacaactagttatcagtaactgaatgtatcttaatcattatggctgcttctgttttttcattaacaaaggttattcatatgttagcatatagtttctttgcacccactatttatgtctgaatcatttgtcacaagagagtgtgtgctgatgagattgtaagtttgtgtgtttaaacttttttttgagcgagggaagaaaaagctgtatgcatttcattgctgtctacaggtttctttcagattatgttcatgggtttgtgtgtatacaatatgaagaatgatctgaagtaattgtgctgtatttatgtttattcaccagtctttgatt

SEQ ID NO: 35449 - DNA, 1602 bp, Homo sapiens
  source 1..1602: mol_type = unassigned DNA
ggagtacagcttcaagtgaagttaatctgaggtgaagcaaacagaaaattgtggaggttttgttggaatgaatctgaagtctgctgcagtaaaacacagaaggctttaaaatgttttcttgcataaaattcaaaacttttaagtagctgcttatgagaatagggaaggcagaaagctaatgtctgtctcaagatacaggacagctgtttgctcatcaacctcaactgtgtgtgcaactgaggaacatggctcaagaaactaatcacagccaagtgcctatgctttgttccactggctgtggattttatggaaaccctcgtacaaatggcatgtgttcagtatgctataaagaacatcttcaaagacagaatagtagtaatggtagaataagcccacctgcaacctctgtcagtagtctgtctgaatctttaccagttcaatgcacagatggcagtgtgccagaagcccagtcagcattagactctacatcttcatctatgcagcccagccctgtatcaaatcagtcacttttatcagaatctgtagcatcttctcaattggacagtacatctgtggacaaagcagtacctgaaacagaagatgtgcaggcttcagtatcagacacagcacagcagccatctgaagagcaaagcaagtctcttgaaaaaccgaaacaaaaaaagaatcgctgtttcatgtgcaggaagaaagtgggacttactgggtttgaatgccggtgtggaaatgtttactgtggtgtacaccgttactcagatgtacacaattgctcttacaattacaaagccgatgctgctgagaaaatcagaaaagaaaatccagtagttgttggtgaaaagatccaaaagatttgaactcctgctggaatacaaaattcttgagcatctgcaaactaaaaattgacttgaggttttttttttcctagtcattgggaatgtagagcagtgtatcttgcatgtcatcggaagaatagatttttgttttggttttgttttgaaaatgactctgaacatttatttccattgcaatttctgtggctgaggagacttaaactttacaagtattatccttttaagatcattttaattttagttgagtgcagagggcttttataacaaacgtgcagaaattttggagggctgtgatttttccagtattaaacatgcatgcattaatcttgcagtttattttctcattgtgtatgtatatatcgcttttctctgcagcacgatttctcttttgataatgccctttagggcacaactagttatcagtaactgaatgtatcttaatcattatggctgcttctgttttttcattaacaaaggttattcatatgttagcatatagtttctttgcacccactatttatgtctgaatcatttgtcacaagagagtgtgtgctgatgagattgtaagtttgtgtgtttaaacttttttttgagcgagggaagaaaaagctgtatgcatttcattgctgtctacaggtttctttcagattatgttcatgggtttgtgtgtatacaatatgaagaatgatctgaagtaattgtgctgtatttatgtttattcaccagtctttga

SEQ ID NO: 35450 - DNA, 1446 bp, Homo sapiens
  source 1..1446: mol_type = unassigned DNA
gctttggagtacagcttcaagtgaagttaatctgaggtgaagcaaacagaaaattgtggaggttttgttggtgtgcaactgaggaacatggctcaagaaactaatcacagccaagtgcctatgctttgttccactggctgtggattttatggaaaccctcgtacaaatggcatgtgttcagtatgctataaagaacatcttcaaagacagaatagtagtaatggtagaataagcccacctgcaacctctgtcagtagtctgtctgaatctttaccagttcaatgcacagatggcagtgtgccagaagcccagtcagcattagactctacatcttcatctatgcagcccagccctgtatcaaatcagtcacttttatcagaatctgtagcatcttctcaattggacagtacatctgtggacaaagcagtacctgaaacagaagatgtgcaggcttcagtatcagacacagcacagcagccatctgaagagcaaagcaagtctcttgaaaaaccgaaacaaaaaaagaatcgctgtttcatgtgcaggaagaaagtgggacttactgggtttgaatgccggtgtggaaatgtttactgtggtgtacaccgttactcagatgtacacaattgctcttacaattacaaagccgatgctgctgagaaaatcagaaaagaaaatccagtagttgttggtgaaaagatccaaaagatttgaactcctgctggaatacaaaattcttgagcatctgcaaactaaaaattgacttgaggttttttttttcctagtcattgggaatgtagagcagtgtatcttgcatgtcatcggaagaatagatttttgttttggttttgttttgaaaatgactctgaacatttatttccattgcaatttctgtggctgaggagacttaaactttacaagtattatccttttaagatcattttaattttagttgagtgcagagggcttttataacaaacgtgcagaaattttggagggctgtgatttttccagtattaaacatgcatgcattaatcttgcagtttattttctcattgtgtatgtatatatcgcttttctctgcagcacgatttctcttttgataatgccctttagggcacaactagttatcagtaactgaatgtatcttaatcattatggctgcttctgttttttcattaacaaaggttattcatatgttagcatatagtttctttgcacccactatttatgtctgaatcatttgtcacaagagagtgtgtgctgatgagattgtaagtttgtgtgtttaaacttttttttgagcgagggaagaaaaagctgtatgcatttcattgctgtctacaggtttctttcagattatgttcatgggtttgtgtgtatacaatatgaagaatgatctgaagtaattgtgctgtatttatgtttattcaccagtctttgatt

SEQ ID NO: 35451 - DNA, 891 bp, Homo sapiens
  source 1..891: mol_type = unassigned DNA
ggccaatccagtggctctcctccgcggtcgcgtcataggccgaacaaccaaacagaaaagtttaataaacagcggacggaggggccggcggtggcggagccggagcaagcaggggttcggcggcattacctgtacccattcaccggcggctaccggcggcggcgcgcagcgtgtcaggcggagagacccgccgccaggtgtgcaactgaggaacatggctcaagaaactaatcacagccaagtgcctatgctttgttccactggctgtggattttatggaaaccctcgtacaaatggcatgtgttcagtatgctataaagaacatcttcaaagacagaatagtagtaatggtagaataagcccacctgcaacctctgtcagtagtctgtctgaatctttaccagttcaatgcacagatggcagtgtgccagaagcccagtcagcattagactctacatcttcatctatgcagcccagccctgtatcaaatcagtcacttttatcagaatctgtagcatcttctcaattggacagtacatctgtggacaaagcagtacctgaaacagaagatgtgcaggcttcagtatcagacacagcacagcagccatctgaagagcaaagcaagtctcttgaaaaaccgaaacaaaaaaagaatcgctgtttcatgtgcaggaagaaagtgggacttactgggtttgaatgccggtgtggaaatgtttactgtggtgtacaccgttactcagatgtacacaattgctcttacaattacaaagccgatgctgctgagaaaatcagaaaagaaaatccagtagttgttggtgaaaagatccaaaagatttgaactcctgctggaatacaaaattcttgagcatctgcaaactaaaaattgac

SEQ ID NO: 35452 - DNA, 2832 bp, Homo sapiens
  source 1..2832: mol_type = unassigned DNA
gcgcgtgtggcctccccgcctgtcccgggtcgggctccaaccaagcagcccccgtgcagccgcccccccgcgcaccctgacacctccgggccatggccggggacccgggggctcgcacgccccgcgcccaagacatcaggcggctctgcctgccgcctgcggtcggccagtgaccgcgcgcccccgccaggccccggaggggaggagcgggcgtcccagggacctcgacccctacccaccccaggcaggtccccacgcatgagcagccgtccagcaggcaggctccggtggagaagcaatggagaataaaagcctggagagctcccagacagacctgaagctggtggcccacccccgcgccaagagcaaggtgtggaagtatttcggcttcgacaccaacgccgagggatgcatcctgcagtggaagaaaatctactgccgcatctgcatggcccagatcgcctactccggaaacacctccaacctgtcctaccacctggagaagaaccaccccgaggaattctgcgagttcgtcaagagcaacacggagcagatgcgtgaagccttcgccaccgccttctccaagctgaagcccgagtcgtcccagcagcccgggcaggacgcgctggccgtcaaggccggccacggctacgacagcaagaagcagcaggagctgacggccgccgtgctgggcctcatctgcgaggggctgtacccagcctccatcgtggacgagcccaccttcaaggtgctgctgaagacggccgacccccggtatgagctgcccagccggaagtacatctctaccaaggccatccctgagaagtacggggccgtccgggaggtgatcctgaaggagctggccgaggccacctggtgtggcatctccaccgacatgtggaggagtgagaatcagaaccgcgcctacgtcacgctggccgcccacttcctgggcctgggcgcccccaactgcctgtccatgggctcccgctgcctgaagaccttcgaggtgcccgaagagaacacggcggagaccatcacgcgagtgctctatgaggtcttcatcgagtggggcatcagcgccaaggtcttcggggccaccaccaactatggcaaggacatcgtgaaggcgtgctccctgctggacgtcgcagtgcacatgccctgcctgggccacaccttcaatgccggcatccagcaggccttccagctcccgaagctgggggcgctgctgtcgcgctgccgcaaactggtggagtacttccagcagtctgccgtggccatgtacatgctctatgagaagcagaagcagcagaacgtggcccactgcatgctggtgagcaaccgcgtctcctggtgggggagcacgctggccatgctgcagcgcctcaaggagcagcagttcgtcatcgccggggtcttggtggaggacagcaacaaccaccacctcatgctggaggccagcgagtgggccaccatcgaggggctggtggagctcctgcagcccttcaagcaggtggccgagatgctgtcggcctccaggtaccccaccatcagcatggtgaagccgctgctgcacatgctcctgaacaccacgctcaacatcaaggagaccgactccaaggagctcagcatggccaaggaggtcatcgccaaggagctttccaagacctaccaggagacgcccgagatcgacatgtttctcaacgtggccaccttcctggacccccgctacaagaggctgcccttcctctccgccttcgagcggcagcaggtggagaatcgcgtggtggaagaggccaagggcctgctggacaaggtcaaagacggcggctaccggccggctgaggacaagatcttcccggtgcccgaggagcctcccgtcaagaagctcatgcggacatccacgccgccgcccgccagcgtcatcaacaacatgctggccgagatcttctgccagacaggcggcgtggaggaccaggaagagtggcatgcccaggtggtggaggagctgagcaacttcaagtcccagaaggtgcttggcctcaacgaagaccccctcaagtggtggtcagaccgcctggccctcttccccctgctgcccaaggtgctgcagaagtactggtgcgtgacggccacgcgcgtcgcccctgagcgtctcttcggatccgccgccaacgtggtcagcgccaagaggaaccggctggctcccgcgcacgtggacgagcaggtgtttctgtatgagaacgcccggagtggggcagaggcggaacccgaggaccaggacgagggggagtggggcctggaccaggagcaggtgttctccttgggggatggcgtcagcggcggtttctttggcattagggacagcagcttcctgtagcgaggaagcgtgttgtcttacaagtcatccccgcagcagcccattggatgctttgctgtaaatacttacccggtcagcttggttttgaacctcagagaccatccactgtctttgacacctagaaggtggaaaaaggaaagagatttgagaagtgagagagggtcgggggcggtggctcctgtctataatcgcagcactttgggaggccgaggtgggcagatcagctgaggtcaggagatcgagaccagcctggccaacatggcgaaaccccgtctctactaaaaatacaaaaattagccaggactgatggcatgtgcctgtaatcccagcttctggaggctgaggccagagaatcgcttgaacctgggaggtggaggttgcagtaagctgagatcgctgcactccagcctgggcgacaagagcgagactctctcaaaaagaaaaaagaa

SEQ ID NO: 35453 - DNA, 4485 bp, Homo sapiens
  source 1..4485: mol_type = unassigned DNA
cgcgggcggcgcggaagcggcggcggcgcggccggggcagccatgtcgccattgtctgcggcgcgggcggccctgcgggtctacgcggtaggcgccgcggtgatcctggcgcagctgctgcggcgctgccgcgggggcttcctggagccaggtccccacgcatgagcagccgtccagcaggcaggctccggtggagaagcaatggagaataaaagcctggagagctcccagacagacctgaagctggtggcccacccccgcgccaagagcaaggtgtggaagtatttcggcttcgacaccaacgccgagggatgcatcctgcagtggaagaaaatctactgccgcatctgcatggcccagatcgcctactccggaaacacctccaacctgtcctaccacctggagaagaaccaccccgaggaattctgcgagttcgtcaagagcaacacggagcagatgcgtgaagccttcgccaccgccttctccaagctgaagcccgagtcgtcccagcagcccgggcaggacgcgctggccgtcaaggccggccacggctacgacagcaagaagcagcaggagctgacggccgccgtgctgggcctcatctgcgaggggctgtacccagcctccatcgtggacgagcccaccttcaaggtgctgctgaagacggccgacccccggtatgagctgcccagccggaagtacatctctaccaaggccatccctgagaagtacggggccgtccgggaggtgatcctgaaggagctggccgaggccacctggtgtggcatctccaccgacatgtggaggagtgagaatcagaaccgcgcctacgtcacgctggccgcccacttcctgggcctgggcgcccccaactgcctgtccatgggctcccgctgcctgaagaccttcgaggtgcccgaagagaacacggcggagaccatcacgcgagtgctctatgaggtcttcatcgagtggggcatcagcgccaaggtcttcggggccaccaccaactatggcaaggacatcgtgaaggcgtgctccctgctggacgtcgcagtgcacatgccctgcctgggccacaccttcaatgccggcatccagcaggccttccagctcccgaagctgggggcgctgctgtcgcgctgccgcaaactggtggagtacttccagcagtctgccgtggccatgtacatgctctatgagaagcagaagcagcagaacgtggcccactgcatgctggtgagcaaccgcgtctcctggtgggggagcacgctggccatgctgcagcgcctcaaggagcagcagttcgtcatcgccggggtcttggtggaggacagcaacaaccaccacctcatgctggaggccagcgagtgggccaccatcgaggggctggtggagctcctgcagcccttcaagcaggtggccgagatgctgtcggcctccaggtaccccaccatcagcatggtgaagccgctgctgcacatgctcctgaacaccacgctcaacatcaaggagaccgactccaaggagctcagcatggccaaggaggtcatcgccaaggagctttccaagacctaccaggagacgcccgagatcgacatgtttctcaacgtggccaccttcctggacccccgctacaagaggctgcccttcctctccgccttcgagcggcagcaggtggagaatcgcgtggtggaagaggccaagggcctgctggacaaggtcaaagacggcggctaccggccggctgaggacaagatcttcccggtgcccgaggagcctcccgtcaagaagctcatgcggacatccacgccgccgcccgccagcgtcatcaacaacatgctggccgagatcttctgccagacaggcggcgtggaggaccaggaagagtggcatgcccaggtggtggaggagctgagcaacttcaagtcccagaaggtgcttggcctcaacgaagaccccctcaagtggtggtcagaccgcctggccctcttccccctgctgcccaaggtgctgcagaagtactggtgcgtgacggccacgcgcgtcgcccctgagcgtctcttcggatccgccgccaacgtggtcagcgccaagaggaaccggctggctcccgcgcacgtggacgagcaggtgtttctgtatgagaacgcccggagtggggcagaggcggaacccgaggaccaggacgagggggagtggggcctggaccaggagcaggtgttctccttgggggatggcgtcagcggcggtttctttggcattagggacagcagcttcctgtagcgaggaagcgtgttgtcttacaagtcatccccgcagcagcccattggatgctttgctgtaaatacttacccggtcagcttggttttgaacctcagagaccatccactgtctttgacacctagaaggtggaaaaaggaaagagatttgagaagtgagagagggtcgggggcggtggctcctgtctataatcgcagcactttgggaggccgaggtgggcagatcagctgaggtcaggagatcgagaccagcctggccaacatggcgaaaccccgtctctactaaaaatacaaaaattagccaggactgatggcatgtgcctgtaatcccagcttctggaggctgaggccagagaatcgcttgaacctgggaggtggaggttgcagtaagctgagatcgctgcactccagcctgggcgacaagagcgagactctctcaaaaagaaaaaagaagacacaagagaggtggctttgagtgggtttcctttcctcccctattcccggggcccggacgacttctgcttgggaactgccaacgcttctgcttgggaattgcgtgcagcagagcctagaggagctgttccttccttcacagatacttaagacctccaccatgtctgattcgagttctccctgggagggtttagaagaaacgcaggaacattctgggtggcgtcgaaggagcctttcccgatcatcatgtgtgacttctgcgaggtccagatcactgaattcatgtttacattctcgtgcaagcagggacctcttgcttctgagaaatggggaagagaccttttagccaaaatgcccttcttaaaaagagagacctttttttttaatgttcggttaaaaatgtgacagatgagtacaaaaatgcagacacttaacaaaaagcaaacagaaaaaaaagtgtggaatgtgttgtattttcgacaggttgctgccagagagcctgcttcctgctgcctgccgaaatttcactttgcggagttggtccttaaaactgggcggtggccgggcgtggtggctcacgctgaggtcaggagttcgagaccagcctggccaaccaacatggtgaaacctcgtgtctactaaaaatacaagaaactagccagatgcggtggcacccgcctgtaatcccagctactcgggaggctgaggcggaagattcgcttgagcccaggaggtggaggttgcagtgagccaagactacgccactgcactccagcctggaggccagagtgagactccgtctcaaaacaaaacaaaagtgggtggctcacgggtccggaggttatgtcttcggtgtctcagccctaaaagtccagttcccccgtgcggccagcttttccacataaggtgtttttgatttgattaccggaaaggactcttgattcttctcttttaaactgaataccataggggaaatgaattttaaaatattgcccccggaggggttttccgtggctggattcctgcgagttgctttcagtcattcagggaaacagaaagacgttttccaacatgtagaactgctttttaactggaggaaaaatacttcaggaggcttagcatattgcttggattctacgtgcagcgggttctctgcctccgtgaagacaagctgggctggggagaacggtgtctaggagggatgaccccactcagctccaggcagtgttctgccgagaccccaagaactcggggtgtcagagggcaaaggaactacctgcctttcacggctgctgacttctcagggctgcaagcagcacagaatgttatccttacgtcctgagccggtttaagtctgtggaaaaggaagcacgggagaaatccacgtaacctttgctttctttttaagggaagcggttccgccgtgaacttggaaccctcagctccgggtgttctcggcagaagggcagctggaagggacacagtggggcaggctttggggttgctccctgttctgccccgaggccggggacgcagggcagcccacgcctccgtgggctccattctgtagcattgccagcgttctcttcacgtctctaacaatccttcgcttttcctcactcacgtggaaatgtgaactgtcccggctctgtcttcatttttatttttaagccatcgttcccctcctgaacggttgccccttatttaatgctgtaaagttggactgttgttcaataaaccagagcaatgc

SEQ ID NO: 35454 - DNA, 4510 bp, Homo sapiens
  source 1..4510: mol_type = unassigned DNA
cgcgggcggcgcggaagcggcggcggcgcggccggggcagccatgtcgccattgtctgcggcgcgggcggccctgcgggtctacgcggtaggcgccgcggtgatcctggcgcagctgctgcggcgctgccgcgggggcttcctggagccagcaggtccccacgcatgagcagccgtccagcaggcaggctccggtggagaagcaatggagaataaaagcctggagagctcccagacagacctgaagctggtggcccacccccgcgccaagagcaaggtgtggaagtatttcggcttcgacaccaacgccgagggatgcatcctgcagtggaagaaaatctactgccgcatctgcatggcccagatcgcctactccggaaacacctccaacctgtcctaccacctggagaagaaccaccccgaggaattctgcgagttcgtcaagagcaacacggagcagatgcgtgaagccttcgccaccgccttctccaagctgaagcccgagtcgtcccagcagcccgggcaggacgcgctggccgtcaaggccggccacggctacgacagcaagaagcagcaggagctgacggccgccgtgctgggcctcatctgcgaggggctgtacccagcctccatcgtggacgagcccaccttcaaggtgctgctgaagacggccgacccccggtatgagctgcccagccggaagtacatctctaccaaggccatccctgagaagtacggggccgtccgggaggtgatcctgaaggagctggccgaggccacctggtgtggcatctccaccgacatgtggaggagtgagaatcagaaccgcgcctacgtcacgctggccgcccacttcctgggcctgggcgcccccaactgcctgtccatgggctcccgctgcctgaagaccttcgaggtgcccgaagagaacacggcggagaccatcacgcgagtgctctatgaggtcttcatcgagtggggcatcagcgccaaggtcttcggggccaccaccaactatggcaaggacatcgtgaaggcgtgctccctgctggacgtcgcagtgcacatgccctgcctgggccacaccttcaatgccggcatccagcaggccttccagctcccgaagctgggggcgctgctgtcgcgctgccgcaaactggtggagtacttccagcagtctgccgtggccatgtacatgctctatgagaagcagaagcagcagaacgtggcccactgcatgctggtgagcaaccgcgtctcctggtgggggagcacgctggccatgctgcagcgcctcaaggagcagcagttcgtcatcgccggggtcttggtggaggacagcaacaaccaccacctcatgctggaggccagcgagtgggccaccatcgaggggctggtggagctcctgcagcccttcaagcaggtggccgagatgctgtcggcctccaggtaccccaccatcagcatggtgaagccgctgctgcacatgctcctgaacaccacgctcaacatcaaggagaccgactccaaggagctcagcatggccaaggaggtcatcgccaaggagctttccaagacctaccaggagacgcccgagatcgacatgtttctcaacgtggccaccttcctggacccccgctacaagaggctgcccttcctctccgccttcgagcggcagcaggtggagaatcgcgtggtggaagaggccaagggcctgctggacaaggtcaaagacggcggctaccggccggctgaggacaagatcttcccggtgcccgaggagcctcccgtcaagaagctcatgcggacatccacgccgccgcccgccagcgtcatcaacaacatgctggccgagatcttctgccagacaggcggcgtggaggaccaggaagagtggcatgcccaggtggtggaggagctgagcaacttcaagtcccagaaggtgcttggcctcaacgaagaccccctcaagtggtggtcagaccgcctggccctcttccccctgctgcccaaggtgctgcagaagtactggtgcgtgacggccacgcgcgtcgcccctgagcgtctcttcggatccgccgccaacgtggtcagcgccaagaggaaccggctggctcccgcgcacgtggacgagcaggtgtttctgtatgagaacgcccggagtggggcagaggcggaacccgaggaccaggacgagggggagtggggcctggaccaggagcaggtgttctccttgggggatggcgtcagcggcggtttctttggcattagggacagcagcttcctgtagcgaggaagcgtgttgtcttacaagtcatccccgcagcagcccattggatgctttgctgtaaatacttacccggtcagcttggttttgaacctcagagaccatccactgtctttgacacctagaaggtggaaaaaggaaagagatttgagaagtgagagagggtcgggggcggtggctcctgtctataatcgcagcactttgggaggccgaggtgggcagatcagctgaggtcaggagatcgagaccagcctggccaacatggcgaaaccccgtctctactaaaaatacaaaaattagccaggactgatggcatgtgcctgtaatcccagcttctggaggctgaggccagagaatcgcttgaacctgggaggtggaggttgcagtaagctgagatcgctgcactccagcctgggcgacaagagcgagactctctcaaaaagaaaaaagaagacacaagagaggtggctttgagtgggtttcctttcctcccctattcccggggcccggacgacttctgcttgggaactgccaacgcttctgcttgggaattgcgtgcagcagagcctagaggagctgttccttccttcacagatacttaagacctccaccatgtctgattcgagttctccctgggagggtttagaagaaacgcaggaacattctgggtggcgtcgaaggagcctttcccgatcatcatgtgtgacttctgcgaggtccagatcactgaattcatgtttacattctcgtgcaagcagggacctcttgcttctgagaaatggggaagagaccttttagccaaaatgcccttcttaaaaagagagacctttttttttaatgttcggttaaaaatgtgacagatgagtacaaaaatgcagacacttaacaaaaagcaaacagaaaaaaaagtgtggaatgtgttgtattttcgacaggttgctgccagagagcctgcttcctgctgcctgccgaaatttcactttgcggagttggtccttaaaactgggcggtggccgggcgtggtggctcacgctgaggtcaggagttcgagaccagcctggccaaccaacatggtgaaacctcgtgtctactaaaaatacaagaaactagccagatgcggtggcacccgcctgtaatcccagctactcgggaggctgaggcggaagattcgcttgagcccaggaggtggaggttgcagtgagccaagactacgccactgcactccagcctggaggccagagtgagactccgtctcaaaacaaaacaaaagtgggtggctcacgggtccggaggttatgtcttcggtgtctcagccctaaaagtccagttcccccgtgcggccagcttttccacataaggtgtttttgatttgattaccggaaaggactcttgattcttctcttttaaactgaataccataggggaaatgaattttaaaatattgcccccggaggggttttccgtggctggattcctgcgagttgctttcagtcattcagggaaacagaaagacgttttccaacatgtagaactgctttttaactggaggaaaaatacttcaggaggcttagcatattgcttggattctacgtgcagcgggttctctgcctccgtgaagacaagctgggctggggagaacggtgtctaggagggatgaccccactcagctccaggcagtgttctgccgagaccccaagaactcggggtgtcagagggcaaaggaactacctgcctttcacggctgctgacttctcagggctgcaagcagcacagaatgttatccttacgtcctgagccggtttaagtctgtggaaaaggaagcacgggagaaatccacgtaacctttgctttctttttaagggaagcggttccgccgtgaacttggaaccctcagctccgggtgttctcggcagaagggcagctggaagggacacagtggggcaggctttggggttgctccctgttctgccccgaggccggggacgcagggcagcccacgcctccgtgggctccattctgtagcattgccagcgttctcttcacgtctctaacaatccttcgcttttcctcactcacgtggaaatgtgaactgtcccggctctgtcttcatttttatttttaagccatcgttcccctcctgaacggttgccccttatttaatgctgtaaagttggactgttgttcaataaaccagagcaatgcattagctcctcattcatttgtc

SEQ ID NO: 35455 - DNA, 947 bp, Homo sapiens
  source 1..947: mol_type = unassigned DNA
ctgcgggtctacgcggtaggcgccgcggtgatcctggcgcagctgctgcggcgctgccgcgggggcttcctggagccagcaggtccccacgcatgagcagccgtccagcaggcaggctccggtggagaagcaatggagaataaaagcctggagagctcccagacagacctgaagctggtggcccacccccgcgccaagagcaaggtgtggaagtatttcggcttcgacaccaacgccgagggatgcatcctgcagtggaagaaaatctactgccgcatctgcatggcccagatcgcctactccggaaacacctccaacctgtcctaccacctggagaagaaccaccccgaggaattctgcgagttcgtcaagagcaacacggagcagatgcgtgaagccttcgccaccgccttctccaagctgaagcccgagtcgtcccagcagcccgggcaggacgcgctggccgtcaaggccggccacggctacgacagcaagaagcagcaggagctgacggccgccgtgctgggcctcatctgcgaggggctgtacccagcctccatcgtggacgagcccaccttcaaggtgctgctgaagacggccgacccccggtatgagctgcccagccggaagtacatctctaccaaggccatccctgagaagtacggggccgtccgggaggtgatcctgaaggagctggccgaggccacctggtgtggcatctccaccgacatgtggaggagtgagaatcagaaccgcgcctacgtcacgctggccgcccacttcctgggcctgggcgcccccaactgcctgtccatgggctcccgctgcctgaagaccttcgaggtgcccgaagagaacacggcggagaccatcacgcgagtgctctatgaggtcttcatcgagtggggcatcagcgccaaggtcttcggggccaccaccaactatgg

SEQ ID NO: 35456 - DNA, 5257 bp, Homo sapiens
  source 1..5257: mol_type = unassigned DNA
gcgcagcgtccggcggcgtcgcgggcggcgggcggcggggccgcgggaggggcgcgggggcagacaaagccgcggtaatgaatggagcgtccgcccgcgccgccgtcgtccgcagccggccgggagccgccccagaggccgggccgaggtaatgcacaagggtcacgtgtatgctctcaagatgatcaggcagatcctgtcctcaggaccagaagcacgtctctgctgcacacattgttgtctacaccatgagtgtttagtagcaggactcttggaaagcagtgatctatgctgtaagaccatgagtcacagattctttttttcagtactatttatgattagccatatttctagaaacatcctgaaagatggaattatgacgaaaaagtgaagataatctacattcgggggcacaaatgagcacttggatcagtgttttatgaacctaagatacagccggagtagttatggtcagtcatggagaataacttgaaaacttgtcccaaagaggacggtgatttcgtttctgataaaataaagtttaaaatagaagaggaagatgatgatggaattcctcctgatagtttggaaagaatggactttaaaagcgagcaggaggacatgaagcagacagacagcggtggggagcgagcgggcctcggtgggacgggttgcagctgcaagcccccggggaagtacttgtctgcagagagtgaggatgactatggcgcgctgttctcccagtacagcagcaccctatacgacgtggccatggaggccgtgacccagagcctcctttccagccggaacatgagctccaggaagaagtctccagcctggaagcatttttttatctctccccgagacagcactaaagcaatatgcatgtactgtgtgaaggagttcagcagaggcaaaaacgagaaagacttgagtaccagttgtctcatgaggcacgtgaggcgcgcacacccgaccgtgctcattcaggaaaatggcagtgtgtctgccgtgtcctcgttcccctctccctcactcctgcttccaccacagcctgcggacgcgggtgacctcagcaccatcctctcacccatcaaacttgtccagaaagtggcgtctaagatcccgtcccccgatcgaataacagaggagtctgtgtctgtagtttcttctgaagaaatctcctctgacatgtccgtttcggagaagtgcggcagagaagaagccctggtggggtcgtctccccacctccctgctctccattacgatgaacctgcagagaacttagcggagaagagccttccacttccaaagagcacctctgggtccaggagaaggtccgctgtctggaagcacttctacctgtcgccactggacaactccaaagctgtctgcattcactgcatgaacgagttcagccgggggaagaatgggaaggacctgggcacgagctgcctcatcaggcacatgtggagggcacaccgcgccatcgtgttgcaggagaacgggggcacgggcatcccgccactgtactccacccctcccactctgctgccttccttgctgccgccggagggggagctcagctctgtgtcctcgtctccagtaaagccggtcagagagtccccttcggcctcctcctcccctgacaggctgactgaggacttgcagtctcacttgaaccctggagatgggctgatggaagacgtggcggccttctcatcttccgatgacataggggaggcctcggcgtcctctcctgagaagcagcaggctgatgggctgagtcctagattgtttgaatctggcgccatcttccagcagaataaaaaggtcatgaaaagactgaagtcggaggtctggcatcacttctccctggcccccatggacagcctcaaggccgagtgtcggtactgcggctgtgccatcagccgggggaagaagggtgatgtgggcaccagctgcctgatgagacatctctaccggcgccatccagaagttgtcgggagccagaagggcttcctgggtgcaagtctggcaaactctccgtatgccactttggcctctgcagaaagttcctcttccaaattgactgacttgccaacagtggtcacaaaaaacaatcaagttatgtttcctgttaatagcaaaaagacctcgaagctgtggaatcatttttctatttgctccgcagactccacaaaagtcgtgtgcttgcactgtggccggaccatcagccgggggaagaagccgactaacttgggtaccagctgtcttctgagacatttacagcggttccatagcaacgtgctgaaaactgaggtctcggagacggctcggccctcctctccggacacccgggtgccgcggggcacagaattatcaggcgcttcctcttttgatgacaccaatgagaagttttacgattctcacccagttgccaaaaaaatcacaagtctcatagctgaaatgattgcacttgacctccagccatattcttttgtagacaacgttggctttaacaggctgcttgaatacttgaaacctcagtactccctccccgccccttcctacttctccaggacagctatcccaggtatgtatgataatgtgaagcagataattatgtcccaccttaaggaagctgagagtggtgtgatccacttcacgtctggaatatggatgagtaaccagacccgtgagtacctgaccctcacggcccactgggtttccttcgagtcgccagcccggccgcgctgtgacgaccaccactgctcggcgctgttggacgtgtcgcaggtggactgcgactacagtggcaacagcattcagaagcagctggagtgctggtgggaagcgtgggtgacctccaccggccttcaggtgggcatcaccgtcaccgacaacgccagcatcgggaagacgctgaacgagggggagcactcgagcgtgcagtgcttcagccatacggtgaacctgatcgtcagcgaggccattaagagccagcggatggtgcagaacctgctgagcctcgcccggaagatctgcgagcgggtgcaccggtcgcccaaggcgaaggagaaactggccgagctgcagagggagtacgcgctgcctcagcatcacctcatccaggacgtcccgtccaagtggagcacttccttccacatgctcgagcggctcattgagcagaaaagggccattaacgagatgtccgtcgagtgtaacttccgagagctgatcagctgcgaccagtgggaggtcatgcagtccgtgtgccgtgcgctaaagcccttcgaggctgcgagccgggagatgagcacgcagatgtccaccctcagccaggtcatccccatggtacacatcctcaacaggaaggtggagatgctcttcgaggagacgatgggcatcgacaccatgctgcgctctctgaaggaggccatggtgagccgcctgtctgccaccctccacgacccgcggtacgtcttcgccacgctgctggatcctcgctacaaggcctccctgtttacggaggaggaggcggagcagtacaaacaggatttaatcagggaactcgaactcatgaattctacctcagaggacgtggctgcctcccacaggtgtgatgctggctccccgtcgaaagactctgccgcagaggagaacctgtggtcacttgtggccaaggtgaagaagaaagacccaagagaaaagctgcctgaagccatggtgcttgcgtatctggaggaggaggtgcttgaacacagctgtgacccgctcacctactggaacctgaagaaggcgtcctggccggggctgtccgcgctggccgtcagatttttgggctgccccccaagcatcgtcccttcagaaaagctgttcaacacacccactgagaacggtagccttggccaatccaggctcatgatggaacattttgaaaaacttatctttttgaaagtgaatcttcccttaatatactttcagtattgaaactcacgacggcaccactaggccagaggcgtggctgccccagcgttagcagcctgtaccaggtctatgacccgctctgcccacggctgtgtacgacatcagaccaggcactctcagggccgctctccagctcaccacagtgtctccacgtgccttaccccttctccttcaggccaagtttcgcggggtgttttattaagacgtccactagaaatagcttgtcctgtcaactatgaaatatggtgactagattttaattcataaccgtaaagttttttaaagttttgggttagtaatttgttttactagaatgacaaagaagatgtaaaccattttattctgtaggctttttactcaattatgtacaaaccacaaatcaggtactgtattttagtgaagcattgctttaattgcaacagaatagcttttgtggctatcaaatgaaatctgtaaataggaggtggagggcaagccatcctgactgagcagtttttaaccgcaggttctaaagtgtcccgcggagtacagataatattctggaaggtaactgtttactacgacagagacgtggcatttggaaacgaaacttagatgtttcatggagcttattttgagaactttcccatttcaggtttctgcattcaggctttacatggtcagttaactcagagataccccagctgtttatcatcagctcctctgaaatgtgatccctttgtaactgtgctcatcacttcgccagtgcgttcaatgacacgctgatggcaggtggtccctgctgaaacccccacgcctccgcttcagcatctccacgctctgaagctgtctttcaaaatgtgtgcactgacccccttgtttgatcaaatttgtgtaaaatttttttagaagagatggcttattaacagggaagaagcttgttatattccagttgtaagaatagccttagtgtttagatttttttatgatagggaagatgcggccatcactgggatattttcaaatcccaaggacatcagagtgaagtgtcagttgtcagatgattttaaaagttatgtcttcagagaaaaaaagattcattttctcattttaaaccaattaaatattctgagtgagactaatcactcatttgcctacgaccttttagaaaagttgttttgttgaaatactgtacgtacgcttaatctaaatttgcattgactatgttttagtgtatttataaatggtgaactcagtttctgaaattaaacttcttatttgcaatttt

SEQ ID NO: 35457 - DNA, 4250 bp, Homo sapiens
  source 1..4250: mol_type = unassigned DNA
agcttgtctcaaactccacatacagaaagccaccgaccttattccggtatcctacacccattccccactctcattacactcccacccctggccctcagcgtcggagtcaagagcaacagggacacttccgttctccttgtaggactggtgaaaccgtaatgaagaacacccctaaactcccataatcggtgcggattcctatggggaaggcctatattgttgacatcttccaggccttggttctggaccttgagaaagaggctgtggaactagagatagcgatgctttttagggtaaatgtatgtaggtattgggggaaggggagggatcaatcgaaaaatggaagtggtttaaagttcatatttcactttttgctatctctatagcgtacaacttgtgagttacttacaggctgtaaaagcttctcaagtctaaaaatatctgaaaactaaacttgaattaactcttaatacaaacagtactttgaaaatgcagcatttaaccttgttttaaaatttttttctcaaagcatttttttccagccactcacattttaaaaggttgtattacttttagttagaactgaaagggctcaactagcatttgctgtgaccagtatgcggagtctgtgttggctttccagaattgactttttgggttgtattggcaaatcacagtcctaaatgatgaatgttgaatgatgcactatgtttttgtttaaatgagatttcctgaaaatagttaatttcagaattaagggaaattgatgtcgctatcatgaggcatcataaaaatatgtattttacaaggtgaaggcatttcaagtagatatagttcttgatgaagcaggaagaacatggatctgggatttggaagacctggcttctagctgctactaaccaactctgtgactctgggaaagggggactcagttcttacttctgtaacatgaggacactggactatttgaattcagaacttagaaaattggaagggaccttaaagccctctaagaaagagttcgggaatgttctccattgctgtcagttttcctccaaaaataacctggcttggaagttattggtccagtgggaatttgattccccatagaaactggagaaaaggtaatgcaagtagagaggaacagctgtatttctgcttgagtaataaacccactaacagattctggtacgaattgtggagacataaagagaatgagtgtatgtactctaagtgtaccagtttcttcactctctcctggcagaagatgcaacacttttagtgattctgggattctgggatgtgttcctattaattctaatacagatgaagaagatgtggtagaggaaaagatggtagcagaaggagtgaataaagaggcaaaacagcctgctaaaaagaaaagaaagaagggtttgcgaattaaggggaaaaggcgtcgaaaaaaattgattcttgccaaaaagtttagtaaggatttgggatctgggaggcctgttgcagatgcccctgctttgttagcttccaatgaccctgagcaggatgaagaaagtctttttgagagcaatatagaaaaacagatctatctacctagtactagagccaagacctccattgtgtggcacttctttcatgttgacccccagtacacctggcgggccatttgtaacctctgtgagaaaagcgtcagcaggggtaaaccaggtagccatcttggtacatctactcttcaacgacatctgcaagcaaggcattcacctcattggaccagggccaacaagtttggagttgctagtggagaggaggactttaccttggatgtgtctttatctccctcttctggaagcaatggaagctttgaatatattcctactgatccattagatgataatagaatgggcaagaagcatgataaatcagcatctgatgccctaagggcagaaagagggagatttctcatcaaaagtaacattgtcaagcatgctttaattcctggaactagagccaagacatctgccgtttggaattttttttacactgatcctcagcacatctcaagagctgtgtgtaatatatgtaaaagaagtgtgagccggggtaggccagggtcccacttagggacttcaacacttcaacgacacctgcaagccacacatcctatccattgggctgttgccaacaaagacagtggtgctgttgcaaatggattagatgaagctgagactgagagaagtgatctcttgagtgataccttgcatggagaaaagtctacaggcagccaagatttaacagctgaggaccttagtgactctgattcagatgaacctatgttagaggttgaaaacagatctgaaagtcctattcccgttgcagagcaaggcactctgatgcgtgcgcaggagagagaaacaacatgttgtggaaatccagtctcaagtcacataagtcaggcaattatccaaatgattgtggaggatatgcatccttacaactatttctcaaccccagcctttcagaggttcatgcagattgtggcccctgattataggttgccatcagagacttactttttcactaaggctgtacctcagttatatgattgtgtcagagaaaaaattttcttaactttagagaatgttcaaagccaaaagatacacctgactgttgacatatggacccatgacccatccactgactattttattgtgactgtacactgggtttctttggaaactgcgtcttttctcaataatggcaggatccccgattttagaaagtgggcagtgctttgtgttacaggtttggctaaagactgtttgataaccaatattttacaagaattaaatgaccagattggtctgtggctttctccaaatttccttatccctagcttcattgtttctgacaattcctctaatgtggtacatgcaatcaaagatggtggttttacccatgtgccatgcttcctgcattgtttaaatatggtcattcaggactttttctgcgagcacaaaagcattgagaatatgttagtggctgccaggaaaacttgtcatcattttagtcattcggtcaaggcccgtcagatactgcaagagttccaaaatgatcaccaacttccatggaagaatttgaagcaggacgaaactggccattggatttctactttttatatgttaaaatggctcttggagcattgctactcagttcaccatagtcttggtagagccagtggagttgtgctcacctcccttcagtggactctaatgacttatgtttgtgatattcttaagccatttgaggaggctacccagaaagtgagcgtgaagaccgcaggattgaatcaggtgctacccctaatccatcatctactcctttccctgcagaaactcagagaagattttcaagtcagaggtattactcaggccctcaatctggtggatagtttatctctgaaacttgaaacagataccctactaagtgccatgcttaaatccaagccctgtatcttggctactttgttagatccttgctttaaaaacagtttggaagacttttttcctcaaggtgctgatttagaaacttataagcagttccttgcagaagaggtctgtaattatatggaatcttcaccagagatctgccaaattccaacttcagaagcttcttgtccctcagttacagtgggagctgattcatttacctcatctctaaaagaaggcacctccagttcaggttctgttgatagctcagctgtagacaatgttgcccttggaagcaaaagcttcatgttcccttctgctgtagcagttgtggatgagtacttcaaagagaagtattcagagttctcaggaggtgatgaccctttaatttactggcagaggaagataagcatatggccggctttgacccaggttgccatccagtatctaagttgccccatgtgtagttggcaatctgaatgtatctttactaaaaatagccactttcatccaaaacagatcatgagcctggactttgacaatatagaacaactgatgtttctgaaaatgaacttgaaaaatgttaactacgattattctacgttggttctgagctgggatcctgagcagaatgaagttgttcaaagcagtgaaaaagaaatactgccttaatttctttttctccatttaaaatgggcaactttttgctgtgttactgtatcttaatagctgtagttgttaaatataatcattatctttataaacaca

SEQ ID NO: 35458 - DNA, 5743 bp, Homo sapiens
  source 1..5743: mol_type = unassigned DNA
gccactgagatgaggaggcgtcgcgcgcgcctgtagctcgcgggcctcgcagtttgcttgcctaaactggacttgaagcaatttaaactactggagatctgccattttataatatcacaattggaaagaaacagattttcaaataatggaagagtctaaaaccttaaaaagtgaaaatcatgaaccaaagaagaatgttatttgtgaagaaagcaaagcagttcaagttataggtaatcaaacattgaaagctagaaatgataaatccgtaaaagaaattgagaacagctctccaaataggaatagtagtaaaaaaaataagcaaaatgatatttgtatagaaaaaacagaagttaaatcatgtaaagtaaatgctgccaaccttccaggtcctaaagatttggggttagtccttcgagatcaaagtcattgcaaagcaaaaaaatttcctaattcaccggtgaaagccgaaaaggcaaccatttcacaggcaaaatcagaaaaggcaaccagtttacaggcaaaagcagaaaaatcaccaaagtcacctaattcagtgaaagcagaaaaagcatccagttatcagatgaagtcagaaaaagtaccaagttcaccagcagaagcagaaaagggacccagtttactgttgaaagacatgagacagaagacagaattacaacagattggaaaaaaaattccaagctcctttacttctgtggacaaagtgaatattgaagctgtagggggagaaaaatgtgctctgcaaaactcaccacgatctcagaagcaacagacatgtacagataatactggtgattctgatgatagtgcttcaggaattgaagacgtatcggacgatttaagtaaaatgaagaatgatgaatctaataaagaaaattcttcagagatggactacttagaaaatgccactgtgatagatgaatctgcattgacacctgagcagaggctggggttgaaacaagcagaagaacgcttagaaagagatcacatctttcgacttgaaaaacgatcaccagaatataccaattgtcggtatctatgcaaactttgcttaattcacattgaaaatatccagggggctcataaacatataaaggagaaacgacataagaaaaatattttggaaaaacaagaagaaagtgagcttcgttctctgccacctccttcccctgcccacttggctgctttaagtgttgcagtcattgaattagcaaaagaacatggaataacagatgatgacctcagagtccgtcaggaaattgtggaggaaatgtcaaaggttataacgacatttttaccagaatgttcacttaggttgtatggctcatctctgactagatttgctctgaaaagtagtgatgttaatatagatataaaatttcctcccaagatgaatcatccagatcttctgataaaagtacttgggattttaaagaaaaatgtattatatgtagatgtggaatctgattttcacgctaaagttcctgttgtggtgtgcagagatcgaaaaagtggtttactttgtagagtgagtgcaggaaacgatatggcatgtctcactactgatttacttactgcccttggcaaaatagaacctgtctttattcccttggtgttagcctttcgctactgggctaagttgtgctatattgactcccaaactgatggtggaatcccttcttactgttttgctttaatggtgatgttttttctacaacagagaaaaccccctcttcttccttgcttacttggaagttggattgaaggctttgacccaaaaagaatggatgactttcagctgaagggcatagtagaagagaagtttgtgaagtgggaatgtaattcaagtagtgcaactgagaaaaactcaattgctgaggaaaacaaagctaaggcagaccaaccaaaagatgataccaagaagacagaaacagacaaccaaagtaatgccatgaaggaaaaacatggcaaatctcctttagcattggaaacaccaaatcgggtatccttgggacagttatggttagagctgcttaaattctacacactggattttgctttggaggaatatgtcatatgtgtacggatacaagatattttaacaagagaaaataaaaactggcctaaaaggcgaatagccattgaagatccattttcagtcaagaggaatgttgcacggagcttaaacagccagctggtttacgaatatgttgtggagagatttagggcagcttatcggtattttgcctgtcctcagacgaagggtggaaataagtctacagtggatttcaagaaaagagagaaggggaaaataagcaataagaaaccagtcaagtcgaacaatatggcaaccaatggttgtattctgcttggggaaaccacagaaaaaataaatgcagaaagagagcaacctgttcaatgtgatgaaatggactgtacatcacagagatgtattattgacaacaacaatttgttggtaaatgaactagattttgctgaccacggacaggactcttcatctctttctaccagcaaaagcagtgaaatagagccaaaattagataagaaacaagatgatttagcgccttcagaaacttgtttaaaaaaagagctcagccaatgtaattgcattgatttgtctaagtcgcctgacccagataaatctactggaacagactgcaggtcaaatttagaaacagagagttcacatcagagtgtgtgcaccgacacatctgctacctcttgcaactgcaaagctacagaagatgcttctgaccttaatgatgatgataacctccccacccaggaattatattatgtgtttgataagtttattttaacctctggcaagccaccaacgatagtatgcagcatctgcaaaaaggatggccattcaaagaatgattgcccagaggattttaggaaaattgatttaaaacctctaccaccaatgacaaaccgatttcgggaaatacttgatttagtatgtaaaagatgttttgatgagttatcaccaccttgttctgaacaacacaacagggagcaaattttaattggcttggaaaagtttattcaaaaagaatatgatgaaaaggcaaggttgtgcttatttggctcttctaagaatggatttggatttcgtgatagtgatctggatatttgtatgaccctggaaggccatgaaaatgcagagaaattaaattgtaaggaaataattgaaaatttggcaaaaattcttaagagacatccaggtttaagaaacattttgcctataactactgccaaagtgcctatagtaaaatttgaacacaggcgaagtgggttagaaggcgatatcagtttatataatacgttggctcaacataacacaagaatgctagctacttatgcagctattgatcctagagtgcagtatttgggatatactatgaaagtgtttgctaagcgatgtgacattggggatgcttccaggggaagtttatcttcatatgcatatatccttatggtgctgtactttctgcagcagagaaagccacctgttatcccagttctacaagagatctttgatggaaaacagattccacagagaatggttgatggatggaatgctttcttctttgataaaacagaagaactgaaaaagcgtttaccttcacttggaaagaacacagaatcattaggggagctttggctgggactgcttcgtttctatactgaagagtttgatttcaaggaatatgtaattagcattcggcagaaaaagctgttgacaacttttgagaagcagtggacttccaagtgcattgcaattgaagacccttttgacttgaatcataaccttggtgctggagtttccagaaaaatgaccaatttcatcatgaaagcatttatcaatggaaggaaactttttggtacccctttttatccactcattggcagagaagctgagtacttctttgattccagagtattaacagatggagaactggctcccaatgatagatgttgccgtgtgtgtggaaaaataggccactacatgaaagactgccctaaaaggaaaagcagtttactgtttagactaaagaagaaagacagtgaagaagagaaggaagggaatgaagaagagaaagattcccgagatgttcttgacccccgagacctccacgatactcgagactttagagacccgagagacctcagatgttttatatgtggagatgctggacatgtacgaagggagtgcccagaggtcaagctggcccgtcagaggaatagcagtgtggcagcagcccagctggtccgcaaccttgtaaatgctcaacaggtggctggttcagctcagcaacagggtgatcagtccataaggactagacagtcatcagaatgttctgaatcaccatcttattctcctcagcctcagccatttccacagaactcttcccagtcagctgctattactcagccttcatctcagccaggatcccaacctaagcttggcccacctcagcagggagcccaacctccccatcaggtccagatgccactgtataactttccccagtcaccaccagctcagtattctcccatgcacaatatgggattgttgccaatgcaccctctccagatccctgccccgtcctggcccatccatggcccagtgatccactctgcaccaggcagtgcccccagcaatattggcctaaatgatcccagcatcatctttgcacagcctgctgccagacctgtggcaatccctaacacgtctcacgatggacactggccccgtactgtggctccaaattccctggtaaacagtggtgcagtggggaattcagagccaggctttcgaggactgactcctccaattccttgggaacatgcaccgcgtccccatttcccccttgtcccagcttcgtggccttatggtttgcatcaaaacttcatgcatcagggaaatgcccgattccagcccaacaaacctttctatactcaagacagatgtgccacccgtcggtgtagagagcgttgtccccacccaccaagaggaaacgtgtcggagtaatgcgagtccattttctttcagctggtctaccgatgcacagcaaccagccaatcctgctgtctcaagggtatccgtacctcaatgtcagttacattcagcagaaaaagtgacatttaatggaaagcaaaacaaatcaggtcctgatttaaaattttaacacgtttagatagcttatttaaattctaagactgtttttacagactgtattatttgtatataaatatgaactatagtttttactagtatcaccaaattgagtgatacaaatttcatctattttattaccctatttttaagggaattttatgttttgtttaaccttgatgaattgtataaagagagaatttaaaaaattacattctttattttctattagctgtattcatactttggttgcttcagactttatatattgttcttaaaagttaggaaagaatttcatgtgttttaaattgtcacttctattctttacagaaccttgtagtgccaaaaactttttaaaaggtaaaaaaataaaataaaattacaacatgaagattcagattttttttcttttccatacttgtatattgaacattcaaacttgaatggaaagttgattttgtctgtatttgaagtacttctattttaagttaataaatctttttgacaagagttaaa

SEQ ID NO: 35459 - DNA, 5858 bp, Homo sapiens
  source 1..5858: mol_type = unassigned DNA
cacaatgcagttcgcggcgcggcggacatggcggtggagtcctgagctagtcgtgtcccggcctccagcggcggcagcggcgacggcggcggcagcaggaggcggagggagagcaggagccactgagatgaggaggcgtcgcgcgcgcctgtagctcgcgggcctcgcagtttgcttgcctaaactggacttgaagcaatttaaactactggagatctgccattttataatatcacaattggaaagaaacagattttcaaataatggaagagtctaaaaccttaaaaagtgaaaatcatgaaccaaagaagaatgttatttgtgaagaaagcaaagcagttcaagttataggtaatcaaacattgaaagctagaaatgataaatccgtaaaagaaattgagaacagctctccaaataggaatagtagtaaaaaaaataagcaaaatgatatttgtatagaaaaaacagaagttaaatcatgtaaagtaaatgctgccaaccttccaggtcctaaagatttggggttagtccttcgagatcaaagtcattgcaaagcaaaaaaatttcctaattcaccggtgaaagccgaaaaggcaaccatttcacaggcaaaatcagaaaaggcaaccagtttacaggcaaaagcagaaaaatcaccaaagtcacctaattcagtgaaagcagaaaaagcatccagttatcagatgaagtcagaaaaagtaccaagttcaccagcagaagcagaaaagggacccagtttactgttgaaagacatgagacagaagacagaattacaacagattggaaaaaaaattccaagctcctttacttctgtggacaaagtgaatattgaagctgtagggggagaaaaatgtgctctgcaaaactcaccacgatctcagaagcaacagacatgtacagataatactggtgattctgatgatagtgcttcaggaattgaagacgtatcggacgatttaagtaaaatgaagaatgatgaatctaataaagaaaattcttcagagatggactacttagaaaatgccactgtgatagatgaatctgcattgacacctgagcagaggctggggttgaaacaagcagaagaacgcttagaaagagatcacatctttcgacttgaaaaacgatcaccagaatataccaattgtcggtatctatgcaaactttgcttaattcacattgaaaatatccagggggctcataaacatataaaggagaaacgacataagaaaaatattttggaaaaacaagaagaaagtgagcttcgttctctgccacctccttcccctgcccacttggctgctttaagtgttgcagtcattgaattagcaaaagaacatggaataacagatgatgacctcagagtccgtcaggaaattgtggaggaaatgtcaaaggttataacgacatttttaccagaatgttcacttaggttgtatggctcatctctgactagatttgctctgaaaagtagtgatgttaatatagatataaaatttcctcccaagatgaatcatccagatcttctgataaaagtacttgggattttaaagaaaaatgtattatatgtagatgtggaatctgattttcacgctaaagttcctgttgtggtgtgcagagatcgaaaaagtggtttactttgtagagtgagtgcaggaaacgatatggcatgtctcactactgatttacttactgcccttggcaaaatagaacctgtctttattcccttggtgttagcctttcgctactgggctaagttgtgctatattgactcccaaactgatggtggaatcccttcttactgttttgctttaatggtgatgttttttctacaacagagaaaaccccctcttcttccttgcttacttggaagttggattgaaggctttgacccaaaaagaatggatgactttcagctgaagggcatagtagaagagaagtttgtgaagtgggaatgtaattcaagtagtgcaactgagaaaaactcaattgctgaggaaaacaaagctaaggcagaccaaccaaaagatgataccaagaagacagaaacagacaaccaaagtaatgccatgaaggaaaaacatggcaaatctcctttagcattggaaacaccaaatcgggtatccttgggacagttatggttagagctgcttaaattctacacactggattttgctttggaggaatatgtcatatgtgtacggatacaagatattttaacaagagaaaataaaaactggcctaaaaggcgaatagccattgaagatccattttcagtcaagaggaatgttgcacggagcttaaacagccagctggtttacgaatatgttgtggagagatttagggcagcttatcggtattttgcctgtcctcagacgaagggtggaaataagtctacagtggatttcaagaaaagagagaaggggaaaataagcaataagaaaccagtcaagtcgaacaatatggcaaccaatggttgtattctgcttggggaaaccacagaaaaaataaatgcagaaagagagcaacctgttcaatgtgatgaaatggactgtacatcacagagatgtattattgacaacaacaatttgttggtaaatgaactagattttgctgaccacggacaggactcttcatctctttctaccagcaaaagcagtgaaatagagccaaaattagataagaaacaagatgatttagcgccttcagaaacttgtttaaaaaaagagctcagccaatgtaattgcattgatttgtctaagtcgcctgacccagataaatctactggaacagactgcaggtcaaatttagaaacagagagttcacatcagagtgtgtgcaccgacacatctgctacctcttgcaactgcaaagctacagaagatgcttctgaccttaatgatgatgataacctccccacccaggaattatattatgtgtttgataagtttattttaacctctggcaagccaccaacgatagtatgcagcatctgcaaaaaggatggccattcaaagaatgattgcccagaggattttaggaaaattgatttaaaacctctaccaccaatgacaaaccgatttcgggaaatacttgatttagtatgtaaaagatgttttgatgagttatcaccaccttgttctgaacaacacaacagggagcaaattttaattggcttggaaaagtttattcaaaaagaatatgatgaaaaggcaaggttgtgcttatttggctcttctaagaatggatttggatttcgtgatagtgatctggatatttgtatgaccctggaaggccatgaaaatgcagagaaattaaattgtaaggaaataattgaaaatttggcaaaaattcttaagagacatccaggtttaagaaacattttgcctataactactgccaaagtgcctatagtaaaatttgaacacaggcgaagtgggttagaaggcgatatcagtttatataatacgttggctcaacataacacaagaatgctagctacttatgcagctattgatcctagagtgcagtatttgggatatactatgaaagtgtttgctaagcgatgtgacattggggatgcttccaggggaagtttatcttcatatgcatatatccttatggtgctgtactttctgcagcagagaaagccacctgttatcccagttctacaagagatctttgatggaaaacagattccacagagaatggttgatggatggaatgctttcttctttgataaaacagaagaactgaaaaagcgtttaccttcacttggaaagaacacagaatcattaggggagctttggctgggactgcttcgtttctatactgaagagtttgatttcaaggaatatgtaattagcattcggcagaaaaagctgttgacaacttttgagaagcagtggacttccaagtgcattgcaattgaagacccttttgacttgaatcataaccttggtgctggagtttccagaaaaatgaccaatttcatcatgaaagcatttatcaatggaaggaaactttttggtacccctttttatccactcattggcagagaagctgagtacttctttgattccagagtattaacagatggagaactggctcccaatgatagatgttgccgtgtgtgtggaaaaataggccactacatgaaagactgccctaaaaggaaaagtttactgtttagactaaagaagaaagacagtgaagaagagaaggaagggaatgaagaagagaaagattcccgagatgttcttgacccccgagacctccacgatactcgagactttagagacccgagagacctcagatgttttatatgtggagatgctggacatgtacgaagggagtgcccagaggtcaagctggcccgtcagaggaatagcagtgtggcagcagcccagctggtccgcaaccttgtaaatgctcaacaggtggctggttcagctcagcaacagggtgatcagtccataaggactagacagtcatcagaatgttctgaatcaccatcttattctcctcagcctcagccatttccacagaactcttcccagtcagctgctattactcagccttcatctcagccaggatcccaacctaagcttggcccacctcagcagggagcccaacctccccatcaggtccagatgccactgtataactttccccagtcaccaccagctcagtattctcccatgcacaatatgggattgttgccaatgcaccctctccagatccctgccccgtcctggcccatccatggcccagtgatccactctgcaccaggcagtgcccccagcaatattggcctaaatgatcccagcatcatctttgcacagcctgctgccagacctgtggcaatccctaacacgtctcacgatggacactggccccgtactgtggctccaaattccctggtaaacagtggtgcagtggggaattcagagccaggctttcgaggactgactcctccaattccttgggaacatgcaccgcgtccccatttcccccttgtcccagcttcgtggccttatggtttgcatcaaaacttcatgcatcagggaaatgcccgattccagcccaacaaacctttctatactcaagacagatgtgccacccgtcggtgtagagagcgttgtccccacccaccaagaggaaacgtgtcggagtaatgcgagtccattttctttcagctggtctaccgatgcacagcaaccagccaatcctgctgtctcaagggtatccgtacctcaatgtcagttacattcagcagaaaaagtgacatttaatggaaagcaaaacaaatcaggtcctgatttaaaattttaacacgtttagatagcttatttaaattctaagactgtttttacagactgtattatttgtatataaatatgaactatagtttttactagtatcaccaaattgagtgatacaaatttcatctattttattaccctatttttaagggaattttatgttttgtttaaccttgatgaattgtataaagagagaatttaaaaaattacattctttattttctattagctgtattcatactttggttgcttcagactttatatattgttcttaaaagttaggaaagaatttcatgtgttttaaattgtcacttctattctttacagaaccttgtagtgccaaaaactttttaaaaggtaaaaaaataaaataaaattacaacatgaagattcagattttttttcttttccatacttgtatattgaacattcaaacttgaatggaaagttgattttgtctgtatttgaagtacttctattttaagttaataaatctttttgacaagagttaaa

SEQ ID NO: 35460 - DNA, 883 bp, Homo sapiens
  source 1..883: mol_type = unassigned DNA
ggcgcggcggacatggcggtggagtcctgagctagtcgtgtcccggcctccagcggcggcagcggcgacggcggcggcagcaggaggcggagggagagcaggagccactgagatgaggaggcgtcgcgcgcgcctgtagctcgcgggcctcgcagacagagtcttgctctgttgcctaggctggagtgcagtggcatgattgcagctcactgtagccttcacctcccaagtgcaagtgatcctcccacttcagcctcctgagactgggactacagagccagctgactatgcaacaagatgactatgcaacaagatgaatgaggagatatctacagcaggcttattgcttggaaatttcagaataccaaagcaaagagatcatcctagaagttttcttagagaaaaaaacagcctgaacgacagagcaagaccatgtctcaagaaagaagaagaagaaaaagattactcaaaatgaaaacctgtcaattttctgagcctgggactctccgggtacattgatctatattagtttgcttgcctaaactggacttgaagcaatttaaactactggagatctgccattttataatatcacaattggaaagaaacagattttcaaataatggaagagtctaaaaccttaaaaagtgaaaatcatgaaccaaagaagaatgttatttgtgaagaaagcaaagcagttcaagttataggtaatcaaacattgaaagctagaaatgataaatccgtaaaagaaattgagaacagctctccaaataggaatagtagtaaaaaaaataagcaaaatgatatttgtatagaaaaaacagaagttaaatcatgtaaagtaaatgctgccaaccttccaggtcctaaagatttgggg

SEQ ID NO: 35461 - DNA, 539 bp, Homo sapiens
  source 1..539: mol_type = unassigned DNA
ccctcctcgcgagctaacgagtgtctctcgcgcgctcccttccctccgcgtgggtttcgcggcgcggcggacatggcggtggagtcctgagctagtcgtgtcccggcctccagcggcggcagcggcgacggcggcggcagcaggaggcggagggagagcaggagccactgagatgaggaggcgtcgcgcgcgcctgtagctcgcgggcctcgcagtttgcttgcctaaactggacttgaagcaatttaaactactggagatctgccattttataatatcacaattggaaagaaacagattttcaaataatggaagagtctaaaaccttaaaaagtgaaaatcatgaaccaaagaagaatgttatttgtgaagaaagcaaagcagttcaagttataggtaatcaaacattgaaagctagaaatgataaatccgtaaaagaaattgagaacagctctccaaataggaatagtagtaaaaaaaataagcaaaatgatatttgtatagaaaaaacagaagttaaatcatgtaaagtaaatgct

SEQ ID NO: 35462 - DNA, 2231 bp, Homo sapiens
  source 1..2231: mol_type = unassigned DNA
agaggataaaagccgccgcggctgccttaggaacggcgctgcctcgtctctgctacccctggttgggcggccctgcgaagcagctccttcgggcagccccgggtcgcttagcggccaaggaggcttcagttctttgccgcctgcaaggcggagaccagaaggcggaatccacagctggcgacgcgggagcatctgctgtccaccagcggagcacaggccatcaaagccgcatctgaacttgaattctgtgcagctgattgcagagctggacccggatctgcgaccccctgtggacagaggttgaccgtaccccggagaggagctttctcacggagggcactggttgcagaggctggaagtgaaataaagacgcgctcttgtttcagagttcgtcccctgctgagataggaaggcagagccacctcctctcctctcccacctgcagattaagcttttctaaaaagcctaggcatcttcttatattcagataccctatcgtcgtcagtcatggctagcatcattgcacgtgtcggtaacagccggcggctgaatgcacccttgccgccttgggcccattccatgctgaggtccctggggagaagtctcggtcctataatggccagcatggcagacagaaacatgaagttgttctcggggagggtggtgccagcccaaggggaagaaacctttgaaaactggctgacccaagtcaatggcgtcctgccagattggaatatgtctgaggaggaaaagctcaagcgcttgatgaaaacccttaggggccctgcccgcgaggtcatgcgtgtgcttcaggcgaccaaccctaacctaagtgtggcagatttcttgcgagccatgaaattggtgtttggggagtctgaaagcagtgtgactgcccatggtaaattttttaacaccctacaagctcaaggggagaaagcctccctttatgtgatccgtttagaggtgcagctccagaacgctattcaggcaggcattatagctgagaaagatgcaaaccggactcgcttgcagcagctccttttaggcggtgagctgagtagggacctccgactcagacttaaggattttctcaggatgtatgcaaatgagcaggagcggcttcccaactttctggagttaatcagaatggtaagggaggaagaggattgggatgatgcttttattaaacggaagcgtccaaaaaggtctgagtcaatggtggagagggcagtcagccctgtggcatttcagggctccccaccgatagtgatcggcagtgctgactgcaatgtgatagagatagatgataccctcgacgactccgatgaggatgtgatcctggtggagtctcaggaccctccacttccatcctggggtgcccctcccctcagagacagggccagacctcaggatgaagtgctggtcattgattccccccacaattccagggctcagtttccttccaccagtggtggttctggctataagaataacggtcctggggagatgcgtagagccaggaagcgaaaacacacaatccgctgttcgtattgtggtgaggaaggccactcaaaagaaacctgtgacaacgagagtgacaaggcccaggtttttgagaatttgatcatcactctccaggagctgacccatactgagatggagaggtcaagagtggcccctggcgaatacaatgacttctctgagccactgtaagggaccacccccaggtttcagtgaacccttacctatattcagcatccagtagtgggaaaactggggtgggggtgggggtgggacttctaactgcatgaattaatccacaaagcggctatcttttggggtggagtagaaagggtcttggataccagcacattggagggagatagcctgacctctgtccttgctccttctccctgcagcctacgggtctgttttctgtgtgtgcccatttccttgacagctttattctttgtgaaagtggtataatttattgttaaatatttgaacaataaaaaaggtacaaaaagtgaagtacaaattacccaaatctctccacccttatataatcattgtcaaccctttgatgagtgatatttccctatacctatgtacccagatagatatatgcatagataaaagtgatgaaatataagtgctgttctatctgtattttttcaccaaacaatatatgttgtgagcttctatgtcaataaatatatatatcagca

SEQ ID NO: 35463 - DNA, 2785 bp, Homo sapiens
  source 1..2785: mol_type = unassigned DNA
ggctttcgggacggcggcgggaagatggcggcctccaggaatgggtttgaagccgtggaggcagagggcagcgcagggtgccggggaagctcgggaatggaggtggtgcttcctttggatcctgccgtccccgccccgctgtgccctcacggacccactcttctgtttgtaaaggtgacccaagggaaagaagaaactcggaggttttatgcctgttcagcctgtagagatagaaaagactgtaatttttttcagtgggaagatgaaaagttgtcaggagctagacttgctgcccgagaagctcataaccgaagatgtcagcctcccctgtcccgaacgcagtgtgtggaaaggtacttgaagtttattgagttgcccttgactcagagaaagttttgtcaaacatgtcagcagttgttgttaccagatgactgggggcaacatagtgagcatcaggttctgggtaatgtgtccattacccagttaagaaggcccagtcaactcctttatccactggaaaacaagaagacaaatgcccagtatctgtttgctgatcggagctgtcagttcttggtagacttactttctgccctcggattcagaagagtactgtgtgttggaacaccaaggttgcatgagctgatcaagttgacagcatcaggtgacaagaagtctaacattaaaagccttttattggatattgattttcggtattcacagttttatatggaagatagcttttgccattataatatgtttaaccatcatttctttgatggaaagactgcccttgaagtatgcagagcatttttacaggaagataaaggcgaaggaatcattatggtgacggatcctccgtttggtggcttggttgaacctctggctattacattcaagaagttaattgctatgtggaaagaaggtcaaagccaagatgacagtcacaaagaactacccattttctggattttcccctatttttttgaatcccgaatttgtcagttttttccaagcttccagatgctggattaccaggtagattatgataatcatgcactttataaacacggaaagacaggtcgaaaacagtctcccgtgcgtattttcaccaacattccgcccaacaaaataatccttcctactgaagaagggtacagattttgctctccgtgtcaacggtatgtttctctagagaatcaacactgtgagctctgtaattcttgcacatccaaggatggcaggaaatggaaccattgctttctctgtaaaaagtgtgtaaagccttcctggatccactgtagcatctgcaatcactgtgctgttccagatcattcttgtgagggccccaaacatggctgctttatttgtggtgaactggatcataaacgcagtacttgtcctaacattgctacatctaagagagctaacaaagctgtcagaaagcagaagcaaagaaaaagtaataagatgaaaatggagaccacgaaaggacaatccatgaatcatacatctgctacaaggagaaagaaaaggagggaaagagcccatcaatatcttggctcttaaatgtccagtgactggagaataagaaagatttatggtccaacctttgatgccattttctgaaagtgccacactggacttaaattcagctgcttccagaggtgtgcacctttctgagctagataacaggcaggtggcatttgctggtttacagtcccttatctgcctctctggagacatggggagttgttccatcttcagccagtttactagttctttcagcattcatttttcctcactttaagtctctcccagtcacattgttctatttttatgttttcattttttttgagatggagtcttgctctgtctcccaggctagagtgcaatggcacaacctcagctcactgcaacctctgcctcccgggttcaagcaattctcctgccttagcctcctgagtagctggaattataggcacatgccaccacgactggctaatttttgtatttttagtagagacggggtttcaccatgttggccaggctggtctcgaactcctggcctcaagtgatttgcctgccttggcctcccaaagtgctgggattacaggcatgagccacctcacccagctccggtcacattattctagcctttttatccaaaaaatgggcagaccattcttttgcagaagatgtcagaagaaaatgaaagtgaaaacctatgcagtttgtttaccgtgaacataaaagtatgttaatttaaataggaaaatattttatgttaaatatgaaacaatagtttaaaccccacttgaaaagtatagcgtacaattatttttagactgaatttgaagatgatggaaagggtttttacaaaggcactgtttagatatacagattataattataattacattattattaaatatttattcttcaagtactttttgcagttgtcctctgacggtctagaatcacttaaatgcttgttgaatgagtgagatgtttagaactacgacttgctctgtcattccagtgtcgtttaacctatgcagtaagattctgtctttgtaaaagtagttcgtagcagaagccaggatagtttggtaattaaacgcccaaactaaactcctcattcctacccttaatatttcctggctgtatgatcttggccaggtcactctctaaaagccccggtttcttcattattatcattattataatggggagaataacagctatacctgaggtttgttttgtgattaaattaaatgagacccaa

SEQ ID NO: 35464 - DNA, 938 bp, Homo sapiens
  source 1..938: mol_type = unassigned DNA
ctccaggaatgggtttgaagccgtggaggcagagggcagcgcagggtgccggggaagctcgggaatggaggtggtgcttcctttggatcctgccgtccccgccccgctgtgccctcacggacccactcttctgtttgtaaaggtgacccaagggaaagaagaaactcggaggttttatgcctgttcagcctgtagagatagaaaagactgtaatttttttcagtgggaagatgaaaagttgtcaggagctagacttgctgcccgagaagctcataaccgaagatgtcagcctcccctgtcccgaacgcagtgtggaaggtacttgaagtttattgagttgcccttgactcagagaaagttttgtcaaacatgtcagcagttgttgttaccagatgactgggggcaacatagtgagcatcagttctgggtatgtgtcattaccagttaagaaggcccagtcaactcctttatccactggaaaacaagaagacaaatgcccagtatctgtttgctgatcggagctgtcagttcttggtagacttactttctgccctcggattcagaagagtactgtgtgttggaacaccaaggttgcatgagctgatcaagttgacagcatcaggtgacaagaagtctaacattaaaagccttttattggatattgattttcggtattcacagttttatatggaagatagcttttgccattataatatgtttaaccatcatttctttgatggaaagactgcccttgaagtatgcagagcatttttacaggaagataaaggcgaaggaatcattatggtgacggatcctccgtttggtggcttggttgaacctctggctattacattcaagaagttaattgctatgtggaaagaaggtcaaagccaaggtgtataatttattactgcaaaataaatacatatctatatatc

SEQ ID NO: 35465 - DNA, 2283 bp, Homo sapiens
  source 1..2283: mol_type = unassigned DNA
gggcgccagcaggaagtgggagaagaggcgacccaaggcgggctggcgggctggcggcagtcgctacttgcctagtagcctcagccgctgtgggctcctggggagatggaggggccggggctgggctcgcagatacggaatttttgaacgatgtaaagagttggtagaagcaggatatgatgtcaggcaaccagataaagaaaatgtgtcgcttcttcattgggctgctattaacaacagactggatcttgtaaagttttatatttcaaaaggtgctgttgtagatcagttgggtggagatttaaattcaactcctcttcactgggccatccgacaaggacatttacctatggtcatattattactccagcatggtgcagaccccactcttattgatggagagggattcagcagcatccacctggcagtattgtttcaacacatgcctattatagcatatctcatctcaaagggacagagtgtgaatatgacagatgtaaatgggcagacacctctcatgttatcagctcacaaagtaattgggccagaaccaactggatttcttttaaagtttaatccttctctcaatgtggttgataaaatacaccaaaacactccacttcactgggcagttgcagcaggaaatgttaatgcagttgataagcttttggaagctggttctagcctggatatccagaatgttaagggagaaacacctcttgatatggctctacaaaacaaaaatcagctcattattcatatgctaaaaacagaagccaaaatgagagccaaccaaaagttcagactttggaggtggctgcagaaatgcgagctcttcctgctgctgatgctttctgtgattaccatgtgggctattggatacatattggacttcaattcagattcttggcttttaaaaggatgtcttctagtaacactgttttttctgacatctttgtttccaaggttcttggttgggtataagaaccttgtatacttaccaacagcctttctgctaagttctgttttttggatatttatgacttggttcatcttattttttcctgatttagcaggagcccctttctatttcagtttcattttcagcatagtagcctttctatactttttctataagacttgggcaactgatccaggcttcactaaggcttctgaagaagaaaagaaagtgaatatcatcacccttgcagaaactggctctctggacttcagaacattttgtacatcatgtcttataaggaagccattaaggtcactccactgccatgtatgcaactgctgtgtggctcgatatgatcaacactgcctgtggactggacggtgcataggttttggcaaccatcactattacatattcttcttgtttttcctttccatggtatgtggctggattatatatggatctttcatctatttgtccagtcattgtgccacaacattcaaagaagatggattatggacttacctcaatcagattgtggcctgttccccttgggttttatatatcttgatgctagcaactttccatttctcatggtcaacatttttattattaaatcaactctttcagattgcctttctgggcctgacctcccatgagagaatcagcctgcagaagcagagcaagcatatgaaacagacgttgtccctcaggaagacaccatacaatcttggattcatgcagaacctggcagatttctttcagtgtggctgctttggcttggtgaagccctgtgtggtagattggacatcacagtacaccatggtctttcacccagccagggagaaggttcttcgctcagtatgaagaaaagcaacccaaaactctcaatctgatttgtttttgtttatgtcgatgccctgtagtttgaaagtgaagtaaagatttagaattcacctaagtccaaaggaaaacacgtggtttttaaagccattaggtaaaaaaagttctcaataaaggcattacaattttttaggtttagaaagatggacttttctgataaatcttggcagacatctaaaaaaaaaaccatatttttcacaagaaaatgcaagttactttttttggaaataatactcactgattatggataaaatggaatattttcagatactatattggctgtttcaaaatagtactattctttaaacttgtaatttttgctaagttatttgtctttgttgtatctataaatatgtaaaaaatatttaaatagatgtacctgttttgctttcacacttaataaaaaatttttttttgta

SEQ ID NO: 35466 - DNA, 2445 bp, Homo sapiens
  source 1..2445: mol_type = unassigned DNA
gcagcggcggaggtgagggcgccagcaggaagtgggagaagaggcgacccaaggcgggctggcgggctggcggcagtcgctacttgcctagtagcctcagccgctgtgggctcctggggagatggaggggccggggctgggctcgcagtgcaggaatcacagccatggcccccaccctccaggatttggtcgatatggcatctgtgcacatgaaaacaaagaacttgccaatgcaagagaagctcttcctcttatagaggactctagtaactgtgacattgtcaaagctactcaatacggaatttttgaacgatgtaaagagttggtagaagcaggatatgatgtcaggcaaccagataaagaaaatgtgtcgcttcttcattgggctgctattaacaacagactggatcttgtaaagttttatatttcaaaaggtgctgttgtagatcagttgggtggagatttaaattcaactcctcttcactgggccatccgacaaggacatttacctatggtcatattattactccagcatggtgcagaccccactcttattgatggagagggattcagcagcatccacctggcagtattgtttcaacacatgcctattatagcatatctcatctcaaagggacagagtgtgaatatgacagatgtaaatgggcagacacctctcatgttatcagctcacaaagtaattgggccagaaccaactggatttcttttaaagtttaatccttctctcaatgtggttgataaaatacaccaaaacactccacttcactgggcagttgcagcaggaaatgttaatgcagttgataagcttttggaagctggttctagcctggatatccagaatgttaagggagaaacacctcttgatatggctctacaaaacaaaaatcagctcattattcatatgctaaaaacagaagccaaaatgagagccaaccaaaagttcagactttggaggtggctgcagaaatgcgagctcttcctgctgctgatgctttctgtgattaccatgtgggctattggatacatattggacttcaattcagattcttggcttttaaaaggatgtcttctagtaacactgttttttctgacatctttgtttccaaggttcttggttgggtataagaaccttgtatacttaccaacagcctttctgctaagttctgttttttggatatttatgacttggttcatcttattttttcctgatttagcaggagcccctttctatttcagtttcattttcagcatagtagcctttctatactttttctataagacttgggcaactgatccaggcttcactaaggcttctgaagaagaaaagaaagtgaatatcatcacccttgcagaaactggctctctggacttcagaacattttgtacatcatgtcttataaggaagccattaaggtcactccactgccatgtatgcaactgctgtgtggctcgatatgatcaacactgcctgtggactggacggtgcataggttttggcaaccatcactattacatattcttcttgtttttcctttccatggtatgtggctggattatatatggatctttcatctatttgtccagtcattgtgccacaacattcaaagaagatggattatggacttacctcaatcagattgtggcctgttccccttgggttttatatatcttgatgctagcaactttccatttctcatggtcaacatttttattattaaatcaactctttcagattgcctttctgggcctgacctcccatgagagaatcagcctgcagaagcagagcaagcatatgaaacagacgttgtccctcaggaagacaccatacaatcttggattcatgcagaacctggcagatttctttcagtgtggctgctttggcttggtgaagccctgtgtggtagattggacatcacagtacaccatggtctttcacccagccagggagaaggttcttcgctcagtatgaagaaaagcaacccaaaactctcaatctgatttgtttttgtttatgtcgatgccctgtagtttgaaagtgaagtaaagatttagaattcacctaagtccaaaggaaaacacgtggtttttaaagccattaggtaaaaaaagttctcaataaaggcattacaattttttaggtttagaaagatggacttttctgataaatcttggcagacatctaaaaaaaaaaccatatttttcacaagaaaatgcaagttactttttttggaaataatactcactgattatggataaaatggaatattttcagatactatattggctgtttcaaaatagtactattctttaaacttgtaatttttgctaagttatttgtctttgttgtatctataaatatgtaaaaaatatttaaatagatgtacctgttttgctttcacacttaataaaaaatttttttttgta

SEQ ID NO: 35467 - DNA, 897 bp, Homo sapiens
  source 1..897: mol_type = unassigned DNA
tcttcgagccaaagatgcggcgaggctggaagatggctctgtctggggggctgcggtgctgccgccgggtactgtcctgggtgccagtgctcgttattgtcctcgtcgtgctctggtcctactatgcctacgtctttgaactctgcctggtgactgttttgagcccagcagaaaaagttatttacctcatactctaccatgccatctttgtgttctttacctggacctactggaagtctatctttacactcccacagcagccaaaccagaagttccacttgtcctacacagacaaggagcgctatgaaaatgaagaaagacctgaggtccagaagcagatgcttgttgatatggccaaaaagctaccggtttacacaagaactggaagtggagctgtacgattctgtgaccggtgtcatctgatcaagccagaccgctgccaccactgctctgtctgtgctatgtgtgtgttaaaaatggatcatcactgcccttgggggaattacccagtgttcgctctaagttccatgtcctttttcttctctttgtggcctgcatgttttttgtcagccttgtgattctctttggttaccattgttggcttgtcagcagaaacaaaaccaccttagaggccttctgcactccagtgtttacaagtggcccagagaaaaatgggttcaaccttggcttcatcaagaatatccagcaggtgtttggagataagaagaagttctggttaatacctattggttccagccctggtgatggacactccttccctatgaggtctatgaatgagtcacagaacccactgctagcaaatgaagaaacctgggaagacaacgaggatgacaaccaagattatccagaaggctcatcatctcttgctgtggaaac

SEQ ID NO: 35468 - DNA, 5796 bp, Homo sapiens
  source 1..5796: mol_type = unassigned DNA
cacccttccgctccaacatggctagttcctcaacgccgtgactcaagcctgttgtgccaggcagggcgcactcagcagcgcagccccacaggtggcgaaggctccgcgagagggttcccgccaggctagacagtggagtgccgcacagcgcgccttccagcctcgcagccgccaccctagcggttccgacccggcgccagcaggcctgcttggtcgatcttcgagccaaagatgcggcgaggctggaagatggctctgtctggggggctgcggtgctgccgccgggtactgtcctgggtgccagtgctcgttattgtcctcgtcgtgctctggtcctactatgcctacgtctttgaactctgcctggtgactgttttgagcccagcagaaaaagttatttacctcatactctaccatgccatctttgtgttctttacctggacctactggaagtctatctttacactcccacagcagccaaaccagaagttccacttgtcctacacagacaaggagcgctatgaaaatgaagaaagacctgaggtccagaagcagatgcttgttgatatggccaaaaagctaccggtttacacaagaactggaagtggagctgtacgattctgtgaccggtgtcatctgatcaagccagaccgctgccaccactgctctgtctgtgctatgtgtgtgttaaaaatggatcatcactgcccttgggttaataactgcattggattttccaactacaaattcttccttcaattcttagcttactctgttctctactgcctgtacattgctacgacagtcttcagctatttcatcaaatactggagaggggaattacccagtgttcgctctaagttccatgtcctttttcttctctttgtggcctgcatgttttttgtcagccttgtgattctctttggttaccattgttggcttgtcagcagaaacaaaaccaccttagaggccttctgcactccagtgtttacaagtggcccagagaaaaatgggttcaaccttggcttcatcaagaatatccagcaggtgtttggagataagaagaagttctggttaatacctattggttccagccctggtgatggacactccttccctatgaggtctatgaatgagtcacagaacccactgctagcaaatgaagaaacctgggaagacaacgaggatgacaaccaagattatccagaaggctcatcatctcttgctgtggaaacggaaacatagcagttttcacatttcctgcatctctcagacaggactcaccatctctgcctcccatgaggcttacagagttcaatgttggaaatcattgtaatcttcaaaataagtcaccgtgttggattgaaagcttcaaaatttgaaagaattccatcaaatacttgctgtgtaaatgtttctggactttatgttatttaatttactgactgaaatccaatttggaatttggtagcagttaattcaagccaattttttttgtttcttcatttcccctcccccaatccatgaaagcctaaatgtaaaatatatcttttcattcatcttatcaggtaaaaggaaattcagaaaatttccttagagtctttaattcccccacaaagattattaatcacatatatagggcctttttggtgttgaagggaatcaaactacatttgctgcttgtgtgcgtgtgcatttgtgaacacgtacagcatatctatacaaaattctgctatagtgtgaaaatcagggctaaaaacctgaagcctttgtttaattatgcttttcctctaaatagcaacttaaatatttgctagactttgaatcatcgctatatcaagtatctaaaatttgggagggtgaatcagtacactgtgaccaaggtcctcaaattggaatttgaacaacaatgtaaaacctgttctgtcacaaatgttcctgaaagcaccacagctactcaagaagatcaaattcaggacataaactttattgaacataataaccagtgttttttaaagacttttttgtcagggtgcagtaaaattctccaattacttttattcatttatctgcttcctagttttattttagcctttatgagttattttatgatgaaagaaaatctataagcctaagttatggcccataggttttgttaagggttttcagagtgattttcaggtttaatttcactgcctttcataagggtaaagtttcacagctgacattagcctgaggattagcactaaagagctgtgttttcatagcaggggctattgtacagacagtgataaccaaatagtaatatgccagttctttcttctttttttagcttcagtagtagctaagccattaatacagtttgcatcaatttccccatttatttataatcagcctttcttttagtcctagtgcctgaatcaatgagtgagaatactagtactgattctttacaataataatatcttaagagtattgatatctttcattttttcatccagcagtctagtgcccagctgctgacaataaaagctccaactcttttagagatcagtggaatttagaagcatcttacaggtatcaaggaattgagcttctagagggatggtttggcttactaatttatcttccctgaaatatgtttgagtaaaaaagagttgcctgccacaatttagtgttggggttccagtggagctgagaaagtgaacaatccagctacttaaagcaacaacaaaacctgttcatctggatccctaggtaattttgaccaaggtgagacttttggcataaattaaatggattgtggtcagcattacatttgagagaatactagacatgactacacttattagggctagtgactttctcaaactcagaagctaaaaagcagcctagatgactatgcacacactgggtttcaagatgaaatcttcttatatattcagatggaaaaaaatttccccttacactctttctcaaaatactctcatttcggtttttcctgaaaccttatttggccattcccatggttttatgacagacaagccttgtcttctattcatatagatatgcacctttttctacatgtatggcctttacttactacacagcaagtaggcctcaaagtaatcttcctctttcccatcaatcatcttctgccaagcattcaggcagagcagctgttaactgtgattcaaagtcagaaaaacatcaagaacttctttgatgcatagggtgtatcagcactcagctcccacagaagtcaagtcacaaaatatagtgtcagttaactataaggaagttccggagaggtaaagctcaggaaagatgtaatgcaaagctgattgtttaatgtcttacagatttacactgtctttaaaaggccaaataaggctgggcgcagtggctcacacctgtaatcccaacattttgggagcccaaggcggccggaccacctgaggtcgggagttcaagaccagcctgaccaacatggagaaaccctgtctctactaaaaatacaaaaattagccaggagtgttggtgcatgactgtaatcccagctactcaggaggctgaggcaggagaatcgcttgaacctgggaggtagaggttgtggtgagctgagatcgtgccattgcactccggcctgggcaataagagtgaaactctgtctcaaaaaaaaaaaaaaaaaaaaaaaaagccaaataaatcagggttttaccaggggctcagagataaaaagaaaacctattcctatcttagcattttggtctcattggtttatagactctgataatatccctatccatggatcatttgagtattgactaatgtacataggtacccaactggttgattattaatcaagaatacagaactttatttaataattagcacaccctgatctggcttctttgcttgcttttctttggatccctgtccaataacctctgtggaatctcattccctaattgttgatactcattttctccgtttgcaaaatgaagatactcattgttaggatcctactgctgaagggtgctatgtcactttctagtgctcttatatgtctttaattataggactggaatgaaaagcttaaccatacagtatttctaagcaaaataatgtactccattcttttgtccatgctctcattgctgatttgttcttgcaggacttagagcactttgttaatgttcttccattcactccaacagcgtcctcagaaagagacagaataaaaaaattgttccccatggtacagctggaaaaattaaggggaaaagagattaagtggtccccaatggaacacagctgtcttatgcagggctcacagttaccatgttcagtacattgttaaagtaacttggcttcccaggactggaattatcatggagcagttagaattttgagagtaattacaacaggatcacattctgaaagagtcacattttgtcaaaaatctgaaaagtatgcaatttgtacaactcttactttctatgtgataagaatgcaatatgtgcctctttcccctactagccccatgtgacacatatttttcacactatgtggcatcaaccagtgccattacctcctgtggcaccatagagcccaatctcagggcagacattgccaaggtaaagaatgcactccatgtttataccaaattgcacaaagtatagacattgaggttaatggagatttaagcacaatcctagcaagtaagttttaagaatactgaatattatacattattgtaacatgaacctaaaattaatttaacagggcccaaattcataggaatgtaacagtcattgaaagcctattcttttcacctctcatcacacatatctacatacatgtatgcacatgtacacacacacacacacacacacacacacacatacacattttctccaaagcaggctgcctcttcagcaggagcaaatactttaatttaaaagaatgattatctgttttctccttttagaaaaagagtctaagaaacacagcatgtgaagaacattagatttatacattccagaatctctgctctcagagtagctaagagattcggtacagaagacgttctatggagaagcacagggggcatctaatgagattgtcaggcccttggacaagatccatattcttagaaaattaatgagttccatctcgttaggaattggttgatgaggtatggtacatctgcatttctttaaccatagctgtaatgtaccatattaaattgtagccttttgcatgcgggtattatataataatgaatgggtggctcctagtagcatgcaacccatgactgtttacttccctaaaagggttaggtctgtgtcctgcacagtgttcaaaaccattaaatgtgttctttgtagcaggatggtacacagccatcagcagaatgagttaaaaccaacaatgaattcaatataccaggaaatagattgttagtagggaatggcattaaaggaaaaaaaaattagataagatgcattcaaggaataattactttcactctgctggcttaatcagtgaaggaacataaaaggaaagctggcagtgggtcttggtaatatatgaactatattagagtgccagaaaaggagacctcagaagttaagcataggttgccaatctgctacaattatttttcccaccaatctgctcaaaatgattgtatatagtattcttaaaaccatgtgtcttggtgcagaaatattgacaaatgctggccagctttatcttcctatatccttcattaaaagtatatgcatataa

SEQ ID NO: 35469 - DNA, 6012 bp, Homo sapiens
  source 1..6012: mol_type = unassigned DNA
gtgtgtaactgtgggggggggtagcagggggagagaaagagaacgaagggagacagagagactgagacagaaacaaagagggcggacgcagtgcagtaagagcagatgggcggacccaaatttcttcggcttcacgattttgcggaggtctagccctgcatccagccttgaaacagggtggggaggaggcagaaaggggagggactgcactccctctgagcgtgctagctccgactgcctgacggatcacccttccgctccaacatggctagttcctcaacgccgtgactcaagcctgttgtgccaggcagggcgcactcagcagcgcagccccacaggtggcgaaggctccgcgagagggttcccgccaggctagacagtggagtgccgcacagcgcgccttccagcctcgcagccgccaccctagcggttccgacccggcgccagcaggcctgcttggtcgatcttcgagccaaagatgcggcgaggctggaagatggctctgtctggggggctgcggtgctgccgccgggtactgtcctgggtgccagtgctcgttattgtcctcgtcgtgctctggtcctactatgcctacgtctttgaactctgcctggttatttacctcatactctaccatgccatctttgtgttctttacctggacctactggaagtctatctttacactcccacagcagccaaaccagaagttccacttgtcctacacagacaaggagcgctatgaaaatgaagaaagacctgaggtccagaagcagatgcttgttgatatggccaaaaagctaccggtttacacaagaactggaagtggagctgtacgattctgtgaccggtgtcatctgatcaagccagaccgctgccaccactgctctgtctgtgctatgtgtgtgttaaaaatggatcatcactgcccttgggttaataactgcattggattttccaactacaaattcttccttcaattcttagcttactctgttctctactgcctgtacattgctacgacagtcttcagctatttcatcaaatactggagaggggaattacccagtgttcgctctaagttccatgtcctttttcttctctttgtggcctgcatgttttttgtcagccttgtgattctctttggttaccattgttggcttgtcagcagaaacaaaaccaccttagaggccttctgcactccagtgtttacaagtggcccagagaaaaatgggttcaaccttggcttcatcaagaatatccagcaggtgtttggagataagaagaagttctggttaatacctattggttccagccctggtgatggacactccttccctatgaggtctatgaatgagtcacagaacccactgctagcaaatgaagaaacctgggaagacaacgaggatgacaaccaagattatccagaaggctcatcatctcttgctgtggaaacggaaacatagcagttttcacatttcctgcatctctcagacaggactcaccatctctgcctcccatgaggcttacagagttcaatgttggaaatcattgtaatcttcaaaataagtcaccgtgttggattgaaagcttcaaaatttgaaagaattccatcaaatacttgctgtgtaaatgtttctggactttatgttatttaatttactgactgaaatccaatttggaatttggtagcagttaattcaagccaattttttttgtttcttcatttcccctcccccaatccatgaaagcctaaatgtaaaatatatcttttcattcatcttatcaggtaaaaggaaattcagaaaatttccttagagtctttaattcccccacaaagattattaatcacatatatagggcctttttggtgttgaagggaatcaaactacatttgctgcttgtgtgcgtgtgcatttgtgaacacgtacagcatatctatacaaaattctgctatagtgtgaaaatcagggctaaaaacctgaagcctttgtttaattatgcttttcctctaaatagcaacttaaatatttgctagactttgaatcatcgctatatcaagtatctaaaatttgggagggtgaatcagtacactgtgaccaaggtcctcaaattggaatttgaacaacaatgtaaaacctgttctgtcacaaatgttcctgaaagcaccacagctactcaagaagatcaaattcaggacataaactttattgaacataataaccagtgttttttaaagacttttttgtcagggtgcagtaaaattctccaattacttttattcatttatctgcttcctagttttattttagcctttatgagttattttatgatgaaagaaaatctataagcctaagttatggcccataggttttgttaagggttttcagagtgattttcaggtttaatttcactgcctttcataagggtaaagtttcacagctgacattagcctgaggattagcactaaagagctgtgttttcatagcaggggctattgtacagacagtgataaccaaatagtaatatgccagttctttcttctttttttagcttcagtagtagctaagccattaatacagtttgcatcaatttccccatttatttataatcagcctttcttttagtcctagtgcctgaatcaatgagtgagaatactagtactgattctttacaataataatatcttaagagtattgatatctttcattttttcatccagcagtctagtgcccagctgctgacaataaaagctccaactcttttagagatcagtggaatttagaagcatcttacaggtatcaaggaattgagcttctagagggatggtttggcttactaatttatcttccctgaaatatgtttgagtaaaaaagagttgcctgccacaatttagtgttggggttccagtggagctgagaaagtgaacaatccagctacttaaagcaacaacaaaacctgttcatctggatccctaggtaattttgaccaaggtgagacttttggcataaattaaatggattgtggtcagcattacatttgagagaatactagacatgactacacttattagggctagtgactttctcaaactcagaagctaaaaagcagcctagatgactatgcacacactgggtttcaagatgaaatcttcttatatattcagatggaaaaaaatttccccttacactctttctcaaaatactctcatttcggtttttcctgaaaccttatttggccattcccatggttttatgacagacaagccttgtcttctattcatatagatatgcacctttttctacatgtatggcctttacttactacacagcaagtaggcctcaaagtaatcttcctctttcccatcaatcatcttctgccaagcattcaggcagagcagctgttaactgtgattcaaagtcagaaaaacatcaagaacttctttgatgcatagggtgtatcagcactcagctcccacagaagtcaagtcacaaaatatagtgtcagttaactataaggaagttccggagaggtaaagctcaggaaagatgtaatgcaaagctgattgtttaatgtcttacagatttacactgtctttaaaaggccaaataaggctgggcgcagtggctcacacctgtaatcccaacattttgggagcccaaggcggccggaccacctgaggtcgggagttcaagaccagcctgaccaacatggagaaaccctgtctctactaaaaatacaaaaattagccaggagtgttggtgcatgactgtaatcccagctactcaggaggctgaggcaggagaatcgcttgaacctgggaggtagaggttgtggtgagctgagatcgtgccattgcactccggcctgggcaataagagtgaaactctgtctcaaaaaaaaaaaaaaaaaaaaaaaaagccaaataaatcagggttttaccaggggctcagagataaaaagaaaacctattcctatcttagcattttggtctcattggtttatagactctgataatatccctatccatggatcatttgagtattgactaatgtacataggtacccaactggttgattattaatcaagaatacagaactttatttaataattagcacaccctgatctggcttctttgcttgcttttctttggatccctgtccaataacctctgtggaatctcattccctaattgttgatactcattttctccgtttgcaaaatgaagatactcattgttaggatcctactgctgaagggtgctatgtcactttctagtgctcttatatgtctttaattataggactggaatgaaaagcttaaccatacagtatttctaagcaaaataatgtactccattcttttgtccatgctctcattgctgatttgttcttgcaggacttagagcactttgttaatgttcttccattcactccaacagcgtcctcagaaagagacagaataaaaaaattgttccccatggtacagctggaaaaattaaggggaaaagagattaagtggtccccaatggaacacagctgtcttatgcagggctcacagttaccatgttcagtacattgttaaagtaacttggcttcccaggactggaattatcatggagcagttagaattttgagagtaattacaacaggatcacattctgaaagagtcacattttgtcaaaaatctgaaaagtatgcaatttgtacaactcttactttctatgtgataagaatgcaatatgtgcctctttcccctactagccccatgtgacacatatttttcacactatgtggcatcaaccagtgccattacctcctgtggcaccatagagcccaatctcagggcagacattgccaaggtaaagaatgcactccatgtttataccaaattgcacaaagtatagacattgaggttaatggagatttaagcacaatcctagcaagtaagttttaagaatactgaatattatacattattgtaacatgaacctaaaattaatttaacagggcccaaattcataggaatgtaacagtcattgaaagcctattcttttcacctctcatcacacatatctacatacatgtatgcacatgtacacacacacacacacacacacacacacacatacacattttctccaaagcaggctgcctcttcagcaggagcaaatactttaatttaaaagaatgattatctgttttctccttttagaaaaagagtctaagaaacacagcatgtgaagaacattagatttatacattccagaatctctgctctcagagtagctaagagattcggtacagaagacgttctatggagaagcacagggggcatctaatgagattgtcaggcccttggacaagatccatattcttagaaaattaatgagttccatctcgttaggaattggttgatgaggtatggtacatctgcatttctttaaccatagctgtaatgtaccatattaaattgtagccttttgcatgcgggtattatataataatgaatgggtggctcctagtagcatgcaacccatgactgtttacttccctaaaagggttaggtctgtgtcctgcacagtgttcaaaaccattaaatgtgttctttgtagcaggatggtacacagccatcagcagaatgagttaaaaccaacaatgaattcaatataccaggaaatagattgttagtagggaatggcattaaaggaaaaaaaaattagataagatgcattcaaggaataattactttcactctgctggcttaatcagtgaaggaacataaaaggaaagctggcagtgggtcttggtaatatatgaactatattagagtgccagaaaaggagacctcagaagttaagcataggttgccaatctgctacaattatttttcccaccaatctgctcaaaatgattgtatatagtattcttaaaaccatgtgtcttggtgcagaaatattgacaaatgctggccagctttatcttcctatatccttcattaaaagtatatgcat

SEQ ID NO: 35470 - DNA, 3072 bp, Homo sapiens
  source 1..3072: mol_type = unassigned DNA
atgccccgcagccccgggacgcgcctcaaacccgccaagtacatcccggtggccacggccgccgcgctgctggtcggctccagcaccctcttcttcgtgttcacgtgcccgtggttgacacgagctgtgtccccagctgttcccgtctacaatggcatcatcttcctctttgtcctggccaacttcagcatggccactttcatggaccctggtgttttcccccgagcggatgaggatgaggacaaggaggacgacttccgggctccgctgtacaagaacgtggatgtgcgaggtatccaggtccgcatgaagtggtgtgccacgtgccacttctaccgcccgccgcgctgctcccactgcagcgtctgtgacaactgtgtagaggtgactgggaagttccgcgggggtgtgaaccctttcacccgaggctgctgtgggaatgtggagcacgtgctgtgtagccccctggcgccccggtacgtggtggagccaccccggctgccgctcgcggtgagtttgaagccgcctttccttaggcctgaactcctggaccgagctgcaccgctcaaggtcaagcttagtgacaacgggctgaaggctggcctgggccgtagcaagtccaagggcagcctggaccggctggatgagaagccactggacttggggccaccactgccccccaagatagaggctggcacgttcagcagtgacctgcagaccccgcgcccaggcagtgctgagagtgccctgtcggtgcagaggaccagccccccgacacctgccatgtacaagtttaggccggctttccccacgggtcccaaggtgcccttctgtggaccaggcgagcaggttccaggccctgattccctgaccctgggggacgacagcatccgtagcctggactttgtgtccgagccgagcctggacctccctgactatgggccagggggcctgcatgcagcctacccgccatccccaccgctcagcgcctctgatgccttctcgggcgctttgcgctccctgagcctcaaggcctcgagccggcggggcggggatcatgtggccctgcagcccctgcgctctgagggggggccccccacgccccaccgtagcatttttgccccccatgcactgcccaaccgcaacggcagcctgtcctatgacagcctgctcaatcctggctcgcctggtggccacgcctgccctgcccacccagcagttggcgtggccggataccactcaccctacctgcatcctggggcaacgggcgacccgccacggcccctaccccgcagcttcagccccgtgctgggcccccgcccccgggagccctcgcctgtgcgctacgacaacctgtccaggaccatcatggcatccatccaggagcgcaaggacagggaggagcgtgagcgcctgctgcgctcccaggccgactcactcttcggcgactcaggcgtctatgacgctcccagctcctacagcctgcagcaggccagtgtgctgtccgagggcccccgaggtcccgcgctgcgctatggctccagagacgaccttgtggctgggcccggcttcggtggcgcccgcaaccctgccctgcagacgtcactgtcctcgctgtccagctccgtgagccgtgcaccgcggacgtcgtcctcctccctgcaggctgatcaggccagcagcaacgccccggggccccggcccagcagtggctcacacaggtcacctgcacgccagggcctgccctccccgcccggcactccccactcaccatcctacgcgggccccaaagctgtcgccttcatccacacggacctcccagagccaccgccctcgctgaccgtgcagagggaccaccctcagctgaagactcccccaagtaagcttaatgggcagtccccgggcctggcccggctgggacctgccaccggccccccagggccctctgccagccctacacggcacacgctggttaagaaggtgtccggcgtgggtgggaccacctacgagatctcggtgtgaggactgactgccacacatccgccatggtgccacggggaccaggaccccacagcgcaccccccctccccaccaacttctctgccccagggacccgaggccaccccagcctggtgtggacccatcggcgggagagagtgccacgcctccacagcttgccccaagcgctctgcctgcccgtccactcatctgcccatggggaagtcggctcactgggacaagggccactgggctggtctgtgtctgggcctgtcccatggctggggcagtgagggggcccagtcagcctctttggggcaccctctctcagccaggcttggcccactgccatcacccagcaccccagatcaccgccaggccagcccccaatggtccccttacggacaggtcccagagatggacagaggcacccagggcccccaccgtccttctgacacagcctgtgggctcccggaccgagtgtcccccgccaggctactcctaactaacgcgttgcctttcacggaccccgctggaagcttgtagcttggcaaggctgatgcttctgccctggcctgctctgggtggtggtggataggtggacagacggccagccagccagctgtggccgggggcccggctccatgtgtcccgtgtctgtgtgctgtgctgccgcgccgtgtctgatgtgtcagtgctccggccgccgctgtccctttcatcaaagccttaacctttgctttatgctcttgtgggaggcgacgggggggcaggcgggagcaggcacgggggtgatgctgccacagggggctggtgacacccagagccccctccccagccctcaggccctccctgccaaactggagaaccccaccccaaggcatgccacgtccgcagccccggcctggctgcggtgctcgcgccgtgggaaagcacactggggaggggtcagtgcttcccttggtgtcagggacctgagagtaagcacatgacagcgtctgcttgcgttgtgtctgttttatgtttttatatctacatctatatatctataattttattaaaaaaaagaaaaag

SEQ ID NO: 35471 - DNA, 5046 bp, Homo sapiens
  source 1..5046: mol_type = unassigned DNA
gggtgggatttcctccgccgccgccgccgccgccgccgcgggtcctgcgccgcgtccagcccgcccgcccgaccccggcccgaccccggccggccctgcccgcccggccccggggagggatgcggcggcgcggcgcccaggatgccccgcagccccgggacgcgcctcaaacccgccaagtacatcccggtggccacggccgccgcgctgctggtcggctccagcaccctcttcttcgtgttcacgtgcccgtggttgacacgagctgtgtccccagctgttcccgtctacaatggcatcatcttcctctttgtcctggccaacttcagcatggccactttcatggaccctggtgttttcccccgagcggatgaggatgaggacaaggaggacgacttccgggctccgctgtacaagaacgtggatgtgcgaggtatccaggtccgcatgaagtggtgtgccacgtgccacttctaccgcccgccgcgctgctcccactgcagcgtctgtgacaactgtgtagaggactttgaccaccactgcccctgggtcaacaactgcatcgggcgtcgaaactatcgctacttcttcctgttcctgctgtcactcagtgcacacatggtgggcgtcgtggccttcggcctggtctacgtgctgaaccacgctgaggggctgggagccgcgcacaccaccatcaccatggctgtcatgtgtgtggccggcctcttcttcatccctgtcattggcctcactggcttccatgtggtgctggtcactcgggggcgcaccaccaacgagcaggtgactgggaagttccgcgggggtgtgaaccctttcacccgaggctgctgtgggaatgtggagcacgtgctgtgtagccccctggcgccccggtacgtggtggagccaccccggctgccgctcgcggtgagtttgaagccgcctttccttaggcctgaactcctggaccgagctgcaccgctcaaggtcaagcttagtgacaacgggctgaaggctggcctgggccgtagcaagtccaagggcagcctggaccggctggatgagaagccactggacttggggccaccactgccccccaagatagaggctggcacgttcagcagtgacctgcagaccccgcgcccaggcagtgctgagagtgccctgtcggtgcagaggaccagccccccgacacctgccatgtacaagtttaggccggctttccccacgggtcccaaggtgcccttctgtggaccaggcgagcaggttccaggccctgattccctgaccctgggggacgacagcatccgtagcctggactttgtgtccgagccgagcctggacctccctgactatgggccagggggcctgcatgcagcctacccgccatccccaccgctcagcgcctctgatgccttctcgggcgctttgcgctccctgagcctcaaggcctcgagccggcggggcggggatcatgtggccctgcagcccctgcgctctgagggggggccccccacgccccaccgtagcatttttgccccccatgcactgcccaaccgcaacggcagcctgtcctatgacagcctgctcaatcctggctcgcctggtggccacgcctgccctgcccacccagcagttggcgtggccggataccactcaccctacctgcatcctggggcaacgggcgacccgccacggcccctaccccgcagcttcagccccgtgctgggcccccgcccccgggagccctcgcctgtgcgctacgacaacctgtccaggaccatcatggcatccatccaggagcgcaaggacagggaggagcgtgagcgcctgctgcgctcccaggccgactcactcttcggcgactcaggcgtctatgacgctcccagctcctacagcctgcagcaggccagtgtgctgtccgagggcccccgaggtcccgcgctgcgctatggctccagagacgaccttgtggctgggcccggcttcggtggcgcccgcaaccctgccctgcagacgtcactgtcctcgctgtccagctccgtgagccgtgcaccgcggacgtcgtcctcctccctgcaggctgatcaggccagcagcaacgccccggggccccggcccagcagtggctcacacaggtcacctgcacgccagggcctgccctccccgcccggcactccccactcaccatcctacgcgggccccaaagctgtcgccttcatccacacggacctcccagagccaccgccctcgctgaccgtgcagagggaccaccctcagctgaagactcccccaagtaagcttaatgggcagtccccgggcctggcccggctgggacctgccaccggccccccagggccctctgccagccctacacggcacacgctggttaagaaggtgtccggcgtgggtgggaccacctacgagatctcggtgtgaggactgactgccacacatccgccatggtgccacggggaccaggaccccacagcgcaccccccctccccaccaacttctctgccccagggacccgaggccaccccagcctggtgtggacccatcggcgggagagagtgccacgcctccacagcttgccccaagcgctctgcctgcccgtccactcatctgcccatggggaagtcggctcactgggacaagggccactgggctggtctgtgtctgggcctgtcccatggctggggcagtgagggggcccagtcagcctctttggggcaccctctctcagccaggcttggcccactgccatcacccagcaccccagatcaccgccaggccagcccccaatggtccccttacggacaggtcccagagatggacagaggcacccagggcccccaccgtccttctgacacagcctgtgggctcccggaccgagtgtcccccgccaggctactcctaactaacgcgttgcctttcacggaccccgctggaagcttgtagcttggcaaggctgatgcttctgccctggcctgctctgggtggtggtggataggtggacagacggccagccagccagctgtggccgggggcccggctccatgtgtcccgtgtctgtgtgctgtgctgccgcgccgtgtctgatgtgtcagtgctccggccgccgctgtccctttcatcaaagccttaacctttgctttatgctcttgtgggaggcgacgggggggcaggcgggagcaggcacgggggtgatgctgccacagggggctggtgacacccagagccccctccccagccctcaggccctccctgccaaactggagaaccccaccccaaggcatgccacgtccgcagccccggcctggctgcggtgctcgcgccgtgggaaagcacactggggaggggtcagtgcttcccttggtgtcagggacctgagagtaagcacatgacagcgtctgcttgcgttgtgtctgttttatgtttttatatctacatctatatatctataattttattaaaaaaaagaaaaagagttattttgattctttccttgggcaaggccagggctattgctgcaggatcccgagttaggggagggcaggggccgggccccagaagagggagtggctgctgtctggtgtgcaggggtcggtgggttcctcaggggcatttctgccgacttgggctgagtcagaggcttgggaagagggggcggccgatggtctgtggctgggaagtgtgagggtctctcgccttgggtctgtgtcagttctggcagtgacagggtgtttgggggaaagacttgggtctgccgctacccacaggggactctcaggaacccgagagcttggggagatgaaatgggggtgcataggggccacctgttggctcagggccctgtgggggccgctgaacctgctggaactctcctgcctgccacatgccaggggcagggctgagggagtgtgagggatgcacagctgttcagggctgagacattctgggctggggctgtcccagcgtgggaggcgtgcgggctgtagggccccgaagctgacctccacctttctgcttctctctcacggacgccgcggcccgcagggggcggattggcacctgcacccgtggatgggggcggcgtggccagccttgggtgcctcctgggctgcacctgtgccaccttggccgcccggaggaccgcccaccactgcgggccccctggagccaggccgccggggcacccccacgcggggccatgtgccgcctgcacttggctgcctccagtcttttccccagcctctcggggccctagcaggatgacaagtaggcggctctggggcccaggacagcccagctggggacccaggaggtcagactgcagtggaccctggggcagggctgggggtgggctgggctctctgctccaccagccacagcttgacagattcccagcctgccagggcctgagaccctgtgtccacatgacctcagggagtcccccacctgctgcagggggtccagcaccccacaggggggcagtcccagagctgtggggaccggcacgacctttgcccagcctccctacccaaccaagcactttagactaagccacttcctcctcggggagcccaggcctccgtgggttgggctgggtggggggggggtctcaggttgcccctgaaggtctctgcactcctcctgcccttcccctgacacatgaacagatgccttaacttcctggagccaccagcctggtgagccattggcctctgcctgccaccaaggtcctgtggtcttggccagctccgcctgggccccactggggctgcctgcacccagagacgatgccggcgggatctcagagggcctgaggcccaagccctgtgtcctccagcagtggtacggcctgcggcagggtggcactccggccagcccttctccgtcacagggtccctgtccctgggtccaccctgggctgtggctctacatctcccatttggggacgagaaagccacaaaaccattctctattgttcttaagggtacccctgctaattaattccccaaataaaatttttggtgttgatca

SEQ ID NO: 35472 - DNA, 3112 bp, Homo sapiens
  source 1..3112: mol_type = unassigned DNA
atgccccgcagccccgggacgcgcctcaaacccgccaagtacatcccggtggccacggccgccgcgctgctggtcggctccagcaccctcttcttcgtgttcacgtgcccgtggttgacacgagctgtgtccccagctgttcccgtctacaatggcatcatcttcctctttgtcctggccaacttcagcatggccactttcatggaccctggtgttttcccccgagcggatgaggatgaggacaaggaggacgacttccgggctccgctgtacaagaacgtggatgtgcgaggtatccaggtccgcatgaagtggtgtgccacgtgccacttctaccgcccgccgcgctgctcccactgcagcgtctgtgacaactgtgtagaggactttgaccaccactgcccctgggtcaacaactgcatcgggcgtcgaaactatcgctacttcttcctgttcctgctgtcactcagtgcacacatggtgggcgtcgtggccttcggcctggtctacgtgctgaaccacgctgaggggctgggagccgcgcacaccaccatcaccatggctgtcatgtgtgtggccggcctcttcttcatccctgtcattggcctcactggcttccatgtggtgctggtcactcgggggcgcaccaccaacgagcaggtgactgggaagttccgcgggggtgtgaaccctttcacccgaggctgctgtgggaatgtggagcacgtgctgtgtagccccctggcgccccggtacgtggtggagccaccccggctgccgctcgcggtgagtttgaagccgcctttccttaggcctgaactcctggaccgagctgcaccgctcaaggtcaagcttagtgacaacgggctgaaggctggcctgggccgtagcaagtccaagggcagcctggaccggctggatgagaagccactggacttggggccaccactgccccccaagatagaggctggcacgttcagcagtgacctgcagaccccgcgcccaggcagtgctgagagtgccctgtcggtgcagaggaccagccccccgacacctgccatgtacaagtttaggccggctttccccacgggtcccaaggtgcccttctgtggaccaggcgagcaggttccaggccctgattccctgaccctgggggacgacagcatccgtagcctggactttgtgtccgagccgagcctggacctccctgactatgggccagggggcctgcatgcagcctacccgccatccccaccgctcagcgcctctgatgccttctcgggcgctttgcgctccctgagcctcaaggcctcgagccggcggggcggggatcatgtggccctgcagcccctgcgctctgagggggggccccccacgccccaccgtagcatttttgccccccatgcactgcccaaccgcaacggcagcctgtcctatgacagcctgctcaatcctggctcgcctggtggccacgcctgccctgcccacccagcagttggcgtggccggataccactcaccctacctgcatcctggggcaacgggcgacccgccacggcccctaccccgcagcttcagccccgtgctgggcccccgcccccgggagccctcgcctgtgcgctacgacaacctgtccaggaccatcatggcatccatccaggagcgcaaggacagggaggagcgtgagcgcctgctgcgctcccaggccgactcactcttcggcgactcaggcgtctatgacgctcccagctcctacagcctgcagcaggccagtgtgctgtccgagggcccccgaggtcccgcgctgcgctatggctccagagacgaccttgtggctgggcccggcttcggtggcgcccgcaaccctgccctgcagacgtcactgtcctcgctgtccagctccgtgagccgtgcaccgcggacgtcgtcctcctccctgcaggctgatcaggccagcagcaacgccccggggccccggcccagcagtggctcacacaggtcacctgcacgccagggcctgccctccccgcccggcactccccactcaccatcctacgcgggccccaaagctgtcgccttcatccacacggacctcccagagccaccgccctcgctgaccgtgcagagggggcggattggcacctgcacccgtggatgggggcggcgtggccagccttgggtgcctcctgggctgcacctgtgccaccttggccgcccggaggaccgcccaccactgcgggccccctggagccaggccgccggggcacccccacgcggggccatgtgccgcctgcacttggctgcctccagtcttttccccagcctctcggggccctagcaggatgacaagtaggcggctctggggcccaggacagcccagctggggacccaggaggtcagactgcagtggaccctggggcagggctgggggtgggctgggctctctgctccaccagccacagcttgacagattcccagcctgccagggcctgagaccctgtgtccacatgacctcagggagtcccccacctgctgcagggggtccagcaccccacaggggggcagtcccagagctgtggggaccggcacgacctttgcccagcctccctacccaaccaagcactttagactaagccacttcctcctcggggagcccaggcctccgtgggttgggctgggtggggggggggtctcaggttgcccctgaaggtctctgcactcctcctgcccttcccctgacacatgaacagatgccttaacttcctggagccaccagcctggtgagccattggcctctgcctgccaccaaggtcctgtggtcttggccagctccgcctgggccccactggggctgcctgcacccagagacgatgccggcgggatctcagagggcctgaggcccaagccctgtgtcctccagcagtggtacggcctgcggcagggtggcactccggccagcccttctccgtcacagggtccctgtccctgggtccaccctgggctgtggctctacatctcccatttggggacgagaaagccacaaaaccattctctattgttcttaagggtacccctgctaattaattccccaaataaaatttttggtgttgatc

SEQ ID NO: 35473 - DNA, 4569 bp, Homo sapiens
  source 1..4569: mol_type = unassigned DNA
atttggccagtggtgggcggttgccacagctggtttagggccccgaccactggggccccttgtcaggaggagacagcctcccggcccggggaggacaagtcgctgccacctttggctgccgacgtgattccctgggacggtccgtttcctgccgtcagctgccggccgagttgggtctccgtggttcaggccggctcccccttcctggtctcccttctcccgctgggccggtttatcgggaggagattgtcttccagggctagcaattggacttttgatgatgtttgacccagcggcaggaatagcaggcaacgtgatttcaaagctgggctcagcctctgtttcttctctcgtgtaatcgcaaaacccattttggagcaggaattccaatcatgtctgtgatggtggtgagaaagaaggtgacacggaaatgggagaaactcccaggcaggaacaccttttgctgtgatggccgcgtcatgatggcccggcaaaagggcattttctacctgacccttttcctcatcctggggacatgtacactcttcttcgcctttgagtgccgctacctggctgttcagctgtctcctgccatccctgtatttgctgccatgctcttccttttctccatggctacactgttgaggaccagcttcagtgaccctggagtgattcctcgggcgctaccagatgaagcagctttcatagaaatggagatagaagctaccaatggtgcggtgccccagggccagcgaccaccgcctcgtatcaagaatttccagataaacaaccagattgtgaaactgaaatactgttacacatgcaagatcttccggcctccccgggcctcccattgcagcatctgtgacaactgtgtggagcgcttcgaccatcactgcccctgggtggggaattgtgttggaaagaggaactaccgctacttctacctcttcatcctttctctctccctcctcacaatctatgtcttcgccttcaacatcgtctatgtggccctcaaatctttgaaaattggcttcttggagacattgaaagaaactcctggaactgttctagaagtcctcatttgcttctttacactctggtccgtcgtgggactgactggatttcatactttcctcgtggctctcaaccagacaaccaatgaagacatcaaaggatcatggacagggaagaatcgcgtccagaatccctacagccatggcaatattgtgaagaactgctgtgaagtgctgtgtggccccttgccccccagtgtgctggatcgaaggggtattttgccactggaggaaagtggaagtcgacctcccagtactcaagagaccagtagcagcctcttgccacagagcccagcccccacagaacacctgaactcaaatgagatgccggaggacagcagcactcccgaagagatgccacctccagagcccccagagccaccacaggaggcagctgaagctgagaagtagcctatctatggaagagacttttgtttgtgtttaattagggctatgagagatttcaggtgagaagttaaacctgagacagagagcaagtaagctgtcccttttaactgtttttctttggtctttagtcacccagttgcacactggcattttcttgctgcaagcttttttaaatttctgaactcaaggcagtggcagaagatgtcagtcacctctgataactggaaaaatgggtctcttgggccctggcactggttctccatggcctcagccacagggtccccttggaccccctctcttccctccagatcccagccctcctgcttggggtcactggtctcattctggggctaaaagtttttgagactggctcaaatcctcccaagctgctgcacgtgctgagtccagaggcagtcacagagacctctggccaggggatcctaactgggttcttggggtcttcaggactgaagaggagggagagtggggtcagaagattctcctggccaccaagtgccagcattgcccacaaatccttttaggaatgggacaggtaccttccacttgttgtatttattagtgtagcttctcctttgtctcccatccactctgacacctaagccccactcttttcccattagatatatgtaagtagttgtagtagagataataattgacatttctcgtagactacccagaaacttttttaatacctgtgccattctcaataagaatttatgagatgccagcggcatagcccttcacactctctgtctcatctctcctcctttctcattagccccttttaatttgtttttccttttgactcctgctcccattaggagcaggaatggcagtaataaaagtctgcactttggtcatttcttttcctcagaggaagcctgagtgctcacttaaacactatcccctcagactccctgtgtgaggcctgcagaggccctgaatgcacaaatgggaaaccaaggcacagagaggctctcctctcctctcctctcccccgatgtaccctcaaaaaaaaaaaaatgctaaccagttcttccattaagcctcggctgagtgagggaaagcccagcactgctgccctctcgggtaactcaccctaaggcctcggcccacctctggctatggtaaccacactgggggcttcctccaagccccgctcttccagcacttccaccggcagagtcccagagccacttcaccctgggggtgggctgtggcccccagtcagctctgctcaggacctgctctatttcagggaagaagatttatgtattatatgtggctatatttcctagagcacctgtgttttcctctttctaagccagggtcctgtctggatgacttatgcggtgggggagtgtaaaccagaacttttcatctatttgaaggcgattaaactgtgtctaatgcaaacttcctgcctcctccttcccccttccatttcaagaatatgtttgtgtgtagggtgggggtgggggttggaaggggttgcttgttactccccaaacttccattaaccagggcacccttgggttggagaggtagttccaaactctccattgatctatactacattctgggctgaaggttttcttattctggactatgaagaaaggactttcaaggagatatagtgtgaacaggatcaggaaggtagagggattatatttacttaagagaacaagctctatattaggatattgttttgaagcagatggatgccgttaattgctaataagtcttagttattaacgcaggctcatcagggcccccccttggaaatatttgatcagtggtcttttacaagtgatggtatatatttctttctaggtggtgtataatcaagactccctatcaattcccatctcatacttcccagttaattggaattaatgaaatttggctgctcccagacctttttccatgtcttcctttttccttttaacaggatttaagttgagcattcttgagagagagagagagagagagattggaagagagatggggagagactgactcagatccctctcctgtctgcttctttttctggttctctcagttttttttcttgaagttataaagccaaacctggagaatttgtaagttgttaggtttccccaggtaacttggcactcatatgaaccccattttaataagtactcagcccatctcctctcctgggctcagatggctctctctcctccctcaccttacctcaagtgttctcctgaggacccttaggtcagacagagaagctttctctttctgatgggaagggtcaaagtggaaatctcttatctctagtgtgaaatgattttctgctttttcatactccctgccctctttcttttccttaataaatcttccatgtttaagatgttggcctgaagatctgtcccattcataccatgcaccagctgggactgtccctatctgatcagaggggagattaaagaatcaatgttcccaggggaaaagggccttaaattgtttggtcttttcaatggctgacactgtctccaactctccccttcctccttcttcctcaagcttcctatgcaccctactttcccaggccaggatggttggcactgatcccaaacctctgggggcaggtggaaattggctgtggtgagccatttcttcatgtccattcagctctgaggccttcctggccctagctgagatcatcatctcctcctttgcttttaccccaggagtgaggttgggttagaggtggattctgattccgtagcagctaaattccattctccctgtcctgaccatcctgcctttacccataaagcacccgttcctactgaccaaatctctttactttgttggagaaaaaaagtattttgtttttaaatctattttctaatttaaatgcaatttaatatgtaaatctctgcacttttgtgtgagcctacaaatgtgtatgtgttgggggtttttcactctctggtatttcttaataaagaaatctttcttttggggggaagccaattaatgaaggagccttgaatggttttagaaatacagggctgtctgtttctttgtg

SEQ ID NO: 35474 - DNA, 2473 bp, Homo sapiens
  source 1..2473: mol_type = unassigned DNA
ggcgtggcggagtcagggcgggcctcgagaggccgcgcccgcggctcggccccggactccggcctccggcctccggccccccgctggggagccggtcgctgcttcccgacggattttgatctttgttcttccaggccggctcccccttcctggtctcccttctcccgctgggccggtttatcgggaggagattgtcttccagggctagcaattggacttttgatgatgtttgacccagcggcaggaatagcaggcaacgtgatttcaaagctgggctcagcctctgtttcttctctcgtgtaatcgcaaaacccattttggagcaggaattccaatcatgtctgtgatggtggtgagaaagaaggtgacacggaaatgggagaaactcccaggcaggaacaccttttgctgtgatggccgcgtcatgatggcccggcaaaagggcattttctacctgacccttttcctcatcctggggacatgtacactcttcttcgcctttgagtgccgctacctggctgttcagctgtctcctgccatccctgtatttgctgccatgctcttccttttctccatggctacactgttgaggaccagcttcagtgaccctggagtgattcctcgggcgctaccagatgaagcagctttcatagaaatggagatagaagctaccaatggtgcggtgccccagggccagcgaccaccgcctcgtatcaagaatttccagataaacaaccagattgtgaaactgaaatactgttacacatgcaagatcttccggcctccccgggcctcccattgcagcatctgtgacaactgtgtggagcgcttcgaccatcactgcccctgggtggggaattgtgttggaaagaggaactaccgctacttctacctcttcatcctttctctctccctcctcacaatctatgtcttcgccttcaacatcgtctatgtggccctcaaatctttgaaaattggcttcttggagacattgaaagaaactcctggaactgttctagaagtcctcatttgcttctttacactctggtccgtcgtgggactgactggatttcatactttcctcgtggctctcaaccagacaaccaatgaagacatcaaaggatcatggacagggaagaatcgcgtccagaatccctacagccatggcaatattgtgaagaactgctgtgaagtgctgtgtggccccttgccccccagtgtgctggatcgaaggggtattttgccactggaggaaagtggaagtcgacctcccagtactcaagagaccagtagcagcctcttgccacagagcccagcccccacagaacacctgaactcaaatgagatgccggaggacagcagcactcccgaagagatgccacctccagagcccccagagccaccacaggaggcagctgaagctgagaagtagcctatctatggaagagacttttgtttgtgtttaattagggctatgagagatttcaggtgagaagttaaacctgagacagagagcaagtaagctgtcccttttaactgtttttctttggtctttagtcacccagttgcacactggcattttcttgctgcaagcttttttaaatttctgaactcaaggcagtggcagaagatgtcagtcacctctgataactggaaaaatgggtctcttgggccctggcactggttctccatggcctcagccacagggtccccttggaccccctctcttccctccagatcccagccctcctgcttggggtcactggtctcattctggggctaaaagtttttgagactggctcaaatcctcccaagctgctgcacgtgctgagtccagaggcagtcacagagacctctggccaggggatcctaactgggttcttggggtcttcaggactgaagaggagggagagtggggtcagaagattctcctggccaccaagtgccagcattgcccacaaatccttttaggaatgggacaggtaccttccacttgttgtatttattagtgtagcttctcctttgtctcccatccactctgacacctaagccccactcttttcccattagatatatgtaagtagttgtagtagagataataattgacatttctcgtagactacccagaaacttttttaatacctgtgccattctcaataagaatttatgagatgccagcggcatagcccttcacactctctgtctcatctctcctcctttctcattagccccttttaatttgtttttccttttgactcctgctcccattaggagcaggaatggcagtaataaaagtctgcactttggtcatttcttttcctcagaggaagcctgagtgctcacttaaacactatcccctcagactccctgtgtgaggcctgcagaggccctgaatgcacaaatgggaaaccaaggcacagagaggctctcctctcctctcctctcccccgatgtaccctcaaaaaaaaaaaaa

SEQ ID NO: 35475 - DNA, 737 bp, Homo sapiens
  source 1..737: mol_type = unassigned DNA
gacctggtgacgtgaggagcgttccatttggccagtggtgggcggttgccacagctggtttagggccccgaccactggggccccttgtcaggaggagacagcctcccggcccggggaggacaagtcgctgccacctttggctgccgacgtgattccctgggacggtccgtttcctgccgtcagctgccggccgagttgggtctccgtggttcaggaattccaatcatgtctgtgatggtggtgagaaagaaggtgacacggaaatgggagaaactcccaggcaggaacaccttttgctgtgatggccgcgtcatgatggcccggcaaaagggcattttctacctgacccttttcctcatcctggggacatgtacactcttcttcgcctttgagtgccgctacctggctgttcagctgtctcctgccatccctgtatttgctgccatgctcttccttttctccatggctacactgttgaggaccagcttcagtgaccctggagtgattcctcgggcgctaccagatgaagcagctttcatagaaatggagatagaagctaccaatggtgcggtgccccagggccagcgaccaccgcctcgtatcaagaatttccagataaacaaccagattgtgaaactgaaatactgttacacatgcaagatcttccggcctccccgggcctcccattgcagcatctgtgacaactgtgtggagcgcttcgaccatcactgcccctg

SEQ ID NO: 35476 - DNA, 581 bp, Homo sapiens
  source 1..581: mol_type = unassigned DNA
cccttttcctcatcctggggacatgtacactcttcttcgcctttgagtgccgctacctggctgttcagctgtctcctgccatccctgtatttgctgccatgctcttccttttctccatggctacactgttgaggaccagcttcagtgaccctggagtgattcctcgggcgctaccagatgaagcagctttcatagaaatggagatagaagctaccaatggtgcggtgccccagggccagcgaccaccgcctcgtatcaagaatttccagataaacaaccagattgtgaaactgaaatactgttacacatgcaagatcttccggcctccccgggcctcccattgcagcatctgtgacaactgtgtggaatctttgaaaattggcttcttggagacattgaaagaaactcctggaactgttctagaagtcctcatttgcttctttacactctggtccgtcgtgggactgactggatttcatactttcctcgtggctctcaaccagacaaccaatgaagacatcaaaggatcatggacagggaagaatcgcgtccagaatccctacagccatggcaatattgtg

SEQ ID NO: 35477 - DNA, 1521 bp, Homo sapiens
  source 1..1521: mol_type = unassigned DNA
gattggacgccggcgctgtcagccgcgcgcggaccggggcggggcgggcggtgccccgggctgggcgaggggccgggtgcggggccgctggccgagaggctgaggcggcgtcatgtcctccgaggtgtccgcgcgccgcgacgccaagaagctggtgcgctccccgagcggcctgcgcatggtgcccgaacaccgcgccttcggaagcccgttcggcctggaggagccgcagtgggtcccggacaaggagtgtcggagatgtatgcagtgtgacgccaagtttgactttctcaccagaaagcaccactgtcgccgctgcgggaagtgcttctgcgacaggtgctgcagccagaaggtgccgctgcggcgcatgtgctttgtggaccccgtgcggcagtgcgcggagtgcgccctcgtgtccctcaaggaggcggagttctacgacaagcagctcaaagtgctcctgagcggagccaccttcctcgtcacgtttggaaactcagagaaacctgaaactatgacttgtcgtctttccaataaccagagatacttgtttctggatggagacagccactatgaaatcgaaattgtacacatttccaccgtgcagatcctcacagaaggcttccctcctggagaaaaagacattcacgcttacaccagcctccgggggagccagcctgcctctgaaggaggcaacgcacgggccacaggcatgttcctgcagtatacagtgccggggacggagggtgtgacccagctgaagctgacagtggtggaggacgtgactgtgggcaggaggcaggcggtggcgtggctagtggccatgcacaaggctgccaagctcctctatgaatctcgggaccagtaactctacgtggggctgagcttggagtacgtgtggtcaccaggactgagtcgcttggaacagcagagcctgctccttgcgtaccacagggattaatcctgcttgtgctgggaaatgcaactcactcatgtatttggagaaacaggagtgttcacttatctagtgcaatatgttcacagtttattaatgctttaaacagcttcatgttttagaatttgtgtattgtcaatacttaattgggggtgggagagactgagctacactactgctaaactatttttagcataatatataccatttttatgagttcgcaggtctactagaaggttctggcccatcaatattcatttcatttaattcttccacagaaccagtttgggcagtaggaactcaggcttctggtctgcagtggagcctgttcgcctctaatagccagtttacagcacttgccttagcctgtttcacagacttgtccacttaccttgtcactaatttggggcttctgggctgtgagtgatcctttgatacttcaccaaggggaacgtgggggctttgtgttttgtacttttcactcactatttcactttattaagatgactgtacagcaatttgtatataaagcttatgattaaaaactattttgaacatacgga

SEQ ID NO: 35478 - DNA, 1383 bp, Homo sapiens
  source 1..1383: mol_type = unassigned DNA
gcggggccgctggccgagaggctgaggcggcgtcatgtcctccgaggtgtccgcgcgccgcgacgccaagaagctggtgcgctccccgagcggcctgcgcatggtgcccgaacaccgcgccttcggaagcccgttcggcctggaggagccgcagtgggtcccggacaaggagtgtcggagatgtatgcagtgtgacgccaagtttgactttctcaccagaaagcaccactgtcgccgctgcgggaagtgcttctgcgacaggtgctgcagccagaaggtgccgctgcggcgcatgtgctttgtggaccccgtgcggcagtgcgcggagtgcgccctcgtgtccctcaaggaggcggagttctacgacaagcagctcaaagtgctcctgagcggagccaccttcctcgtcacgtttggaaactcagagaaacctgaaactatgacttgtcgtctttccaataaccagagatacttgtttctggatggagacagccactatgaaatcgaaattgtacacatttccaccgtgcagatcctcacagaaggcttccctcctggaggaggcaacgcacgggccacaggcatgttcctgcagtatacagtgccggggacggagggtgtgacccagctgaagctgacagtggtggaggacgtgactgtgggcaggaggcaggcggtggcgtggctagtggccatgcacaaggctgccaagctcctctatgaatctcgggaccagtaactctacgtggggctgagcttggagtacgtgtggtcaccaggactgagtcgcttggaacagcagagcctgctccttgcgtaccacagggattaatcctgcttgtgctgggaaatgcaactcactcatgtatttggagaaacaggagtgttcacttatctagtgcaatatgttcacagtttattaatgctttaaacagcttcatgttttagaatttgtgtattgtcaatacttaattgggggtgggagagactgagctacactactgctaaactatttttagcataatatataccatttttatgagttcgcaggtctactagaaggttctggcccatcaatattcatttcatttaattcttccacagaaccagtttgggcagtaggaactcaggcttctggtctgcagtggagcctgttcgcctctaatagccagtttacagcacttgccttagcctgtttcacagacttgtccacttaccttgtcactaatttggggcttctgggctgtgagtgatcctttgatacttcaccaaggggaacgtgggggctttgtgttttgtacttttcactcactatttcactttattaagatgactgtacagcaatttgtatataaagcttatgattaaaaactattttgaaca

SEQ ID NO: 35479 - DNA, 9675 bp, Homo sapiens
  source 1..9675: mol_type = unassigned DNA
actcggctcaaacatggctgcgctgagagctctattgctttgggcgccgggagcaggaggtactccgcgaatgagaacattgagaatgtgttcggcataactcatttctttgtatctccctgcactctgtgctgggaaaatgaatcatccatttggaaaagaggaagctgcttcgcagaagcagctttttggatttttctgcgaatgcctgcggaggggagaatgggagctggcacaggcatgtgtacctcagctacaggagggacaaggggatatcccaaagagggtagaagacatacttcaggcattggtggtgtgtccaaatctgctgagatgtgggcaggacatcaaccctcaaagagtagcctgggtctggcttcttgtactggagaaatggttggcccgggaaaagaagttactcccagttgttttccggagaaagcttgagtttcttttattgtcagaagacctccaaggtgacattccagagaacatcctcgaggagctgtatgagaccttaacacagggtgcagtaggccacgtgcctgacggaaatccaaggagggagagctggactcctcgtctcagctccgaagctgtctctgtgctctgggatctcctgaggcagtctccccagccagcacaggccctgctggagctcctgcttgaggaggatgacggtactggcctctgtcactggcctctgcagaatgcactggtggacctcattcgaaaggcattgcgggctttgcagggccctgattcggtgccccctggggtagtcgatgccatctatggagccctgcggactctgcgttgccccgcagaaccacttggggttgagttgcatctcctgtgtgaggaactactagaggcctgcaggaccgaggggagtcccctgcgggaggagcggctgctcagctgcctgctgcacaaggccagccggggcctgctgtccctgtatggccatacctatgcagagaaggtcacagaaaagccaccgagggctacagcctcgggaaaagtctcaccggatcatctagatcctgagcgggcaatgctagccctgttctccaatcccaacccagccgaggcttggaaagtggcctatttctactgcctgagcaacaacaaacacttcctcgagcagattctggtaacagcactaacattgttgaaagaagaagacttcccaaatcttggctgcctacttgatagagaattcaggcccctcagttgcctgcttgtactcctgggctggacacactgccagagcctagagtcagccaagaggctgctccagaccctgcacaggacccagggcccaggctgtgatgagctcctcagggatgcctgtgatgggttgtgggctcacctggaggtcctggagtggtgcatacagcagagcagcaaccccataccaaagagagatctgttgtatcatttacacggtggagacagccactcagtgctctacactctccatcaccttacaaaccttccagccctcagggaggaagatgttctcaagctcttacagaaagtgccagccaaggacccccagcaagagcctgatgcagttgatgctccagtccctgagcacctgagccagtgtcagaacctgacactctaccagggcttctgtgccatgaagtatgccatctatgccctctgtgtaaactcacaccagcactcccagtgccaggactgcaaagacagcctctctgaggacctggcctcagctacagagccagcgaatgactctctctcctccccaggtgctgcaaatctcttctcaacttacctggccaggtgtcaacagtatctgtgcagtattcctgactctctgtgcctggagcttctggaaaacatcttctcattgcttctcatcacctctgctgatcttcacccagagcctcacttgcctgaggactatgctgaggatgatgacattgaggggaagagcccctcaggtttgaggtccccatcagagagccctcagcacatagcacatcctgaaaggaagtcagaacggggttccctgggagtcccaaagacccttgcttatacaatgccaagccatgtgaaggcagagccaaaagacagttacccagggcctcataggcacagctttttggacttaaaacactttactagtggtatcagtggatttctggctgatgaatttgcaataggggccttcctcaggcttctccaagagcaactggatgagatcagtagccgcagccctcctgagaagccaaagcaagaaagtcagagctgctcaggaagcagagatggactgcagagccgcctgcatcgactttccaaggttgtctctgaggcccagtggagacacaaggtggtgacaagcaaccatcgttcagaggagcaaccttcccgaagataccagcctgccacacgtcaccccagtctccgccggggtcgtcggacaagaaggagccaggcagatggccgagacagaggttcaaacccatccctggaaagtacaagtagtgagctgagcacaagtacgtcagagggaagtctgagtgccatgtctggccggaatgagctgcacagtagattgcacccccatcctcaaagttcactcatccccatgatgttctccccacctgagtcactgctggcatcctgcatccttcgcgggaacttcgcagaagcccatcaggtgctgttcacgttcaacctgaagtcctcacccagttcaggggaactgatgttcatggagcgctaccaggaagtgatccaagaactggcccaagtagagcacaagattgaaaaccagaactcagatgcgggtagcagcaccattcggagaactggcagtggccgctcaactctacaggccattggcagcgctgcagcagcaggaatggtgttttactctatctctgacgtgactgacaagctgctcaacacctctggagaccccatccccatgctccaggaggacttttggataagcacggctctagtggagcccactgctcccctgagagaggttctggaagacctcagtccccctgccatggctgcatttgacctagcttgctctcagtgccagctctggaaaacctgcaagcagcttttggagacagccgaacggcgtttgaatagtagccttgaaaggcggggtcgacggatagaccacgtactcctaaatgctgatggcattcgaggttttccagttgttcttcagcaaatcagtaagagtctcaattatctgcttatgtcagccagtcaaaccaaatcagagagtgtggaagaaaagggaggaggccctccacggtgcagcatcactgaactgcttcagatgtgctggcccagcctaagcgaggactgtgttgccagccacaccaccctctcccagcagctagatcaggtccttcagtcactgagagaggcactagagctgccagagcccaggactcctccactgtcttccctggtggagcaggcagcccagaaagctccagaggcagaggcccaccctgtgcagatccagactcagctcctccagaagaacctgggcaaacagaccccatcaggcagcaggcagatggactacttgggcaccttcttcagttactgcagcacccttgctgcagttctccttcaaagtttgagctctgagcctgatcatgtggaggtcaaggtaggaaatccctttgttctgctgcaacagagctcttcccaactggtgtcacatctcctgtttgagagacaagttcccccagagagactggcagcccttctggcccaagagaatctcagcctaagtgtgccacaggtcatcgtcagctgctgctgtgagccccttgctctttgctcatcccggcaaagccagcagacctcctccctcctgactcgtctgggtactctggcccagctacacgcctctcactgcctggatgacctcccactttctacaccgagctccccgaggacaactgagaaccctacattggaaagaaagccctactcctccccaagggactcatcactcccagccctcacctcctctgccttggcctttcttaagtcacgctcaaagctcctagctacggtggcctgcctgggggcttccccgaggttaaaggtcagcaaacccagcttgtcatggaaggaacttcgtggccgcagggaggtgcctctggctgcagagcaggtagcccgggagtgtgagcgccttctggaacaattccctctgtttgaggccttcctcctggctgcctgggagcccctgcgagggtctttgcagcaggggcagagtctggcagtgaatctctgtggttgggccagtctttctaccgttctcctgggcctacattctcccattgccctagatgtactgagtgaggcttttgaggaatccttggtggccagagattggtcccgggcccttcagctcactgaagtgtacgggcgagatgtggacgatttgagcagcataaaggatgcagtcctgagctgtgctgtggcatgtgacaaagaaggttggcaatacctgtttcccgtgaaggatgcatctctgagaagtcggctggccctacagtttgtggacaggtggcccctggagtcatgcctggagattctggcctactgcatttcagacacggctgtccaagaaggactaaagtgtgagctacagaggaagctggcggagctgcaggtgtatcagaagattctgggtttgcagtctcccccagtgtggtgtgactggcagaccttgaggagctgttgtgttgaggacccatcaactgtcatgaacatgattctagaagcacaggagtatgaactgtgtgaagagtggggctgcctgtaccccattccaagagaacatttaatcagccttcatcaaaagcatcttctccaccttctagaaagaagagatcatgacaaggctctgcaactcctgcgaagaatccctgaccccaccatgtgccttgaagtgacagagcaatccctcgaccagcacactagcttggccacttctcacttcttggccaactacctcaccacccacttctatggacaactgactgctgtccgacaccgtgaaatccaggcgctgtatgtgggatccaagattctgctgaccctgcctgagcagcaccgggccagctattcccacttgtcctctaaccccctgttcatgctggagcagctgcttatgaacatgaaggtggattgggccactgtggctgtgcagactctccagcagctgctggttggacaggagattggcttcactatggacgaggtggactcactgctttccagatacgcagagaaagccctggactttccataccctcagagggagaaacgatcagattctgtgattcacctccaagaaattgtccaccaggctgcagatcccgagaccctccctagatcaccatcagcagagttctctcctgctgctcctcctggtatctccagtatacattcccctagtctaagggaaaggagtttcccaccaacccagccctcacaggaatttgtgcccccagcgacaccccctgccaggcaccagtgggtaccggatgagactgagagtatctgcatggtctgctgcagggagcacttcaccatgtttaacaggcgtcatcattgtcgccgctgtggccggctagtgtgcagctcctgctccactaagaaaatggtggttgaaggctgcagagagaaccctgctcgtgtgtgtgatcagtgctatagttactgcaacaaagatgtaccagaggagccttcagaaaaaccagaagctctagacagctccaagaatgaaagccctccatactcgtttgtggtgagagtccccaaagcagatgaggtggaatggattttggatctcaaagaggaggaaaatgagctggtgcggagtgaattttactatgagcaggcccccagcgcctccttgtgcattgccatcctgaatctgcaccgggacagcattgcctgtggtcaccagctgattgagcactgctgcaggctctccaagggcctcaccaacccagaggtggatgccgggctgctcacggacatcatgaagcagctgctgttcagcgccaagatgatgttcgtcaaagccggccagagccaagacttggctctttgtgacagctacatcagcaaggtagatgtgctgaatattttagttgctgctgcctatcgccacgtgccatctttggatcagatcttgcagccagctgcagtaaccaggctaaggaaccagcttttggaagccgagtactaccaactgggcgttgaggtctccacaaagactgggcttgataccaccggggcgtggcatgcttggggcatggcctgcctcaaagccgggaacctcactgctgcacgggagaagttcagtcgctgtctgaagcccccatttgacctcaatcagctgaatcatggctcaaggctggtgcaggatgtggttgagtacctagagtccacagtgaggccctttgtatccttgcaagatgacgattactttgccaccctgagggaactggaagctacccttcggacgcagagcctttctctggcagtgattcctgaagggaaaatcatgaacaacacctactaccaggaatgcctcttctacctgcacaactatagcaccaacctggccatcatcagcttctacgtgaggcacagctgcctgcgggaagctcttctgcaccttctcaacaaggagagtcctccagaagtttttatagaaggcattttccaaccaagctataaaagtgggaagctacacactttggagaacttgctagaatccattgatccaaccttggagagctggggaaagtacttgattgctgcctgccaacatttacagaagaagaactactaccacattctgtatgagctgcagcagtttatgaaggaccaagttcgggccgccatgacctgtattcggttcttcagtcacaaagcaaagtcatatacagaactgggagagaagctctcatggctacttaaggccaaggaccacctgaagatctacctccaagaaacatcccgcagctctggaaggaagaaaaccacattcttcagaaagaagatgactgcagctgatgtgtcaaggcacatgaacacacttcagctgcagatggaagtgaccaggttcttgcatcggtgcgaaagtgctgggacctctcaaatcaccactttgcctctgccaaccctgtttggaaataaccacatgaaaatggatgttgcctgcaaggtcatgctgggagggaaaaatgtagaagatggttttggaattgctttccgtgttctgcaggacttccagctggatgctgccatgacctactgcagagctgcccgccagttggtggagaaagagaagtacagtgagatccagcaactgctcaaatgtgtcagtgagtcaggcatggcagccaaaagtgacggggacaccatcctcctcaactgcctggaagcgttcaagagaattccgccccaggagctggagggcctgatccaggcaatacacaatgatgacaacaaggttcgggcctacctgatatgttgcaaactgcgttctgcctacttgattgctgtgaagcaagaacactcacgggccacagcccttgtccagcaggtgcagcaggccgccaagagcagcggggatgcagtagtgcaagacatctgtgcccagtggcttctgacaagccacccccggggtgcccatggcccaggctccaggaagtgaccttgggcagtggggccaggaacacgtggcctgagagctgggcaacagcagtgatggcgatgccctccacctctttcctccagtggagtgggacttctctggctctgccctaggttggaaagagttggattggaccctacttgccttcccgggcaaggataggacctttcacgcaagtgccatgtttctctaaaattgtggaatctatgtgtgtttgtctggagatggccagttctttctacctcagagtgagtgagtgagtatgtgtgcacacacgtgtgcatgttcctgtgcgctgatgtttacgcccaagcatttctgaacaaatgaaactcttctccatttaaaagaggcactttactttagacttgccactctgaaaaccttccctgcgttttggttcttgacccgggttgtcctgtttgtatagtcccccctctgtggacgtgctttagtagctcctcttacctagagggcttttacagagaattagagcaacaccaaaaggattgcctcttttccttccttcccattccaaaattcagagatggctttggggcaagtgctacctgtggaataaacctgttttccaggtgtctcttctcccaagcacaagaagtcctggagtctttggaaggtagtctgaatagaagggttttcaggtgcaggcatctgaaagctgtgggtatgtgtataaatgatcaggtctgtgaggctaacacgggcaagagggaaagaaaggctaaccatccaaacagggatacaggggaggcggtggggggtggtggggggagcgggtgctcacaagcacagagctgcctgttgtgaatgtccctgctgcaaagttggtgggtgagagaatgggacttcctctttgagagtctggggagagaaaaggtggccaggatcctaggactgaatgactcgattttacctatttgagctgcagtcctgtttgcgctccttgaattggttaggaagctgcttccttttccctcctgcttcccttcagtctcttcaggaccacaggatggatatgcagacatgtggggtcattgggaagggagtgcgcttcttttctctgtcttagaaaagggagtcaagggttggctttggaattgggcctctggacagagtcagaatgagggaataatgaataggtcacatctggttggtggaaaactaggtgaagtgcttctttaatatgcactgtcttgtcttcccacgcaagatgtgacaatgtttgagaaaaggtgtgtcatactcagtgacttcaatttgcaaatgtggggcctaaagaaagctctgcagctctgaacctctcactggccagagctcagcctattggtcccatccatgatgctgagacaaacagaaactggaagctgaagtcagtgtctctggtgctcagaaaccctgtggatttccctctgaaccaagatttttagtagtaaaataaacaactcatggacatctgtcagatgagaagttttggtcctgttagagaggagaaagactgtaatgaaactactagacccatttgggctaaagtttggcttttccttccttgagtcatagaacgtatccatctcccaggaaatgtccttctctggcgtctgcttgcccttctgagtctgccttttttgcactgaacataagcactttatactaatgggtcacaaatcttgcagcccttaatttgggataagaccagattttcctgacattttcctctaactcattgaactatcaaattataggcaaccactgactagactgatatgagatgaggctaaaagcctttgaacaccacgctgtagtctccaacagaaaaacaccaccaaaacagatacccatgttgaggggttgaatgttttactacaaacaagccacaataaagtgtctatcaacatgtt

SEQ ID NO: 35480 - DNA, 9612 bp, Homo sapiens
  source 1..9612: mol_type = unassigned DNA
actcggctcaaacatggctgcgctgagagctctattgctttgggcgccgggagcaggaggtactccgcgaatgagaacattgagaatgtgttcggcataactcatttctttgtatctccctgcactctgtgctgggaaaatgaatcatccatttggaaaagaggaagctgcttcgcagaagcagctttttggatttttctgcgaatgcctgcggaggggagaatgggagctggcacaggcatgtgtacctcagctacaggagggacaaggggatatcccaaagagggtagaagacatacttcaggcattggtggtgtgtccaaatctgctgagatgtgggcaggacatcaaccctcaaagagtagcctgggtctggcttcttgtactggagaaatggttggcccgggaaaagaagttactcccagttgttttccggagaaagcttgagtttcttttattgtcagaagacctccaaggtgacattccagagaacatcctcgaggagctgtatgagaccttaacacagggtgcagtaggccacgtgcctgacggaaatccaaggagggagagctggactcctcgtctcagctccgaagctgtctctgtgctctgggatctcctgaggcagtctccccagccagcacaggccctgctggagctcctgcttgaggaggatgacggtactggcctctgtcactggcctctgcagaatgcactggtggacctcattcgaaaggcattgcggactctgcgttgccccgcagaaccacttggggttgagttgcatctcctgtgtgaggaactactagaggcctgcaggaccgaggggagtcccctgcgggaggagcggctgctcagctgcctgctgcacaaggccagccggggcctgctgtccctgtatggccatacctatgcagagaaggtcacagaaaagccaccgagggctacagcctcgggaaaagtctcaccggatcatctagatcctgagcgggcaatgctagccctgttctccaatcccaacccagccgaggcttggaaagtggcctatttctactgcctgagcaacaacaaacacttcctcgagcagattctggtaacagcactaacattgttgaaagaagaagacttcccaaatcttggctgcctacttgatagagaattcaggcccctcagttgcctgcttgtactcctgggctggacacactgccagagcctagagtcagccaagaggctgctccagaccctgcacaggacccagggcccaggctgtgatgagctcctcagggatgcctgtgatgggttgtgggctcacctggaggtcctggagtggtgcatacagcagagcagcaaccccataccaaagagagatctgttgtatcatttacacggtggagacagccactcagtgctctacactctccatcaccttacaaaccttccagccctcagggaggaagatgttctcaagctcttacagaaagtgccagccaaggacccccagcaagagcctgatgcagttgatgctccagtccctgagcacctgagccagtgtcagaacctgacactctaccagggcttctgtgccatgaagtatgccatctatgccctctgtgtaaactcacaccagcactcccagtgccaggactgcaaagacagcctctctgaggacctggcctcagctacagagccagcgaatgactctctctcctccccaggtgctgcaaatctcttctcaacttacctggccaggtgtcaacagtatctgtgcagtattcctgactctctgtgcctggagcttctggaaaacatcttctcattgcttctcatcacctctgctgatcttcacccagagcctcacttgcctgaggactatgctgaggatgatgacattgaggggaagagcccctcaggtttgaggtccccatcagagagccctcagcacatagcacatcctgaaaggaagtcagaacggggttccctgggagtcccaaagacccttgcttatacaatgccaagccatgtgaaggcagagccaaaagacagttacccagggcctcataggcacagctttttggacttaaaacactttactagtggtatcagtggatttctggctgatgaatttgcaataggggccttcctcaggcttctccaagagcaactggatgagatcagtagccgcagccctcctgagaagccaaagcaagaaagtcagagctgctcaggaagcagagatggactgcagagccgcctgcatcgactttccaaggttgtctctgaggcccagtggagacacaaggtggtgacaagcaaccatcgttcagaggagcaaccttcccgaagataccagcctgccacacgtcaccccagtctccgccggggtcgtcggacaagaaggagccaggcagatggccgagacagaggttcaaacccatccctggaaagtacaagtagtgagctgagcacaagtacgtcagagggaagtctgagtgccatgtctggccggaatgagctgcacagtagattgcacccccatcctcaaagttcactcatccccatgatgttctccccacctgagtcactgctggcatcctgcatccttcgcgggaacttcgcagaagcccatcaggtgctgttcacgttcaacctgaagtcctcacccagttcaggggaactgatgttcatggagcgctaccaggaagtgatccaagaactggcccaagtagagcacaagattgaaaaccagaactcagatgcgggtagcagcaccattcggagaactggcagtggccgctcaactctacaggccattggcagcgctgcagcagcaggaatggtgttttactctatctctgacgtgactgacaagctgctcaacacctctggagaccccatccccatgctccaggaggacttttggataagcacggctctagtggagcccactgctcccctgagagaggttctggaagacctcagtccccctgccatggctgcatttgacctagcttgctctcagtgccagctctggaaaacctgcaagcagcttttggagacagccgaacggcgtttgaatagtagccttgaaaggcggggtcgacggatagaccacgtactcctaaatgctgatggcattcgaggttttccagttgttcttcagcaaatcagtaagagtctcaattatctgcttatgtcagccagtcaaaccaaatcagagagtgtggaagaaaagggaggaggccctccacggtgcagcatcactgaactgcttcagatgtgctggcccagcctaagcgaggactgtgttgccagccacaccaccctctcccagcagctagatcaggtccttcagtcactgagagaggcactagagctgccagagcccaggactcctccactgtcttccctggtggagcaggcagcccagaaagctccagaggcagaggcccaccctgtgcagatccagactcagctcctccagaagaacctgggcaaacagaccccatcaggcagcaggcagatggactacttgggcaccttcttcagttactgcagcacccttgctgcagttctccttcaaagtttgagctctgagcctgatcatgtggaggtcaaggtaggaaatccctttgttctgctgcaacagagctcttcccaactggtgtcacatctcctgtttgagagacaagttcccccagagagactggcagcccttctggcccaagagaatctcagcctaagtgtgccacaggtcatcgtcagctgctgctgtgagccccttgctctttgctcatcccggcaaagccagcagacctcctccctcctgactcgtctgggtactctggcccagctacacgcctctcactgcctggatgacctcccactttctacaccgagctccccgaggacaactgagaaccctacattggaaagaaagccctactcctccccaagggactcatcactcccagccctcacctcctctgccttggcctttcttaagtcacgctcaaagctcctagctacggtggcctgcctgggggcttccccgaggttaaaggtcagcaaacccagcttgtcatggaaggaacttcgtggccgcagggaggtgcctctggctgcagagcaggtagcccgggagtgtgagcgccttctggaacaattccctctgtttgaggccttcctcctggctgcctgggagcccctgcgagggtctttgcagcaggggcagagtctggcagtgaatctctgtggttgggccagtctttctaccgttctcctgggcctacattctcccattgccctagatgtactgagtgaggcttttgaggaatccttggtggccagagattggtcccgggcccttcagctcactgaagtgtacgggcgagatgtggacgatttgagcagcataaaggatgcagtcctgagctgtgctgtggcatgtgacaaagaaggttggcaatacctgtttcccgtgaaggatgcatctctgagaagtcggctggccctacagtttgtggacaggtggcccctggagtcatgcctggagattctggcctactgcatttcagacacggctgtccaagaaggactaaagtgtgagctacagaggaagctggcggagctgcaggtgtatcagaagattctgggtttgcagtctcccccagtgtggtgtgactggcagaccttgaggagctgttgtgttgaggacccatcaactgtcatgaacatgattctagaagcacaggagtatgaactgtgtgaagagtggggctgcctgtaccccattccaagagaacatttaatcagccttcatcaaaagcatcttctccaccttctagaaagaagagatcatgacaaggctctgcaactcctgcgaagaatccctgaccccaccatgtgccttgaagtgacagagcaatccctcgaccagcacactagcttggccacttctcacttcttggccaactacctcaccacccacttctatggacaactgactgctgtccgacaccgtgaaatccaggcgctgtatgtgggatccaagattctgctgaccctgcctgagcagcaccgggccagctattcccacttgtcctctaaccccctgttcatgctggagcagctgcttatgaacatgaaggtggattgggccactgtggctgtgcagactctccagcagctgctggttggacaggagattggcttcactatggacgaggtggactcactgctttccagatacgcagagaaagccctggactttccataccctcagagggagaaacgatcagattctgtgattcacctccaagaaattgtccaccaggctgcagatcccgagaccctccctagatcaccatcagcagagttctctcctgctgctcctcctggtatctccagtatacattcccctagtctaagggaaaggagtttcccaccaacccagccctcacaggaatttgtgcccccagcgacaccccctgccaggcaccagtgggtaccggatgagactgagagtatctgcatggtctgctgcagggagcacttcaccatgtttaacaggcgtcatcattgtcgccgctgtggccggctagtgtgcagctcctgctccactaagaaaatggtggttgaaggctgcagagagaaccctgctcgtgtgtgtgatcagtgctatagttactgcaacaaagatgtaccagaggagccttcagaaaaaccagaagctctagacagctccaagaatgaaagccctccatactcgtttgtggtgagagtccccaaagcagatgaggtggaatggattttggatctcaaagaggaggaaaatgagctggtgcggagtgaattttactatgagcaggcccccagcgcctccttgtgcattgccatcctgaatctgcaccgggacagcattgcctgtggtcaccagctgattgagcactgctgcaggctctccaagggcctcaccaacccagaggtggatgccgggctgctcacggacatcatgaagcagctgctgttcagcgccaagatgatgttcgtcaaagccggccagagccaagacttggctctttgtgacagctacatcagcaaggtagatgtgctgaatattttagttgctgctgcctatcgccacgtgccatctttggatcagatcttgcagccagctgcagtaaccaggctaaggaaccagcttttggaagccgagtactaccaactgggcgttgaggtctccacaaagactgggcttgataccaccggggcgtggcatgcttggggcatggcctgcctcaaagccgggaacctcactgctgcacgggagaagttcagtcgctgtctgaagcccccatttgacctcaatcagctgaatcatggctcaaggctggtgcaggatgtggttgagtacctagagtccacagtgaggccctttgtatccttgcaagatgacgattactttgccaccctgagggaactggaagctacccttcggacgcagagcctttctctggcagtgattcctgaagggaaaatcatgaacaacacctactaccaggaatgcctcttctacctgcacaactatagcaccaacctggccatcatcagcttctacgtgaggcacagctgcctgcgggaagctcttctgcaccttctcaacaaggagagtcctccagaagtttttatagaaggcattttccaaccaagctataaaagtgggaagctacacactttggagaacttgctagaatccattgatccaaccttggagagctggggaaagtacttgattgctgcctgccaacatttacagaagaagaactactaccacattctgtatgagctgcagcagtttatgaaggaccaagttcgggccgccatgacctgtattcggttcttcagtcacaaagcaaagtcatatacagaactgggagagaagctctcatggctacttaaggccaaggaccacctgaagatctacctccaagaaacatcccgcagctctggaaggaagaaaaccacattcttcagaaagaagatgactgcagctgatgtgtcaaggcacatgaacacacttcagctgcagatggaagtgaccaggttcttgcatcggtgcgaaagtgctgggacctctcaaatcaccactttgcctctgccaaccctgtttggaaataaccacatgaaaatggatgttgcctgcaaggtcatgctgggagggaaaaatgtagaagatggttttggaattgctttccgtgttctgcaggacttccagctggatgctgccatgacctactgcagagctgcccgccagttggtggagaaagagaagtacagtgagatccagcaactgctcaaatgtgtcagtgagtcaggcatggcagccaaaagtgacggggacaccatcctcctcaactgcctggaagcgttcaagagaattccgccccaggagctggagggcctgatccaggcaatacacaatgatgacaacaaggttcgggcctacctgatatgttgcaaactgcgttctgcctacttgattgctgtgaagcaagaacactcacgggccacagcccttgtccagcaggtgcagcaggccgccaagagcagcggggatgcagtagtgcaagacatctgtgcccagtggcttctgacaagccacccccggggtgcccatggcccaggctccaggaagtgaccttgggcagtggggccaggaacacgtggcctgagagctgggcaacagcagtgatggcgatgccctccacctctttcctccagtggagtgggacttctctggctctgccctaggttggaaagagttggattggaccctacttgccttcccgggcaaggataggacctttcacgcaagtgccatgtttctctaaaattgtggaatctatgtgtgtttgtctggagatggccagttctttctacctcagagtgagtgagtgagtatgtgtgcacacacgtgtgcatgttcctgtgcgctgatgtttacgcccaagcatttctgaacaaatgaaactcttctccatttaaaagaggcactttactttagacttgccactctgaaaaccttccctgcgttttggttcttgacccgggttgtcctgtttgtatagtcccccctctgtggacgtgctttagtagctcctcttacctagagggcttttacagagaattagagcaacaccaaaaggattgcctcttttccttccttcccattccaaaattcagagatggctttggggcaagtgctacctgtggaataaacctgttttccaggtgtctcttctcccaagcacaagaagtcctggagtctttggaaggtagtctgaatagaagggttttcaggtgcaggcatctgaaagctgtgggtatgtgtataaatgatcaggtctgtgaggctaacacgggcaagagggaaagaaaggctaaccatccaaacagggatacaggggaggcggtggggggtggtggggggagcgggtgctcacaagcacagagctgcctgttgtgaatgtccctgctgcaaagttggtgggtgagagaatgggacttcctctttgagagtctggggagagaaaaggtggccaggatcctaggactgaatgactcgattttacctatttgagctgcagtcctgtttgcgctccttgaattggttaggaagctgcttccttttccctcctgcttcccttcagtctcttcaggaccacaggatggatatgcagacatgtggggtcattgggaagggagtgcgcttcttttctctgtcttagaaaagggagtcaagggttggctttggaattgggcctctggacagagtcagaatgagggaataatgaataggtcacatctggttggtggaaaactaggtgaagtgcttctttaatatgcactgtcttgtcttcccacgcaagatgtgacaatgtttgagaaaaggtgtgtcatactcagtgacttcaatttgcaaatgtggggcctaaagaaagctctgcagctctgaacctctcactggccagagctcagcctattggtcccatccatgatgctgagacaaacagaaactggaagctgaagtcagtgtctctggtgctcagaaaccctgtggatttccctctgaaccaagatttttagtagtaaaataaacaactcatggacatctgtcagatgagaagttttggtcctgttagagaggagaaagactgtaatgaaactactagacccatttgggctaaagtttggcttttccttccttgagtcatagaacgtatccatctcccaggaaatgtccttctctggcgtctgcttgcccttctgagtctgccttttttgcactgaacataagcactttatactaatgggtcacaaatcttgcagcccttaatttgggataagaccagattttcctgacattttcctctaactcattgaactatcaaattataggcaaccactgactagactgatatgagatgaggctaaaagcctttgaacaccacgctgtagtctccaacagaaaaacaccaccaaaacagatacccatgttgaggggttgaatgttttactacaaacaagccacaataaagtgtctatcaacatgtt

SEQ ID NO: 35481 - DNA, 2927 bp, Homo sapiens
  source 1..2927: mol_type = unassigned DNA
gcagagcgattcgcgtcccggaagcggcggtggcggccgcggcgtaggcggaggagattttcggacctgcgacttccgaacaaccctggcaggaggagcggcgttcagccgggggaggcctgaagaaacgctccggggcccagtggctctacccctgctcctgcccgaccctgccgcctccctcacggagccagcggccgggatgcagacatcagaacgtgaggggagtgggccggagctgagccccagcgtgatgcccgaggctcccctggagtctccaccttttcctaccaagtccccagcgtttgaccttttcaacttggttctctcctacaagaggctggagatctacctggaacccttgaaggatgcaggtgcatggtactcagtaggtgccctgatgatttcagtgcccgccctgctgggctaccttcaggaggtttgccgggcacggctgcctgattccgagctgatgcggaggaagtatcatagcgtgaggcaggaggacctgcagagaggtcgcctgtctcgtcccgaggccgtggctgaggtgaagagcttcttgatccagctggaggccttcctgagccgcctgtgctgcacatgtgaagccgcctaccgcgtgctgcactgggagaaccccgtcgtgtcctcacagttctatggggctcttctgggcacagtctgcatgctgtatttgctgccactctgctgggttctcacccttttaaacagcacgctctttctggggaatgtggagttcttccgagttgtgtctgagtacagggcatctctgcagcagaggatgaacccaaagcaggaagagcatgcctttgagagtcctccaccaccagatgttggggggaaggatggtctgatggacagcacgcctgccctcacacccacggaggacctcacaccgggcagcgtggaggaggctgaggaggctgagccagatgaagagtttaaagatgcgattgaggaggatgatgagggcgccccgtgcccagcagaggatgagctggccctgcaggacaacgggttcctgagcaagaatgaggtgctgcgcagcaaggtgtctcggctcacggagcggctccgcaagcgctaccccaccaacaacttcgggaactgcacgggctgctcggccaccttctcagtgctgaagaagaggcggagctgcagtaattgtggaaacagcttctgctctcgatgctgctccttcaaggtgcccaagtcctccatgggggccacagcccctgaagcccagagggagactgtgtttgtgtgtgcctcgtgtaaccagaccttgagcaagtgagaagagaggccagggtccaaccaggcacccgtccttgggaccagcagtagaccccccactctccccacccctggcccactgtggtgtgtgctgggcaaatgtggcctgaatgctaggtaggcttccccttccttcctcactctctccagctggattctggagctgttctccatccatgagagtggctggcaatggctgctctcaatcccttgagggagaagagcccctggagggcctggcatgtttgtcctgctctgcctgggactgagcgagtggacttagggctgggcaggcagtagccaccagagggcagcagcgaactaggccaggcctgactggggtctgaagatcagggtcagtgtggctgtgcctgggaattccagacctgaggttgggaaaagaggtttttctcctgcagggtactgggccaggccctcagcctcagagagcctgcagaagggcttgggagtgccacaccccatctctgctgattgaatgtccctccaggcaccaggatctcatcatttccccatcagagggtgtggccaggcctaacaagaccatgggtgcttctagaaacagggttgaagttcccagattccctgagaggagaatgtgtataggagggtttggctgagtccttcagcgttaagtggaggaaagcttggggaagccccaatagctggacagacctcggcctcccctcgaagacacctcaattcacagactctcagcccacacaatgccccagtgtccccagctccgctggagcagctgcagggcacttggatcacaacttctgcaccctctgtccagagtctagggcagtcctccactggcccagcactccagtttcctttccctgcctcttgtccaatggagtgggaggccaggtgagtggagcagaggtcctgaagcccttgacccctgggggcctgggtagtgtaggatctcgctgggctgggtcctggattccagggctattccctggaggacagtctcagttatgggataaggccccctgggggtctccatttctttccaacagtttcatgttcactactggactcttacgggctcagtatctctcccttagccatgagctggctcaggcatcccttcccttccctggagctgccctgcctttctcaagtatttatttatttattgcatggttcctgggaacatgtggcacaagtaatgggatgaggaggaattgggggtgggggtcttctacctaggactcttccctggagtcatgggctgcctgggacccaggacccatgagggggctgagaggtttctacactcgaggagcaggggtccagagaggcaggctggggaggcaagggacccatcctaggcccgctttcttgccgagccaagcagcttagctggggctgtgcagccaggggcttacccaggccagtggaggtgccacagccctggggagccagacaggctttggtatcgtatcgcctctgtgtccttttaagagaggagagttcagtaccccgtgctttctttacactggagaggaactaaaaggatctctgtgtctatggagaattgtcaataaaaaggcctcaagcttcttgtttttgtc

SEQ ID NO: 35482 - DNA, 2858 bp, Homo sapiens
  source 1..2858: mol_type = unassigned DNA
gatgcagacatcagaacgtgaggggagtgggccggagctgagccccagcgtgatgcccgaggctcccctggagtctccaccttttcctaccaagtccccagcgtttgaccttttcaacttggttctctcctacaagaggctggagatctacctggaacccttgaaggatgcaggtgatggtgttcgatacttgctcaggtggcagatgcctttgtgttccttgctgacctgcctgggcctcaacgtcttgttcctcactttgaatgagggtgcatggtactcagtaggtgccctgatgatttcagtgcccgccctgctgggctaccttcaggaggtttgccgggcacggctgcctgattccgagctgatgcggaggaagtatcatagcgtgaggcaggaggacctgcagagaggtcgcctgtctcgtcccgaggccgtggctgaggtgaagagcttcttgatccagctggaggccttcctgagccgcctgtgctgcacatgtgaagccgcctaccgcgtgctgcactgggagaaccccgtcgtgtcctcacagttctatggggctcttctgggcacagtctgcatgctgtatttgctgccactctgctgggttctcacccttttaaacagcacgctctttctggggaatgtggagttcttccgagttgtgtctgagtacagggcatctctgcagcagaggatgaacccaaagcaggaagagcatgcctttgagagtcctccaccaccagatgttggggggaaggatggtctgatggacagcacgcctgccctcacacccacggagagtctctcttcccaggacctcacaccgggcagcgtggaggaggctgaggaggctgagccagatgaagagtttaaagatgcgattgaggagacccacttggtggtgctggaggatgatgagggcgccccgtgcccagcagaggatgagctggccctgcaggacaacgggttcctgagcaagaatgaggtgctgcgcagcaaggtgtctcggctcacggagcggctccgcaagcgctaccccaccaacaacttcgggaactgcacgggctgctcggccaccttctcagtgctgaagaagaggcggagctgcagtaattgtggaaacagcttctgctctcgatgctgctccttcaaggtgcccaagtcctccatgggggccacagcccctgaagcccagagggagactgtgtttgtgtgtgcctcgtgtaaccagaccttgagcaagtgagaagagaggccagggtccaaccaggcacccgtccttgggaccagcagtagaccccccactctccccacccctggcccactgtggtgtgtgctgggcaaatgtggcctgaatgctaggtaggcttccccttccttcctcactctctccagctggattctggagctgttctccatccatgagagtggctggcaatggctgctctcaatcccttgagggagaagagcccctggagggcctggcatgtttgtcctgctctgcctgggactgagcgagtggacttagggctgggcaggcagtagccaccagagggcagcagcgaactaggccaggcctgactggggtctgaagatcagggtcagtgtggctgtgcctgggaattccagacctgaggttgggaaaagaggtttttctcctgcagggtactgggccaggccctcagcctcagagagcctgcagaagggcttgggagtgccacaccccatctctgctgattgaatgtccctccaggcaccaggatctcatcatttccccatcagagggtgtggccaggcctaacaagaccatgggtgcttctagaaacagggttgaagttcccagattccctgagaggagaatgtgtataggagggtttggctgagtccttcagcgttaagtggaggaaagcttggggaagccccaatagctggacagacctcggcctcccctcgaagacacctcaattcacagactctcagcccacacaatgccccagtgtccccagctccgctggagcagctgcagggcacttggatcacaacttctgcaccctctgtccagagtctagggcagtcctccactggcccagcactccagtttcctttccctgcctcttgtccaatggagtgggaggccaggtgagtggagcagaggtcctgaagcccttgacccctgggggcctgggtagtgtaggatctcgctgggctgggtcctggattccagggctattccctggaggacagtctcagttatgggataaggccccctgggggtctccatttctttccaacagtttcatgttcactactggactcttacgggctcagtatctctcccttagccatgagctggctcaggcatcccttcccttccctggagctgccctgcctttctcaagtatttatttatttattgcatggttcctgggaacatgtggcacaagtaatgggatgaggaggaattgggggtgggggtcttctacctaggactcttccctggagtcatgggctgcctgggacccaggacccatgagggggctgagaggtttctacactcgaggagcaggggtccagagaggcaggctggggaggcaagggacccatcctaggcccgctttcttgccgagccaagcagcttagctggggctgtgcagccaggggcttacccaggccagtggaggtgccacagccctggggagccagacaggctttggtatcgtatcgcctctgtgtccttttaagagaggagagttcagtaccccgtgctttctttacactggagaggaactaaaaggatctctgtgtctatggagaattgtcaataaaaaggcctcaagcttcttgtttttgtc

SEQ ID NO: 35483 - DNA, 2765 bp, Homo sapiens
  source 1..2765: mol_type = unassigned DNA
gcagagcgattcgcgtcccggaagcggcggtggcggccgcggcgtaggcggaggagattttcggacctgcgacttccgaacaaccctggcaggaggagcggcgttcagccgggggaggcctgaagaaacgctccggggcccagtggctctacccctgctcctgcccgaccctgccgcctccctcacggagccagcggccgggatgcagacatcagaacgtgaggggagtgggccggagctgagccccagcgtgatgcccgaggctcccctggagtctccaccttttcctaccaagtccccagcgtttgaccttttcaacttggttctctcctacaagaggctggagatctacctggaacccttgaaggatgcaggtgatggtgttcgatacttgctcagcttgatccagctggaggccttcctgagccgcctgtgctgcacatgtgaagccgcctaccgcgtgctgcactgggagaaccccgtcgtgtcctcacagttctatggggctcttctgggcacagtctgcatgctgtatttgctgccactctgctgggttctcacccttttaaacagcacgctctttctggggaatgtggagttcttccgagttgtgtctgagtacagggcatctctgcagcagaggatgaacccaaagcaggaagagcatgcctttgagagtcctccaccaccagatgttggggggaaggatggtctgatggacagcacgcctgccctcacacccacggaggacctcacaccgggcagcgtggaggaggctgaggaggctgagccagatgaagagtttaaagatgcgattgaggaggatgatgagggcgccccgtgcccagcagaggatgagctggccctgcaggacaacgggttcctgagcaagaatgaggtgctgcgcagcaaggtgtctcggctcacggagcggctccgcaagcgctaccccaccaacaacttcgggaactgcacgggctgctcggccaccttctcagtgctgaagaagaggcggagctgcagtaattgtggaaacagcttctgctctcgatgctgctccttcaaggtgcccaagtcctccatgggggccacagcccctgaagcccagagggagactgtgtttgtgtgtgcctcgtgtaaccagaccttgagcaagtgagaagagaggccagggtccaaccaggcacccgtccttgggaccagcagtagaccccccactctccccacccctggcccactgtggtgtgtgctgggcaaatgtggcctgaatgctaggtaggcttccccttccttcctcactctctccagctggattctggagctgttctccatccatgagagtggctggcaatggctgctctcaatcccttgagggagaagagcccctggagggcctggcatgtttgtcctgctctgcctgggactgagcgagtggacttagggctgggcaggcagtagccaccagagggcagcagcgaactaggccaggcctgactggggtctgaagatcagggtcagtgtggctgtgcctgggaattccagacctgaggttgggaaaagaggtttttctcctgcagggtactgggccaggccctcagcctcagagagcctgcagaagggcttgggagtgccacaccccatctctgctgattgaatgtccctccaggcaccaggatctcatcatttccccatcagagggtgtggccaggcctaacaagaccatgggtgcttctagaaacagggttgaagttcccagattccctgagaggagaatgtgtataggagggtttggctgagtccttcagcgttaagtggaggaaagcttggggaagccccaatagctggacagacctcggcctcccctcgaagacacctcaattcacagactctcagcccacacaatgccccagtgtccccagctccgctggagcagctgcagggcacttggatcacaacttctgcaccctctgtccagagtctagggcagtcctccactggcccagcactccagtttcctttccctgcctcttgtccaatggagtgggaggccaggtgagtggagcagaggtcctgaagcccttgacccctgggggcctgggtagtgtaggatctcgctgggctgggtcctggattccagggctattccctggaggacagtctcagttatgggataaggccccctgggggtctccatttctttccaacagtttcatgttcactactggactcttacgggctcagtatctctcccttagccatgagctggctcaggcatcccttcccttccctggagctgccctgcctttctcaagtatttatttatttattgcatggttcctgggaacatgtggcacaagtaatgggatgaggaggaattgggggtgggggtcttctacctaggactcttccctggagtcatgggctgcctgggacccaggacccatgagggggctgagaggtttctacactcgaggagcaggggtccagagaggcaggctggggaggcaagggacccatcctaggcccgctttcttgccgagccaagcagcttagctggggctgtgcagccaggggcttacccaggccagtggaggtgccacagccctggggagccagacaggctttggtatcgtatcgcctctgtgtccttttaagagaggagagttcagtaccccgtgctttctttacactggagaggaactaaaaggatctctgtgtctatggagaattgtcaataaaaaggcctcaagcttcttgtttttgtc

SEQ ID NO: 35484 - DNA, 2997 bp, Homo sapiens
  source 1..2997: mol_type = unassigned DNA
ggaagcggcggtggcggccgcggcgtaggcggaggagattttcggacctgcgacttccgaacaaccctggcaggaggagcggcgttcagccgggggaggcctgaagaaacgctccggggcccagtggctctacccctgctcctgcccgaccctgccgcctccctcacggagccagcggccgggtaggatgcagacatcagaacgtgaggggagtgggccggagctgagccccagcgtgatgcccgaggctcccctggagtctccaccttttcctaccaagtccccagcgtttgaccttttcaacttggttctctcctacaagaggctggagatctacctggaacccttgaaggatgcaggtgatggtgttcgatacttgctcaggtggcagatgcctttgtgttccttgctgacctgcctgggcctcaacgtcttgttcctcactttgaatgagggtgcatggtactcagtaggtgccctgatgatttcagtgcccgccctgctgggctaccttcaggaggtttgccgggcacggctgcctgattccgagctgatgcggaggaagtatcatagcgtgaggcaggaggacctgcagagaggtcgcctgtctcgtcccgaggccgtggctgaggtgaagagcttcttgatccagctggaggccttcctgagccgcctgtgctgcacatgtgaagccgcctaccgcgtgctgcactgggagaaccccgtcgtgtcctcacagttctatggggctcttctgggcacagtctgcatgctgtatttgctgccactctgctgggttctcacccttttaaacagcacgctctttctggggaatgtggagttcttccgagttgtgtctgagtacagggcatctctgcagcagaggatgaacccaaagcaggaagagcatgcctttgagagtcctccaccaccagatgttggggggaaggatggtctgatggacagcacgcctgccctcacacccacggaggacctcacaccgggcagcgtggaggaggctgaggaggctgagccagatgaagagtttaaagatgcgattgaggaggatgatgagggcgccccgtgcccagcagaggatgagctggccctgcaggacaacgggttcctgagcaagaatgaggtgctgcgcagcaaggtgtctcggctcacggagcggctccgcaagcgctaccccaccaacaacttcgggaactgcacgggctgctcggccaccttctcagtgctgaagaagaggcggagctgcagtaattgtggaaacagcttctgctctcgatgctgctccttcaaggtgcccaagtcctccatgggggccacagcccctgaagcccagagggagactgtgtttgtgtgtgcctcgtgtaaccagaccttgagcaagtgagaagagaggccagggtccaaccaggcacccgtccttgggaccagcagtagaccccccactctccccacccctggcccactgtggtgtgtgctgggcaaatgtggcctgaatgctaggtaggcttccccttccttcctcactctctccagctggattctggagctgttctccatccatgagagtggctggcaatggctgctctcaatcccttgagggagaagagcccctggagggcctggcatgtttgtcctgctctgcctgggactgagcgagtggacttagggctgggcaggcagtagccaccagagggcagcagcgaactaggccaggcctgactggggtctgaagatcagggtcagtgtggctgtgcctgggaattccagacctgaggttgggaaaagaggtttttctcctgcagggtactgggccaggccctcagcctcagagagcctgcagaagggcttgggagtgccacaccccatctctgctgattgaatgtccctccaggcaccaggatctcatcatttccccatcagagggtgtggccaggcctaacaagaccatgggtgcttctagaaacagggttgaagttcccagattccctgagaggagaatgtgtataggagggtttggctgagtccttcagcgttaagtggaggaaagcttggggaagccccaatagctggacagacctcggcctcccctcgaagacacctcaattcacagactctcagcccacacaatgccccagtgtccccagctccgctggagcagctgcagggcacttggatcacaacttctgcaccctctgtccagagtctagggcagtcctccactggcccagcactccagtttcctttccctgcctcttgtccaatggagtgggaggccaggtgagtggagcagaggtcctgaagcccttgacccctgggggcctgggtagtgtaggatctcgctgggctgggtcctggattccagggctattccctggaggacagtctcagttatgggataaggccccctgggggtctccatttctttccaacagtttcatgttcactactggactcttacgggctcagtatctctcccttagccatgagctggctcaggcatcccttcccttccctggagctgccctgcctttctcaagtatttatttatttattgcatggttcctgggaacatgtggcacaagtaatgggatgaggaggaattgggggtgggggtcttctacctaggactcttccctggagtcatgggctgcctgggacccaggacccatgagggggctgagaggtttctacactcgaggagcaggggtccagagaggcaggctggggaggcaagggacccatcctaggcccgctttcttgccgagccaagcagcttagctggggctgtgcagccaggggcttacccaggccagtggaggtgccacagccctggggagccagacaggctttggtatcgtatcgcctctgtgtccttttaagagaggagagttcagtaccccgtgctttctttacactggagaggaactaaaaggatctctgtgtctatggagaattgtcaataaaaaggcctcaagcttc

SEQ ID NO: 35485 - DNA, 2769 bp, Homo sapiens
  source 1..2769: mol_type = unassigned DNA
gcagagcgattcgcgtcccggaagcggcggtggcggccgcggcgtaggcggaggagattttcggacctgcgacttccgaacaaccctggcaggaggagcggcgttcagccgggggaggcctgaagaaacgctccggggcccagtggctctacccctgctcctgcccgaccctgccgcctccctcacggagccagcggccgggtgcatggtactcagtaggtgccctgatgatttcagtgcccgccctgctgggctaccttcaggaggtttgccgggcacggctgcctgattccgagctgatgcggaggaagtatcatagcgtgaggcaggaggacctgcagagaggtcgcctgtctcgtcccgaggccgtggctgaggtgaagagcttcttgatccagctggaggccttcctgagccgcctgtgctgcacatgtgaagccgcctaccgcgtgctgcactgggagaaccccgtcgtgtcctcacagttctatggggctcttctgggcacagtctgcatgctgtatttgctgccactctgctgggttctcacccttttaaacagcacgctctttctggggaatgtggagttcttccgagttgtgtctgagtacagggcatctctgcagcagaggatgaacccaaagcaggaagagcatgcctttgagagtcctccaccaccagatgttggggggaaggatggtctgatggacagcacgcctgccctcacacccacggagagtctctcttcccaggacctcacaccgggcagcgtggaggaggctgaggaggctgagccagatgaagagtttaaagatgcgattgaggaggatgatgagggcgccccgtgcccagcagaggatgagctggccctgcaggacaacgggttcctgagcaagaatgaggtgctgcgcagcaaggtgtctcggctcacggagcggctccgcaagcgctaccccaccaacaacttcgggaactgcacgggctgctcggccaccttctcagtgctgaagaagaggcggagctgcagtaattgtggaaacagcttctgctctcgatgctgctccttcaaggtgcccaagtcctccatgggggccacagcccctgaagcccagagggagactgtgtttgtgtgtgcctcgtgtaaccagaccttgagcaagtgagaagagaggccagggtccaaccaggcacccgtccttgggaccagcagtagaccccccactctccccacccctggcccactgtggtgtgtgctgggcaaatgtggcctgaatgctaggtaggcttccccttccttcctcactctctccagctggattctggagctgttctccatccatgagagtggctggcaatggctgctctcaatcccttgagggagaagagcccctggagggcctggcatgtttgtcctgctctgcctgggactgagcgagtggacttagggctgggcaggcagtagccaccagagggcagcagcgaactaggccaggcctgactggggtctgaagatcagggtcagtgtggctgtgcctgggaattccagacctgaggttgggaaaagaggtttttctcctgcagggtactgggccaggccctcagcctcagagagcctgcagaagggcttgggagtgccacaccccatctctgctgattgaatgtccctccaggcaccaggatctcatcatttccccatcagagggtgtggccaggcctaacaagaccatgggtgcttctagaaacagggttgaagttcccagattccctgagaggagaatgtgtataggagggtttggctgagtccttcagcgttaagtggaggaaagcttggggaagccccaatagctggacagacctcggcctcccctcgaagacacctcaattcacagactctcagcccacacaatgccccagtgtccccagctccgctggagcagctgcagggcacttggatcacaacttctgcaccctctgtccagagtctagggcagtcctccactggcccagcactccagtttcctttccctgcctcttgtccaatggagtgggaggccaggtgagtggagcagaggtcctgaagcccttgacccctgggggcctgggtagtgtaggatctcgctgggctgggtcctggattccagggctattccctggaggacagtctcagttatgggataaggccccctgggggtctccatttctttccaacagtttcatgttcactactggactcttacgggctcagtatctctcccttagccatgagctggctcaggcatcccttcccttccctggagctgccctgcctttctcaagtatttatttatttattgcatggttcctgggaacatgtggcacaagtaatgggatgaggaggaattgggggtgggggtcttctacctaggactcttccctggagtcatgggctgcctgggacccaggacccatgagggggctgagaggtttctacactcgaggagcaggggtccagagaggcaggctggggaggcaagggacccatcctaggcccgctttcttgccgagccaagcagcttagctggggctgtgcagccaggggcttacccaggccagtggaggtgccacagccctggggagccagacaggctttggtatcgtatcgcctctgtgtccttttaagagaggagagttcagtaccccgtgctttctttacactggagaggaactaaaaggatctctgtgtctatggagaattgtcaataaaaaggcctcaagcttcttgtttttgtc

SEQ ID NO: 35486 - DNA, 2669 bp, Homo sapiens
  source 1..2669: mol_type = unassigned DNA
gcagagcgattcgcgtcccggaagcggcggtggcggccgcggcgtaggcggaggagattttcggacctgcgacttccgaacaaccctggcaggaggagcggcgttcagccgggggaggcctgaagaaacgctccggggcccagtggctctacccctgctcctgcccgaccctgccgcctccctcacggagccagcggccgggatgcagacatcagaacgtgaggggagtgggccggagctgagccccagcgtgatgcccgaggctcccctggagtctccaccttttcctaccaagtccccagcgtttgaccttttcaacttggttctctcctacaagaggctggagatctacctggaacccttgaaggatgcaggtgatggtgttcgatacttgctcaggttctatggggctcttctgggcacagtctgcatgctgtatttgctgccactctgctgggttctcacccttttaaacagcacgctctttctggggaatgtggagttcttccgagttgtgtctgagtacagggcatctctgcagcagaggatgaacccaaagcaggaagagcatgcctttgagagtcctccaccaccagatgttggggggaaggatggtctgatggacagcacgcctgccctcacacccacggaggacctcacaccgggcagcgtggaggaggctgaggaggctgagccagatgaagagtttaaagatgcgattgaggaggatgatgagggcgccccgtgcccagcagaggatgagctggccctgcaggacaacgggttcctgagcaagaatgaggtgctgcgcagcaaggtgtctcggctcacggagcggctccgcaagcgctaccccaccaacaacttcgggaactgcacgggctgctcggccaccttctcagtgctgaagaagaggcggagctgcagtaattgtggaaacagcttctgctctcgatgctgctccttcaaggtgcccaagtcctccatgggggccacagcccctgaagcccagagggagactgtgtttgtgtgtgcctcgtgtaaccagaccttgagcaagtgagaagagaggccagggtccaaccaggcacccgtccttgggaccagcagtagaccccccactctccccacccctggcccactgtggtgtgtgctgggcaaatgtggcctgaatgctaggtaggcttccccttccttcctcactctctccagctggattctggagctgttctccatccatgagagtggctggcaatggctgctctcaatcccttgagggagaagagcccctggagggcctggcatgtttgtcctgctctgcctgggactgagcgagtggacttagggctgggcaggcagtagccaccagagggcagcagcgaactaggccaggcctgactggggtctgaagatcagggtcagtgtggctgtgcctgggaattccagacctgaggttgggaaaagaggtttttctcctgcagggtactgggccaggccctcagcctcagagagcctgcagaagggcttgggagtgccacaccccatctctgctgattgaatgtccctccaggcaccaggatctcatcatttccccatcagagggtgtggccaggcctaacaagaccatgggtgcttctagaaacagggttgaagttcccagattccctgagaggagaatgtgtataggagggtttggctgagtccttcagcgttaagtggaggaaagcttggggaagccccaatagctggacagacctcggcctcccctcgaagacacctcaattcacagactctcagcccacacaatgccccagtgtccccagctccgctggagcagctgcagggcacttggatcacaacttctgcaccctctgtccagagtctagggcagtcctccactggcccagcactccagtttcctttccctgcctcttgtccaatggagtgggaggccaggtgagtggagcagaggtcctgaagcccttgacccctgggggcctgggtagtgtaggatctcgctgggctgggtcctggattccagggctattccctggaggacagtctcagttatgggataaggccccctgggggtctccatttctttccaacagtttcatgttcactactggactcttacgggctcagtatctctcccttagccatgagctggctcaggcatcccttcccttccctggagctgccctgcctttctcaagtatttatttatttattgcatggttcctgggaacatgtggcacaagtaatgggatgaggaggaattgggggtgggggtcttctacctaggactcttccctggagtcatgggctgcctgggacccaggacccatgagggggctgagaggtttctacactcgaggagcaggggtccagagaggcaggctggggaggcaagggacccatcctaggcccgctttcttgccgagccaagcagcttagctggggctgtgcagccaggggcttacccaggccagtggaggtgccacagccctggggagccagacaggctttggtatcgtatcgcctctgtgtccttttaagagaggagagttcagtaccccgtgctttctttacactggagaggaactaaaaggatctctgtgtctatggagaattgtcaataaaaaggcctcaagcttcttgtttttgtc

SEQ ID NO: 35487 - DNA, 3035 bp, Homo sapiens
  source 1..3035: mol_type = unassigned DNA
agagcgattcgcgtcccggaagcggcggtggcggccgcggcgtaggcggaggagattttcggacctgcgacttccgaacaaccctggcaggaggagcggcgttcagccgggggaggcctgaagaaacgctccggggcccagtggctctacccctgctcctgcccgaccctgccgcctccctcacggagccagcggccgggtaggatgcagacatcagaacgtgaggggagtgggccggagctgagccccagcgtgatgcccgaggctcccctggagtctccaccttttcctaccaagtccccagcgtttgaccttttcaacttggttctctcctacaagaggctggagatctacctggaacccttgaaggatgcaggtgatggtgttcgatacttgctcaggtggcagatgcctttgtgttccttgctgacctgcctgggcctcaacgtcttgttcctcactttgaatgagggtgcatggtactcagtaggtgccctgatgatttcagtgcccgccctgctgggctaccttcaggaggtttgccgggcacggctgcctgattccgagctgatgcggaggaagtatcatagcgtgaggcaggaggacctgcagagaggtcgcctgtctcgtcccgaggccgtggctgaggtgaagagcttcttgatccagctggaggccttcctgagccgcctgtgctgcacatgtgaagccgcctaccgcgtgctgcactgggagaaccccgtcgtgtcctcacagttctatggggctcttctgggcacagtctgcatgctgtatttgctgccactctgctgggttctcacccttttaaacagcacgctctttctggggaatgtggagttcttccgagttgtgtctgagtacagggcatctctgcagcagaggatgaacccaaagcaggaagagcatgcctttgagagtcctccaccaccagatgttggggggaaggatggtctgatggacagcacgcctgccctcacacccacggaggacctcacaccgggcagcgtggaggaggctgaggaggctgagccagatgaagagtttaaagatgcgattgaggagacccacttggtggtgctggaggatgatgagggcgccccgtgcccagcagaggatgagctggccctgcaggacaacgggttcctgagcaagaatgaggtgctgcgcagcaaggtgtctcggctcacggagcggctccgcaagcgctaccccaccaacaacttcgggaactgcacgggctgctcggccaccttctcagtgctgaagaagaggcggagctgcagtaattgtggaaacagcttctgctctcgatgctgctccttcaaggtgcccaagtcctccatgggggccacagcccctgaagcccagagggagactgtgtttgtgtgtgcctcgtgtaaccagaccttgagcaagtgagaagagaggccagggtccaaccaggcacccgtccttgggaccagcagtagaccccccactctccccacccctggcccactgtggtgtgtgctgggcaaatgtggcctgaatgctaggtaggcttccccttccttcctcactctctccagctggattctggagctgttctccatccatgagagtggctggcaatggctgctctcaatcccttgagggagaagagcccctggagggcctggcatgtttgtcctgctctgcctgggactgagcgagtggacttagggctgggcaggcagtagccaccagagggcagcagcgaactaggccaggcctgactggggtctgaagatcagggtcagtgtggctgtgcctgggaattccagacctgaggttgggaaaagaggtttttctcctgcagggtactgggccaggccctcagcctcagagagcctgcagaagggcttgggagtgccacaccccatctctgctgattgaatgtccctccaggcaccaggatctcatcatttccccatcagagggtgtggccaggcctaacaagaccatgggtgcttctagaaacagggttgaagttcccagattccctgagaggagaatgtgtataggagggtttggctgagtccttcagcgttaagtggaggaaagcttggggaagccccaatagctggacagacctcggcctcccctcgaagacacctcaattcacagactctcagcccacacaatgccccagtgtccccagctccgctggagcagctgcagggcacttggatcacaacttctgcaccctctgtccagagtctagggcagtcctccactggcccagcactccagtttcctttccctgcctcttgtccaatggagtgggaggccaggtgagtggagcagaggtcctgaagcccttgacccctgggggcctgggtagtgtaggatctcgctgggctgggtcctggattccagggctattccctggaggacagtctcagttatgggataaggccccctgggggtctccatttctttccaacagtttcatgttcactactggactcttacgggctcagtatctctcccttagccatgagctggctcaggcatcccttcccttccctggagctgccctgcctttctcaagtatttatttatttattgcatggttcctgggaacatgtggcacaagtaatgggatgaggaggaattgggggtgggggtcttctacctaggactcttccctggagtcatgggctgcctgggacccaggacccatgagggggctgagaggtttctacactcgaggagcaggggtccagagaggcaggctggggaggcaagggacccatcctaggcccgctttcttgccgagccaagcagcttagctggggctgtgcagccaggggcttacccaggccagtggaggtgccacagccctggggagccagacaggctttggtatcgtatcgcctctgtgtccttttaagagaggagagttcagtaccccgtgctttctttacactggagaggaactaaaaggatctctgtgtctatggagaattgtcaataaaaaggcctcaagcttc

SEQ ID NO: 35488 - DNA, 2780 bp, Homo sapiens
  source 1..2780: mol_type = unassigned DNA
ctggagtctccaccttttcctaccaagtccccagcgtttgaccttttcaacttggttctctcctacaagaggctggagatctacctggaacccttgaaggatgcaggtgatggtgttcgatacttgctcaggtggcagatgcctttgtgttccttgctgacctgcctgggcctcaacgtcttgttcctcactttgaatgagggtgcatggtactcagtaggtgccctgatgatttcagtgcccgccctgctgggctaccttcaggaggtttgccgggcacggctgcctgattccgagctgatgcggaggaagtatcatagcgtgaggcaggaggacctgcagagaggtcgcctgtctcgtcccgaggccgtggctgaggtgaagagcttcttgatccagctggaggccttcctgagccgcctgtgctgcacatgtgaagccgcctaccgcgtgctgcactgggagaaccccgtcgtgtcctcacagttctatggggctcttctgggcacagtctgcatgctgtatttgctgccactctgctgggttctcacccttttaaacagcacgctctttctggggaatgtggagttcttccgagttgtgtctgagtacagggcatctctgcagcagaggatgaacccaaagcaggaagagcatgcctttgagagtcctccaccaccagatgttggggggaaggatggtctgatggacagcacgcctgccctcacacccacggagagtctctcttcccaggacctcacaccgggcagcgtggaggaggctgaggaggctgagccagatgaagagtttaaagatgcgattgaggagacccacttggtggtgctggaggatgatgagggcgccccgtgcccagcagaggatgagctggccctgcaggacaacgggttcctgagcaagaatgaggtgctgcgcagcaaggtgtctcggctcacggagcggctccgcaagcgctaccccaccaacaacttcgggaactgcacgggctgctcggccaccttctcagtgctgaagaagaggcggagctgcagtaattgtggaaacagcttctgctctcgatgctgctccttcaaggtgcccaagtcctccatgggggccacagcccctgaagcccagagggagactgtgtttgtgtgtgcctcgtgtaaccagaccttgagcaagtgagaagagaggccagggtccaaccaggcacccgtccttgggaccagcagtagaccccccactctccccacccctggcccactgtggtgtgtgctgggcaaatgtggcctgaatgctaggtaggcttccccttccttcctcactctctccagctggattctggagctgttctccatccatgagagtggctggcaatggctgctctcaatcccttgagggagaagagcccctggagggcctggcatgtttgtcctgctctgcctgggactgagcgagtggacttagggctgggcaggcagtagccaccagagggcagcagcgaactaggccaggcctgactggggtctgaagatcagggtcagtgtggctgtgcctgggaattccagacctgaggttgggaaaagaggtttttctcctgcagggtactgggccaggccctcagcctcagagagcctgcagaagggcttgggagtgccacaccccatctctgctgattgaatgtccctccaggcaccaggatctcatcatttccccatcagagggtgtggccaggcctaacaagaccatgggtgcttctagaaacagggttgaagttcccagattccctgagaggagaatgtgtataggagggtttggctgagtccttcagcgttaagtggaggaaagcttggggaagccccaatagctggacagacctcggcctcccctcgaagacacctcaattcacagactctcagcccacacaatgccccagtgtccccagctccgctggagcagctgcagggcacttggatcacaacttctgcaccctctgtccagagtctagggcagtcctccactggcccagcactccagtttcctttccctgcctcttgtccaatggagtgggaggccaggtgagtggagcagaggtcctgaagcccttgacccctgggggcctgggtagtgtaggatctcgctgggctgggtcctggattccagggctattccctggaggacagtctcagttatgggataaggccccctgggggtctccatttctttccaacagtttcatgttcactactggactcttacgggctcagtatctctcccttagccatgagctggctcaggcatcccttcccttccctggagctgccctgcctttctcaagtatttatttatttattgcatggttcctgggaacatgtggcacaagtaatgggatgaggaggaattgggggtgggggtcttctacctaggactcttccctggagtcatgggctgcctgggacccaggacccatgagggggctgagaggtttctacactcgaggagcaggggtccagagaggcaggctggggaggcaagggacccatcctaggcccgctttcttgccgagccaagcagcttagctggggctgtgcagccaggggcttacccaggccagtggaggtgccacagccctggggagccagacaggctttggtatcgtatcgcctctgtgtccttttaagagaggagagttcagtaccccgtgctttctttacactggagaggaactaaaaggatctctgtgtctatggagaattgtcaataaaaaggcctcaagcttc

SEQ ID NO: 35489 - DNA, 1504 bp, Homo sapiens
  source 1..1504: mol_type = unassigned DNA
gcgattcgcgtcccggaagcggcggtggcggccgcggcgtaggcggaggagattttcggacctgcgacttccgaacaaccctggcaggaggagcggcgttcagccgggggaggcctgaagaaacgctccggggcccagtggctctacccctgctcctgcccgaccctgccgcctccctcacggagccagcggccgggatgcagacatcagaacgtgaggggagtgggccggagctgagccccagcgtgatgcccgaggctcccctggagtctccaccttttcctaccaagtccccagcgtttgaccttttcaacttggttctctcctacaagaggctggagatctacctggaacccttgaaggatgcaggtgatggtgttcgatacttgctcaggtggcagatgcctttgtgttccttgctgacctgcctgggcctcaacgtcttgttcctcactttgaatgagggtgcatggtactcagtaggtgccctgatgatttcagtgcccgccctgctgggctaccttcaggaggtttgccgggcacggctgcctgattccgagctgatgcggaggaagtatcatagcgtgaggcaggaggacctgcagagaggtcgcctgtctcgtcccgaggccgtggctgaggtgaagagcttcttgatccagctggaggccttcctgagccgcctgtgctgcacatgtgaagccgcctaccgcgtgctgcactgggagaaccccgtcgtgtcctcacagttctatggggctcttctgggcacagtctgcatgctgtatttgctgccactctgctgggttctcacccttttaaacagcacgctctttctggggaatgtggagttcttccgagttgtgtctgagtacagggcatctctgcagcagaggatgaacccaaagcaggaagagcatgcctttgagagtcctccaccaccagatgttggggggaaggatggtctgatggacagcacgcctgccctcacacccacggaggacctcacaccgggcagcgtggaggaggctgaggaggctgagccagatgaagagtttaaagatgcgattgaggaggatgatgagggcgccccgtgcccagcagaggatgagctggccctgcaggacaacgggttcctgagcaagaatgaggtgctgcgcagcaaggtgtctcggctcacggagcggctccgcaagcgctaccccaccaacaacttcggtgtgacaggagcaggcagttcttaagggttcagagcagccagattccagcagtgcccggtaacactacacacaagaagtattactctggtccagcaaataatttgtctatttctacaacttctaagtaaagcggagctgcagtaattgtggaaacagcttctgctctcgatgctgctccttcaaggtgcccaagtcctccatgggggccacagcccctgaagcccagagggagactgtgtttgtgtgtgcctcgtgtaaccagaccttgagcaagtgagaagaga

SEQ ID NO: 35490 - DNA, 4131 bp, Homo sapiens
  source 1..4131: mol_type = unassigned DNA
gtgcggcgcggggcggccgtgaccagcggagcgctgggtgtcagtgagcagcgaggagccgcgcgcccccgtgcccgcgtctgtccgtgcgcccgagcgcccactcccgggtctgaggtctgcccggcgcgccgcttgcagagcatactcagggccgcgcacctgccccgcgcacctgcccgccgcccgctcggcgctccgggcttcgctagccagcctccctgcgacagcgcgggggctccggccgtgcctccgcgtccgccccgcgcctcagccgggcccgggcgcagcgctgcggagggcgagggccgcccggagtccggccagggccggcgcggcgatgatgaacaggttccgaaagtggctctacaaacccaagaggtcggatccgcagctgcttgcccggttctactatgccgacgaggagctgaaccaggtggccgcggagctggacagcctggatgggcggaaggacccccagcggtgcacgctgctggtcagccagttccgctcctgtcaggacaatgtgttgaacatcattaaccagatcatggatgagtgcatcccccaggaccgcgcccccagagatttctgcgtcaagttccctgaggagatccggcacgacaacctggccggccagctgtggttcggtgccgagtgcctggccgccggctccatcatcatgaaccgggagctggagagcatggccatgcgcccgctggccaaggagctgacgcgcagcctggaggacgtgcggggcgccctccgtgaccaggcgctgcgggacctgaacacctacacagagaagatgagggaagcgctgaggcacttcgacgtcctgttcgcagagtttgagctcagctacgtctcggccatggtgcctgtgaagtcccccagggagtactacgtgcagcaggaggtcatcgtgctcttctgcgagacggtggagagggccctggacttcgggtacctgactcaggacatgattgatgactacgagccggccctcatgttcagcatccccaggctggccatcgtgtgtggcctcgtggtctatgcggacggacctctgaacttggaccgcaaggtggaagacatgtccgagctgttccggcccttccacacgttgctgcggaaaataagggatttgctgcagacgctgacggaggaggagctgcacacgctggaacggaacctctgcatttcccaagacgtggagttccccatccgcgcagacgtgcagggacccgctgccctggcgcctgccctctctgcccctctcccccctgaggggccactctcagctaaggccaaagacccggatgcagagctggcctgctccatgcagtacgacgaccaggagctggagcagctcagccgcatggtccacagggcgggggacgagatgtcctctttgctttcaccgcccattgcctgccagtccccagctcacaggccaggagcggagggcagcccaggcggggaggcctctccaggtagaccgcgcctgcggtcaggcagtgacgaggaggagcgcgtgttcttcatggatgacgtggaggggacggcagaagccctggccaggcccgagtccccagctggcccatttgggtgggcaggcagtacctgggccgacccccaggagaaagggcagggtgggccaggcggagcggcggggatcagcttgcccgcctcggaaaaggaggaggacttgagcaacaacaatctcgaggccgagggcacagatggggccagcctcgcgggcaccagctcctgcagctgcctggactcgcggctgcacctggacggctgggaggtgggtgcggatgacgcagagacggctgagatgatcgcccaccggacagggggcatgaagctctcagccacggtcatcttcaaccccaaatcgcccacttccctggactctgcggtcgccacccaggaggccgcctcggagcccgtggccgaggggatggatggcggcccccacaagcttagcactggggccaccaactgccttctgcattcctgcgtgtgctgtgggagctgcggggacagcagggaggacgtggtggagcgtctgcgggagaagtgcagcccgggaggcgtcattggtgcctcgtacgctgccggcttagccaaggccagcgacagggcccctgagagacaggaggaggcgcccccaccctcagaagatgcctccaacgggcgggagcccaaagcccccacttccgacaagtgcctgcctcacacctcaggttcccaggtggacacagcgagtgggctgcaaggagaggctggggttgcaggtcagcaggagccagaggccagagagctgcatgctgggagcccctcggctcacgaggcgcctcaggccctgtcgggctccagcagctccacagctgggtcctgctcctcagacaagatggggccagaggcggccccagcagccacgcatgctgccccacaggccacaagagagaagatccggtccaggttccacggcagccacgacctcatccaccgcctgttcgtctgcatttcaggtgtggctgaccagctgcagacgaactatgccagtgacctgagaagtattcttaaaacactgtttgaggtcatggccaccaagcctgaaacagacgacaaggaaaagttaaggaaggtcacccagactctgcggagtgcggccttggaggactgtgcactgtgccaggagaccctgtcatcctctgaactggcagccaagacccgcgatggggactttgaagaccccccggagtgggtgccagacgaggcctgtggcttctgcacggcgtgcaaagcacccttcaccgtcatccgccggaagcaccactgccgcagctgtgggaagatcttctgctcgcgctgctcctcgcactcagcaccgctgccccgctacgggcaggtgaagccggtccgagtgtgcacccactgctacatgttccatgtcacgcccttctacagcgacaaggccggcctgtgacgtggtgccaggggcagccccaacccacccgggccaggaacccccaggaaggtggggccacgctgcaggcaggtctcactgcgtctcatgaggccgctgccgctgctgcaggggcacccagacctccagagcatccagagcctctgtcctgcccacgctagcctccctgcagggaccccgggccggctgcaggggccaacaagaggtcagctttgcccagcaggggacccggaggagcctggtggctgcctcagggcagggtgcctggcggagaaggcctgggccctcccactggtccctcggagatctgctggggctatgggaatcggggcgggtgatggaggtggacaagagtggggccactctgcgcctctgctgttgcggtgaatctggaagccggagcaagggccactccacaggctctttggcacagcagggctccctatgtgcctcccaaacgtcaaatgcaggctacccattctccccatcagctgcccacctcgttccccagccctcacccctcacccctcaccatccttcctcaggacttggctaaacaacatgcatctcatttcttcttggagtggggagatgcgggaagctgacccagtggtcctctaggcaggcagggtgctcctggtgtctgcccaccactgtccccttgctgatggcatgggggtccgaccaggcactgacaccgcaggcagaggttgctcggggccttgggtcgggtttaccaatcagccaggacgcccggggccaccagctcagctaccacttccccttccctctgcaccctctggaaccctggcccaattcctcagaccccagagtggcctgggacccaagctgccgcagctgagtggccccagcggacacctcctcaggcttaaatctcaggcttcacattgcaatgacgattgcagttttatttttggagatgacacacctactgcttcttttctaggataaatctaattactgtttactggtggagtacatatgcatagaaacggcttctgtcggggggagagtatataatggaggaaatattatgtattgagattatatttattttctaaatgctgtaatttgaagccatttccataaatctatttaaggattgc

SEQ ID NO: 35491 - DNA, 3273 bp, Homo sapiens
  source 1..3273: mol_type = unassigned DNA
ggagcgctgggtgtcagtgagcagcgaggagccgcgcgcccccgtgcccgcgtctgtccgtgcgcccgagcgcccactcccgggtctgaggtctgcccggcgcgccgcttgcagagcatactcagggccgcgcacctgccccgcgcacctgcccgccgcccgctcggcgctccgggcttcgctagccagcctccctgcgacagcgcgggggctccggccgtgcctccgcgtccgccccgcgcctcagccgggcccgggcgcagcgctgcggagggcgagggccgcccggagtccggccagggccggcgcggcgatgatgaacaggttccgaaagtggctctacaaacccaagaggtcggatccgcagctgcttgcccggttctactatgccgacgaggagctgaaccaggtggccgcggagctggacagcctggatgggcggaaggacccccagcggtgcacgctgctggtcagccagttccgctcctgtcaggacaatgtgttgaacatcattaaccagatcatggatgagtgcatcccccaggaccgcgcccccagagatttctgcgtcaagttccctgaggagatccggcacgacaacctggccggccagctgtggttcggtgccgagtgcctggccgccggctccatcatcatgaaccgggagctggagagcatggccatgcgcccgctggccaaggagctgacgcgcagcctggaggacgtgcggggcgccctccgtgaccaggcgctgcgggacctgaacacctacacagagaagatgagggaagcgctgaggcacttcgacgtcctgttcgcagagtttgagctcagctacgtctcggccatggtgcctgtgaagtcccccagggagtactacgtgcagcaggaggtcatcgtgctcttctgcgagacggtggagagtggcctcgtggtctatgcggacggacctctgaacttggaccgcaaggtggaagacatgtccgagctgttccggcccttccacacgttgctgcggaaaataagggatttgctgcagacgctgacggaggaggagctgcacacgctggaacggaacctctgcatttcccaagacgtggagttccccatccgcgcagacgtgcagggacccgctgccctggcgcctgccctctctgcccctctcccccctgaggggccactctcagctaaggccaaagacccggatgcagagctggcctgctccatgcagtacgacgaccaggagctggagcagctcagccgcatggtccacagggcgggggacgagatgtcctctttgctttcaccgcccattgcctgccagtccccagctcacaggccaggagcggagggcagcccaggcggggaggcctctccaggtagaccgcgcctgcggtcaggcagtgacgaggaggagcgcgtgttcttcatggatgacgtggaggggacggcagaagccctggccaggcccgagtccccagctggcccatttgggtgggcaggcagtacctgggccgacccccaggagaaagggcagggtgggccaggcggagcggcggggatcagcttgcccgcctcggaaaaggaggaggacttgagcaacaacaatctcgaggccgagggcacagatggggccagcctcgcgggcaccagctcctgcagctgcctggactcgcggctgcacctggacggctgggaggtgggtgcggatgacgcagagacggctgagatgatcgcccaccggacagggggcatgaagctctcagccacggtcatcttcaaccccaaatcgcccacttccctggactctgcggtcgccacccaggaggccgcctcggagcccgtggccgaggggatggatggcggcccccacaagcttagcactggggccaccaactgccttctgcattcctgcgtgtgctgtgggagctgcggggacagcagggaggacgtggtggagcgtctgcgggagaagtgcagcccgggaggcgtcattggtgcctcgtacgctgccggcttagccaaggccagcgacagggcccctgagagacaggaggaggcgcccccaccctcagaagatgcctccaacgggcgggagcccaaagcccccacttccgacaagtgcctgcctcacacctcaggttcccaggtggacacagcgagtgggctgcaaggagaggctggggttgcaggtcagcaggagccagaggccagagagctgcatgctgggagcccctcggctcacgaggcgcctcaggccctgtcgggctccagcagctccacagctgggtcctgctcctcagacaagatggggccagaggcggccccagcagccacgcatgctgccccacaggccacaagagagaagatccggtccaggttccacggcagccacgacctcatccaccgcctgttcgtctgcatttcaggtgtggctgaccagctgcagacgaactatgccagtgacctgagaagtattcttaaaacactgtttgaggtcatggccaccaagcctgaaacagacgacaaggaaaagttaaggaaggtcacccagactctgcggagtgcggccttggaggactgtgcactgtgccaggagaccctgtcatcctctgaactggcagccaagacccgcgatggggactttgaagaccccccggagtgggtgccagacgaggcctgtggcttctgcacggcgtgcaaagcacccttcaccgtcatccgccggaagcaccactgccgcagctgtgggaagatcttctgctcgcgctgctcctcgcactcagcaccgctgccccgctacgggcaggtgaagccggtccgagtgtgcacccactgctacatgttccatgtcacgcccttctacagcgacaaggccggcctgtgacgtggtgccaggggcagccccaacccacccgggccaggaacccccaggaaggtggggccacgctgcaggcaggtctcactgcgtctcatgaggccgctgccgctgctgcaggggcacccagacctccagagcatccagagcctctgtcctgcccacgctagcctccctgcagggaccccgggccggctgcaggggccaacaagaggtcagctttgcccagcaggggacccggaggagcctggtggctgcctcagggcagggtgcctggcggagaaggcctgggccctcccactggtccctcggagatctgctggggctatgggaatcggggcgggtgatggaggtggacaagagtggggccactctgcgcctctgctgttgcggtg

SEQ ID NO: 35492 - DNA, 3247 bp, Homo sapiens
  source 1..3247: mol_type = unassigned DNA
actctcgcgactttgccgcggcgacgtgggggttttatcgcggtatcgcggaacacagcccccgccattcccagtcacccgctcggaggccgtgggcgccttgacgagggcgcggcggcgggaatgcacaacgttatgctcatcacctgcgtccaccactgtcacccctgacggcgagacgcgaggtgctaagggcttgtccaggctaagcgggttctctgcgtccttaagcccactttgcagatgctaatcagaggggacaggcggccaagaacctggagcccacccgggcgtctgtgcccagtgccgaccgtctaaattcccttcccacgtggctcctgttgcgtctgggctgtggaggattcctctaaacaggcacagccaccctctggaggtcggatccgcagctgcttgcccggttctactatgccgacgaggagctgaaccaggtggccgcggagctggacagcctggatgggcggaaggacccccagcggtgcacgctgctggtcagccagttccgctcctgtcaggacaatgtgttgaacatcattaaccagatcatggatgagtgcatcccccaggaccgcgcccccagagatttctgcgtcaagttccctgaggagatccggcacgacaacctggccggccagctgtggttcggtgccgagtgcctggccgccggctccatcatcatgaaccgggagctggagagcatggccatgcgcccgctggccaaggagctgacgcgcagcctggaggacgtgcggggcgccctccgtgaccaggcgctgcgggacctgaacacctacacagagaagatgagggaagcgctgaggcacttcgacgtcctgttcgcagagtttgagctcagctacgtctcggccatggtgcctgtgaagtcccccagggagtactacgtgcagcaggaggtcatcgtgctcttctgcgagacggtggagagggccctggacttcgggtacctgactcaggacatgattgatgactacgagccggccctcatgttcagcatccccaggctggccatcgtgtgtggcctcgtggtctatgcggacggacctctgaacttggaccgcaaggtggaagacatgtccgagctgttccggcccttccacacgttgctgcggaaaataagggatttgctgcagacgctgacggaggaggagctgcacacgctggaacggaacctctgcatttcccaagacgtggagttccccatccgcgcagacgtgcagggacccgctgccctggcgcctgccctctctgcccctctcccccctgaggggccactctcagctaaggccaaagacccggatgcagagctggcctgctccatgcagtacgacgaccaggagctggagcagctcagccgcatggtccacagggcgggggacgagatgtcctctttgctttcaccgcccattgcctgccagtccccagctcacaggccaggagcggagggcagcccaggcggggaggcctctccaggtagaccgcgcctgcggtcaggcagtgacgaggaggagcgcgtgttcttcatggatgacgtggaggggacggcagaagccctggccaggcccgagtccccagctggcccatttgggtgggcaggcagtacctgggccgacccccaggagaaagggcagggtgggccaggcggagcggcggggatcagcttgcccgcctcggaaaaggaggaggacttgagcaacaacaatctcgaggccgagggcacagatggggccagcctcgcgggcaccagctcctgcagctgcctggactcgcggctgcacctggacggctgggaggtgggtgcggatgacgcagagacggctgagatgatcgcccaccggacagggggcatgaagctctcagccacggtcatcttcaaccccaaatcgcccacttccctggactctgcggtcgccacccaggaggccgcctcggagcccgtggccgaggggatggatggcggcccccacaagcttagcactggggccaccaactgccttctgcattcctgcgtgtgctgtgggagctgcggggacagcagggaggacgtggtggagcgtctgcgggagaagtgcagcccgggaggcgtcattggtgcctcgtacgctgccggcttagccaaggccagcgacagggcccctgagagacaggaggaggcgcccccaccctcagaagatgcctccaacgggcgggagcccaaagcccccacttccgacaagtgcctgcctcacacctcaggttcccaggtggacacagcgagtgggctgcaaggagaggctggggttgcaggtcagcaggagccagaggccagagagctgcatgctgggagcccctcggctcacgaggcgcctcaggccctgtcgggctccagcagctccacagctgggtcctgctcctcagacaagatggggccagaggcggccccagcagccacgcatgctgccccacaggccacaagagagaagatccggtccaggttccacggcagccacgacctcatccaccgcctgttcgtctgcatttcaggtgtggctgaccagctgcagacgaactatgccagtgacctgagaagtattcttaaaacactgtttgaggtcatggccaccaagcctgaaacagacgacaaggaaaagttaaggaaggtcacccagactctgcggagtgcggccttggaggactgtgcactgtgccaggagaccctgtcatcctctgaactggcagccaagacccgcgatggggactttgaagaccccccggagtgggtgccagacgaggcctgtggcttctgcacggcgtgcaaagcacccttcaccgtcatccgccggaagcaccactgccgcagctgtgggaagatcttctgctcgcgctgctcctcgcactcagcaccgctgccccgctacgggcaggtgaagccggtccgagtgtgcacccactgctacatgttccatgtcacgcccttctacagcgacaaggccggcctgtgacgtggtgccaggggcagccccaacccacccgggccaggaacccccaggaaggtggggccacgctgcaggcaggtctcactgcgtctcatgaggccgctgccgctgctgcaggggcacccagacctccagagcatccagagcctctgtcctgcccacgctagcctccctgcagggaccccgggccggctgcaggggccaacaagaggtcagctttgcccagcaggggaccc

SEQ ID NO: 35493 - DNA, 1296 bp, Homo sapiens
  source 1..1296: mol_type = unassigned DNA
ctaccaccggcgtgcgttcgcaggtagatcgcggtgccagttgccatggagccggccgggccctgtggcttctgcccggcgggggaggtccagccagcgcgttacacctgccctcgctgtaatgcgccctactgctcgctgcgctgctaccggacgcatggcacctgcgcagaaaacttctaccgtgaccaggtgctgggagagctccgcggttgcagcgctcctcccagccgcctagcaagcgccctacgccggctgcgtcagcaacgcgagaccgaggacgagcctggggaagcaggcctcagctccggcccggcgcccggcggcctatcgggactctgggagcggctggcgccgggcgaaaaagctgccttcgagcggctgctgagccgcggtgaggccgggcggctgctgcctccatggcggccgtggtggtggaaccgcggagccggaccgcagcttctggaggagctggataatgccccgggtagtgacgccgcggagctggagctcgcccctgcgaggaccccgccggattctgtgaaagatgcctccgccgcggagcccgcggccgccgagcgggttcttggagatgtcccgggggcctgcacgcccgtcgtacccacccgcatccccgcgatagtcagcctgagccgcggcccagtctcgccgctcgtgcgcttccagctgcccaatgtgctgttcgcctacgcgcatactctcgccctgtatcacggcggtgacgacgcgctgctctctgacttctgtgccacactgctcggcgtttccggagccctgggtgcccagcaagtcttcgcctctgcggaagaagccctgcaggcggcagcccacgtgctggaagcaggcgagcacccgccggggcccctgggcacacgaggggctatgcacgaggtcgcccgcatcctgctgggcgagggcccgaccaaccagaaaggctacacgctggcagcactgggggacctggcacagaccctgggccgtgcccggaaacaggccgtggctagagaagagcgagatcatctttaccgggcccggaaaaagtgccagttcctcctggcctggaccaacgaaaatgaggcggccctcacacccctggccctagactgcgccagggctcaccaagcccatgctgtggtagccgaggaggtggccgccctcactggggagctggagcggctttggggaggccccgtgccacctgccccaagaactctcattgaggagctccctagctgaacgggttaccctggtcattaataaagctgtgactggtca

SEQ ID NO: 35494 - DNA, 951 bp, Homo sapiens
  source 1..951: mol_type = unassigned DNA
gcacgcgggcgcggctgcgtgagaggcgcgcggcggcgcagtaaacagtctccttccacaaaaccatggcgtcgctcaaatgtagcaccgtcgtctgcgtgatctgcttggagaagcccaaataccgctgtccagcctgccgcgtgccctactgctcggtagtctgcttccggaagcacaaagaacagtgcaaccctgaaactcgtcctgttgagaaaaaaataagatcagctcttcctaccaaaaccgtaaagcctgtggaaaacaaagatgatgatgactctatagctgattttctcaatagtgatgaggaagaagacagagtttctttgcagaatttaaagaatttaggggaatctgcaacattaagaagcttattgctcaatccacacctcaggcagttgatggtcaacctcgatcagggagaagacaaagcaaagctcatgagagcttacatgcaagagcctttgtttgtggagtttgcagactgctgtttaggaattgtggagccatcccagaatgaggagtcttaagatggattattgtgctgcttgctcaagcgtgtgcttgactcctggaacctgcctgctccctctcccagaccagctagtttggggctggggagctcaggcaaaagaggtttccaggatgcagattaggtcatgcaggcctttaccggcattgatgtggctcatgtttcaggcagacttggggtccttaaggtggcaagtcctttatggagagaaaacttgacattcagatgattgtttttaaatgttttacttttggtacagttgatagacatcataaacgatatcaagcttacacttcatatggagttaaacttggtcagtgttaataaaatcaaaacgtgattctactgtacattgcattattcataatttaattgtttgaaattacattaaataaatcaactaattaaatactaaa

SEQ ID NO: 35495 - DNA, 10199 bp, Homo sapiens
  source 1..10199: mol_type = unassigned DNA
agcgcgcggagggcggggcctccccgggctcggccgcgccgccgcctcctccgcctcctcctcctcaccagcgctaaagccgggactggaccgagcggagttgtgcgtgtcgccgaaggggggtgggccgggggaggggaggttcgttccgcggagccccagccagaaccgggaccaagaatcgccttcagccctgtctggtgcatccttggcagaaagtgaggaggaaaacacccccattgttctttggcatggacacaagttcagtgggaggattagaattgactgatcagactcctgttttattagggagtacggccatggcaactagtctcacgaatgtaggaaactcatttagtggtccagctaatcctttagtgtctagatctaataagtttcagaactcgtcagtggaagatgatgatgatgttgtttttatcgaacctgtacaacctcccccaccttctgtaccagtggtagctgatcaaagaaccataacatttacatcatcaaaaaatgaagaactacaaggaaatgattccaaaattactccttcctcaaaagagttggcatctcagaagggaagtgtaagtgagacaattgtcattgatgatgaagaggacatggaaacaaatcaagggcaagagaaaaattcctccaattttattgaacgaagacctcctgagactaaaaacagaaccaatgatgtggatttctccacttccagtttttcaagaagtaaggtaaatgcaggaatgggtaatagtggtatcaccacagaaccagactctgaaattcagattgctaatgttacaactttagaaacaggtgtaagctctgtgaatgatggccaattagaaaatactgacgggcgagatatgaacttaatgattacacatgtaacatcactgcagaataccaacttgggagatgtctctaacggactgcagtcaagtaattttggtgttaatatacaaacatacaccccatctttaacttcacagaccaagactggagtaggaccttttaatcctggtagaatgaatgtggcaggagacgtttttcagaatggagaatctgcaactcatcataatcctgattcttggatctcccagtcagcttcatttccccgtaatcagaaacaaccaggggtggactctttatcaccagtggcctcacttcctaaacagattttccagccgtctgtccaacagcagcctactaaaccagttaaagtcacttgtgcaaactgcaaaaaacctttacagaagggccagacagcttatcaacgaaaaggatcagctcacctcttttgttctaccacctgcctttcttccttctcccacaagcctgctccaaagaaactctgtgttatgtgtaaaaaagatataactacaatgaaaggaaccattgttgctcaagtggattcaagtgagtccttccaggaattctgtagtacatcttgtttatctctctatgaagacaaacagaatcctactaaaggagctctaaataaatcaagatgtacaatctgtggtaaactaactgagattcgccatgaagtcagctttaaaaatatgactcataagctgtgcagtgaccactgctttaatagatatagaatggccaatggtttaataatgaattgctgtgaacagtgtggagagtacttgcccagtaaaggtgctggaaataatgttctggtgattgatggtcaacagaaaagattttgctgtcaaagttgtgtcagtgaatacaaacaggtaggtagccatccaagcttcctgaaggaggttcgagatcacatgcaggactctttcttaatgcagcctgagaaatatggaaaactgacaacttgtactggttgccgaacacagtgcaggttttttgatatgactcagtgtataggtcctaatggatatatggagccatattgttcaactgcttgtatgaacagtcacaagacaaaatatgcaaaatcacaaagtttgggaattatttgccatttttgtaagcgaaactctttacctcaataccaagccacaatgcctgatggaaaactgtacaacttttgcaattccagttgtgtggctaaatttcaggctctaagtatgcagtcatctccaaatggccagtttgtagcgccaagtgatattcagttgaaatgcaactactgcaaaaattccttttgttcaaaaccagaaatcctggaatgggagaacaaagtgcatcagttctgcagcaaaacttgttcagatgactataagaagttgcattgcatagttacatattgcgaatactgtcaagaggagaagactcttcatgaaacagtaaatttctctggcgttaagagacctttctgtagtgaaggctgcaaattattatacaaacaggattttgccagacgtttaggattgagatgtgttacttgcaactattgttctcagctatgtaagaagggagcaactaaagaactcgatggtgttgtgagagatttctgcagtgaagattgctgtaaaaaatttcaggattggtactacaaggctgcaaggtgtgactgttgtaaatctcaaggaactcttaaagagcgagttcagtggcgtggggaaatgaaacatttctgtgatcaacattgcttactgcgtttctactgtcaacaaaatgagcccaacatgacaactcagaaaggacctgaaaacttacattatgatcagggttgtcagacatctcgaaccaaaatgacaggttcagcaccacccccttctccaacacctaacaaagagatgaagaacaaagcagttctttgcaaacctttaacaatgacaaaagctacttactgtaaacctcacatgcagaccaaatcttgtcagacagatgatacttggaggacagaatatgttccagtgcctatccctgtgcctgtgtatatcccagttcctatgcacatgtacagtcagaatattcctgttcctactacagttcctgttcctgtgccagttcctgtttttctgcctgctccattggacagcagtgagaagattcctgcagcaattgaggagctaaaaagcaaggtttcttcagatgctcttgatacagagttgcttacaatgacggatatgatgagtgaagacgaggggaaaacagagacaaccaacatcaacagtgtaattattgaaacagatataattggttcagaccttttgaagaactctgacccagagacacagtccagcatgcctgatgtaccatatgaaccagatttggatatcgaaatagattttcccagagctgctgaggagcttgatatggaaaatgaatttttattaccacctgtttttggcgaagaatatgaggaacagcccagacctcgatctaaaaaaaagggagccaagagaaaggctgtatcaggataccagtctcatgatgatagttctgacaattcagaatgcagctttcctttcaaatatacgtatggcgtaaatgcatggaaacactgggtcaaaactaggcaacttgatgaagatcttctggtattagatgagttaaaatcttctaaatcagtaaagttaaaagaggatctactctctcacaccacagctgagcttaactatgggttagctcattttgtcaatgagatccgacggccaaatggagagaattatgcacctgacagcatctattacctttgccttggaatacaggagtatttgtgtggaagtaatcgaaaagacaacatatttattgatcctggataccaaacatttgagcaagaattgaataaaatactgcgaagctggcaaccaagcatacttccagatgggtcaatattctctcgagttgaagaagactatctctggaggataaaacaactaggatcacactctccagtagctcttctgaatacactgttctactttaacactaagtattttggcctgaaaacagtggaacaacacttaagactttcctttggcactgtgtttaggcattggaaaaaaaatcctttaacgatggaaaacaaagcgtgtcttcgataccaagtgtcttccttgtgtggaacagataatgaagataaaattactactggaaaaagaaaacatgaagatgatgagccagtatttgaacaaattgaaaacacagccaatccttccagatgtcctgtgaaaatgtttgaatgctacttgtctaaaagtccacagaatcttaatcagaggatggatgttttttatttgcaaccagaatgctctagttctacagatagccctgtctggtatacgtctacttcactggaccgaaacaccttggaaaatatgcttgtacgggttcttctagtaaaagatatttatgataaagacaattatgaactggatgaagacacagactaaaaaggaacgttgcagaagcaatcgggataaaacagcattagatagtcatgctgctagatctttattatggaaaacatttcaagtttactccttctgttttgagttttgtagcagtgtacccacgctgggtattaccatgtaaataatctgtgagtgaaagttgccattattctatgtagtggttttaggatacttaacaaatacattcaaattctttttttattattatttatttgattaggtatgtttgtaactttttacattacagaatatgaatgagaatgtgccatgtataatttttttcttgtagtaagaaacatccatattgcacaactctactgttgcaaagcttccttggaagggggctcttttactgggttcttaaccagatggttgtgtatgggtagcactactaaaagtttagaacttgcagtgtctttcggaatttttaaaataaactgtaaactaataggctggggtttttgttttgttttggggttttgttttgtttggttttacattttagttactgaagccttacaaggttatgtagagagataccatcttctgtaccaaaaatagacaagagaatgctgtcaatattggtgtactgtaatgtgaatctatgctggtgaaaacaattttttgttccccttattaaaaccttagtgtccttttctcatttgtggctttctgcatcacccaatcaataaaaaacaaatatatatatgtatatatatgtatgtatgtgtgtgtgtatatatatatatatatatatatatataaatgattgtaagttgaaaacaagatcatcaagacatttcctttgtaaaaatgtctggtgaaagtataaaattctgttttcttctatgccagccataagtatctgaaatcctcttcatttatagaggtttgatttttatttctttttttccctcttaaggatacagatcatgctgcaatgttagctgtgtagtactctaaaacttagcaattttatcagaattcttgtgcctgtttacattggataaaattgtttttagaaattccactcctgaaatagttacagaaagtcaagctatgttaaataagataggatcacattttataatgaagattaccagtgtagtaattctgatattgcaaatgattgaggaacaaacaaagaaactaatagagaaagtcagtctcagaggaaatcccatttaatgttagattgtttggcttttgaaattacttcttatagaagattgcattaaaaaaaaaaacaactttgtgcttctgcatagcaatttatccattcagaccttttcttttagaataaggaaacttaaaatctactttctaaagactgaacaaagtgctagctgcaaattatcttgaaatcatttggctcttttctagcatgtgtgtaatcatgttttcttctgattcctgaatgaccatggtagcattagtgtttagaaattgttcaggggaaaattgagctattttccatagtggctagcaattgctacacatccttagatactcctctctcccataggataaatgttacagcacacaaaagaaattttctcaattctgatttggaaaatttcacaggtgtcattattgtatatctaagcaataattatctgaatgttttggcataaaaaattataatgttctaacttgttttataagttgaatgacttttcagtcccttgattttatattgttgagtgataatcagactgatagtagcaaatctgatcatacattactaaaatagattgctgattgtctatttaacgaagacaagtgggtaacatttaaaatatataatacaaaaattttctctaacttacctttttccagaactacttctttaagcacttttcctattaatgcctattgttgattaaaaggtggttaattctaaccatcttttagtcttcaaagtggtgctatattccatcaagagcaataaagtttttcccaggtgtcacttattgtatatgttaccaaataccatgaatttctgccatagtactactatcaagcaccttgtcttgctatttacagtttcttcatttgtatatttttagcttttctaagtggaaatgtctacataattttgatcttgacatgattgaggatttagagctcttgtctttgtcttgattgcaatccaacgatagattaacttgattctcagggggaaaagaaaaacttattttatgagaattgtttgttctgtgaaactcacttcacctagaacacatttcattgattcttggatcttagtttatgtggtcatagttgactgctgagaaaaggacaatgaaatgatagcaatttccttttgcttctaggtgatctctgattatagatagcatcctgtaaatataactttattgtcttgaaatgtttattgaagatgctatatttttctgttctgttttctgaagattttgccatttaaaatgatccagtgaaaaatatttatccacattgaagaaagtggatttcccatgcaaattgaatcttcattaacacattttaaaaggctttactgtattaggtaacatagatattaaaggatttttctaggcaagaagctcaactttttttttccataaaaataatttttgcttaaatagtaactcatggttttcttttattaaatggggttgttgtcagtatgttaaacattgaagtaggaggaggatgcatattgtactatgcattcaaatttatcactgttttttctgacagactttccctttgtcctttctagttatgacttgggaatggggtaacttctttatgcatagtattaagggttatagtatgaagaaatcataaaattgcaagttttggtttgcattactctaatgtgggttcatttaatctgagatcttaaatatcttgcagccttaaatcactacaaacatttgcatttttattatgccagttatttccaaaatgtattgttatacatgtcacttatgtttttaagctaatattgactgtaggataatctccttgttcccctcaaaatagtcatgaaagtgtacatgaaaatatttttaaagaataaatttctttaaattacatacttttggatttcccccttaataagccccttactcatgtttagagaagattttgaatttcatttattccattctactgtgttctgaggattatatcaatttagaagttgatgtccagaacaggttatctgtatcagttctgagaatagaaacaacctacagtgctgtcccaatttgtacttttttttctttactcggaagttagatgtcagagggacacctcaaataagtgactgtgatcccctgccttgtaatgaagtggaaaagagagggtccctaaaaatctgggcaagtggtgtcctaattagttactgagttaaaacaagttcatgaatttaggccttttgggaaagaaagagaatgtaagatttaacctgtaaatgttaagaatagaaccaaagagagggccacagaccattagttgttaagaggtatcaatcttaacagcatattttctcttgtgcaatgaaaagaacaatcgtagctcttttgggcatcttaggtcttttattctttctggatggcttacatcgaatccttgtgatttatttaaagacacatttttcctggagaggagaaagatcttctctaaaatagccttaacactgagaacatattaggcctaattttaaaagtccaattcagataactcctcagaagtaaatgcagcacactaaaattcattatcacaaaacttaatatttgttaatatgtttcctctgtgctaaaaggctgctgctaaccatggtagttagggaggaagagaaagtaaaagacattagtgttcaaaacttacatctttgggggtaaacaagacatatagtacatttaactcctagggaacttagaatatttatggtaggatagaaagagatgattgtggacacacacaagtaccccaaaaggccattatggtctagaataggtttcatagagaggattactaccacctgtgattatatggtatatgaaacatgagattttgtaacctggacattgcttttagctctgttggaaatggtcagtagagcaatttctgaatattttgatggtacggtgttgatggcatcagtccttttctgtggctttcagcccaacttaatacaagaggagttaaaaatagcacccaaaaggggtagctagagcaccctcaccatgcactaaagataaatctaaaaggtgttcaagtacattgaatcaagatgagtaatccaacttctatgttatgtaggatggatggagcacacaaattcttgcaaacattgtagaggtttttttaaacttcatccactaaggatttttttataataattacttttgaaaataaaatctcaactattttccaagttatgagtgtgctgctcttaaccctgtgagatgaaatcttcccatttggattacatatttgtagttctatatcgacatcagcagatggcaatagtatacaaatagtatacagcatgagccttccattgcttttatttctttgtttataagtatactataatccttcatctgaaacccttagggttttagaattcagaattttccccttttcagagagaatatatataatgtagattacataacaccctcaatggggcctggggcaacaccccataatcaaacattagtacattcatagtaactgggattaactatgtaaggcagtaagctacctgccttacatagtttaggtcaatttttgtcacaaacttatggaaaaactaggtttttagaaattttttggatctcagaattcgtgattagggattgctgacctctgtaaggaaactggtgtcaggtctagaattttccttctaatgaaatacgtagtcattttccccctttttaaattgcttagctttggtagaggtaactgaaggctttctttagaattcgtgtgttagattttaagaaaaatgcatgaaattgttaggacaggcataaatacaaatggcaattctagagccattacggaattttgaaacacttaacaattgctttcttttacttttcatcttgcctcaatacttgtagcattacaagtattccacgtaaataaacgtttatgaagagctgcagtcatgtcatggagccaggcatttattcattcaacaaataggttagtcttccacacacaatttcaggtgctgggaacacagaattaagacccagcccttcctctcaaggacttcgcgtagtttgggagaaacgggaatgggctggaatgtcagaataagatgggcacttaggccttattgagcatgatcacacttgtattttgaagtaaaataccctgatcaagtaatttaccaagaagctactttttgtgacacagctccgtctcctgaccgcggttccagacttcaccattacaccagtctattcccattctggaaagggagaggtatcagctcttagggggcagagattagcaaattgaaaaatagcagtgaaccagatggaaggctctcgatctttagaggttattaatcagtgtttgttcgttcaatttttaaccagtcaccttgctgttaagagcagaacataattggctggaatgtaatgtagggaatttttccctgttggatccctagcacctagaaaagttcctagcacctattaggtgttaataaatgattgttgaatgaatcagtgattacaagtacttttaagaattttgaaaataaaggaaccattggaaatacga

SEQ ID NO: 35496 - DNA, 5045 bp, Homo sapiens
  source 1..5045: mol_type = unassigned DNA
cgaaggggggtgggccgggggaggggaggttcgttccgcggagccccagccagaaccgggaccaagaatcgccttcagccctgtctggtgcatccttggcagaaagtgaggaggaaaacacccccattgttagatgaggtcttaatcatggaacatttgaagtcacgtaaagaaggttctttggcatggacacaagttcagtgggaggattagaattgactgatcagactcctgttttattagggagtacggccatggcaactagtctcacgaatgtaggaaactcatttagtggtccagctaatcctttagtgtctagatctaataagtttcagaactcgtcagtggaagatgatgatgatgttgtttttatcgaacctgtacaacctcccccaccttctgtaccagtggtagctgatcaaagaaccataacatttacatcatcaaaaaatgaagaactacaaggaaatgattccaaaattactccttcctcaaaagagttggcatctcagaagggaagtgtaagtgagacaattgtcattgatgatgaagaggacatggaaacaaatcaagggcaagagaaaaattcctccaattttattgaacgaagacctcctgagactaaaaacagaaccaatgatgtggatttctccacttccagtttttcaagaagtaaggtaaatgcaggaatgggtaatagtggtatcaccacagaaccagactctgaaattcagattgctaatgttacaactttagaaacaggtgtaagctctgtgaatgatggccaattagaaaatactgacgggcgagatatgaacttaatgattacacatgtaacatcactgcagaataccaacttgggagatgtctctaacggactgcagtcaagtaattttggtgttaatatacaaacatacaccccatctttaacttcacagaccaagactggagtaggaccttttaatcctggtagaatgaatgtggcaggagacgtttttcagaatggagaatctgcaactcatcataatcctgattcttggatctcccagtcagcttcatttccccgtaatcagaaacaaccaggggtggactctttatcaccagtggcctcacttcctaaacagattttccagccgtctgtccaacagcagcctactaaaccagttaaagtcacttgtgcaaactgcaaaaaacctttacagaagggccagacagcttatcaacgaaaaggatcagctcacctcttttgttctaccacctgcctttcttccttctcccacaagcctgctccaaagaaactctgtgttatgtgtaaaaaagatataactacaatgaaaggaaccattgttgctcaagtggattcaagtgagtccttccaggaattctgtagtacatcttgtttatctctctatgaagacaaacagaatcctactaaaggagctctaaataaatcaagatgtacaatctgtggtaaactaactgagattcgccatgaagtcagctttaaaaatatgactcataagctgtgcagtgaccactgctttaatagatatagaatggccaatggtttaataatgaattgctgtgaacagtgtggagagtacttgcccagtaaaggtgctggaaataatgttctggtgattgatggtcaacagaaaagattttgctgtcaaagttgtgtcagtgaatacaaacaggtaggtagccatccaagcttcctgaaggaggttcgagatcacatgcaggactctttcttaatgcagcctgagaaatatggaaaactgacaacttgtactggttgccgaacacagtgcaggttttttgatatgactcagtgtataggtcctaatggatatatggagccatattgttcaactgcttgtatgaacagtcacaagacaaaatatgcaaaatcacaaagtttgggaattatttgccatttttgtaagcgaaactctttacctcaataccaagccacaatgcctgatggaaaactgtacaacttttgcaattccagttgtgtggctaaatttcaggctctaagtatgcagtcatctccaaatggccagtttgtagcgccaagtgatattcagttgaaatgcaactactgcaaaaattccttttgttcaaaaccagaaatcctggaatgggaggcaagtttgcatcagttctgcagcaaaacttgttcagatgactataagaagttgcattgcatagttacatattgcgaatactgtcaagaggagaagactcttcatgaaacagtaaatttctctggcgttaagagacctttctgtagtgaaggctgcaaattattatacaaacaggattttgccagacgtttaggattgagatgtgttacttgcaactattgttctcagctatgtaagaagggagcaactaaagaactcgatggtgttgtgagagatttctgcagtgaagattgctgtaaaaaatttcaggattggtactacaaggcgtgtgactgttgtaaatctcaaggaactcttaaagagcgagttcagtggcgtggggaaatgaaacatttctgtgatcaacattgcttactgcgtttctactgtcaacaaaatgagcccaacatgacaactcagaaaggacctgaaaacttacattatgatcagggttgtcagacatctcgaaccaaaatgacaggttcagcaccacccccttctccaacacctaacaaagagatgaagaacaaagcagttctttgcaaacctttaacaatgacaaaagctacttactgtaaacctcacatgcagaccaaatcttgtcagacagatgatacttggaggacagaatatgttccagtgcctatccctgtgcctgtgtatatcccagttcctatgcacatgtacagtcagaatattcctgttcctactacagttcctgttcctgtgccagttcctgtttttctgcctgctccattggacagcagtgagaagattcctgcagcaattgaggagctaaaaagcaaggtttcttcagatgctcttgatacagagttgcttacaatgacggatatgatgagtgaagacgaggggaaaacagagacaaccaacatcaacagtgtaattattgaaacagatataattggttcagaccttttgaagaactctgacccagagacacagtccagcatgcctgatgtaccatatgaaccagatttggatatcgaaatagattttcccagagctgctgaggagcttgatatggaaaatgaatttttattaccacctgtttttggcgaagaatatgaggaacagcccagacctcgatctaaaaaaaagggagccaagagaaaggctgtatcaggataccagtctcatgatgatagttctgacaattcagaatgcagctttcctttcaaatatacgtatggcgtaaatgcatggaaacactgggtcaaaactaggcaacttgatgaagatcttctggtattagatgagttaaaatcttctaaatcagtaaagttaaaagaggatctactctctcacaccacagctgagcttaactatgggttagctcattttgtcaatgagatccgacggccaaatggagagaattatgcacctgacagcatctattacctttgccttggaatacaggagtatttgtgtggaagtaatcgaaaagacaacatatttattgatcctggataccaaacatttgagcaagaattgaataaaatactgcgaagctggcaaccaagcatacttccagatgggtcaatattctctcgagttgaagaagactatctctggaggataaaacaactaggatcacactctccagtagctcttctgaatacactgttctactttaacactaagtattttggcctgaaaacagtggaacaacacttaagactttcctttggcactgtgtttaggcattggaaaaaaaatcctttaacgatggaaaacaaagcgtgtcttcgataccaagtgtcttccttgtgtggaacagataatgaagataaaattactactggaaaaagaaaacatgaagatgatgagccagtatttgaacaaattgaaaacacagccaatccttccagatgtcctgtgaaaatgtttgaatgctacttgtctaaaagtccacagaatcttaatcagaggatggatgttttttatttgcaaccagaatgctctagttctacagatagccctgtctggtatacgtctacttcactggaccgaaacaccttggaaaatatgcttgtacgggttcttctagtaaaagatatttatgataaagacaattatgaactggatgaagacacagactaaaaaggaacgttgcagaagcaatcgggataaaacagcattagatagtcatgctgctagatctttattatggaaaacatttcaagtttactccttctgttttgagttttgtagcagtgtacccacgctgggtattaccatgtaaataatctgtgagtgaaagttgccattattctatgtagtggttttaggatacttaacaaatacattcaaattctttttttattattatttatttgattaggtatgtttgtaactttttacattacagaatatgaatgagaatgtgccatgtataatttttttcttgtagtaagaaacatccatattgcacaactctactgttgcaaagcttccttggaagggggctcttttactgggttcttaaccagatggttgtgtatgggtagcactactaaaagtttagaacttgcagtgtctttcggaatttttaaaataaactgtaaactaataggctggggtttttgttttgttttggggttttgttttgtttggttttacattttagttactgaagccttacaaggttatgtagagagataccatcttctgtaccaaaaatagacaagagaatgctgtcaatattggtgtactgtaatgtgaatctatgctggtgaaaacaattttttgttccccttattaaaaccttagtgtccttttctcatttgtggctttctgcatcacccaatcaataaaaaacaaatatatatatgt

SEQ ID NO: 35497 - DNA, 7417 bp, Homo sapiens
  source 1..7417: mol_type = unassigned DNA
ccgccgcctcctccgcctcctcctcctcaccagcgctaaagccgggactggaccgagcggagttgaccaagaatcgccttcagccctgtctggtgcatccttggcagaaagtgaggaggaaaacacccccattgttagatgaggtcttaatcatggaacatttgaagtcacgtaaagaaggttctttggcatggacacaagttcagtgggaggattagaattgactgatcagactcctgttttattagggagtacggccatggcaactagtctcacgaatgtaggaaactcatttagtggtccagctaatcctttagtgtctagatctaataagtttcagaactcgtcagtggaagatgatgatgatgttgtttttatcgaacctgtacaacctcccccaccttctgtaccagtggtagctgatcaaagaaccataacatttacatcatcaaaaaatgaagaactacaaggaaatgattccaaaattactccttcctcaaaagagttggcatctcagaagggaagtgtaagtgagacaattgtcattgatgatgaagaggacatggaaacaaatcaagggcaagagaaaaattcctccaattttattgaacgaagacctcctgagactaaaaacagaaccaatgatgtggatttctccacttccagtttttcaagaagtaaggtaaatgcaggaatgggtaatagtggtatcaccacagaaccagactctgaaattcagattgctaatgttacaactttagaaacaggtgtaagctctgtgaatgatggccaattagaaaatactgacgggcgagatatgaacttaatgattacacatgtaacatcactgcagaataccaacttgggagatgtctctaacggactgcagtcaagtaattttggtgttaatatacaaacatacaccccatctttaacttcacagaccaagactggagtaggaccttttaatcctggtagaatgaatgtggcaggagacgtttttcagaatggagaatctgcaactcatcataatcctgattcttggatctcccagtcagcttcatttccccgtaatcagaaacaaccaggggtggactctttatcaccagtggcctcacttcctaaacagattttccagccgtctgtccaacagcagcctactaaaccagttaaagtcacttgtgcaaactgcaaaaaacctttacagaagggccagacagcttatcaacgaaaaggatcagctcacctcttttgttctaccacctgcctttcttccttctcccacaagcctgctccaaagaaactctgtgttatgtgtaaaaaagatataactacaatgaaaggaaccattgttgctcaagtggattcaagtgagtccttccaggaattctgtagtacatcttgtttatctctctatgaagacaaacagaatcctactaaaggagctctaaataaatcaagatgtacaatctgtggtaaactaactgagattcgccatgaagtcagctttaaaaatatgactcataagctgtgcagtgaccactgctttaatagatatagaatggccaatggtttaataatgaattgctgtgaacagtgtggagagtacttgcccagtaaaggtgctggaaataatgttctggtgattgatggtcaacagaaaagattttgctgtcaaagttgtgtcagtgaatacaaacaggtaggtagccatccaagcttcctgaaggaggttcgagatcacatgcaggactctttcttaatgcagcctgagaaatatggaaaactgacaacttgtactggttgccgaacacagtgcaggttttttgatatgactcagtgtataggtcctaatggatatatggagccatattgttcaactgcttgtatgaacagtcacaagacaaaatatgcaaaatcacaaagtttgggaattatttgccatttttgtaagcgaaactctttacctcaataccaagccacaatgcctgatggaaaactgtacaacttttgcaattccagttgtgtggctaaatttcaggctctaagtatgcagtcatctccaaatggccagtttgtagcgccaagtgatattcagttgaaatgcaactactgcaaaaattccttttgttcaaaaccagaaatcctggaatgggaggcaagtttgcatcagttctgcagcaaaacttgttcagatgactataagaagttgcattgcatagttacatattgcgaatactgtcaagaggagaagactcttcatgaaacagtaaatttctctggcgttaagagacctttctgtagtgaaggctgcaaattattatacaaacaggattttgccagacgtttaggattgagatgtgttacttgcaactattgttctcagctatgtaagaagggagcaactaaagaactcgatggtgttgtgagagatttctgcagtgaagattgctgtaaaaaatttcaggattggtactacaaggcgtgtgactgttgtaaatctcaaggaactcttaaagagcgagttcagtggcgtggggaaatgaaacatttctgtgatcaacattgcttactgcgtttctactgtcaacaaaatgagcccaacatgacaactcagaaaggacctgaaaacttacattatgatcagggttgtcagacatctcgaaccaaaatgacaggttcagcaccacccccttctccaacacctaacaaagagatgaagaacaaagcagttctttgcaaacctttaacaatgacaaaagctacttactgtaaacctcacatgcagaccaaatcttgtcagacagatgatacttggaggacagaatatgttccagtgcctatccctgtgcctgtgtatatcccagttcctatgcacatgtacagtcagaatattcctgttcctactacagttcctgttcctgtgccagttcctgtttttctgcctgctccattggacagcagtgagaagattcctgcagcaattgaggagctaaaaagcaaggtttcttcagatgctcttgatacagagttgcttacaatgacggatatgatgagtgaagacgaggggaaaacagagacaaccaacatcaacagtgtaattattgaaacagatataattggttcagaccttttgaagaactctgacccagagacacagtccagcatgcctgatgtaccatatgaaccagatttggatatcgaaatagattttcccagagctgctgaggagcttgatatggaaaatgaatttttattaccacctgtttttggcgaagaatatgaggaacagcccagacctcgatctaaaaaaaagggagccaagagaaaggctgtatcaggataccagtctcatgatgatagttctgacaattcagaatgcagctttcctttcaaatatacgtatggcgtaaatgcatggaaacactgggtcaaaactaggcaacttgatgaagatcttctggtattagatgagttaaaatcttctaaatcagtaaagttaaaagaggatctactctctcacaccacagctgagcttaactatgggttagctcattttgtcaatgagatccgacggccaaatggagagaattatgcacctgacagcatctattacctttgccttggaatacaggagtatttgtgtggaagtaatcgaaaagacaacatatttattgatcctggataccaaacatttgagcaagaattgaataaaatactgcgaagctggcaaccaagcatacttccagatgggtcaatattctctcgagttgaagaagactatctctggaggataaaacaactaggatcacactctccagtagctcttctgaatacactgttctactttaacactaagtattttggcctgaaaacagtggaacaacacttaagactttcctttggcactgtgtttaggcattggaaaaaaaatcctttaacgatggaaaacaaagcgtgtcttcgataccaagtgtcttccttgtgtggaacagataatgaagataaaattactactggaaaaagaaaacatgaagatgatgagccagtatttgaacaaattgaaaacacagccaatccttccagatgtcctgtgaaaatgtttgaatgctacttgtctaaaagtccacagaatcttaatcagaggatggatgttttttatttgcaaccagaatgctctagttctacagatagccctgtctggtatacgtctacttcactggaccgaaacaccttggaaaatatgcttgtacgggttcttctagtaaaagatatttatgataaagacaattatgaactggatgaagacacagactaaaaaggaacgttgcagaagcaatcgggataaaacagcattagatagtcatgctgctagatctttattatggaaaacatttcaagtttactccttctgttttgagttttgtagcagtgtacccacgctgggtattaccatgtaaataatctgtgagtgaaagttgccattattctatgtagtggttttaggatacttaacaaatacattcaaattctttttttattattatttatttgattaggtatgtttgtaactttttacattacagaatatgaatgagaatgtgccatgtataatttttttcttgtagtaagaaacatccatattgcacaactctactgttgcaaagcttccttggaagggggctcttttactgggttcttaaccagatggttgtgtatgggtagcactactaaaagtttagaacttgcagtgtctttcggaatttttaaaataaactgtaaactaataggctggggtttttgttttgttttggggttttgttttgtttggttttacattttagttactgaagccttacaaggttatgtagagagataccatcttctgtaccaaaaatagacaagagaatgctgtcaatattggtgtactgtaatgtgaatctatgctggtgaaaacaattttttgttccccttattaaaaccttagtgtccttttctcatttgtggctttctgcatcacccaatcaataaaaaacaaatatatatatgtatatatatgtatgtatgtgtgtgtgtatatatatatatatatatatatatataaatgattgtaagttgaaaacaagatcatcaagacatttcctttgtaaaaatgtctggtgaaagtataaaattctgttttcttctatgccagccataagtatctgaaatcctcttcatttatagaggtttgatttttatttctttttttccctcttaaggatacagatcatgctgcaatgttagctgtgtagtactctaaaacttagcaattttatcagaattcttgtgcctgtttacattggataaaattgtttttagaaattccactcctgaaatagttacagaaagtcaagctatgttaaataagataggatcacattttataatgaagattaccagtgtagtaattctgatattgcaaatgattgaggaacaaacaaagaaactaatagagaaagtcagtctcagaggaaatcccatttaatgttagattgtttggcttttgaaattacttcttatagaagattgcattaaaaaaaaaaacaactttgtgcttctgcatagcaatttatccattcagaccttttcttttagaataaggaaacttaaaatctactttctaaagactgaacaaagtgctagctgcaaattatcttgaaatcatttggctcttttctagcatgtgtgtaatcatgttttcttctgattcctgaatgaccatggtagcattagtgtttagaaattgttcaggggaaaattgagctattttccatagtggctagcaattgctacacatccttagatactcctctctcccataggataaatgttacagcacacaaaagaaattttctcaattctgatttggaaaatttcacaggtgtcattattgtatatctaagcaataattatctgaatgttttggcataaaaaattataatgttctaacttgttttataagttgaatgacttttcagtcccttgattttatattgttgagtgataatcagactgatagtagcaaatctgatcatacattactaaaatagattgctgattgtctatttaacgaagacaagtgggtaacatttaaaatatataatacaaaaattttctctaacttacctttttccagaactacttctttaagcacttttcctattaatgcctattgttgattaaaaggtggttaattctaaccatcttttagtcttcaaagtggtgctatattccatcaagagcaataaagtttttcccaggtgtcacttattgtatatgttaccaaataccatgaatttctgccatagtactactatcaagcaccttgtcttgctatttacagtttcttcatttgtatatttttagcttttctaagtggaaatgtctacataattttgatcttgacatgattgaggatttagagctcttgtctttgtcttgattgcaatccaacgatagattaacttgattctcagggggaaaagaaaaacttattttatgagaattgtttgttctgtgaaactcacttcacctagaacacatttcattgattcttggatcttagtttatgtggtcatagttgactgctgagaaaaggacaatgaaatgatagcaatttccttttgcttctaggtgatctctgattatagatagcatcctgtaaatataactttattgtcttgaaatgtttattgaagatgctatatttttctgttctgttttctgaagattttgccatttaaaatgatccagtgaaaaatatttatccacattgaagaaagtggatttcccatgcaaattgaatcttcattaacacattttaaaaggctttactgtattaggtaacatagatattaaaggatttttctaggcaagaagctcaactttttttttccataaaaataatttttgcttaaatagtaactcatggttttcttttattaaatggggttgttgtcagtatgttaaacattgaagtaggaggaggatgcatattgtactatgcattcaaatttatcactgttttttctgacagactttccctttgtcctttctagttatgacttgggaatggggtaacttctttatgcatagtattaagggttatagtatgaagaaatcataaaattgcaagttttggtttgcattactctaatgtgggttcatttaatctgagatcttaaatatcttgcagccttaaatcactacaaacatttgcatttttattatgccagttatttccaaaatgtattgttatacatgtcacttatgtttttaagctaatattgactgtaggataatctccttgttcccctcaaaatagtcatgaaagtgtacatgaaaatatttttaaagaataaatttctttaaatta

SEQ ID NO: 35498 - DNA, 1517 bp, Homo sapiens
  source 1..1517: mol_type = unassigned DNA
tctatgaagacaaacagaatcctactaaaggagctctaaataaatcaagatgtacaatctgtggtaaactaactgaggtaggtagccatccaagcttcctgaaggaggttcgagatcacatgcaggactctttcttaatgcagcctgagaaatatggaaaactgacaacttgtactggttgccgaacacagtgcaggttttttgatatgactcagtgtataggtcctaatggatatatggagccatattgttcaactgcttgtatgaacagtcacaagacaaaatatgcaaaatcacaaagtttgggaattatttgccatttttgtaagcgaaactctttacctcaataccaagccacaatgcctgatggaaaactgtacaacttttgcaattccagttgtgtggctaaatttcaggctctaagtatgcagtcatctccaaatggccagtttgtagcgccaagtgatattcagttgaaatgcaactactgcaaaaattccttttgttcaaaaccagaaatcctggaatgggagaacaaagtgcatcagttctgcagcaaaacttgttcagatgactataagaagttgcattgcatagttacatattgcgaatactgtcaagaggagaagactcttcatgaaacagtaaatttctctggcgttaagagacctttctgtagtgaaggctgcaaattattatacaaacaggattttgccagacgtttaggattgagatgtgttacttgcaactattgttctcagctatgtaagaagggagcaactaaagaactcgatggtgttgtgagagatttctgcagtgaagattgctgtaaaaaatttcaggattggtactacaaggctgcaaggtgtgactgttgtaaatctcaaggaactcttaaagagcgagttcagtggcgtggggaaatgaaacatttctgtgatcaacattgcttactgcgtttctactgtcaacaaaatgagcccaacatgacaactcagaaaggacctgaaaacttacattatgatcagggttgtcagacatctcgaaccaaaatgacaggttcagcaccacccccttctccaacacctaacaaagagatgaagaacaaagcagttctttgcaaacctttaacaatgacaaaagctacttactgtaaacctcacatgcagaccaaatcttgtcagacagatattacctggagaatacagcatctcattttaaatcattatgatcaatctctgataaaggcctagaatacaaattatgtcaaaagtgaaaaaatactatctcgaaaatttccttggggataagactactaaaattataatgcttcctctgagaaaatcatctctttgcatgtgatgatacttggaggacagaatatgttccagtgcctatccctgtgcctgtgtatatcccagttcctatgcacatgtacagtcagaatattcctgttcctactacagttcctgttcctgtgccagttcctgtttttctgcctgctccattggacagca

SEQ ID NO: 35499 - DNA, 10246 bp, Homo sapiens
  source 1..10246: mol_type = unassigned DNA
agcgcgcggagggcggggcctccccgggctcggccgcgccgccgcctcctccgcctcctcctcctcaccagcgctaaagccgggactggaccgagcggagttgtgcgtgtcgccgaaggggggtgggccgggggaggggaggttcgttccgcggagccccagccagaaccgggaccaagaatcgccttcagccctgtctggtgcatccttggcagaaagtgaggaggaaaacacccccattgttagatgaggtcttaatcatggaacatttgaagtcacgtaaagaaggttctttggcatggacacaagttcagtgggaggattagaattgactgatcagactcctgttttattagggagtacggccatggcaactagtctcacgaatgtaggaaactcatttagtggtccagctaatcctttagtgtctagatctaataagtttcagaactcgtcagtggaagatgatgatgatgttgtttttatcgaacctgtacaacctcccccaccttctgtaccagtggtagctgatcaaagaaccataacatttacatcatcaaaaaatgaagaactacaaggaaatgattccaaaattactccttcctcaaaagagttggcatctcagaagggaagtgtaagtgagacaattgtcattgatgatgaagaggacatggaaacaaatcaagggcaagagaaaaattcctccaattttattgaacgaagacctcctgagactaaaaacagaaccaatgatgtggatttctccacttccagtttttcaagaagtaaggtaaatgcaggaatgggtaatagtggtatcaccacagaaccagactctgaaattcagattgctaatgttacaactttagaaacaggtgtaagctctgtgaatgatggccaattagaaaatactgacgggcgagatatgaacttaatgattacacatgtaacatcactgcagaataccaacttgggagatgtctctaacggactgcagtcaagtaattttggtgttaatatacaaacatacaccccatctttaacttcacagaccaagactggagtaggaccttttaatcctggtagaatgaatgtggcaggagacgtttttcagaatggagaatctgcaactcatcataatcctgattcttggatctcccagtcagcttcatttccccgtaatcagaaacaaccaggggtggactctttatcaccagtggcctcacttcctaaacagattttccagccgtctgtccaacagcagcctactaaaccagttaaagtcacttgtgcaaactgcaaaaaacctttacagaagggccagacagcttatcaacgaaaaggatcagctcacctcttttgttctaccacctgcctttcttccttctcccacaagcctgctccaaagaaactctgtgttatgtgtaaaaaagatataactacaatgaaaggaaccattgttgctcaagtggattcaagtgagtccttccaggaattctgtagtacatcttgtttatctctctatgaagacaaacagaatcctactaaaggagctctaaataaatcaagatgtacaatctgtggtaaactaactgagattcgccatgaagtcagctttaaaaatatgactcataagctgtgcagtgaccactgctttaatagatatagaatggccaatggtttaataatgaattgctgtgaacagtgtggagagtacttgcccagtaaaggtgctggaaataatgttctggtgattgatggtcaacagaaaagattttgctgtcaaagttgtgtcagtgaatacaaacaggtaggtagccatccaagcttcctgaaggaggttcgagatcacatgcaggactctttcttaatgcagcctgagaaatatggaaaactgacaacttgtactggttgccgaacacagtgcaggttttttgatatgactcagtgtataggtcctaatggatatatggagccatattgttcaactgcttgtatgaacagtcacaagacaaaatatgcaaaatcacaaagtttgggaattatttgccatttttgtaagcgaaactctttacctcaataccaagccacaatgcctgatggaaaactgtacaacttttgcaattccagttgtgtggctaaatttcaggctctaagtatgcagtcatctccaaatggccagtttgtagcgccaagtgatattcagttgaaatgcaactactgcaaaaattccttttgttcaaaaccagaaatcctggaatgggagaacaaagtgcatcagttctgcagcaaaacttgttcagatgactataagaagttgcattgcatagttacatattgcgaatactgtcaagaggagaagactcttcatgaaacagtaaatttctctggcgttaagagacctttctgtagtgaaggctgcaaattattatacaaacaggattttgccagacgtttaggattgagatgtgttacttgcaactattgttctcagctatgtaagaagggagcaactaaagaactcgatggtgttgtgagagatttctgcagtgaagattgctgtaaaaaatttcaggattggtactacaaggctgcaaggtgtgactgttgtaaatctcaaggaactcttaaagagcgagttcagtggcgtggggaaatgaaacatttctgtgatcaacattgcttactgcgtttctactgtcaacaaaatgagcccaacatgacaactcagaaaggacctgaaaacttacattatgatcagggttgtcagacatctcgaaccaaaatgacaggttcagcaccacccccttctccaacacctaacaaagagatgaagaacaaagcagttctttgcaaacctttaacaatgacaaaagctacttactgtaaacctcacatgcagaccaaatcttgtcagacagatgatacttggaggacagaatatgttccagtgcctatccctgtgcctgtgtatatcccagttcctatgcacatgtacagtcagaatattcctgttcctactacagttcctgttcctgtgccagttcctgtttttctgcctgctccattggacagcagtgagaagattcctgcagcaattgaggagctaaaaagcaaggtttcttcagatgctcttgatacagagttgcttacaatgacggatatgatgagtgaagacgaggggaaaacagagacaaccaacatcaacagtgtaattattgaaacagatataattggttcagaccttttgaagaactctgacccagagacacagtccagcatgcctgatgtaccatatgaaccagatttggatatcgaaatagattttcccagagctgctgaggagcttgatatggaaaatgaatttttattaccacctgtttttggcgaagaatatgaggaacagcccagacctcgatctaaaaaaaagggagccaagagaaaggctgtatcaggataccagtctcatgatgatagttctgacaattcagaatgcagctttcctttcaaatatacgtatggcgtaaatgcatggaaacactgggtcaaaactaggcaacttgatgaagatcttctggtattagatgagttaaaatcttctaaatcagtaaagttaaaagaggatctactctctcacaccacagctgagcttaactatgggttagctcattttgtcaatgagatccgacggccaaatggagagaattatgcacctgacagcatctattacctttgccttggaatacaggagtatttgtgtggaagtaatcgaaaagacaacatatttattgatcctggataccaaacatttgagcaagaattgaataaaatactgcgaagctggcaaccaagcatacttccagatgggtcaatattctctcgagttgaagaagactatctctggaggataaaacaactaggatcacactctccagtagctcttctgaatacactgttctactttaacactaagtattttggcctgaaaacagtggaacaacacttaagactttcctttggcactgtgtttaggcattggaaaaaaaatcctttaacgatggaaaacaaagcgtgtcttcgataccaagtgtcttccttgtgtggaacagataatgaagataaaattactactggaaaaagaaaacatgaagatgatgagccagtatttgaacaaattgaaaacacagccaatccttccagatgtcctgtgaaaatgtttgaatgctacttgtctaaaagtccacagaatcttaatcagaggatggatgttttttatttgcaaccagaatgctctagttctacagatagccctgtctggtatacgtctacttcactggaccgaaacaccttggaaaatatgcttgtacgggttcttctagtaaaagatatttatgataaagacaattatgaactggatgaagacacagactaaaaaggaacgttgcagaagcaatcgggataaaacagcattagatagtcatgctgctagatctttattatggaaaacatttcaagtttactccttctgttttgagttttgtagcagtgtacccacgctgggtattaccatgtaaataatctgtgagtgaaagttgccattattctatgtagtggttttaggatacttaacaaatacattcaaattctttttttattattatttatttgattaggtatgtttgtaactttttacattacagaatatgaatgagaatgtgccatgtataatttttttcttgtagtaagaaacatccatattgcacaactctactgttgcaaagcttccttggaagggggctcttttactgggttcttaaccagatggttgtgtatgggtagcactactaaaagtttagaacttgcagtgtctttcggaatttttaaaataaactgtaaactaataggctggggtttttgttttgttttggggttttgttttgtttggttttacattttagttactgaagccttacaaggttatgtagagagataccatcttctgtaccaaaaatagacaagagaatgctgtcaatattggtgtactgtaatgtgaatctatgctggtgaaaacaattttttgttccccttattaaaaccttagtgtccttttctcatttgtggctttctgcatcacccaatcaataaaaaacaaatatatatatgtatatatatgtatgtatgtgtgtgtgtatatatatatatatatatatatatataaatgattgtaagttgaaaacaagatcatcaagacatttcctttgtaaaaatgtctggtgaaagtataaaattctgttttcttctatgccagccataagtatctgaaatcctcttcatttatagaggtttgatttttatttctttttttccctcttaaggatacagatcatgctgcaatgttagctgtgtagtactctaaaacttagcaattttatcagaattcttgtgcctgtttacattggataaaattgtttttagaaattccactcctgaaatagttacagaaagtcaagctatgttaaataagataggatcacattttataatgaagattaccagtgtagtaattctgatattgcaaatgattgaggaacaaacaaagaaactaatagagaaagtcagtctcagaggaaatcccatttaatgttagattgtttggcttttgaaattacttcttatagaagattgcattaaaaaaaaaaacaactttgtgcttctgcatagcaatttatccattcagaccttttcttttagaataaggaaacttaaaatctactttctaaagactgaacaaagtgctagctgcaaattatcttgaaatcatttggctcttttctagcatgtgtgtaatcatgttttcttctgattcctgaatgaccatggtagcattagtgtttagaaattgttcaggggaaaattgagctattttccatagtggctagcaattgctacacatccttagatactcctctctcccataggataaatgttacagcacacaaaagaaattttctcaattctgatttggaaaatttcacaggtgtcattattgtatatctaagcaataattatctgaatgttttggcataaaaaattataatgttctaacttgttttataagttgaatgacttttcagtcccttgattttatattgttgagtgataatcagactgatagtagcaaatctgatcatacattactaaaatagattgctgattgtctatttaacgaagacaagtgggtaacatttaaaatatataatacaaaaattttctctaacttacctttttccagaactacttctttaagcacttttcctattaatgcctattgttgattaaaaggtggttaattctaaccatcttttagtcttcaaagtggtgctatattccatcaagagcaataaagtttttcccaggtgtcacttattgtatatgttaccaaataccatgaatttctgccatagtactactatcaagcaccttgtcttgctatttacagtttcttcatttgtatatttttagcttttctaagtggaaatgtctacataattttgatcttgacatgattgaggatttagagctcttgtctttgtcttgattgcaatccaacgatagattaacttgattctcagggggaaaagaaaaacttattttatgagaattgtttgttctgtgaaactcacttcacctagaacacatttcattgattcttggatcttagtttatgtggtcatagttgactgctgagaaaaggacaatgaaatgatagcaatttccttttgcttctaggtgatctctgattatagatagcatcctgtaaatataactttattgtcttgaaatgtttattgaagatgctatatttttctgttctgttttctgaagattttgccatttaaaatgatccagtgaaaaatatttatccacattgaagaaagtggatttcccatgcaaattgaatcttcattaacacattttaaaaggctttactgtattaggtaacatagatattaaaggatttttctaggcaagaagctcaactttttttttccataaaaataatttttgcttaaatagtaactcatggttttcttttattaaatggggttgttgtcagtatgttaaacattgaagtaggaggaggatgcatattgtactatgcattcaaatttatcactgttttttctgacagactttccctttgtcctttctagttatgacttgggaatggggtaacttctttatgcatagtattaagggttatagtatgaagaaatcataaaattgcaagttttggtttgcattactctaatgtgggttcatttaatctgagatcttaaatatcttgcagccttaaatcactacaaacatttgcatttttattatgccagttatttccaaaatgtattgttatacatgtcacttatgtttttaagctaatattgactgtaggataatctccttgttcccctcaaaatagtcatgaaagtgtacatgaaaatatttttaaagaataaatttctttaaattacatacttttggatttcccccttaataagccccttactcatgtttagagaagattttgaatttcatttattccattctactgtgttctgaggattatatcaatttagaagttgatgtccagaacaggttatctgtatcagttctgagaatagaaacaacctacagtgctgtcccaatttgtacttttttttctttactcggaagttagatgtcagagggacacctcaaataagtgactgtgatcccctgccttgtaatgaagtggaaaagagagggtccctaaaaatctgggcaagtggtgtcctaattagttactgagttaaaacaagttcatgaatttaggccttttgggaaagaaagagaatgtaagatttaacctgtaaatgttaagaatagaaccaaagagagggccacagaccattagttgttaagaggtatcaatcttaacagcatattttctcttgtgcaatgaaaagaacaatcgtagctcttttgggcatcttaggtcttttattctttctggatggcttacatcgaatccttgtgatttatttaaagacacatttttcctggagaggagaaagatcttctctaaaatagccttaacactgagaacatattaggcctaattttaaaagtccaattcagataactcctcagaagtaaatgcagcacactaaaattcattatcacaaaacttaatatttgttaatatgtttcctctgtgctaaaaggctgctgctaaccatggtagttagggaggaagagaaagtaaaagacattagtgttcaaaacttacatctttgggggtaaacaagacatatagtacatttaactcctagggaacttagaatatttatggtaggatagaaagagatgattgtggacacacacaagtaccccaaaaggccattatggtctagaataggtttcatagagaggattactaccacctgtgattatatggtatatgaaacatgagattttgtaacctggacattgcttttagctctgttggaaatggtcagtagagcaatttctgaatattttgatggtacggtgttgatggcatcagtccttttctgtggctttcagcccaacttaatacaagaggagttaaaaatagcacccaaaaggggtagctagagcaccctcaccatgcactaaagataaatctaaaaggtgttcaagtacattgaatcaagatgagtaatccaacttctatgttatgtaggatggatggagcacacaaattcttgcaaacattgtagaggtttttttaaacttcatccactaaggatttttttataataattacttttgaaaataaaatctcaactattttccaagttatgagtgtgctgctcttaaccctgtgagatgaaatcttcccatttggattacatatttgtagttctatatcgacatcagcagatggcaatagtatacaaatagtatacagcatgagccttccattgcttttatttctttgtttataagtatactataatccttcatctgaaacccttagggttttagaattcagaattttccccttttcagagagaatatatataatgtagattacataacaccctcaatggggcctggggcaacaccccataatcaaacattagtacattcatagtaactgggattaactatgtaaggcagtaagctacctgccttacatagtttaggtcaatttttgtcacaaacttatggaaaaactaggtttttagaaattttttggatctcagaattcgtgattagggattgctgacctctgtaaggaaactggtgtcaggtctagaattttccttctaatgaaatacgtagtcattttccccctttttaaattgcttagctttggtagaggtaactgaaggctttctttagaattcgtgtgttagattttaagaaaaatgcatgaaattgttaggacaggcataaatacaaatggcaattctagagccattacggaattttgaaacacttaacaattgctttcttttacttttcatcttgcctcaatacttgtagcattacaagtattccacgtaaataaacgtttatgaagagctgcagtcatgtcatggagccaggcatttattcattcaacaaataggttagtcttccacacacaatttcaggtgctgggaacacagaattaagacccagcccttcctctcaaggacttcgcgtagtttgggagaaacgggaatgggctggaatgtcagaataagatgggcacttaggccttattgagcatgatcacacttgtattttgaagtaaaataccctgatcaagtaatttaccaagaagctactttttgtgacacagctccgtctcctgaccgcggttccagacttcaccattacaccagtctattcccattctggaaagggagaggtatcagctcttagggggcagagattagcaaattgaaaaatagcagtgaaccagatggaaggctctcgatctttagaggttattaatcagtgtttgttcgttcaatttttaaccagtcaccttgctgttaagagcagaacataattggctggaatgtaatgtagggaatttttccctgttggatccctagcacctagaaaagttcctagcacctattaggtgttaataaatgattgttgaatgaatcagtgattacaagtacttttaagaattttgaaaataaaggaaccattggaaatacga

SEQ ID NO: 35500 - DNA, 5536 bp, Homo sapiens
  source 1..5536: mol_type = unassigned DNA
aaaggggccgcgacccctgtcccggctgctagggagggaggtagagaaggagcgcggggccgtcgctgtctgcagttctaggcttgtagcctttgcactaaccctgccgcagtacatatccagccatactcatggaccccagtgatttccccagtccatttgacccattgaccctgccagagaagcccctggctggagacctaccagtagacatggaatttggagaggatctactggaatcccagactgccccaactcgaggatgggccccccctggcccttctccatcctcgggagccctggacctgcttgatacccctgctggcctggaaaaagaccctggagtcctggatggagccactgagttgctggggctgggggggctgctctataaagccccctctcccccggaggtggaccacggtcctgagggaaccctggcatgggatgcaggagatcagaccctagagcctggaccagggggccagacccctgaggtggtaccacctgatccaggggctggggcaaattcctgttcacctgaggggctactagagcctttggctccagattctccaataacactgcagtccccacatattgaagaggaggagaccacctccatagctactgcaagaaggggctcccctgggcaggaggaggagcttccccaagggcagccacagagcccaaatgccccgcctagcccttcagtgggagagactctgggggatggaatcaacagttctcagaccaaacctgggggctctagcccccctgcacatccttccttgccaggagatggcctgactgcgaaggcgagtgagaagccgcctgaacggaagagaagcgagcgcgttaggagagcagaacctccaaaacctgaggttgtagattccactgagagcattccagtgtcagatgaggattctgatgccatggtagatgaccccaatgatgaggactttgtgccattccggccccggcgctctcctcgcatgtccctacgctcaagtgtgtcacaaagggccgggcgctctgcagtgggcaccaagatgacttgtgcacattgccggacaccactgcagaaggggcagactgcctatcagcgcaaggggctgcctcagctcttctgctcgtcatcctgcctcaccactttctccaagaagccctcgggcaaaaagacctgtaccttctgcaagaaggagatctggaacaccaaggactcggttgtggcgcagactggttctggaggctccttccatgagttctgcacatccgtctgtctctccctgtatgaggcccagcagcagcgcccgatcccccagtctggggatcccgccgacgctactcgctgcagcatatgccagaagactggagaggtcctgcacgaggtcagcaatggcagcgtggtacaccggctctgcagcgattcttgcttctccaaattccgggccaacaagggactgaaaaccaactgttgtgaccagtgtggggcttacatctacaccaagaccgggagtcctggccctgagctcctcttccacgagggccaacaaaagcggttctgcaacacaacctgcttgggggcgtacaagaagaaaaacacacgtgtgtacccatgtgtctggtgcaagaccctgtgtaagaactttgagatgctatcacatgtggatcgtaatggcaagaccagcttgttctgttccctgtgctgtaccacttcttacaaagtgaagcaggcagggctcactggccctccccgaccctgcagcttctgccgccgcagcctctctgacccctgttactacaacaaggttgaccgcacagtctaccagttctgcagccccagctgctggaccaagttccagcgcacaagccctgaggggggcattcacctgagctgtcactactgtcacagcctcttcagtggcaagcctgaggtcttggactggcaggaccaagtgttccagttctgctgccgtgattgctgtgaggacttcaagcggcttcggggtgtggtgtcccagtgtgagcactgtcggcaggagaaactcttgcatgagaaactccgattcagcggagtggagaaaagcttctgcagcgaaggctgtgtgctgctgtacaaacaggacttcactaagaagctgggcttgtgctgtatcacttgtacttactgctcccagacctgccagcgcggagtcaccgagcaactggatggcagcacctgggacttctgcagtgaggactgtaagagcaagtacctgctgtggtactgcaaggctgcccggtgccatgcgtgtaagcgccaggggaagctgctggagaccatccactggcgtgggcagatccgtcatttctgcaaccagcagtgtcttctgcgtttctatagccagcagaaccaacccaacctggatacccagagtgggcccgagagcctcctgaacagtcagtctcctgagtcaaaaccccagacaccctctcaaaccaaagtggagaacagcaacacagtgaggaccccagaggaaaatgggaatttgggcaagatccctgtgaagacccgatcagctcccactgctcccacccctccacccccaccacccccagcaacaccccgcaaaaacaaggctgccatgtgtaagccactgatgcagaatcggggcgtctcctgcaaggtggagatgaagtccaaaggaagtcaaacagaagagtggaagccacaggtgatcgtgctgcccatcccagtgcccatcttcgtgccagtgcctatgcatctgtactgccagaaagtcccggtgcctttctcgatgcctatcccggtgcctgtgcccatgttcttgcccactaccttggagagcacagacaagattgtagagaccattgaggagctgaaggtgaagatcccttccaaccccttggaggccgacatcctggctatggcagaaatgattgcagaggctgaggagttagacaaggcctcatctgacctttgtgatcttgtgagcaaccagagtgcagagggactcctggaagactgtgacctgtttgggcctgctcgagatgatgtcctggccatggcagtcaagatggccaatgtcttggatgagcctgggcaagacttggaggcagacttccctaagaatcctctggacattaatcccagtgtagacttcctctttgattgtggcctggtagggcctgaggatgtgtctactgaacaagaccttccccgaaccatgaggaagggtcaaaagcggctggtgctttccgaaagctgctcccgggactccatgagcagtcagcctagttgtaccgggctcaactattcatatggtgtcaatgcttggaagtgctgggtgcagtcaaaatatgccaatggagaaaccagcaagggtgatgagctgcgctttggccccaaacccatgcgtatcaaagaggatattctcgcctgctcagctgctgagctcaactacggtctggcccagtttgtgagagaaatcactcggcccaatggtgaacgatatgaacctgacagtatctactatttgtgtcttggcatccagcagtacttgctggaaaataaccggatggtgaacattttcacggacctttactacctgacttttgttcaagaactcaacaagtctctgagtacctggcagcccacactcctccccaacaatacggtgttctctcgagtggaggaggagcacctctgggagtgtaagcaactgggggtctactcgccctttgtcctcctcaacaccctcatgttcttcaacactaagttttttgggctgcagacagctgaggaacacatgcaactctccttcaccaatgtggtgcggcagtcccgcaagtgtaccacccctcggggcaccaccaaggtggtgagcatccgctactatgccccagtccgccagaggaaagggcgagacacgggtcctggaaaacggaagagagaagatgaagcccctatcttagagcagcgtgagaaccgcatgaatcccctccgctgccctgtcaagttctatgaattctatctctcaaaatgtcctgaaagcctccggactcgcaacgatgtgttctacctgcaacctgaacggtcctgcatcgccgagtcacctctctggtattctgtgatccccatggaccgcagcatgttggagagcatgctcaatcgcatcctggctgtgcgcgagatttatgaggaactgggtcgtcctggggaggaagacctggactgagctcgtgtgccatccatatccatctttcacatcaatgtctgtcctgtggccatgtccctcagggtgacaggcccaggaaccaatgctactcattctgaagggccctgactgctcctttccgctcacccattccctgccttctctaggaaccctggcttttatcttcttccgtaccacttgacaaccatggggccctggtcttctgtactcaggggctggtctcccagtgatgggcaaaagccagcttgcccgttttctttatgcttcagagtaaacccctccttctgggtccagactctgggtggagtgttaatagctctggtgatcctgttggctttgggtttcctgacccatcccgcataggtagagcctcttgttcctaggcatgacctagggaaaaacccagctgccttctctgccctgtgcccactcccttctctactcttccccagcaccatgccaaaaggtcttatctgaaaggtaagaaataaacaatgaaagcgatgaggggaccatttacataaaacacagagcttagacactcttcccctcctatgaaataattggttgttggcaccatctcaccaccgcatatccctcaccccctcggcaagcaccaatccttggtgctgccgtttttaaaatcttccaaatgcctttttttcctcagaggcagagaatgactaagtacggggagcagactcctgttgtgcagactcctgtccccttggtttctgtgtttgtctctctgccatcttaggttgccatgagccatggtgtcaacatgcttagccccctctgtaactgcctccctttagttcaatggacagacctcccaaggcaaaaactaccttctgacttgggttgaggctgggttcccctctattgttcccctatcataagagctaggccaagcctatgggaccttgagtcatgcaggatgggatctgtggtcaaaggacaggcgaggagctgtgggcgcagggcctgccgccactgcctacatcttctctcttccccatcttgcattggaggtcccagaaaacaattagcttctggcaaagggggtacccacttctttccctgttgactttgctgtttcccaggctcctttttgtgtttttataactgtcaccagttagccactgtttaaattgtatatattgttctgaggcgcctggcctgtcccttcagtgagccatgcccacccttgtgttgtagtgagaagctgttgtcacgactaaccttctgtctctgaaattgtttgtttcaaataaagagttaaaattgtc

SEQ ID NO: 35501 - DNA, 5593 bp, Homo sapiens
  source 1..5593: mol_type = unassigned DNA
attgaggggggcggacgccgagggggtgaacacgagtgggaagctaagagagacacggggagggggaggggaccgggaaccatttgaatgagaggaggggatcacgggtagagtgggctccaggaggtagggcgagcagggtgtgacgggggccagactcttgagccagtacatatccagccatactcatggaccccagtgatttccccagtccatttgacccattgaccctgccagagaagcccctggctggagacctaccagtagacatggaatttggagaggatctactggaatcccagactgccccaactcgaggatgggccccccctggcccttctccatcctcgggagccctggacctgcttgatacccctgctggcctggaaaaagaccctggagtcctggatggagccactgagttgctggggctgggggggctgctctataaagccccctctcccccggaggtggaccacggtcctgagggaaccctggcatgggatgcaggagatcagaccctagagcctggaccagggggccagacccctgaggtggtaccacctgatccaggggctggggcaaattcctgttcacctgaggggctactagagcctttggctccagattctccaataacactgcagtccccacatattgaagaggaggagaccacctccatagctactgcaagaaggggctcccctgggcaggaggaggagcttccccaagggcagccacagagcccaaatgccccgcctagcccttcagtgggagagactctgggggatggaatcaacagttctcagaccaaacctgggggctctagcccccctgcacatccttccttgccaggagatggcctgactgcgaaggcgagtgagaagccgcctgaacggaagagaagcgagcgcgttaggagagcagaacctccaaaacctgaggttgtagattccactgagagcattccagtgtcagatgaggattctgatgccatggtagatgaccccaatgatgaggactttgtgccattccggccccggcgctctcctcgcatgtccctacgctcaagtgtgtcacaaagggccgggcgctctgcagtgggcaccaagatgacttgtgcacattgccggacaccactgcagaaggggcagactgcctatcagcgcaaggggctgcctcagctcttctgctcgtcatcctgcctcaccactttctccaagaagccctcgggcaaaaagacctgtaccttctgcaagaaggagatctggaacaccaaggactcggttgtggcgcagactggttctggaggctccttccatgagttctgcacatccgtctgtctctccctgtatgaggcccagcagcagcgcccgatcccccagtctggggatcccgccgacgctactcgctgcagcatatgccagaagactggagaggtcctgcacgaggtcagcaatggcagcgtggtacaccggctctgcagcgattcttgcttctccaaattccgggccaacaagggactgaaaaccaactgttgtgaccagtgtggggcttacatctacaccaagaccgggagtcctggccctgagctcctcttccacgagggccaacaaaagcggttctgcaacacaacctgcttgggggcgtacaagaagaaaaacacacgtgtgtacccatgtgtctggtgcaagaccctgtgtaagaactttgagatgctatcacatgtggatcgtaatggcaagaccagcttgttctgttccctgtgctgtaccacttcttacaaagtgaagcaggcagggctcactggccctccccgaccctgcagcttctgccgccgcagcctctctgacccctgttactacaacaaggttgaccgcacagtctaccagttctgcagccccagctgctggaccaagttccagcgcacaagccctgaggggggcattcacctgagctgtcactactgtcacagcctcttcagtggcaagcctgaggtcttggactggcaggaccaagtgttccagttctgctgccgtgattgctgtgaggacttcaagcggcttcggggtgtggtgtcccagtgtgagcactgtcggcaggagaaactcttgcatgagaaactccgattcagcggagtggagaaaagcttctgcagcgaaggctgtgtgctgctgtacaaacaggacttcactaagaagctgggcttgtgctgtatcacttgtacttactgctcccagacctgccagcgcggagtcaccgagcaactggatggcagcacctgggacttctgcagtgaggactgtaagagcaagtacctgctgtggtactgcaaggctgcccggtgccatgcgtgtaagcgccaggggaagctgctggagaccatccactggcgtgggcagatccgtcatttctgcaaccagcagtgtcttctgcgtttctatagccagcagaaccaacccaacctggatacccagagtgggcccgagagcctcctgaacagtcagtctcctgagtcaaaaccccagacaccctctcaaaccaaagtggagaacagcaacacagtgaggaccccagaggaaaatgggaatttgggcaagatccctgtgaagacccgatcagctcccactgctcccacccctccacccccaccacccccagcaacaccccgcaaaaacaaggctgccatgtgtaagccactgatgcagaatcggggcgtctcctgcaaggtggagatgaagtccaaaggaagtcaaacagaagagtggaagccacaggtgatcgtgctgcccatcccagtgcccatcttcgtgccagtgcctatgcatctgtactgccagaaagtcccggtgcctttctcgatgcctatcccggtgcctgtgcccatgttcttgcccactaccttggagagcacagacaagattgtagagaccattgaggagctgaaggtgaagatcccttccaaccccttggaggccgacatcctggctatggcagaaatgattgcagaggctgaggagttagacaaggcctcatctgacctttgtgatcttgtgagcaaccagagtgcagagggactcctggaagactgtgacctgtttgggcctgctcgagatgatgtcctggccatggcagtcaagatggccaatgtcttggatgagcctgggcaagacttggaggcagacttccctaagaatcctctggacattaatcccagtgtagacttcctctttgattgtggcctggtagggcctgaggatgtgtctactgaacaagaccttccccgaaccatgaggaagggtcaaaagcggctggtgctttccgaaagctgctcccgggactccatgagcagtcagcctagttgtaccgggctcaactattcatatggtgtcaatgcttggaagtgctgggtgcagtcaaaatatgccaatggagaaaccagcaagggtgatgagctgcgctttggccccaaacccatgcgtatcaaagaggatattctcgcctgctcagctgctgagctcaactacggtctggcccagtttgtgagagaaatcactcggcccaatggtgaacgatatgaacctgacagtatctactatttgtgtcttggcatccagcagtacttgctggaaaataaccggatggtgaacattttcacggacctttactacctgacttttgttcaagaactcaacaagtctctgagtacctggcagcccacactcctccccaacaatacggtgttctctcgagtggaggaggagcacctctgggagtgtaagcaactgggggtctactcgccctttgtcctcctcaacaccctcatgttcttcaacactaagttttttgggctgcagacagctgaggaacacatgcaactctccttcaccaatgtggtgcggcagtcccgcaagtgtaccacccctcggggcaccaccaaggtggtgagcatccgctactatgccccagtccgccagaggaaagggcgagacacgggtcctggaaaacggaagagagaagatgaagcccctatcttagagcagcgtgagaaccgcatgaatcccctccgctgccctgtcaagttctatgaattctatctctcaaaatgtcctgaaagcctccggactcgcaacgatgtgttctacctgcaacctgaacggtcctgcatcgccgagtcacctctctggtattctgtgatccccatggaccgcagcatgttggagagcatgctcaatcgcatcctggctgtgcgcgagatttatgaggaactgggtcgtcctggggaggaagacctggactgagctcgtgtgccatccatatccatctttcacatcaatgtctgtcctgtggccatgtccctcagggtgacaggcccaggaaccaatgctactcattctgaagggccctgactgctcctttccgctcacccattccctgccttctctaggaaccctggcttttatcttcttccgtaccacttgacaaccatggggccctggtcttctgtactcaggggctggtctcccagtgatgggcaaaagccagcttgcccgttttctttatgcttcagagtaaacccctccttctgggtccagactctgggtggagtgttaatagctctggtgatcctgttggctttgggtttcctgacccatcccgcataggtagagcctcttgttcctaggcatgacctagggaaaaacccagctgccttctctgccctgtgcccactcccttctctactcttccccagcaccatgccaaaaggtcttatctgaaaggtaagaaataaacaatgaaagcgatgaggggaccatttacataaaacacagagcttagacactcttcccctcctatgaaataattggttgttggcaccatctcaccaccgcatatccctcaccccctcggcaagcaccaatccttggtgctgccgtttttaaaatcttccaaatgcctttttttcctcagaggcagagaatgactaagtacggggagcagactcctgttgtgcagactcctgtccccttggtttctgtgtttgtctctctgccatcttaggttgccatgagccatggtgtcaacatgcttagccccctctgtaactgcctccctttagttcaatggacagacctcccaaggcaaaaactaccttctgacttgggttgaggctgggttcccctctattgttcccctatcataagagctaggccaagcctatgggaccttgagtcatgcaggatgggatctgtggtcaaaggacaggcgaggagctgtgggcgcagggcctgccgccactgcctacatcttctctcttccccatcttgcattggaggtcccagaaaacaattagcttctggcaaagggggtacccacttctttccctgttgactttgctgtttcccaggctcctttttgtgtttttataactgtcaccagttagccactgtttaaattgtatatattgttctgaggcgcctggcctgtcccttcagtgagccatgcccacccttgtgttgtagtgagaagctgttgtcacgactaaccttctgtctctgaaattgtttgtttcaaataaagagttaaaattgtc

SEQ ID NO: 35502 - DNA, 1511 bp, Homo sapiens
  source 1..1511: mol_type = unassigned DNA
gagtgggctccaggaggtagggcgagcagggtgtgacgggggccagactcttgagccagtacatatccagccatactcatggaccccagtgatttccccagtccatttgacccattgaccctgccagagaagcccctggctggagacctaccagtagacatggaatttggagaggatctactggaatcccagactgccccaactcgaggatgggccccccctggcccttctccatcctcgggagccctggacctgcttgatacccctgctggcctggaaaaagaccctggagtcctggatggagccactgagttgctggggctgggggggctgctctataaagccccctctcccccggaggtggaccacggtcctgagggaaccctggcatgggatgcaggagatcagaccctagagcctggaccagggggccagacccctgaggtggtaccacctgatccaggggctggggcaaattcctgttcacctgaggggctactagagcctttggctccagattctccaataacactgcagtccccacatattgaagaggaggagaccacctccatagctactgcaagaaggggctcccctgggcaggaggaggagcttccccaagggcagccacagagcccaaatgccccgcctagcccttcagtgggagagactctgggggatggaatcaacagttctcagaccaaacctgggggctctagcccccctgcacatccttccttgccaggagatggcctgactgcgaaggcgagtgagaagccgcctgaacgggtacagaagagaagcgagcgcgttaggagagcagaacctccaaaacctgaggttgtagattccactgagagcaggagatctggaacaccaaggactcggttgtggcgcagactggttctggaggctccttccatgagttctgcacatccgtctgtctctccctgtatgaggcccagcagcagcgcccgatcccccagtctggggatcccgccgacgctactcgctgcagcatatgccagaagactggagaggtcctgcacgaggtcagcaatggcagcgtggtacaccggctctgcagcgattcttgcttctccaaattccgggccaacaagggactgaaaaccaactgttgtgaccagtgtggggcttacatctacaccaagaccgggagtcctggccctgagctcctcttccacgagggccaacaaaagcggttctgcaacacaacctgcttgggggcgtacaagaaggtggggccgagggagtagtgcattagagggctgtggaagggggtgtggttcttgggttataaataaaggtggctgatgggtcaagggctgggagaaataaaacaaataaagggggtttcaattgtatccgttatgttttatttttgaagctggctggtggatacacaggtctttgttacatcatcatctatactttttttgtatgcctgaaatatttcatgtttaaaacatttaaaaaataaaagtgaaggg

SEQ ID NO: 35503 - DNA, 1841 bp, Homo sapiens
  source 1..1841: mol_type = unassigned DNA
gggaaccatttgaatgagaggaggggatcacgggtagagtgggctccaggaggtagggcgagcagggtgtgacgggggccagactcttgagccagtacatatccagccatactcatggaccccagtgatttccccagtccatttgacccattgaccctgccagagaagcccctggctggagacctaccagtagacatggaatttggagaggatctactggaatcccagactgccccaactcgaggatgggccccccctggcccttctccatcctcgggagccctggacctgcttgatacccctgctggcctggaaaaagaccctggagtcctggatggagccactgagttgctggggctgggggggctgctctataaagccccctctcccccggaggtggaccacggtcctgagggaaccctggcatgggatgcaggagatcagaccctagagcctggaccagggggccagacccctgaggtggtaccacctgatccaggggctggggcaaattcctgttcacctgaggggctactagagcctttggctccagattctccaataacactgcagtccccacatattgaagaggaggagaccacctccatagctactgcaagaaggggctcccctgggcaggaggaggagcttccccaagggcagccacagagcccaaatgccccgcctagcccttcagtgggagagactctgggggatggaatcaacagttctcagaccaaacctgggggctctagcccccctgcacatccttccttgccaggagatggcctgactgcgaaggcgagtgagaagccgcctgaacggaagagaagcgagcgcgttaggagagcagaacctccaaaacctgaggttgtagattccactgagagcattccagtgtcagatgaggattctgatgccatggtagatgaccccaatgatgaggactttgtgccattccggccccggcgctctcctcgcatgtccctacgctcaagtgtgtcacaaagggccgggcgctctgcagtgggcaccaagatgacttgtgcacattgccggacaccactgcagaaggggcagactgcctatcagcgcaaggggctgcctcagctcttctgctcgtcatcctgcctcaccactttctccaagaagccctcgggcaaaaagacctgtaccttctgcaagaaggagatctggaacaccaaggactcggttgtggcgcagactggttctggaggctccttccatgagttctgcacatccgtctgtctctccctgtatgaggcccagcagcagcgcccgatcccccagtctggggatcccgccgacgctactcgctgcagcatatgccagaagactggagaggtcctgcacgaggtcagcaatggcagcgtggtacaccggctctgcagcgattcttgcttctccaaattccgggccaacaagggactgaaaaccaactgttgtgaccagtgtggggcttacatctacaccaagaccgggagtcctggccctgagctcctcttccacgagggccaacaaaagcggttctgcaacacaacctgcttgggggcgtacaagaaggtggggccgagggagtagtgcattagagggctgtggaagggggtgtggttcttgggttataaataaaggtggctgatgggtcaagggctgggagaaataaaacaaataaagggggtttcaattgtatccgttatgttttatttttgaagctggctggtggatacacaggtctttgttacatcatcatctatactttttttgtatgcctgaaatatttcatgtttaaaacatttaaaaaataaaagtgaagggacaaa

SEQ ID NO: 35504 - DNA, 1867 bp, Homo sapiens
  source 1..1867: mol_type = unassigned DNA
aaaggggccgcgacccctgtcccggctgctagggagggaggtagagaaggagcgcggggccgtcgctgtctgcagttctaggcttgtagcctttgcactaaccctgccgcagtacatatccagccatactcatggaccccagtgatttccccagtccatttgacccattgaccctgccagagaagcccctggctggagacctaccagtagacatggaatttggagaggatctactggaatcccagactgccccaactcgaggatgggccccccctggcccttctccatcctcgggagccctggacctgcttgatacccctgctggcctggaaaaagaccctggagtcctggatggagccactgagttgctggggctgggggggctgctctataaagccccctctcccccggaggtggaccacggtcctgagggaaccctggcatgggatgcaggagatcagaccctagagcctggaccagggggccagacccctgaggtggtaccacctgatccaggggctggggcaaattcctgttcacctgaggggctactagagcctttggctccagattctccaataacactgcagtccccacatattgaagaggaggagaccacctccatagctactgcaagaaggggctcccctgggcaggaggaggagcttccccaagggcagccacagagcccaaatgccccgcctagcccttcagtgggagagactctgggggatggaatcaacagttctcagaccaaacctgggggctctagcccccctgcacatccttccttgccaggagatggcctgactgcgaaggcgagtgagaagccgcctgaacgggtacagaagagaagcgagcgcgttaggagagcagaacctccaaaacctgaggttgtagattccactgagagcattccagtgtcagatgaggattctgatgccatggtagatgaccccaatgatgaggactttgtgccattccggccccggcgctctcctcgcatgtccctacgctcaagtgtgtcacaaagggccgggcgctctgcagtgggcaccaagatgacttgtgcacattgccggacaccactgcagaaggggcagactgcctatcagcgcaaggggctgcctcagctcttctgctcgtcatcctgcctcaccactttctccaagaagccctcgggcaaaaagacctgtaccttctgcaagaaggagatctggaacaccaaggactcggttgtggcgcagactggttctggaggctccttccatgagttctgcacatccgtctgtctctccctgtatgaggcccagcagcagcgcccgatcccccagtctggggatcccgccgacgctactcgctgcagcatatgccagaagactggagaggtcctgcacgaggtcagcaatggcagcgtggtacaccggctctgcagcgattcttgcttctccaaattccgggccaacaagggactgaaaaccaactgttgtgaccagtgtggggcttacatctacaccaagaccgggagtcctggccctgagctcctcttccacgagggccaacaaaagcggttctgcaacacaacctgcttgggggcgtacaagaaggtggggccgagggagtagtgcattagagggctgtggaagggggtgtggttcttgggttataaataaaggtggctgatgggtcaagggctgggagaaataaaacaaataaagggggtttcaattgtatccgttatgttttatttttgaagctggctggtggatacacaggtctttgttacatcatcatctatactttttttgtatgcctgaaatatttcatgtttaaaacatttaaaaaataaaagtgaagggacaaatcc

SEQ ID NO: 35505 - DNA, 5253 bp, Homo sapiens
  source 1..5253: mol_type = unassigned DNA
gacccctgtcccggctgctagggagggaggtagagaaggagcgcggggccgtcgctgtctgcagttctaggcttgtagcctttgcactaaccctgccgcagtacatatccagccatactcatggaccccagtgatttccccagtccatttgacccattgaccctgccagagaagcccctggctggagacctaccagtagacatggaatttggagaggatctactggaatcccagactgccccaactcgaggatgggccccccctggcccttctccatcctcgggagccctggacctgcttgatacccctgctggcctggaaaaagaccctggagtcctggatggagccactgagttgctggggctgggggggctgctctataaagccccctctcccccggaggtggaccacggtcctgagggaaccctggcatgggatgcaggagatcagaccctagagcctggaccagggggccagacccctgaggtggtaccacctgatccaggggctggggcaaattcctgttcacctgaggggctactagagcctttggctccagattctccaataacactgcagtccccacatattgaagaggaggagaccacctccatagctactgcaagaaggggctcccctgggcaggaggaggagcttccccaagggcagccacagagcccaaatgccccgcctagcccttcagtgggagagactctgggggatggaatcaacagttctcagaccaaacctgggggctctagcccccctgcacatccttccttgccaggagatggcctgactgcgaaggcgagtgagaagccgcctgaacgggtacagaagagaagcgagcgcgttaggagagcagaacctccaaaacctgaggttgtagattccactgagagcattccagtgtcagatgaggattctgatgccatggtagatgaccccaatgatgaggactttgtgccattccggccccggcgctctcctcgcatgtccctacgctcaagtgtgtcacaaagggccgggcgctctgcagtgggcaccaagatgacttgtgcacattgccggacaccactgcagaaggggcagactgcctatcagcgcaaggggctgcctcagctcttctgctcgtcatcctgcctcaccactttctccaagaagccctcgggcaaaaagacctgtaccttctgcaagaaggagatctggaacaccaaggactcggttgtggcgcagactggttctggaggctccttccatgagttctgcacatccgtctgtctctccctgtatgaggcccagcagcagcgcccgatcccccagtctggggatcccgccgacgctactcgctgcagcatatgccagaagactggagaggtcctgcacgaggtcagcaatggcagcgtggtacaccggctctgcagcgattcttgcttctccaaattccgggccaacaagggactgaaaaccaactgttgtgaccagtgtggggcttacatctacaccaagaccgggagtcctggccctgagctcctcttccacgagggccaacaaaagcggttctgcaacacaacctgcttgggggcgtacaagaagaaaaacacacgtgtgtacccatgtgtctggtgcaagaccctgtgtaagaactttgagatgctatcacatgtggatcgtaatggcaagaccagcttgttctgttccctgtgctgtaccacttcttacaaagtgaagcaggcagggctcactggccctccccgaccctgcagcttctgccgccgcagcctctctgacccctgttactacaacaaggttgaccgcacagtctaccagttctgcagccccagctgctggaccaagttccagcgcacaagccctgaggggggcattcacctgagctgtcactactgtcacagcctcttcagtggcaagcctgaggtcttggactggcaggaccaagtgttccagttctgctgccgtgattgctgtgaggacttcaagcggcttcggggtgtggtgtcccagtgtgagcactgtcggcaggagaaactcttgcatgagaaactccgattcagcggagtggagaaaagcttctgcagcgaaggctgtgtgctgctgtacaaacaggacttcactaagaagctgggcttgtgctgtatcacttgtacttactgctcccagacctgccagcgcggagtcaccgagcaactggatggcagcacctgggacttctgcagtgaggactgtaagagcaagtacctgctgtggtactgcaaggctgcccggtgccatgcgtgtaagcgccaggggaagctgctggagaccatccactggcgtgggcagatccgtcatttctgcaaccagcagtgtcttctgcgtttctatagccagcagaaccaacccaacctggatacccagagtgggcccgagagcctcctgaacagtcagtctcctgagtcaaaaccccagacaccctctcaaaccaaagtggagaacagcaacacagtgaggaccccagaggaaaatgggaatttgggcaagatccctgtgaagacccgatcagctcccactgctcccacccctccacccccaccacccccagcaacaccccgcaaaaacaaggctgccatgtgtaagccactgatgcagaatcggggcgtctcctgcaaggtggagatgaagtccaaaggaagtcaaacagaagagtggaagccacaggtgatcgtgctgcccatcccagtgcccatcttcgtgccagtgcctatgcatctgtactgccagaaagtcccggtgcctttctcgatgcctatcccggtgcctgtgcccatgttcttgcccactaccttggagagcacagacaagattgtagagaccattgaggagctgaaggtgaagatcccttccaaccccttggaggccgacatcctggctatggcagaaatgattgcagaggctgaggagttagacaaggcctcatctgacctttgtgatcttgtgagcaaccagagtgcagagggactcctggaagactgtgacctgtttgggcctgctcgagatgatgtcctggccatggcagtcaagatggccaatgtcttggatgagcctgggcaagacttggaggcagacttccctaagaatcctctggacattaatcccagtgtagacttcctctttgattgtggcctggtagggcctgaggatgtgtctactgaacaagaccttccccgaaccatgaggaagggtcaaaagcggctggtgctttccgaaagctgctcccgggactccatgagcagtcagcctagttgtaccgggctcaactattcatatggtgtcaatgcttggaagtgctgggtgcagtcaaaatatgccaatggagaaaccagcaaggccaaacccatgcgtatcaaagaggatattctcgcctgctcagctgctgagctcaactacggtctggcccagtttgtgagagaaatcactcggcccaatggtgaacgatatgaacctgacagtatctactatttgtgtcttggcatccagcagtacttgctggaaaataaccggatggtgaacattttcacggacctttactacctgacttttgttcaagaactcaacaagtctctgagtacctggcagcccacactcctccccaacaacacgggtcctggaaaacggaagagagaagatgaagcccctatcttagagcagcgtgagaaccgcatgaatcccctccgctgccctgtcaagttctatgaattctatctctcaaaatgtcctgaaagcctccggactcgcaacgatgtgttctacctgcaacctgaacggtcctgcatcgccgagtcacctctctggtattctgtgatccccatggaccgcagcatgttggagagcatgctcaatcgcatcctggctgtgcgcgagatttatgaggaactgggtcgtcctggggaggaagacctggactgagctcgtgtgccatccatatccatctttcacatcaatgtctgtcctgtggccatgtccctcagggtgacaggcccaggaaccaatgctactcattctgaagggccctgactgctcctttccgctcacccattccctgccttctctaggaaccctggcttttatcttcttccgtaccacttgacaaccatggggccctggtcttctgtactcaggggctggtctcccagtgatgggcaaaagccagcttgcccgttttctttatgcttcagagtaaacccctccttctgggtccagactctgggtggagtgttaatagctctggtgatcctgttggctttgggtttcctgacccatcccgcataggtagagcctcttgttcctaggcatgacctagggaaaaacccagctgccttctctgccctgtgcccactcccttctctactcttccccagcaccatgccaaaaggtcttatctgaaaggtaagaaataaacaatgaaagcgatgaggggaccatttacataaaacacagagcttagacactcttcccctcctatgaaataattggttgttggcaccatctcaccaccgcatatccctcaccccctcggcaagcaccaatccttggtgctgccgtttttaaaatcttccaaatgcctttttttcctcagaggcagagaatgactaagtacggggagcagactcctgttgtgcagactcctgtccccttggtttctgtgtttgtctctctgccatcttaggttgccatgagccatggtgtcaacatgcttagccccctctgtaactgcctccctttagttcaatggacagacctcccaaggcaaaaactaccttctgacttgggttgaggctgggttcccctctattgttcccctatcataagagctaggccaagcctatgggaccttgagtcatgcaggatgggatctgtggtcaaaggacaggcgaggagctgtgggcgcagggcctgccgccactgcctacatcttctctcttccccatcttgcattggaggtcccagaaaacaattagcttctggcaaagggggtacccacttctttccctgttgactttgctgtttcccaggctcctttttgtgtttttataactgtcaccagttagccactgtttaaattgtatatattgttctgaggcgcctggcctgtcccttcagtgagccatgcccacccttgtgttgtagtgagaagctgttgtcacgactaaccttctgtctctgaaattgtttgtttcaaataaagagttaaaattg

SEQ ID NO: 35506 - DNA, 6021 bp, Homo sapiens
  source 1..6021: mol_type = unassigned DNA
tccatagataatacagggagctcctgcaggaagactcagggagaagatcccagaacttaccctaagactgttgagagagtagggggtagctttgcaggacctggtttgggggtcatcaagcagtaacggttactgcacaggcgttgccactgagccagagccatttaacccgacctgtgtggctggggatcaagcttcagataccccataactctgactctcagactgttttgggggccccgtggctgcagacaagggaaggaggggcacgtgagggctgggtccctgcctccccccgtcctccgctgtcactcactaccccaacagtcgcccagggggcgggacccggagaggtggggatgggggagggtaatcttggcaggcgcctgctgcatggcgtaggtagggactattgaggggggcggacgccgagggggtgaacacgagtgggaagctaagagagacacggggagggggaggggaccgggaaccatttgaatgagaggaggggatcacgggtagagtgggctccaggaggtagggcgagcagggtgtgacgggggccagactcttgagccaggtaaggggagcagtacatatccagccatactcatggaccccagtgatttccccagtccatttgacccattgaccctgccagagaagcccctggctggagacctaccagtagacatggaatttggagaggatctactggaatcccagactgccccaactcgaggatgggccccccctggcccttctccatcctcgggagccctggacctgcttgatacccctgctggcctggaaaaagaccctggagtcctggatggagccactgagttgctggggctgggggggctgctctataaagccccctctcccccggaggtggaccacggtcctgagggaaccctggcatgggatgcaggagatcagaccctagagcctggaccagggggccagacccctgaggtggtaccacctgatccaggggctggggcaaattcctgttcacctgaggggctactagagcctttggctccagattctccaataacactgcagtccccacatattgaagaggaggagaccacctccatagctactgcaagaaggggctcccctgggcaggaggaggagcttccccaagggcagccacagagcccaaatgccccgcctagcccttcagtgggagagactctgggggatggaatcaacagttctcagaccaaacctgggggctctagcccccctgcacatccttccttgccaggagatggcctgactgcgaaggcgagtgagaagccgcctgaacgggtacagaagagaagcgagcgcgttaggagagcagaacctccaaaacctgaggttgtagattccactgagagcattccagtgtcagatgaggattctgatgccatggtagatgaccccaatgatgaggactttgtgccattccggccccggcgctctcctcgcatgtccctacgctcaagtgtgtcacaaagggccgggcgctctgcagtgggcaccaagatgacttgtgcacattgccggacaccactgcagaaggggcagactgcctatcagcgcaaggggctgcctcagctcttctgctcgtcatcctgcctcaccactttctccaagaagccctcgggcaaaaagacctgtaccttctgcaagaaggagatctggaacaccaaggactcggttgtggcgcagactggttctggaggctccttccatgagttctgcacatccgtctgtctctccctgtatgaggcccagcagcagcgcccgatcccccagtctggggatcccgccgacgctactcgctgcagcatatgccagaagactggagaggtcctgcacgaggtcagcaatggcagcgtggtacaccggctctgcagcgattcttgcttctccaaattccgggccaacaagggactgaaaaccaactgttgtgaccagtgtggggcttacatctacaccaagaccgggagtcctggccctgagctcctcttccacgagggccaacaaaagcggttctgcaacacaacctgcttgggggcgtacaagaagaaaaacacacgtgtgtacccatgtgtctggtgcaagaccctgtgtaagaactttgagatgctatcacatgtggatcgtaatggcaagaccagcttgttctgttccctgtgctgtaccacttcttacaaagtgaagcaggcagggctcactggccctccccgaccctgcagcttctgccgccgcagcctctctgacccctgttactacaacaaggttgaccgcacagtctaccagttctgcagccccagctgctggaccaagttccagcgcacaagccctgaggggggcattcacctgagctgtcactactgtcacagcctcttcagtggcaagcctgaggtcttggactggcaggaccaagtgttccagttctgctgccgtgattgctgtgaggacttcaagcggcttcggggtgtggtgtcccagtgtgagcactgtcggcaggagaaactcttgcatgagaaactccgattcagcggagtggagaaaagcttctgcagcgaaggctgtgtgctgctgtacaaacaggacttcactaagaagctgggcttgtgctgtatcacttgtacttactgctcccagacctgccagcgcggagtcaccgagcaactggatggcagcacctgggacttctgcagtgaggactgtaagagcaagtacctgctgtggtactgcaaggctgcccggtgccatgcgtgtaagcgccaggggaagctgctggagaccatccactggcgtgggcagatccgtcatttctgcaaccagcagtgtcttctgcgtttctatagccagcagaaccaacccaacctggatacccagagtgggcccgagagcctcctgaacagtcagtctcctgagtcaaaaccccagacaccctctcaaaccaaagtggagaacagcaacacagtgaggaccccagaggaaaatgggaatttgggcaagatccctgtgaagacccgatcagctcccactgctcccacccctccacccccaccacccccagcaacaccccgcaaaaacaaggctgccatgtgtaagccactgatgcagaatcggggcgtctcctgcaaggtggagatgaagtccaaaggaagtcaaacagaagagtggaagccacaggtgatcgtgctgcccatcccagtgcccatcttcgtgccagtgcctatgcatctgtactgccagaaagtcccggtgcctttctcgatgcctatcccggtgcctgtgcccatgttcttgcccactaccttggagagcacagacaagattgtagagaccattgaggagctgaaggtgaagatcccttccaaccccttggaggccgacatcctggctatggcagaaatgattgcagaggctgaggagttagacaaggcctcatctgacctttgtgatcttgtgagcaaccagagtgcagagggactcctggaagactgtgacctgtttgggcctgctcgagatgatgtcctggccatggcagtcaagatggccaatgtcttggatgagcctgggcaagacttggaggcagacttccctaagaatcctctggacattaatcccagtgtagacttcctctttgattgtggcctggtagggcctgaggatgtgtctactgaacaagaccttccccgaaccatgaggaagggtcaaaagcggctggtgctttccgaaagctgctcccgggactccatgagcagtcagcctagttgtaccgggctcaactattcatatggtgtcaatgcttggaagtgctgggtgcagtcaaaatatgccaatggagaaaccagcaagggtgatgagctgcgctttggccccaaacccatgcgtatcaaagaggatattctcgcctgctcagctgctgagctcaactacggtctggcccagtttgtgagagaaatcactcggcccaatggtgaacgatatgaacctgacagtatctactatttgtgtcttggcatccagcagtacttgctggaaaataaccggatggtgaacattttcacggacctttactacctgacttttgttcaagaactcaacaagtctctgagtacctggcagcccacactcctccccaacaatacggtgttctctcgagtggaggaggagcacctctgggagtgtaagcaactgggggtctactcgccctttgtcctcctcaacaccctcatgttcttcaacactaagttttttgggctgcagacagctgaggaacacatgcaactctccttcaccaatgtggtgcggcagtcccgcaagtgtaccacccctcggggcaccaccaaggtggtgagcatccgctactatgccccagtccgccagaggaaagggcgagacacgggtcctggaaaacggaagagagaagatgaagcccctatcttagagcagcgtgagaaccgcatgaatcccctccgctgccctgtcaagttctatgaattctatctctcaaaatgtcctgaaagcctccggactcgcaacgatgtgttctacctgcaacctgaacggtcctgcatcgccgagtcacctctctggtattctgtgatccccatggaccgcagcatgttggagagcatgctcaatcgcatcctggctgtgcgcgagatttatgaggaactgggtcgtcctggggaggaagacctggactgagctcgtgtgccatccatatccatctttcacatcaatgtctgtcctgtggccatgtccctcagggtgacaggcccaggaaccaatgctactcattctgaagggccctgactgctcctttccgctcacccattccctgccttctctaggaaccctggcttttatcttcttccgtaccacttgacaaccatggggccctggtcttctgtactcaggggctggtctcccagtgatgggcaaaagccagcttgcccgttttctttatgcttcagagtaaacccctccttctgggtccagactctgggtggagtgttaatagctctggtgatcctgttggctttgggtttcctgacccatcccgcataggtagagcctcttgttcctaggcatgacctagggaaaaacccagctgccttctctgccctgtgcccactcccttctctactcttccccagcaccatgccaaaaggtcttatctgaaaggtaagaaataaacaatgaaagcgatgaggggaccatttacataaaacacagagcttagacactcttcccctcctatgaaataattggttgttggcaccatctcaccaccgcatatccctcaccccctcggcaagcaccaatccttggtgctgccgtttttaaaatcttccaaatgcctttttttcctcagaggcagagaatgactaagtacggggagcagactcctgttgtgcagactcctgtccccttggtttctgtgtttgtctctctgccatcttaggttgccatgagccatggtgtcaacatgcttagccccctctgtaactgcctccctttagttcaatggacagacctcccaaggcaaaaactaccttctgacttgggttgaggctgggttcccctctattgttcccctatcataagagctaggccaagcctatgggaccttgagtcatgcaggatgggatctgtggtcaaaggacaggcgaggagctgtgggcgcagggcctgccgccactgcctacatcttctctcttccccatcttgcattggaggtcccagaaaacaattagcttctggcaaagggggtacccacttctttccctgttgactttgctgtttcccaggctcctttttgtgtttttataactgtcaccagttagccactgtttaaattgtatatattgttctgaggcgcctggcctgtcccttcagtgagccatgcccacccttgtgttgtagtgagaagctgttgtcacgactaaccttctgtctctgaaattgtttgtttcaaataaagagttaaaattg

SEQ ID NO: 35507 - DNA, 6067 bp, Homo sapiens
  source 1..6067: mol_type = unassigned DNA
gagagagagagagagagagagagagagagagagagagagagagagagagagagagagagagatcagccctggtgagggaggaaaactccatagataatacagggagctcctgcaggaagactcagggagaagatcccagaacttaccctaagactgttgagagagtagggggtagctttgcaggacctggtttgggggtcatcaagcagtaacggttactgcacaggcgttgccactgagccagagccatttaacccgacctgtgtggctggggatcaagcttcagataccccataactctgactctcagactgttttgggggccccgtggctgcagacaagggaaggaggggcacgtgagggctgggtccctgcctccccccgtcctccgctgtcactcactaccccaacagtcgcccagggggcgggacccggagaggtggggatgggggagggtaatcttggcaggcgcctgctgcatggcgtaggtagggactattgaggggggcggacgccgagggggtgaacacgagtgggaagctaagagagacacggggagggggaggggaccgggaaccatttgaatgagaggaggggatcacgggtagagtgggctccaggaggtagggcgagcagggtgtgacgggggccagactcttgagccaggtaaggggagcagtacatatccagccatactcatggaccccagtgatttccccagtccatttgacccattgaccctgccagagaagcccctggctggagacctaccagtagacatggaatttggagaggatctactggaatcccagactgccccaactcgaggatgggccccccctggcccttctccatcctcgggagccctggacctgcttgatacccctgctggcctggaaaaagaccctggagtcctggatggagccactgagttgctggggctgggggggctgctctataaagccccctctcccccggaggtggaccacggtcctgagggaaccctggcatgggatgcaggagatcagaccctagagcctggaccagggggccagacccctgaggtggtaccacctgatccaggggctggggcaaattcctgttcacctgaggggctactagagcctttggctccagattctccaataacactgcagtccccacatattgaagaggaggagaccacctccatagctactgcaagaaggggctcccctgggcaggaggaggagcttccccaagggcagccacagagcccaaatgccccgcctagcccttcagtgggagagactctgggggatggaatcaacagttctcagaccaaacctgggggctctagcccccctgcacatccttccttgccaggagatggcctgactgcgaaggcgagtgagaagccgcctgaacggaagagaagcgagcgcgttaggagagcagaacctccaaaacctgaggttgtagattccactgagagcattccagtgtcagatgaggattctgatgccatggtagatgaccccaatgatgaggactttgtgccattccggccccggcgctctcctcgcatgtccctacgctcaagtgtgtcacaaagggccgggcgctctgcagtgggcaccaagatgacttgtgcacattgccggacaccactgcagaaggggcagactgcctatcagcgcaaggggctgcctcagctcttctgctcgtcatcctgcctcaccactttctccaagaagccctcgggcaaaaagacctgtaccttctgcaagaaggagatctggaacaccaaggactcggttgtggcgcagactggttctggaggctccttccatgagttctgcacatccgtctgtctctccctgtatgaggcccagcagcagcgcccgatcccccagtctggggatcccgccgacgctactcgctgcagcatatgccagaagactggagaggtcctgcacgaggtcagcaatggcagcgtggtacaccggctctgcagcgattcttgcttctccaaattccgggccaacaagggactgaaaaccaactgttgtgaccagtgtggggcttacatctacaccaagaccgggagtcctggccctgagctcctcttccacgagggccaacaaaagcggttctgcaacacaacctgcttgggggcgtacaagaagaaaaacacacgtgtgtacccatgtgtctggtgcaagaccctgtgtaagaactttgagatgctatcacatgtggatcgtaatggcaagaccagcttgttctgttccctgtgctgtaccacttcttacaaagtgaagcaggcagggctcactggccctccccgaccctgcagcttctgccgccgcagcctctctgacccctgttactacaacaaggttgaccgcacagtctaccagttctgcagccccagctgctggaccaagttccagcgcacaagccctgaggggggcattcacctgagctgtcactactgtcacagcctcttcagtggcaagcctgaggtcttggactggcaggaccaagtgttccagttctgctgccgtgattgctgtgaggacttcaagcggcttcggggtgtggtgtcccagtgtgagcactgtcggcaggagaaactcttgcatgagaaactccgattcagcggagtggagaaaagcttctgcagcgaaggctgtgtgctgctgtacaaacaggacttcactaagaagctgggcttgtgctgtatcacttgtacttactgctcccagacctgccagcgcggagtcaccgagcaactggatggcagcacctgggacttctgcagtgaggactgtaagagcaagtacctgctgtggtactgcaaggctgcccggtgccatgcgtgtaagcgccaggggaagctgctggagaccatccactggcgtgggcagatccgtcatttctgcaaccagcagtgtcttctgcgtttctatagccagcagaaccaacccaacctggatacccagagtgggcccgagagcctcctgaacagtcagtctcctgagtcaaaaccccagacaccctctcaaaccaaagtggagaacagcaacacaatccctgtgaagacccgatcagctcccactgctcccacccctccacccccaccacccccagcaacaccccgcaaaaacaaggctgccatgtgtaagccactgatgcagaatcggggcgtctcctgcaaggtggagatgaagtccaaaggaagtcaaacagaagagtggaagccacaggtgatcgtgctgcccatcccagtgcccatcttcgtgccagtgcctatgcatctgtactgccagaaagtcccggtgcctttctcgatgcctatcccggtgcctgtgcccatgttcttgcccactaccttggagagcacagacaagattgtagagaccattgaggagctgaaggtgaagatcccttccaaccccttggaggccgacatcctggctatggcagaaatgattgcagaggctgaggagttagacaaggcctcatctgacctttgtgatcttgtgagcaaccagagtgcagagggactcctggaagactgtgacctgtttgggcctgctcgagatgatgtcctggccatggcagtcaagatggccaatgtcttggatgagcctgggcaagacttggaggcagacttccctaagaatcctctggacattaatcccagtgtagacttcctctttgattgtggcctggtagggcctgaggatgtgtctactgaacaagaccttccccgaaccatgaggaagggtcaaaagcggctggtgctttccgaaagctgctcccgggactccatgagcagtcagcctagttgtaccgggctcaactattcatatggtgtcaatgcttggaagtgctgggtgcagtcaaaatatgccaatggagaaaccagcaagggtgatgagctgcgctttggccccaaacccatgcgtatcaaagaggatattctcgcctgctcagctgctgagctcaactacggtctggcccagtttgtgagagaaatcactcggcccaatggtgaacgatatgaacctgacagtatctactatttgtgtcttggcatccagcagtacttgctggaaaataaccggatggtgaacattttcacggacctttactacctgacttttgttcaagaactcaacaagtctctgagtacctggcagcccacactcctccccaacaatacggtgttctctcgagtggaggaggagcacctctgggagtgtaagcaactgggggtctactcgccctttgtcctcctcaacaccctcatgttcttcaacactaagttttttgggctgcagacagctgaggaacacatgcaactctccttcaccaatgtggtgcggcagtcccgcaagtgtaccacccctcggggcaccaccaaggtggtgagcatccgctactatgccccagtccgccagaggaaagggcgagacacgggtcctggaaaacggaagagagaagatgaagcccctatcttagagcagcgtgagaaccgcatgaatcccctccgctgccctgtcaagttctatgaattctatctctcaaaatgtcctgaaagcctccggactcgcaacgatgtgttctacctgcaacctgaacggtcctgcatcgccgagtcacctctctggtattctgtgatccccatggaccgcagcatgttggagagcatgctcaatcgcatcctggctgtgcgcgagatttatgaggaactgggtcgtcctggggaggaagacctggactgagctcgtgtgccatccatatccatctttcacatcaatgtctgtcctgtggccatgtccctcagggtgacaggcccaggaaccaatgctactcattctgaagggccctgactgctcctttccgctcacccattccctgccttctctaggaaccctggcttttatcttcttccgtaccacttgacaaccatggggccctggtcttctgtactcaggggctggtctcccagtgatgggcaaaagccagcttgcccgttttctttatgcttcagagtaaacccctccttctgggtccagactctgggtggagtgttaatagctctggtgatcctgttggctttgggtttcctgacccatcccgcataggtagagcctcttgttcctaggcatgacctagggaaaaacccagctgccttctctgccctgtgcccactcccttctctactcttccccagcaccatgccaaaaggtcttatctgaaaggtaagaaataaacaatgaaagcgatgaggggaccatttacataaaacacagagcttagacactcttcccctcctatgaaataattggttgttggcaccatctcaccaccgcatatccctcaccccctcggcaagcaccaatccttggtgctgccgtttttaaaatcttccaaatgcctttttttcctcagaggcagagaatgactaagtacggggagcagactcctgttgtgcagactcctgtccccttggtttctgtgtttgtctctctgccatcttaggttgccatgagccatggtgtcaacatgcttagccccctctgtaactgcctccctttagttcaatggacagacctcccaaggcaaaaactaccttctgacttgggttgaggctgggttcccctctattgttcccctatcataagagctaggccaagcctatgggaccttgagtcatgcaggatgggatctgtggtcaaaggacaggcgaggagctgtgggcgcagggcctgccgccactgcctacatcttctctcttccccatcttgcattggaggtcccagaaaacaattagcttctggcaaagggggtacccacttctttccctgttgactttgctgtttcccaggctcctttttgtgtttttataactgtcaccagttagccactgtttaaattgtatatattgttctgaggcgcctggcctgtcccttcagtgagccatgcccacccttgtgttgtagtgagaagctgttgtcacgactaaccttctgtctctgaaattgtttgtttcaaataaagagttaaaattgtc

SEQ ID NO: 35508 - DNA, 2268 bp, Homo sapiens
  source 1..2268: mol_type = unassigned DNA
tctgggccggggccctgtgccgctgaagacatggagtttgtgtctggataccgggatgagttccttgatttcactgcccttctcttcggctggttccgaaagtttgtggcagagcgtggagctgtagggactagccttgagggccgctgccggcagctggaggcccagatcagaaggctaccccaggaccctgccctttgggtgctccatgtcctgcccaaccatagtgtgggcatcagcctggggcaaggggcagaaccaggtcctggaccaggcctggggactgcctggctcctgggagacaaccctccactccacctgcgagacctgagcccctacatcagctttgtcagcctagaggatggggaggaaggggaggaggaagaggaggaagatgaagaagaagagaagagagaggacgggggtgcaggcagcacagagaaggtggaaccagaggaggaccgggagctagcccctaccagcagggagtccccccaggaaacaaaccctccaggagagtcagaggaggctgcccgggaggcaggaggtggcaaggatggctgccgagaggacagggtggagaacgaaacaagaccccagaagaggaagggacagaggagtgaggctgcccccctgcacgtttcctgtctcttacttgtgacggatgagcatggcaccatcttgggcattgatctgctagtggatggagcccagggaaccgcaagctggggctcagggaccaaggacctggctccttgggcctatgctctcctctgtcacagcatggcctgtcccatgggctctggggatccccgaaagccccgacagcttactgtgggagatgcccggctgcatcgagagctggagagcttggtcccaaggctaggtgtgaagttagccaaaaccccaatgcggacatggggtccccggccaggcttcacctttgcttcccttcgtgctcgaacctgccatgtgtgtcacaggcacagctttgaagcgaagctgacaccttgcccccagtgtagtgctgtcttgtattgtggagaggcttgtctccgggctgactggcagcggtgcccagatgatgtgagtcaccgattttggtgcccaaggcttgcagccttcatggagcgggcaggagaactggcaaccctgccttttacctacaccgcagaggtgaccagtgaaaccttcaacaaagaggccttcctggcctctcggggcctcactcgtggctattggacccagctcagcatgctgattccaggcccgggcttctccagacacccccgaggcaacacgccatccctcagccttcttcgcggtggagacccctaccagcttctccagggagacgggactgccctgatgcctcctgtgcccccacatccaccccggggtgtttttgtccctgagctcaacatccaaaacaaacagtcactgaagatccacgtggtggaggccgggaaggagtttgaccttgtcatggtgttttgggagcttttggtcctgctcccccatgtggccctggagctgcagtttgtaggtgatggcctgccccccgaaagcgacgagcagcattttaccctgcagagggacagcctggaggtgtctgtccggcctggttccggcatatcagcacggcccagctctggcactaaggagaaagggggccgcagggacctgcagatcaaggtgtcagcaaggccctaccacctgttccaggggcccaagcctgacctggttattggatttaactccgggtttgctctcaaggatacgtggctgaggtctctgccccggttacagtccctccgagtgccagccttcttcaccgagagcagcgagtacagctgtgtgatggacggccagaccatggcggtggccactggagggggcaccagccctccccagcccaaccccttccgctccccctttcgcctcagagcggccgacaactgcatgtcctggtactgcaatgccttcatcttccacctggtttacaagcctgctcaagggagcggggcccgcccggcgcccgggcccccacccccatccccaactccctctgctcctcctgcccccacccgaaggcgccgaggagaaaagaaacctgggcggggggcccgccggcggaaatgaatgctgataccctagtagtccccagctcccaaacactgaaaggaaaacgtgaaaacactcaaggcctagggggaggacaggttggtaaaacatgaaaaggtaaataaaattacttgtttgaaacca

SEQ ID NO: 35509 - DNA, 2411 bp, Homo sapiens
  source 1..2411: mol_type = unassigned DNA
accttcgaaaagtggtggcggctgcagtctgggccggggccctgtgccgctgaagacatggagtttgtgtctggataccgggatgagttccttgatttcactgcccttctcttcggctggttccgaaagtttgtggcagagcgtggagctgtagggactagccttgagggccgctgccggcagctggaggcccagatcagaaggctaccccaggaccctgccctttgggtgctccatgtcctgcccaaccatagtgtgggcatcagcctggggcaaggggcagaaccaggtcctggaccaggcctggggactgcctggctcctgggagacaaccctccactccacctgcgagacctgagcccctacatcagctttgtcagcctagaggatggggaggaaggggaggaggaagaggaggaagatgaagaagaagagaagagagaggacgggggtgcaggcagcacagagaaggtggaaccagaggaggaccgggagctagcccctaccagcagggagtccccccaggaaacaaaccctccaggagagtcagaggaggctgcccgggaggcaggaggtggcaaggatggctgccgagaggacagggtggagaacgaaacaagaccccagaagaggaagggacagaggagtgaggctgcccccctgcacgtttcctgtctcttacttgtgacggatgagcatggcaccatcttgggcattgatctgctagtggatggagcccagggaaccgcaagctggggctcagggaccaaggacctggctccttgggcctatgctctcctctgtcacagcatggcctgtcccatgggctctggggatccccgaaagccccgacagcttactgtgggagatgcccggctgcatcgagagctggagagcttggtcccaaggctaggtgtgaagttagccaaaaccccaatgcggacatggggtccccggccaggcttcacctttgcttcccttcgtgctcgaacctgccatgtgtgtcacaggcacagctttgaagcgaagctgacaccttgcccccagtgtagtgctgtcttgtattgtggagaggcttgtctccgggctgactggcagcggtgcccagatgatgtgagtcaccgattttggtgcccaaggcttgcagccttcatggagcgggcaggagaactggcaaccctgccttttacctacaccgcagaggtgaccagtgaaaccttcaacaaagaggccttcctggcctctcggggcctcactcgtggctattggacccagctcagcatgctgattccaggcccgggcttctccagacacccccgaggcaacacgccatccctcagccttcttcgcggtggagacccctaccagcttctccagggagacgggactgccctgatgcctcctgtgcccccacatccaccccggggtgtttttggctcatggcaggattactacacatggcggggcctcagcttggactcccccatagccgtgcttctcacctacccgctgaccgtgtactacgtcatcacccacctggtgccccagtccttccctgagctcaacatccaaaacaaacagtcactgaagatccacgtggtggaggccgggaaggagtttgaccttgtcatggtgttttgggagcttttggtcctgctcccccatgtggccctggagctgcagtttgtaggtgatggcctgccccccgaaagcgacgagcagcattttaccctgcagagggacagcctggaggtgtctgtccggcctggttccggcatatcagcacggcccagctctggcactaaggagaaagggggccgcagggacctgcagatcaaggtgtcagcaaggccctaccacctgttccaggggcccaagcctgacctggttattggatttaactccgggtttgctctcaaggatacgtggctgaggtctctgccccggttacagtccctccgagtgccagccttcttcaccgagagcagcgagtacagctgtgtgatggacggccagaccatggcggtggccactggagggggcaccagccctccccagcccaaccccttccgctccccctttcgcctcagagcggccgacaactgcatgtcctggtactgcaatgccttcatcttccacctggtttacaagcctgctcaagggagcggggcccgcccggcgcccgggcccccacccccatccccaactccctctgctcctcctgcccccacccgaaggcgccgaggagaaaagaaacctgggcggggggcccgccggcggaaatgaatgctgataccctagtagtccccagctcccaaacactgaaaggaaaacgtgaaaacactcaaggcctagggggaggacaggttggtaaaacatgaaaaggtaaataaaattacttgtttgaaacc

SEQ ID NO: 35510 - DNA, 1375 bp, Homo sapiens
  source 1..1375: mol_type = unassigned DNA
cggtggcggtggcggcggcggcggcggcgcgtggcaggtccggcgggcgcgaggcggcggcggaggcccgagcccggcccagcctcgtcccgcccggagcccgcctggctgctaccccgaccccggctccggtcccgtcctgtcccggcgcgccgcggcctcgccccggcccccgctcggcgcctcccgagggagcggcgctgccggccgagagcgcaggcccggccatgaccgacttcaaattgggtatcgtgcggctcggccgggtggccgggaagaccaaatacacgctgatcgatgagcaggacatcccgctggtggagagctactcctttgaggcccgaatggaagtggatgcagatggaaatggtgctaagatatttgcctatgcctttgacaagaaccgaggaaggggctctgggagactccttcatgagctgctgtgggagcggcaccgggggggcgtggccccgggcttccaggtggtgcacctcaacgctgtgaccgtggacaatcgcctggacaacctgcaactggtgccgtggggctggcggcccaaggctgaagagacctccagcaagcagagggagcaaagcttgtattggcttgcaattcagcagctgcctacagaccctatagaagaacagtttcctgtcctaaatgtgacccggtattataatgccaacggggatgtagtggaagaggaggagaactcttgcacctactatgagtgccactaccctccctgcacagtgattgagaagcagctccgggagttcaacatctgtgggcgctgccaggtggcccggtactgcggctcccagtgccagcagaaggactggcctgcccacaagaagcactgtcgggagaggaagcgtcccttccagcatgagcttgagccagagcgatgacgggcaggggagccacacatactcacagcccccgggctctaccctgggcacagcagagacagactggtggttgaacctggaggtgccaaaaaagccagctgcgggcccaggacagctgccgtgagactcccgatgtcacaggcagtctgtgtggttacagcgcccctcagtgttcatctccagcagagacaacggaggaggctcccaccaggacggttctcattatttatatgttaatatgtttgtaaactcatgtacagttttttttgggggggaggcaatgggaagggtagaaattacaaatagaatcatttgctgtaatccttaaatggcaaacggtcaggccacgtgactaaaaactgtcctgttgtcgaagcttctcccctgggccgccgggagccccgtggagcgcggcctgcacgggagttgtgtccacaaaggcaaagtaaaggggtggaatcatc

SEQ ID NO: 35511 - DNA, 5695 bp, Homo sapiens
  source 1..5695: mol_type = unassigned DNA
gtgatggcctccctgaaattaaacatttctattagtggcttcccgttaatctcatccttcttagatcaaacctcgttatatctcctgcctatctcttttgcattccaaagttcagttttattaaatcccagggtctaagattttttctttgagaatttatctccagtgtttctatggaaattaaaaaagaaaattaggataattcaatgtcgaaatgttgcatgcatcttttgagaaatttatattttgtaggttgaaggacttgctttttgggcagcgtatttttggaggtggaatgtagttattttaataaccatgtcctaattatttatagcttcctgcctgacacagctcacttcaagaagtgcacaatgtcagaacgtggaattaagtgggcttgtgaatattgtacgtatgaaaactggccatctgcaatcaagtgtactatgtgtcgtgcccaaagacctagtggaacaattattacagaagatccatttaaaagtggttcaagtgatgttggtagagattgggatccttccagcaccgaaggaggaagtagtcctttgatatgtccagactctagtgcaagaccaagggtgaaatcttcgtatagcatggaaaatgcaaataagtggtcatgccacatgtgtacatatttgaactggccaagagcaatcagatgtacccagtgcttatcccaacgtaggaccaggagtcctacagaatctcctcagtcctcaggatctggctcaagaccagttgctttttctgttgatccttgtgaggaatacaatgatagaaataaactgaacactaggacacagcactggacttgctctgtttgcacatatgaaaactgggccaaggctaaaagatgtgttgtttgtgatcatcccagacctaataacattgaagcaatagaattggcagagactgaagaggcttcttcaataataaatgagcaagacagagctcgatggaggggaagttgcagtagtggtaatagccaaaggagatcacctcctgctacgaagcgggactctgaagtgaaaatggattttcagaggattgaattggctggtgctgtgggaagcaaggaggaacttgaagtagactttaaaaaactaaagcaaattaaaaacaggatgaaaaagactgattggctcttcctcaatgcttgtgtgggggttgtagaaggtgatttagctgccatagaagcatacaagtcatcaggaggagacattgcacgtcagctcaccgcagatgaagtacgcttgctgaatcgtccttctgcctttgatgttggctatactcttgtacacttggctatacgttttcagaggcaggatatgctagcaatattgcttacagaggtgtctcaacaagcagcaaagtgtattccagcaatggtgtgtcctgaactgacagaacaaatccggagagagatagctgcctctcttcatcagagaaagggggattttgcttgctattttctgactgaccttgtaacatttacattgccagcagatattgaagatttgcccccaacagtccaagaaaaattatttgatgaggtgcttgatagagacgttcaaaaagaattagaagaagaatctccaattattaactggtccttggaattggctacacgtttggacagtcgactgtatgcactttggaaccggactgcaggagactgcctacttgattcagttctacaagctacctggggcatctatgacaaggactcagtgcttcggaaagccctgcatgacagcctgcatgactgttcacattggttttacacacgctggaaagattgggaatcatggtattctcagagctttggtttacatttttccttgagagaagaacagtggcaagaagactgggcatttatactctctcttgctagtcagcctggagcaagcttggagcagacgcacatttttgtactggcacatattcttagacgaccaattatagtttatggagtaaaatattacaagagtttccggggagaaactttaggatatactcggtttcaaggtgtttatctgcctttgttgtgggaacagagtttttgttggaaaagtccgattgctctgggttatacgaggggccacttctctgctttggttgccatggaaaatgatggctatggcaaccgaggtgctggtgctaatctcaataccgatgatgatgtcaccatcacatttttgcctctggttgacagtgaaaggaagctactccatgtgcacttcctttctgctcaggagctaggtaatgaggaacagcaagaaaaactgctcagggagtggctggactgctgtgtgacggaggggggagttctggttgccatgcagaagagttctcggcggcgaaatcaccccctggtcactcagatggtagaaaaatggcttgaccgctaccgacagatccggccgtgtacatccctgtctgatggagaggaagatgaggatgatgaagatgaatgaaaaaaaaaatcaaacagcagaagaccaaggcatcagatctgtaatgaccctaaagttagtgtggtgctccaagcagagtcgacatcatggaatgaaccaaatctggcaggatctgctcggggaagtgttttcctggaccacacacaccttatggagataatgcctctgctgcgtgaggagacagagaactttagttggactacagtttgtaaaaaaaactaattttattaagacagaactttttttccttccaaattgtaaatctgtctataaatgtaacgcatgtggttgtgtaagacattgtttaataggaaaagttgtaccagcatcttcatattattgagaaaattttttccagcatgggcacttagaaaaagcacatggcaaatggctctttgttcctttcagatattatttcagtagaacctggcattctactttcaccttaaaagatccatctaagtctcagatctggaaacgttttgtaccgattatccacagcaaaacaaaaataagcttttattttattaataatttcgttcctcttgtgcccaatcaaatcttttaggaacaaactgcaagaaaagctaagaatgttttagagtgaactaaatacagacattgcttacttgttttgaagagggttttggttttggttattgtgtctttaagttttctgatatgccccctttcaatatttagatatttatttgttgggaagaataccttaaaatgagggttcttattccagattctgggcagtggtctgtgagtagtttttttcctggatgaaaagggagcaagcccacttgtcactaaatgaattgtgtgaaatgtgctcacttggactccatcaacaatgtgctgctcccagattgccatgccagagggtcttcggattcttccttctatcacctctgctctaagcaaatcttgttagaagggcatgcctttgcttaggcagattgggaataccaattcactacagaataaagattttaaaaatgcaataaggtggcaaatgcattgtatgaagaatttctcagtgtttagtctgagaatttttgcatgttggttaattgtggccattctttaatttaaagttaaaactataatcttaggtagaaaaacttttttataagaagtattatttgaccacttcaggtatacattcaatactgggtaaaaatttcagacctatctcaggaacacagaaatatttggtgtcctgataagcactttctagactattgatgtggccaggaatttggaaagacgacacacgcacgcgcgcgcgcgcacacacacacacacacacacacacacacacagttttttccttccctgtgatgaaaaaggctgtgaaaaccttaaagtatttgcttgcttcttgttttgtttagttgataatgaaatgtgtacaacctcaaatttgctgccagaatactaaaaatagaaaaatacccacaaaactgtcatgtctttagttctttccccccgaaaactcagtaaaaaggtgttcccaggatgaaaagatcattttttgctgcatgctaaatcttgcaggaaaaatgattttttagtacgattctgtagaaatgaatctttgatataatgtaaatgctgctgtttgtttcaagtggtgaatgtgttgttaaaaattggctgtttgctttcattttggccaataagtaatcaagtttgtagaaaatgttagcattctgactacttagcatctgtagtaatttctctatgtatagggataattttttagtgggcagagatcctgttctagttgcctgttaagcaaaatctgccctcccaattgaaaaagccaaagagaattgttagagggaaaagcatgtagccattgcagtctgcattgcagccagcgttgtccagagtacacgctcagcacttagcttctactgtgtgttgtggtctggtgagtgttgtttcccctgagcgctctattatttatttatttattatcaatcagtgaccctgaccacatagtgtgataggtgcagcattcttccctgtgggaaagaattaaagatggttccatttcctaggctacagacaggaatggggctctaaatggttttcatagactggctgttaaaggccaaaaattttggtaaatcaatgctatattatgctcttgaactattaaaacagccataattattgtcccaagatagaatatagtcctttttcaaagatgattatacgtggctaggtgacagacattaatgactgactctggagagtaagtcatacctgcactctgtggacttgatggttctttttctagagcaaacagagcgtggcattttgttttgacttgttcttccttggggtcaaatttatatatatatatataaatttttgtttgggcgaccaagatctaataattaaaacccaggtggaccatggattcagacctgcctttttatgtttttgactcttaggttcatcgtgtcccagacttcttcacatattcgtgaaggtaagatattctgtgtgcgcttggcctccttttcacgcatatttcattgcctctttgatgagtggttacgaagacgttaaactacctttttgttccctggggtaataggtcagtaactatgagcgccgtctctctccatgtgagcttgtgttaatagacacttttatggtagagttgggatggggccaccaccttaaaatgagtgagcagacaaggccaggcaagccaaaggctttaagacaccatgattttcttgttttgttttaattgggaagggaagtataaggaagagctcagagggagtttcatacctggaattgttggacttaattgacacttgcaaatacttttagtataaaggtttaattctatttaaaaagaagatccattaaatcaagctcttaactcatgggactatttgcaacacttctttgtaaatatcattttgtttgttaggttattggcaaaacagtttcaaggttcacttccctcccttgaaccaggtccaggtcattttgctttggggtagattaaagtcagaactctaaaagttgagcaactttgtttttttttgaattgatttagcactaacccaccattgcatcttaaggatggcatgacgtgataatgatggacttgtgtgaggttttgatttttcaattaaactttttgttatcacaggtaa

SEQ ID NO: 35512 - DNA, 5204 bp, Homo sapiens
  source 1..5204: mol_type = unassigned DNA
ctacctctgggctttctattccgttccagagacccagtaccagaatatttaaatcactgtggcgttgaatacattttaatatctgatagggccagtttctgcgcattgcacatttttttttcccctttcaggaacgtgttcaggcccgcggcagggggcgggatcgcgcctcctcctcggctctggttccagccgagcctctcggacgcagagatggaaatcccgaagctgctcccggctcgcgggacactacagggcggcggcggcggcggtatccccgcgggtggcggccgagtccaccgaggccctgactcgccggctggccaggtccccacgcgccgcctcctgctgccccggggcccccaagatggcgggcccgggcggcggcgcgaggaggccagcacggcatcacggggccctggcccaagcctgttcgcgccgaggccccatcaacctagcggcggcggcgacgacttcttcctggtgctgcttgacccggtgggtggcgacgtggagaccgcgggctccggtcaggccgcagggcctgtgttgagggaggaggccaaggcgggcccggggctccagggggacgagagcggcgcgaaccccgcgggctgctctgcgcagggcccccactgcctgtccgcggttcccactccggccccgatctccgcccccggccccgccgcggccttcgcgggcacagtcactatccacaaccaggacctgctgttgcgctttgagaacggcgtcctcaccctggccacgcccccaccacacgcctgggagccaggggccgctcctgcccagcagcccaggtgtctgatcgccccccaagctgggttcccgcaagccgcgcacccgggtgactgcccagagctgcggtccgacctcctgctagccgagcccgcagaacccgcgcctgctccggcgccccaggaggaggcggagggcctggccgccgccctgggcccccgcggactgctgggctctggtccaggcgtggtgctgtacctgtgccccgaggcgctgtgcgggcaaaccttcgccaagaagcaccagctgaagatgcacctgctgacgcacagcagcagccagggccagaggcccttcaaatgccccctgggtggctgcggctggaccttcaccacctcttacaagctcaagaggcacctgcagtcgcacgataaactgcggcccttcggctgccctgcggagggctgtggcaagagcttcaccaccgtgtacaacctcaaggcgcacatgaagggccatgagcaggagaactcgttcaaatgtgaggtgtgcgaggagagcttccccacgcaggccaaactcggcgcccaccagcgcagccacttcgaacccgagaggccttaccagtgcgcgttttctggctgcaagaagacatttatcacagtgagtgctctgttttcccataaccgcgcccatttcagggaacaggaactgttttcctgctctttccctggctgcagcaagcaatatgacaaggcttgtaggctgaaaattcacctgcggagtcacaccggcgagagacctttcctttgtgactttgatggctgtggctggaacttcaccagcatgtccaaactcttaaggcacaaaaggaagcacgacgatgaccggaggttcatgtgccctgtggaaggctgtgggaaatctttcacgagggccgaacatctgaaaggccacagcattacccacctgggcacaaagcctttcgtgtgtcctgtggcaggctgctgtgccaggttctctgctcgcagtagcctctacattcactccaagaaacacctgcaggatgtggacacttggaaaagccgttgcccgatctcctcttgtaataaactcttcacatccaagcacagcatgaagacgcacatggttaaaaggcataaggtgggccaggatctcttagctcagctagaagcagcaaattctcttacacccagcagtgaacttaccagccagagacagaatgatctcagtgatgcagagatagtgtctctcttctctgatgtacctgacagtacttctgctgcattgctggacacagcattggtgaactctggaatcttgactattgatgtggcttctgtgagctcgactctggcagggcacctccctgctaataataataattccgtagggcaggctgtggaccctccgtccttgatggccaccagcgaccctcctcaaagtctggatacctctctcttttttggaacggcggccactggttttcagcagagctccttaaatatggatgaggtctcaagtgtaagtgtggggccattgggatctctggactctttggccatgaaaaactccagtccagagcctcaggctttgacacccagcagtaagctaacagtggacacagatactctgactccttcgagcaccctttgtgaaaacagtgtctcagaactactgacaccagccaaagcggagtggagcgtacatcctaactctgacttctttggacaggagggagaaacccagtttggattccccaatgcagcaggaaaccatggttctcagaaagaaagaaatcttatcactgtgactggcagctcatttttggtatgaagcaactctattcattccttgccatgtggctaacttttattacagtcaattttgaggatattctggactaaatatttaagtgcagtcatttctttttggtttgcaaaaagagcacagccctggactatgagtttggagatctaaattctgatcttgagtctggaactgacaagttgtgtgaccctcagcaagtcacttaacctatctgagccttaatttccttatttataaattgtggtggtttgaacacattgctcataaggtcttttcagttttgttttgttttgttttgtgattttgtgctttttcttgaaaattttcgggcattttgcaattattattgtttgtacttgtaatcagaagcggtttgagccctgtagcactaaataatgaaagattgaggaactggtgttttacattaaaaatttaatggaaattttacacagtacgaaaatctaatgatagagctcaaaaaaaaagagctaaaaataggagttggttcttcttagctgtttatccttctaaccttttttttaaatgatgaaggtatgtttttgttgtggaaaatacaagggcttttgttatcactcagacccagagtgaaatgtttgctttgtggttttgaataagttggcctttaataagttatttagtctctcttagcctcagttttctatctgtaaaatggtcatagcaatgtgaacatatgtgttacatcctagacttatttttctaccccagtaggttgtattgaaaggaaaatgttatatgtgtttcagcatgttttggtgaatcttcattccctttcctgccccttgttttccctcctcaaaggggagaaattagcacaaattagtatcaggattgtgcaggaaataaacatttgtgaaggttaagaaagaggaaaaggaagttatttcttcaacagattaaggatttttctacacacagttcttttgtggcattggccacatgtccattagaccaatttgatagtatcttcggtctgcattcaaagccagctcatgcaatgagtattcagcctattcttccaagacaatctggacatagaccagagggagatttttctcccctctgtgccctagagagctcattgctggcttactcttagagttgaaatgagagggttttgtctgcattttgagtagataccatctatcttatgtgagtatagcattttacaatttagcactttcacaactattatatttgatcctcacaatcctgtgaggtaattatggcaaagtcagatctacaattcatattaaaatttacctagctcagattacaaatgtatttcacttagtaatgtgtgtgtgtgtgtgtgtgtgtgtgtgtgtgtagctcaaaacaaagaggaaatatttcccactctcccattcgactcttgagtttcatgactattttgtttataactgtttgctgcctcccaccttaattgatttctcttacattctttgtactccatgctatttccttgtaggtgtacaccagtccttgccatgaatctcttttacttacatttaaattagacacgtctctttcatggtcaccatctctcagccattcttcttatggcccatttttcagtcacagtattactgcaagtatgtgtgtacattgagaagtaattttctggatttagatggcaatgtgtttatacatgaatcagataataatggagacattttatataaggtgttagtgagaagtagttctacttttccttttttacagtgtggtcctggtagcaaacactattagttgctttcaactattgtaacccagtattgtttacatgtggatacttggggataacaattattatggcactttaacagtgcactttaatatataccaccttgatatacatctttactgtctttataatttttaagttggttgtacttattcaatgaaaaagcaaaaaatacacataaatttgtaattcaaagaaatagaattttgtgtctaaccatttaacagttctcccttagtattttagaaagattttaagccattttagaaatgtgttgtcattagttaagtcctcttaaatagattattattattttcctatagaaaatgcagaggcctgaggtgaacgcaagggtcataggcatccattaagatacataactatatagatatcttaaaactctgtcacattgtttccttaatcccttagacctatttcctcccatgaaaactatcataagctatgcttttgttatggtctatagaattttcaaaggacaaattttttttttttaggataaagatcttgtgattgtccgtgggctcacatggtttcttttgttcaattttttcaaaagatttctttttcaatactgttgtcccaccatgatagttgacatggcatgtaattacagacagaagtgtgactgtaaacatattagtgtttctgttagtgttggcataagcttgcctttttgtttaaacaatggaacatgatttaattttatctcatttgccttttgtttatcttcagtccttgatttattaacattttgccaattgaaaacacaataaaaaatgccttgcaggaa

SEQ ID NO: 35513 - DNA, 5638 bp, Homo sapiens
  source 1..5638: mol_type = unassigned DNA
ctacctctgggctttctattctgttccagagacccagtaccagaatatttaaatcactgtggcgttaaatacgttttaatatctgatagggccagtttctgcgcattgcacatttttttttcccctttcaggaacgtgttcaggcccgcggcagggggcgggatcgcgcctcctcctcggctctggttccagccgagcctctcggacgcagagatggaaatcccgaagctgctcccggctcgcgggacactacagggcggcggcggcggcggtatccccgcgggtggcggccgagtccaccgaggccctgactcgccggctggccaggtccccacgcgccgcctcctgctgctccggggcccccaagatggcgggcccgggcggcggcgcgaggaggccagcacggcatcacggggccctggcccaagcctgttggcgccgaggaccgatcaacctagcggcggcggcggcggcggcggcgacgacttcttcctggtgctgcttgacccggtgggtggcgacgtggagaccgcgggctccggtcaggccgcagggcctgtgttgagggaggaggccgaggagggcccggggctccaggggggcgagagcggcgcgaatcccgcggggcccactgcgctaggcccccgctgcctgtccgcggttcccactccggccccgatctccgcccccggccccgccgcggccttcgcgggcacagtcactatccacaaccaggacctgctgttgcgctttgagaacggcgtcctcaccctggccacgcccccaccacacgcctgggagccaggggccgctcctgcccagcagcccgggtgtctgatcgccccgcaagctgggttcccgcatgccgcgcacccgggtgactgcccagagctgccgccagacctcctgctagctgagccggccgaacccgcgccagctccggcgcctgaggaggaggcggagggcccggccgccgccctgggcccccgcggaccgctgggctccggcccaggcgtggtgctgtacttgtgccccgaggcgcagtgcgggcaaaccttcgccaagaagcaccagctgaaggtgcacctgctgacgcacagcagcagccagggccagaggcccttcaaatgccccctgggtggctgcggctggaccttcaccacctcttacaagctcaagaggcacctgcagtcgcacgacaaactgcggccctttggctgcccggcagagggctgtggcaagagcttcaccacagtgtacaacctcaaggcgcacatgaagggccatgagcaggagaactcattcaaatgcgaggtgtgcgaggagagcttccccacgcaggccaaactcagcgcccaccagcgcagccacttcgaaccggagaggccttaccagtgcgcgttttctggctgcaagaagacatttatcacagtgagtgctctgttttcccataaccgcgcccatttcagggaacaggaactgttttcctgctcttttcctggctgcagcaaacaatatgacaaggcttgtaggctgaaaattcacctgcggagtcacaccggcgagagacctttcctttgtgactttgatggctgtggctggaacttcactagcatgtccaaactcttaaggcacaaaagaaagcacgacgatgaccggaggttcatgtgccctgtggaaggctgtgggaaatctttcacgagggcggaacatctgaaaggccacagcataacccacctgggcacaaagcctttcgtgtgtcctgtggcaggctgctgtgccaggttctctgctcgcagtagcctctacattcactccaagaaacacctgcaggatgtggacacttggaaaagccgttgcccgatctcctcttgtaataaactcttcacatccaagcacagcatgaagacgcacatggttaaaaggcataaggtgggccaggatctcttagctcagctagaagcagcaaattctctcacacccagcagtgaacttaccagccagagacagaatgatctcagtgatgcagagatagtgtctctcttctctgatgtacctgacagtacttctgctgcattgctggacacagcattggtgaactctggaatcttgactattgatgtggcttctgtgagctcgactctggcagggcacctccctgctaataataataattccgtagggcaggctgtggaccctccgtccttgatggccaccagcgaccctcctcaaagtctggatacctctctcttttttggaacggcggccactggttttcagcagagctccttaaatatggatgaggtctcaagtgtaagtgtggggccattgggatctctggactctttggccatgaaaaactccagtccagagcctcaggctttgacacccagcagtaagctaacagtggacacagatgctctgactccttcgagcaccctttgtgaaaacagtgtctcagaactactgacaccaaccaaagcggagtggaacgtacatcctgactctgacttctttggacaggagggagaaacccagtttggattccccaatgcagcaggaaaccatggttctcagaaagaaacagatcttatcactgtgactggcagctcatttttggtatgaaccaactctattcattcctcatcatgtggcttacttttattacagtcaattttgaggatattctggactaaatatttaagtgcagtcatttctttttggtttgcaaaaagagcacagccctggactacaagtttggagatttaaattctgatcttgagtttggaactgacaagttgtgtgaccctgagcaagtcagttaacctatctgagccttaatttccttatttataaattgaggtggtttgaatagattgcttttaaggtctttctgctctgtgattccttgataatacatttctttccttgaaaaatatgaggacgtttttcagtgatgtggcatgcgtttttttttaactgcccccccagccctgacatgttctttttttggcaaacatacataatgttacatcatactatgatgaacatccatgtacttttcactcaatttcagcaattatgaatccatgaacaatcttttttaacttagcctcactcactccccatgttctagtattattttgtaacaaatagcagacatctgatcattttatccataaatattctttatatatctctgaaagctatgggatgatatggaaaaaaatgataattccattatcgcaagtgatatttacagtaattctttaatatcagtaaatatccagtgagggttcaaacttccaattgcctcataaatgctacttgttttattatttttaattagtagaatcccgtaaatctcctaagtgtcttcttaatccgtatgtttccctttcatctttctttttttccttgcgattttgtttatgaaatgaggttgtttcacatgtagcatttgccacaatttaagttttgctaattgcatccctatggtaatgtttgctttcctctatcctctgtttctttaatttgctagttatgtctagagacttgatgagattgaaacatggcttttggcatgaatgtttcataggttatgttgtgttcatttagtaggtggcgcataatctgtggttttctctctttttgtggtattagcagctgctgcagataaatgcattaattcatgatgcttctgatatgatgagtcatctttgtagagttactaagcattagcaaaggaggaaatgctatgtaatagaaatattattcaatgccaaaatattttcttaaatagtcatagaactaacaagaaaaaatagatagcaaaaaaatgtgttggctgttctcactgtttatcttcctaacttcttttgatgatggaaggcagttttgtggaaattgccagccaggactttgacatgaaacagacccagggctaaattttggctctgtggtgttggataagtggccttgaataaattagttattaagcttcagttttctagcttttaactgattataacaatgcacacacatacctgacacactgttaaattttcttctcttcctgtttcttatgttaaggaaagatactctgtgttttggcatatgttggtgaatttgtaccatttttatcctctcagtccttccttttataagacaataattggagtagtttaatcttattcatgtgcagataaaagaggtttatgaagtttagggtgaagtaggcaagggaatctgtttactccctcttccctctactgaataattttccctctactgaataattttccctctaagaattgctgtgggtaataccaggagtggggacattgcccacatgcataagagcgtatctctccattcgatcagtttgtcaccatctttgctctgttttgaaagtcaggcttctctgtgactgtgaagcctgctgttccctgaaaatctgataatggagcagtggaggtttttttctttctgtgctctgtagatctcattgtttgcacttgtaatttcccagagttgaaaggaaagattgaactggaatattgtgtaaactatctgtcttacattagtgtagcattttgcaatttggggaacatcttcacaatttgtgtctcgttgttcagaacaaccctgtgaagtagttttggcaatgtctgtgttacatttcatgtaatttagccaactcccattccaactaggctttggctaaatctgacaattttatatatagcttaaaacaaagaatatacattcttttcacccctcccagtctacccatccagccttcatgattcattcctgtgtcaaggttagtcgctgttttccatttgaattggtttcttttatggtcagtttactttcttccctctcccctccctttcctgcacatccccatccttgctatgcctttctgtcctcttttataatggatatatctttttcctgccattatccctcagacattctcctcatggcacattttcttcaaatgctaacatttactgagtgtacattgaagttctgtgcatacaggaagaagttattttctgagcttagataatactatgtgtatatgtgattaaaatgaagattattttctaaagccttcaaattagaagtggatttctgtttcattacttccgttttaaaagtttttgccagagagttttgctaaatactctcttatttgctctagtgtactagtccagtagtgtttgcatgtggatgtctgtggatgacagttattgtagcactttggcagtgcactaaaattttgccactatgaaatgtttctttattgtgtgtgcgtgtgtgttttgaaatacgcacacagccacacccacatatatattaaaagtggttgtattcatttagtgaaaaacaaaaagtagatgtacttctgtaaatcagataaatgcttggaatttgattgtctacccaatcaacagttttccctctttgctctggaaatatttgtactcatatagcatatttcaaaaatgttgtcattcattaaggcctcttaaatagaccactattttttgtgtctggcagatgagtatgtcaaggattgagatgaacacataagtcttggaaattaaataaatttataaacataaag

SEQ ID NO: 35514 - DNA, 5014 bp, Homo sapiens
  source 1..5014: mol_type = unassigned DNA
acaggtcagagttgactccctgaaaagtgcagccggtttgaaatgcaagatggcggcggcgtggcgctgagaggcgcggcggcccctgcaggtagtggcgcgagccggctccgcgaccagcgggcccggagactctgggctgcgggtgggaactggagcgcagagtccgcggccggcacgggaaaggagaagacagactgctgctttggacctgttggtaatgatggcctgagctaaacatctaactagaagggatacccttccatttcaaagaacagaatgctaaggaagctgtggcaagtgattggagttgtgcttcaaaaatttcagaaattcagcagtattttatctgccaacaataagctctttacttgattgcaccatgagaaagctgctaatgagacttgttgagcacaaaaatggacttgaagaaccaaaagccattgttttcaaatgaagaacactgaacagttttaagcctcgatgctttttaatcaccactgagcttttcctcataacatcagaatggcaagcaggcgaaaatcaacaacaccttgcatggtccttgccagtgaacaagatccagaccttgagttgatatcagatttggatgaaggtcctcctgtgcttacacctgtagaaaacaccagagcagagagtatctcaagtgatgaagaggttcatgaatctgtggattcagacaatcagcaaaataaaaaagttgaaggtggatatgaatgtaaatattgtacttttcaaactccagatctaaatatgtttacttttcatgtggattcggaacatcccaatgtagtgctaaattcatcctatgtttgtgtcgaatgcaattttcttaccaaaaggtatgatgcactttctgagcataatctgaaatatcacccaggagaagagaattttaagttgactatggtgaaacgtaataaccagacaatctttgaacaaacaataaatgatctgacttttgatggtagttttgttaaagaggagaatgcagagcaagcagaatctacagaagtttcttcttcgggaatatctatcagtaaaactcctatcatgaaaatgatgaaaaataaagtggaaaataaacggattgcagttcatcataactcagttgaggacgttcctgaagagaaagagaatgaaatcaaaccagaccgtgaagaaattgtagaaaatccaagttcttcagcttctgaatctaatacaagtacttccattgtaaacagaatacatccaagtactgccagcacggtagtgacaccagcagcagttcttcctggattggcacaggtgataactgctgtatctgctcagcagaattctaatttgattcccaaagtcttaatccctgttaatagcattcccacctacaatgctgcattggataacaatccccttttacttaacacctacaacaagttcccttacccaacaatgtcagaaattacagttctttctgctcaagcaaaatatacagaggaacagatcaagatatggttttcagcccaacgtttaaaacatggtgttagttggactcccgaggaagtagaggaggcaagaaggaaacaattcaatggaacagtgcatactgtacctcagaccataactgttattcctacacacatttccacagggagtaatggtttaccatctattttacagacatgccaaatagttggtcagcctggtctggtccttactcaagtggctggaacaaacaccttgccagttacagcacctatagccttgacagtggcaggcgttccaagtcaaaataatatacagaaaagtcaggtacctgctgctcagcctactgcagaaacaaagccagcaacagcagcagttccaacttctcaaagtgtcaaacatgaaactgcattggtaaaccctgattcatttggcattcgggcaaaaaagacaaaagagcaactggcagaattaaaagttagctaccttaaaaatcagtttccccatgattcagaaattatcagacttatgaaaataacaggcctgacgaaaggagagattaaaaaatggtttagtgacacaaggtacaaccagagaaattcaaagagtaatcagtgcttacatctcaacaatgattcctctaccaccattattatagactccagtgatgaaaccacggaatccccaactgttggtactgcacagcctaagcaatcctggaatccttttcctgactttactccccaaaagtttaaagagaaaactgcagagcagcttcgtgtccttcaggcaagttttctcaacagctctgtacttacagatgaagaattaaataggttaagggcacaaaccaaacttaccagaagagaaatcgatgcttggtttacagagaagaagaaatcaaaagctttaaaggaagagaaaatggaaatagatgaaagtaatgcaggtagttccaaagaagaagctggagaaacttctcctgcagatgaatctggtgcacctaagtcagggagtacaggcaagatatgtaaaaaaacacctgagcagctgcacatgcttaagagtgcatttgtccggacacagtggccatcaccagaagagtatgacaagttggccaaagaaagcgggcttgctagaacagacatagttagttggtttggggacacccgttatgcttggaagaatggaaacttgaaatggtactactactatcagagcgccaattcaagtagtatgaatggtctgtcttcccttaggaaaagagggagagggagacccaaaggacggggaagaggaagaccgcgtgggcggcctagaggaagcaaaagaattaacaactgggacaggggaccatcactcataaaatttaaaactggaactgcaatacttaaggattattacctgaagcacaagtttcttaatgagcaagaccttgatgaacttgttaacaaatcacatatgggctatgagcaggtcagagagtggtttgcagaaagacagagaagatcagaattaggtatagaattatttgaggaaaatgaggaggaagatgaagttattgatgaccaggaagaggatgaagaagaaacagatgatagtgacacttgggaacctccacgacatgtgaaacggaagctgtctaaatcagatgactgaaatctgcctaaaacgttgaaggagaatcaattcttcaactcaagatgtctgatttactgtgaatttgcccaatctttgatgacattgaaaacgttttggggcatacacactcaaaaagcaggatccaatacccaaaagaaatggaacttaatgttgtgccaaagttaaactactgcagttggtggaagttctgcaatgtaaatagaacactaattaaaaaacaacttgtaaaaatgcaatttaaattttaatacagtacatttttcttctaatatgatggagacattctgaatcttagactttctgagggggtttaatgaccactagagcttgtcctcatattcagtccagtttaatactgtatgtctagtaagatgggctatatattgcctctattctttgagatgtgattaagcttagaactttgaccaaaaattttacagtaaaaattgttagaaatgggtaaaaaaaaaaaaaaaaaaaaaaccctgatttattactatgtcttatttatcagaccctgcactaagattaaaagttgtgcatgggcttatacaatttcaaatgtaaaaacagcctatttatatatgttgaaacaataagattttatggtttcactggcccttaataattggatccttcattaaacacatccatgaataccactgtttctactgttacttgttccattagaagctgatttgctttttattaaactgcaggaaattaattctgaagaaggaaaagaaactgacatggtaatttggatagggtgaagctttgaaataaatactgcaccaaaaatgtgaaaaagaatcacgtagtaaatgtatacttagtgttttcttacaatcgtggaaatcagaaatgtttatacaggtgtcagatcagaatttttaagagttatctttcagtgaaattttataacagtttcagtgaatagagaaaaaattctgaactgatcataatgagttaaaagttagcttttcacttatgaatcatgggagtgttaactgttaactcttgccgtatcaggagactgaaagttcatactaatttacaaactttgtaaagactggtgctgttcattcatattgggaagaaccctttcttttgtgaccataggaccatttttcaaaatgcgctttcttcgtagaagaaatgttcagtttaattagctttggattttaacatgtttttctgaatgaccagatgtaggcttagccagtttattttctctaatttaatggataataaatattaagctcttggttaaatgtttttcagccattgaaaatgttatgaaaaagccttgaatatgcatgctgctttcatttttataaactttttattttttaactatagctttattagtaattccaaaatgctgcaatgtagctgatttcctcactcagacagctggctttgtgggtggcttttttcatactactgttaacttttttaaaaaagaagcaatgtaaagaccgtaatgcactaagctttttttttttcttttacacgtttaaaaacttcttaaagcactctgtaatataatgattaaattgctcccttttataaacattgctaatgtggtctgagttttgtttgacaataattttaatgttctcaaaatttgaaatgtcaagtattagaaatgaagcctttgaatatagttgtttcccttgcaatatgttaactctgtgtagctgtatataactattaatttccctcatctcttttataggcctgataaaactcttctctgacgtttgctagcttttaaatatatttatttgacagagcaaaagaaccctcttctggttgattgtgaccttgaatacaaaataaaagtagtgattagtagttt

SEQ ID NO: 35515 - DNA, 4955 bp, Homo sapiens
  source 1..4955: mol_type = unassigned DNA
gcgcggaggacgcgcgcgcgggagggccccgccttggccggctctctcccttccccctccgcccccggacggccgctggggcgcgcgcctctcctcgcacccccaccctgagtccccacactccgcggggccaccgagctgctgaggcccctttgcgggcccgccgagcggttccgggtttagggttcacaggtcagagttgactccctgaaaagtgcagccggtttgaaatgcaagatggcggcggcgtggcgctgagaggcgcggcggcccctgcaggagaagacagactgctgctttggacctgttggtaatgatggcctgagctaaacatctaactagaagggatacccttccatttcaaagaacagaatgctaaggaagctgtggcaagtgattggagttgtgcttcaaaaatttcagaaattcagcagtattttatctgccaacaataagctctttacttgattgcaccatgagaaagctgctaatgagacttgttgagcacaaaaatggacttgaagaaccaaaagccattgttttcaaatgaagaacactgaacagttttaagcctcgatgctttttaatcaccactgagcttttcctcataacatcagaatggcaagcaggcgaaaatcaacaacaccttgcatggtccttgccagtgaacaagatccagaccttgagttgatatcagatttggatgaaggtcctcctgtgcttacacctgtagaaaacaccagagcagagagtatctcaagtgatgaagaggttcatgaatctgtggattcagacaatcagcaaaataaaaaagttgaaggtggatatgaatgtaaatattgtacttttcaaactccagatctaaatatgtttacttttcatgtggattcggaacatcccaatgtagtgctaaattcatcctatgtttgtgtcgaatgcaattttcttaccaaaaggtatgatgcactttctgagcataatctgaaatatcacccaggagaagagaattttaagttgactatggtgaaacgtaataaccagacaatctttgaacaaacaataaatgatctgacttttgatggtagttttgttaaagaggagaatgcagagcaagcagaatctacagaagtttcttcttcgggaatatctatcagtaaaactcctatcatgaaaatgatgaaaaataaagtggaaaataaacggattgcagttcatcataactcagttgaggacgttcctgaagagaaagagaatgaaatcaaaccagaccgtgaagaaattgtagaaaatccaagttcttcagcttctgaatctaatacaagtacttccattgtaaacagaatacatccaagtactgccagcacggtagtgacaccagcagcagttcttcctggattggcacaggtgataactgctgtatctgctcagcagaattctaatttgattcccaaagtcttaatccctgttaatagcattcccacctacaatgctgcattggataacaatccccttttacttaacacctacaacaagttcccttacccaacaatgtcagaaattacagttctttctgctcaagcaaaatatacagaggaacagatcaagatatggttttcagcccaacgtttaaaacatggtgttagttggactcccgaggaagtagaggaggcaagaaggaaacaattcaatggaacagtgcatactgtacctcagaccataactgttattcctacacacatttccacagggagtaatggtttaccatctattttacagacatgccaaatagttggtcagcctggtctggtccttactcaagtggctggaacaaacaccttgccagttacagcacctatagccttgacagtggcaggcgttccaagtcaaaataatatacagaaaagtcaggtacctgctgctcagcctactgcagaaacaaagccagcaacagcagcagttccaacttctcaaagtgtcaaacatgaaactgcattggtaaaccctgattcatttggcattcgggcaaaaaagacaaaagagcaactggcagaattaaaagttagctaccttaaaaatcagtttccccatgattcagaaattatcagacttatgaaaataacaggcctgacgaaaggagagattaaaaaatggtttagtgacacaaggtacaaccagagaaattcaaagagtaatcagtgcttacatctcaacaatgattcctctaccaccattattatagactccagtgatgaaaccacggaatccccaactgttggtactgcacagcctaagcaatcctggaatccttttcctgactttactccccaaaagtttaaagagaaaactgcagagcagcttcgtgtccttcaggcaagttttctcaacagctctgtacttacagatgaagaattaaataggttaagggcacaaaccaaacttaccagaagagaaatcgatgcttggtttacagagaagaagaaatcaaaagctttaaaggaagagaaaatggaaatagatgaaagtaatgcaggtagttccaaagaagaagctggagaaacttctcctgcagatgaatctggtgcacctaagtcagggagtacaggcaagatatgtaaaaaaacacctgagcagctgcacatgcttaagagtgcatttgtccggacacagtggccatcaccagaagagtatgacaagttggccaaagaaagcgggcttgctagaacagacatagttagttggtttggggacacccgttatgcttggaagaatggaaacttgaaatggtactactactatcagagcgccaattcaagtagtatgaatggtctgtcttcccttaggaaaagagggagagggagacccaaaggacggggaagaggaagaccgcgtgggcggcctagaggaagcaaaagaattaacaactgggacaggggaccatcactcataaaatttaaaactggaactgcaatacttaaggattattacctgaagcacaagtttcttaatgagcaagaccttgatgaacttgttaacaaatcacatatgggctatgagcaggtcagagagtggtttgcagaaagacagagaagatcagaattaggtatagaattatttgaggaaaatgaggaggaagatgaagttattgatgaccaggaagaggatgaagaagaaacagatgatagtgacacttgggaacctccacgacatgtgaaacggaagctgtctaaatcagatgactgaaatctgcctaaaacgttgaaggagaatcaattcttcaactcaagatgtctgatttactgtgaatttgcccaatctttgatgacattgaaaacgttttggggcatacacactcaaaaagcaggatccaatacccaaaagaaatggaacttaatgttgtgccaaagttaaactactgcagttggtggaagttctgcaatgtaaatagaacactaattaaaaaacaacttgtaaaaatgcaatttaaattttaatacagtacatttttcttctaatatgatggagacattctgaatcttagactttctgagggggtttaatgaccactagagcttgtcctcatattcagtccagtttaatactgtatgtctagtaagatgggctatatattgcctctattctttgagatgtgattaagcttagaactttgaccaaaaattttacagtaaaaattgttagaaatgggtaaaaaaaaaaaaaaaaaaaaaaccctgatttattactatgtcttatttatcagaccctgcactaagattaaaagttgtgcatgggcttatacaatttcaaatgtaaaaacagcctatttatatatgttgaaacaataagattttatggtttcactggcccttaataattggatccttcattaaacacatccatgaataccactgtttctactgttacttgttccattagaagctgatttgctttttattaaactgcaggaaattaattctgaagaaggaaaagaaactgacatggtaatttggatagggtgaagctttgaaataaatactgcaccaaaaatgtgaaaaagaatcacgtagtaaatgtatacttagtgttttcttacaatcgtggaaatcagaaatgtttatacaggtgtcagatcagaatttttaagagttatctttcagtgaaattttataacagtttcagtgaatagagaaaaaattctgaactgatcataatgagttaaaagttagcttttcacttatgaatcatgggagtgttaactgttaactcttgccgtatcaggagactgaaagttcatactaatttacaaactttgtaaagactggtgctgttcattcatattgggaagaaccctttcttttgtgaccataggaccatttttcaaaatgcgctttcttcgtagaagaaatgttcagtttaattagctttggattttaacatgtttttctgaatgaccagatgtaggcttagccagtttattttctctaatttaatggataataaatattaagctcttggttaaatgtttttcagccattgaaaatgttatgaaaaagccttgaatatgcatgctgctttcatttttataaactttttattttttaactatagctttattagtaattccaaaatgctgcaatgtagctgatttcctcactcagacagctggctttgtgggtggcttttttcatactactgttaacttttttaaaaaagaagcaatgtaaagaccgtaatgcactaagctttttttttttcttttacacgtttaaaaacttcttaaagcactctgtaatataatgattaaattgctcccttttataaacattgctaatgtggtctgagttttgtttgacaataattttaatgttctcaaaatttgaaatgtcaagtattagaaatgaagcctttgaatatagttgtttcccttgcaatatgttaactctgtgtagctgtatata

SEQ ID NO: 35516 - DNA, 3357 bp, Homo sapiens
  source 1..3357: mol_type = unassigned DNA
aaaaaatcagacttccacttgaagcaattgcatcttttaggattaatgtggctcagcggagctctgctgtgcttttaggattactgtggctcagcggagctctgcacaaagggtccgcgactgggatgggggtggggagtgaacgtcaaggggcccaggagcgctcgagcgtccaaggcccggcgtgtggagcagctggagggagaagacagactgctgctttggacctgttggtaatgatggcctgagctaaacatctaactagaagggatacccttccatttcaaagaacagaatgctaaggaagctgtggcaagtgattggagttgtgcttcaaaaatttcagaaattcagcagtattttatctgccaacaataagctctttacttgattgcaccatgagaaagctgctaatgagacttgttgagcacaaaaatggacttgaagaaccaaaagccattgttttcaaatgaagaacactgaacagttttaagcctcgatgctttttaatcaccactgagcttttcctcataacatcagaatggcaagcaggcgaaaatcaacaacaccttgcatggtccttgccagtgaacaagatccagaccttgagttgatatcagatttggatgaaggtcctcctgtgcttacacctgtagaaaacaccagagcagagagtatctcaagtgatgaagaggttcatgaatctgtggattcagacaatcagcaaaataaaaaagttgaaggtggatatgaatgtaaatattgtacttttcaaactccagatctaaatatgtttacttttcatgtggattcggaacatcccaatgtagtgctaaattcatcctatgtttgtgtcgaatgcaattttcttaccaaaaggtatgatgcactttctgagcataatctgaaatatcacccaggagaagagaattttaagttgactatggtgaaacgtaataaccagacaatctttgaacaaacaataaatgatctgacttttgatggtagttttgttaaagaggagaatgcagagcaagcagaatctacagaagtttcttcttcgggaatatctatcagtaaaactcctatcatgaaaatgatgaaaaataaagtggaaaataaacggattgcagttcatcataactcagttgaggacgttcctgaagagaaagagaatgaaatcaaaccagaccgtgaagaaattgtagaaaatccaagttcttcagcttctgaatctaatacaagtacttccattgtaaacagaatacatccaagtactgccagcacggtagtgacaccagcagcagttcttcctggattggcacaggtgataactgctgtatctgctcagcagaattctaatttgattcccaaagtcttaatccctgttaatagcattcccacctacaatgctgcattggataacaatccccttttacttaacacctacaacaagttcccttacccaacaatgtcagaaattacagttctttctgctcaagcaaaatatacagaggaacagatcaagatatggttttcagcccaacgtttaaaacatggtgttagttggactcccgaggaagtagaggaggcaagaaggaaacaattcaatggaacagtgcatactgtacctcagaccataactgttattcctacacacatttccacagggagtaatggtttaccatctattttacagacatgccaaatagttggtcagcctggtctggtccttactcaagtggctggaacaaacaccttgccagttacagcacctatagccttgacagtggcaggcgttccaagtcaaaataatatacagaaaagtcaggtacctgctgctcagcctactgcagaaacaaagccagcaacagcagcagttccaacttctcaaagtgtcaaacatgaaactgcattggtaaaccctgattcatttggcattcgggcaaaaaagacaaaagagcaactggcagaattaaaagttagctaccttaaaaatcagtttccccatgattcagaaattatcagacttatgaaaataacaggcctgacgaaaggagagattaaaaaatggtttagtgacacaaggtacaaccagagaaattcaaagagtaatcagtgcttacatctcaacaatgattcctctaccaccattattatagactccagtgatgaaaccacggaatccccaactgttggtactgcacagcctaagcaatcctggaatccttttcctgactttactccccaaaagtttaaagagaaaactgcagagcagcttcgtgtccttcaggcaagttttctcaacagctctgtacttacagatgaagaattaaataggttaagggcacaaaccaaacttaccagaagagaaatcgatgcttggtttacagagaagaagaaatcaaaagctttaaaggaagagaaaatggaaatagatgaaagtaatgcaggtagttccaaagaagaagctggagaaacttctcctgcagatgaatctggtgcacctaagtcagggagtacaggcaagatatgtaaaaaaacacctgagcagctgcacatgcttaagagtgcatttgtccggacacagtggccatcaccagaagagtatgacaagttggccaaagaaagcgggcttgctagaacagacatagttagttggtttggggacacccgttatgcttggaagaatggaaacttgaaatggtactactactatcagagcgccaattcaagtagtatgaatggtctgtcttcccttaggaaaagagggagagggagacccaaaggacggggaagaggaagaccgcgtgggcggcctagaggaagcaaaagaattaacaactgggacaggggaccatcactcataaaatttaaaactggaactgcaatacttaaggattattacctgaagcacaagtttcttaatgagcaagaccttgatgaacttgttaacaaatcacatatgggctatgagcaggtcagagagtggtttgcagaaagacagagaagatcagaattaggtatagaattatttgaggaaaatgaggaggaagatgaagttattgatgaccaggaagaggatgaagaagaaacagatgatagtgacacttgggaacctccacgacatgtgaaacggaagctgtctaaatcagatgactgaaatctgcctaaaacgttgaaggagaatcaattcttcaactcaagatgtctgatttactgtgaatttgcccaatctttgatgacattgaaaacgttttggggcatacacactcaaaaagcaggatccaatacccaaaagaaatggaacttaatgttgtgccaaagttaaactactgcagttggtggaagttctgc

SEQ ID NO: 35517 - DNA, 10030 bp, Homo sapiens
  source 1..10030: mol_type = unassigned DNA
aaatagactgaatgaaagatgagcttctgcctttatatccttctctcctgctacccaactcattgtggtgaaggaaaaagaaaacgcgggtggagactgcactatatgcttaggactgaaatgcaactgcagaagcaacatgtgaccttttagagatgcttgtgggactgcataaagtgaagagggaaactggaaaaaaacaatgaagtaaggaaaaaatgaggaaactgagacacagcttaagaattttgcccaaagctacaaagattgaatagggaaaacctgctttctgcaaacaactgaaaaagctgcatttagaaactgtttctttggccctcatcgagaagctggaacttgtattgttaggccccttatgggacaagctctcaactgctgatcacccagtgattgtcaccatggccagcaagaggaaatccaccacaccatgcatgatcccagtgaagactgtggtgttgcaagatgccagcatggaggcccagcccgctgagaccttgcctgaaggaccccagcaggatctgcccccagaagcatctgctgccagcagtgaggcagcacagaaccccagcagtactgatggctctacactggccaatgggcatcggagcactttagatggctatttatattcctgtaaatactgcgatttcagatcccatgacatgacccaatttgtgggacatatgaactcagagcacacagactttaataaagacccaacctttgtatgcagtgggtgcagttttctggcaaaaacccctgaggggctttccttgcacaatgccacatgtcactccggggaagccagctttgtgtggaacgtggccaagccagacaatcatgtggttgtggagcagagcatccctgagagcaccagcactcctgacctagcgggtgagcccagtgctgaaggggctgatggacaggcagaaatcatcattaccaaaactccaatcatgaagataatgaaaggcaaagctgaagccaaaaaaattcatacactcaaggagaatgtccctagccagcctgtgggtgaggccttaccaaagctgtcgactggagaaatggaggtgagagagggggaccattccttcatcaatggggcagttccagtcagccaggcatctgccagctctgcaaaaaacccccatgccgccaacgggcccctgataggaacagtgccagttttgccagctggcatagcacagttcctctccctccagcagcagcccccagtgcatgcccaacaccatgtccaccagccactgcccacggccaaggcccttcccaaagtgatgatccccctgagcagcattccaacgtacaatgcagccatggactctaacagcttcctgaagaactccttccacaagttcccctaccccaccaaagccgagctctgctatttgactgtggtgaccaagtatccagaagaacagctcaagatctggttcacagcccaaaggctgaagcaggggatcagctggtcccctgaggagattgaggatgcccggaaaaagatgttcaatacagtcatccagtctgtgcctcagcccacaattacggttctaaataccccactcgtcgccagtgctggcaatgtccagcatctcatccaggccgctcttccaggtcacgttgtggggcagccagagggtacaggagggggacttctggtcactcagccattgatggccaatgggttgcaagcaacaagttcccctctccccctcacggtgacatccgtccccaagcagccaggtgtggcacccattaacactgtgtgttcaaatacaacgtcagctgtgaaggtggtcaatgcggcccagtcgctcctcacggcctgccccagcataacctcccaagccttccttgatgctagcatctacaaaaataagaaatctcatgaacagctgtcagctctgaaagggagcttctgtcggaaccagttcccagggcagagcgaagttgaacatctcacaaaagtgacgggcctcagtaccagagaggtgcggaaatggttcagtgatcgtagataccactgccggaacttgaagggctccagagcgatgatacctggagatcacagttccatcatcattgactctgtgccagaggtgtccttctccccatcgtccaaggtccctgaggtaacctgcattccgacaacagccacactagcaacccacccttctgccaaacgacaatcttggcaccagactcctgacttcacaccaaccaaatacaaggagagagcccctgagcagctcagagccctggagagcagttttgcacaaaaccctcttcctcttgatgaggaactggaccgcctgagaagtgaaaccaaaatgacccgacgagaaattgatagctggttttcagagagacggaaaaaagtgaatgctgaggagaccaagaaggctgaggagaatgcctctcaggaggaagaggaggctgctgaggatgagggtggagaagaggatttggccagtgagctaagggtctctggtgaaaatggctctctggaaatgcccagcagccatatcttggcagagcgcaaagtcagccccattaaaatcaacctgaagaacctgagggtcactgaagccaatggcaggaacgagattccagggctgggtgcctgtgaccctgaggatgatgagtcaaacaaactggcagagcagctcccaggcaaagtgagctgcaaaaagactgcccagcagcggcacttgctgcggcagctctttgtccagacacagtggccaagcaaccaggactatgactccatcatggcccagacgggtctgccacggccagaggtggtgcgctggtttggagatagcaggtacgcactgaagaacggccaactcaaatggtacgaagactataagcgaggcaacttcccaccagggctactggtcattgcccctggcaaccgggagctcctgcaggactattacatgacacacaagatgctgtatgaagaggacctgcagaacctctgtgacaagacccagatgagctcccagcaggtcaagcagtggtttgctgagaaaatgggggaggagaccagagccgtggcagacacaggcagtgaggaccagggccctggtactggtgagctcacagcagttcacaaagggatgggtgacacctattcagaggtgtctgagaacagtgagtcgtgggagccccgtgtccctgaggccagctcagagccctttgacacatcgagtccccaggctggacgtcagctcgaaacagactgaatttgatctgattaatgtgaaggactggccagtctgggaaaccgcctgccacgtggaagagccaaacccgactctctgctgccacatgccgttcccatgcccggctgctgggcacctgggagagcttccagaatcctcgcagacagcccagagcctgccgctaccctcggcctgcccaccaccaagcaagcagcaagcaagatggggttctcatcagttcttcctcccacaatgtaggacctttcctttaccttccaatggataaaatagttcagagttcatagtcatattcatagacacagaatcaagcttttaacatatacatccacctctatatgttaaataaaacatcagattatcaacactgtcattacgtagaaactttggttagccaagcagtgcattgtcagttacgtcatctctaaaaatgacctgtgtctgttctctggggattgctgggtcacaggtgcccctcaccttccacagtcaggcagggaagttataggcacaaagctacgtctggaacccctttgtgccccctttgtgttcctcaaggaagcagtacctttgaagagatctctgctgcattaagtgatgaccggctacgtttcatgtcaggcttgctttgccttgtgggctactcagtgcagaacctgctgtaaccctcagttcaaaaaatggactggcaatgtgattagcgttggatgctttaccattctctttagttgttaccgtaattctgctttttcatgggagtttgaatcatggaccataacttttcagttatcagatcaactaaagaaacatttgttgttaagcctaatgtgctgacctatgtgcctgcattttttttttaatctagacatgtttggagtgagagaaagatggaaaaaagacatggggtagggacgtaagtggaaatctatagccacagcctgaagctttgaccactgcggttttcagagccctttctccacactcatttcagagcctcctatggtttgggaaggaataacacactggcccattagtaagggtgaaggctggagggatttgttgacttcttggaattatcagaggtagggtggtctttagcacaaagacttgcatgcagagatccctggcagaacacccagagtgcccgtggctcccaccccagggtctggccggtgtgctggatgcatgcccaagggtgctgggcatcactggtccttgtgaggatgcttttaaagttttatatttatgtccccaaacttggaaacaagaactctactttagcctaaccctcatgtccttttttgaattgagaaaattacaggaaatggtgcctttgaaaattagaaaacttgcttacagagctgttctaaatggtaaatcctcaatttccccaagaccggttgctctgagagtagctggtaaagaggggcgaactaaagacctgtccacctgtagctccgctcatttcttagaaaccacctgcttcccagagtgccaagccacaagtaccaggcttcgtgggcacagacacctcctgggctgggcagagtgacagtgctagaagaccccagagagagggcaagggctttgggcaagaagcactggtggtgttttagggaccgtccttctcccctacccagggaactggacctggcagggcaccgtgctcatgtggctccaaggacaagcatggcggtggccccttctgccttccaggagaggtcttgcttttgaaaccaaaatcatgttcttctaaagtgtcatcttctgccctccctgtcccaatagggaccacatcttatttgtctcaaacagggacttgtgagtacttggcaagttttgcagcctatttttgtattcttaatttggggagtaaagatgtttggtctcaaaaacctttgaggaattgccaagaatggcgagtgattgctttccttcagagaacagacacttggaatttctccttttagtgtttatatacgtgcagattaatttatatatatatatatacacacacacatatacagtataaatactcatttgattctcgtaaaacgcgcatctggcgtgtgcagttgagaaacttggtggcacatgggtgttgggggagtagcctgtgttggagggacaccagtgcactaggcagctggggcggcccaggctgaagccatctccgggtgtctgagaaaccacccagtgcctcacctccagatcctgctggcatcacctccagagccctgcatgcactggctgaagagttggtctgtggagaggattttcttggttacttgtattcacggttaatttacaacccaaacagcaaaacacagttggtggacaagttcatgcaggacctacagtgacccagccatgggcactagctcatctttcaggtggaaaagtacagtgctgcctgccctggtatgtttttcttatagatgttagccctgcccaacagccagggctacactacaaaaggcaagaatgcccatgtaaggagcccagcagtctggacagatccttcttcctctgctgttggatgagagtgagtgagtatgctctggaccttatccttgaaagatgatcaaaagcgatgatgagggaggcagtcatcacgcaggtgcttaaagggacattgtaggaggtactcaagggtttgggggcaaaaccctgaatccagccagtcgtgcacagagacacacccacactagcccagtggcagtgggggatgtgggatggcagcagccaggtatgtagccctgtcacaggacagctcactgtggttttgcacactgcctaagggttaaattgtgttgttgccttcagtagaaggcatttgtgggctgcagagttgagagttgggtgaggttagtctctcctgaagaaaaagcctataaaaagtggctaatcttatcccttttctctgtatgcagttggactcgtcagagatagtaaaatcatcttttagtgtttttttgttgctgatgtcttgtacccatttgttttttacatggggttgtagatcgagttctcaaaggtgaaaccagatgatcattctgataaaggaaatttaaatttgatacatatgctttgtatattttgattacttgttttcgtttttgactataaaggagcttttttattttgggaggggaggagtgtcatttttgagaatcttgggttcctgaaaaagaacgccctagttggatggcttgccagggccttggggtttggtagtgattgtacaacttaaagctcctttctcttggctgagtgacaggtggctgttcaggtggaccaaagcaccttgacacaaggactccacactgtgctctctagtagcacaaggaggaagttggacagaacattgggtagtgccttgcgggctcacacatgtactagtggtctcatctccagctagccttgggaggccgtcccaccaggaaatctctctattccgtagcctgagatgtgcccttgtgggttttatcctgctcagtcagtggcctaggggcaggtcctgtgttctctccctctctctcctggctctgggacatctgtccctggctgcctttcatggaggaaggacactggcctttctggttggatgctgtgtggatgctctctgcttgagcctcgtggtctcttgtctctttttggaccaatatcctcagattggtgcagctttttcagttcagatatcacaccccaagtggataaaggcaacttgcaggagaggagagccagccaagaagaaaattttaaaaccaaacctcgtttaggattttcctaaagtcatcttctcttttttcttgctcagagtttacctgggagatttcaccagtttgactcaccatttgcagatgtgcttttgtattaaatttaaattttcacatatcacatccattctcaaggtagttatatgctggagaagaaaaatcctctagacacatgaaggcccacatagtcaagtcttccagggcaaagccagcagcccacccaggtcaggtagccagcagggctcagttcccctcactccagacacggaccctcctcttcagggtctcttgacccagcttccttctctccttttacctgagagcacagacctctctcagccagcctgcccagaccacggggggctactcccatgtagtttggggagcacttgatctcagaaaagctccattgtctgagcaaatgggcagttgtggagctcaagcctttctcctgtgctcaagtcccttccccaagcaaggcttcaacctcatctacccaccatgtagttttctctggccatttaagtggggcggcagggacatggttgggccatgccacaccagggctggtgaggcaaccagttttgattttgacagagtggctggaggaaaagtggcaatcaaggtgctgcttggtttgctctgagtgcaaatggaaccaacaggtttctgctgcaatctgtgtgttcccagtgccaggtcacaccaggaggggtggggcagggctaaccaagtggtctctgaactcaccgagcgtctgcacttggttgtgaagttaatgggagtacagagagcgtctggccttggagaggggttgagagcctcctttttggttcttcattcctgagctcttgcctgcccacaaatctgacctctttgaatggggacgcagtccttcaacagagaagtttctatggcaaagaagtttctatttagctctagatccagcagagtcatccattctaactgccctgaagtctagagcaggggagggaacccagaggctggggatgagactaggcagaccctggttaccatatggacaaggacaggggaaagcacccccttcctcaatttctgaaagttctatctttgggttcgcaggactttgaggatgataaagaacatataggtactagcttgttgttgctggtccaaagcttccacagccctgagaatttggctttcgtggctgctctggcagctgagcgaagggaggaaggcagccgctctggtggggactctaggcaccttccctgctgtccacttggataggcggtgagccccagggtactgagaggagcctgagcatttacctgccattagtgcctcttccttcaggagactggcttgaaacgtgtgttcatgtgcgcgtgcacacacacacatgagcacctgtatgtgttaatgaatagtttttcttggttaatgctttttaacttctgttcctttccgtaagtggatgattcaaaattaacgtgacttggctgggcgcagtggctcacacctgtaatcccagcactttgggaggccaagggaggcggatcacctgaggtcaggagttcgagaccagcctgatcggcatggtgaaaccccgtttctactaaaaatacaaaaattagccgggcgtggtggtgcgcgcctgtaatcccagctactcaggaggctgaggaaggagaatcacttgaacccgggaggtggaggttgcagtgagctgagatcgtgccactgcactccagcctgggcgacagagcgaaactccgtctcaaaaaaaaaaaaaaaacttaatgtgactggagttaaaagtgaaatgtcaggttgtttagtcactgaatagagagctacaagtgcttggtctttcccaagaatcaaacctgagtagaaatacatttaaaagaaaaatctacatggtacctatgaatcctgtaatttgtttagggagatcttgtcactcatccctggttcctgcccatactgtttggtctcgttcttgcagtttgcttggaacagggccagagccccacatgagattgtcagcaggagtgaggagcgccagtccctactcctcagcagggacccagcacagcaatccggttgttctcggttagactgggtcggggccaggggagaagcagtcacccctgtgtagagggttcccgctgtgcttctgagcagttgctttgttcagaagtgttaggagggtcagattgtgccataattgttattaaagagaaaacacgcccaccttcctttctcccctgctggccattgttcattgagttttactgagggcagcctttgtggaagtcagggaggttgccaaaggcctgtagatgcctcctgacaaggtcttgattcctggttttctagcacccatttgcattttggtcttcagcacaaagccttgttccctgtggccggacttctgggcaataagactggggagtgactgttgagcagtctgctgtcaggagagatggctgaaaaggtgatcatcttggtgctaaacaagtaagaggcaactgccctgtttttgtttgttttgaggcacaatgaaactttagccaaactctgcaagagggtcccatctcctgccatggccaggtgtgagagaccaaaccgagaaaacagcatactctatcacttaagccttgggtagaatgggaattctttaccctgggtaaacgttttaacaaaaaaatggaacttaacttcggtttggactgtggtcgtgctgaggcaggagtggggttgccctcttggggctgaatctccaggcctcacgaggtcccctgtggggatgctgctatttctaagatgcaaattgcacatttcctagattttgtatctgtggatttggataagggaggggaacacggacaaattgcttgtacaatttgaaatgggcctcaatggtacttcaaaccttttgattattcctaaataaaaacataaatatatttcaca

SEQ ID NO: 35518 - DNA, 657 bp, Homo sapiens
  source 1..657: mol_type = unassigned DNA
aaatagactgaatgaaagatgagcttctgcctttatatccttctctcctgctacccaactcattgtggtgaaggaaaaagaaaacgcgggtggagactgcactatatgcttaggactgaaatgcaactgcagaagcaacatgtgaccttttagagatgcttgtgggactgcataaagtgaagagggaaactggaaaaaaacaatgaagtaaggaaaaaattgaatagggaaaacctgctttctgcaaacaactgaaaaagctgcatttagaaactgtttctttggccctcatcgagaagctggaacttgtattgttaggccccttatgggacaagctctcaactgctgatcacccagtgattgtcaccatggccagcaagaggaaatccaccacaccatgcatgatcccagtgaagactgtggtgttgcaagatgccagcatggaggcccagcccgctgagaccttgcctgaaggaccccagcaggatctgcccccagaagcatctgctgccagcagtgaggcagcacagaaccccagcagtactgatggctctacactggccaatgggcatcggagcactttagatggctatttatattcctgtaaatactgcgatttcagatcccatgacatgacccaatttgtgggacatatga

SEQ ID NO: 35519 - DNA, 3288 bp, Homo sapiens
  source 1..3288: mol_type = unassigned DNA
gtgatagccgtcaaaggcagcaaatagactgaatgaaagatgagcttctgcctttatatccttctctcctgctacccaactcattgtggtgaaggaaaaagaaaacgcgggtggagactgcactatatgcttaggactgaaatgcaactgcagaagcaacatgtgaccttttagagatgcttgtgggactgcataaagtgaagagggaaactggaaaaaaacaatgaaattgaatagggaaaacctgctttctgcaaacaactgaaaaagctgcatttagaaactgtttctttggccctcatcgagaagctggaacttgtattgttaggccccttatgggacaagctctcaactgctgatcacccagtgattgtcaccatggccagcaagaggaaatccaccacaccatgcatgatcccagtgaagactgtggtgttgcaagatgccagcatggaggcccagcccgctgagaccttgcctgaaggaccccagcaggatctgcccccagaagcatctgctgccagcagtgaggcagcacagaaccccagcagtactgatggctctacactggccaatgggcatcggagcactttagatggctatttatattcctgtaaatactgcgatttcagatcccatgacatgacccaatttgtgggacatatgaactcagagcacacagactttaataaagacccaacctttgtatgcagtgggtgcagttttctggcaaaaacccctgaggggctttccttgcacaatgccacatgtcactccggggaagccagctttgtgtggaacgtggccaagccagacaatcatgtggttgtggagcagagcatccctgagagcaccagcactcctgacctagcgggtgagcccagtgctgaaggggctgatggacaggcagaaatcatcattaccaaaactccaatcatgaagataatgaaaggcaaagctgaagccaaaaaaattcatacactcaaggagaatgtccctagccagcctgtgggtgaggccttaccaaagctgtcgactggagaaatggaggtgagagagggggaccattccttcatcaatggggcagttccagtcagccaggcatctgccagctctgcaaaaaacccccatgccgccaacgggcccctgataggaacagtgccagttttgccagctggcatagcacagttcctctccctccagcagcagcccccagtgcatgcccaacaccatgtccaccagccactgcccacggccaaggcccttcccaaagtgatgatccccctgagcagcattccaacgtacaatgcagccatggactctaacagcttcctgaagaactccttccacaagttcccctaccccaccaaagccgagctctgctatttgactgtggtgaccaagtatccagaagaacagctcaagatctggttcacagcccaaaggctgaagcaggggatcagctggtcccctgaggagattgaggatgcccggaaaaagatgttcaatacagtcatccagtctgtgcctcagcccacaattacggttctaaataccccactcgtcgccagtgctggcaatgtccagcatctcatccaggccgctcttccaggtcacgttgtggggcagccagagggtacaggagggggacttctggtcactcagccattgatggccaatgggttgcaagcaacaagttcccctctccccctcacggtgacatccgtccccaagcagccaggtgtggcacccattaacactgtgtgttcaaatacaacgtcagctgtgaaggtggtcaatgcggcccagtcgctcctcacggcctgccccagcataacctcccaagccttccttgatgctagcatctacaaaaataagaaatctcatgaacagctgtcagctctgaaagggagcttctgtcggaaccagttcccagggcagagcgaagttgaacatctcacaaaagtgacgggcctcagtaccagagaggtgcggaaatggttcagtgatcgtagataccactgccggaacttgaagggctccagagcgatgatacctggagatcacagttccatcatcattgactctgtgccagaggtgtccttctccccatcgtccaaggtccctgaggtaacctgcattccgacaacagccacactagcaacccacccttctgccaaacgacaatcttggcaccagactcctgacttcacaccaaccaaatacaaggagagagcccctgagcagctcagagccctggagagcagttttgcacaaaaccctcttcctcttgatgaggaactggaccgcctgagaagtgaaaccaaaatgacccgacgagaaattgatagctggttttcagagagacggaaaaaagtgaatgctgaggagaccaagaaggctgaggagaatgcctctcaggaggaagaggaggctgctgaggatgagggtggagaagaggatttggccagtgagctaagggtctctggtgaaaatggctctctggaaatgcccagcagccatatcttggcagagcgcaaagtcagccccattaaaatcaacctgaagaacctgagggtcactgaagccaatggcaggaacgagattccagggctgggtgcctgtgaccctgaggatgatgagtcaaacaaactggcagagcagctcccaggcaaagtgagctgcaaaaagactgcccagcagcggcacttgctgcggcagctctttgtccagacacagtggccaagcaaccaggactatgactccatcatggcccagacgggtctgccacggccagaggtggtgcgctggtttggagatagcaggtacgcactgaagaacggccaactcaaatggtacgaagactataagcgaggcaacttcccaccagggctactggtcattgcccctggcaaccgggagctcctgcaggactattacatgacacacaagatgctgtatgaagaggacctgcagaacctctgtgacaagacccagatgagctcccagcaggtcaagcagtggtttgctgagaaaatgggggaggagaccagagccgtggcagacacaggcagtgaggaccagggccctggtactggtgagctcacagcagttcacaaagggatgggtgacacctattcagaggtgtctgagaacagtgagtcgtgggagccccgtgtccctgaggccagctcagagccctttgacacatcgagtccccaggctggacgtcagctcggttcctggtcactgagttcccagcctctcccttccctccttaccctttga

SEQ ID NO: 35520 - DNA, 9991 bp, Homo sapiens
  source 1..9991: mol_type = unassigned DNA
gtgatagccgtcaaaggcagcaaatagactgaatgaaagatgagcttctgcctttatatccttctctcctgctacccaactcattgtggtgaaggaaaaagaaaacgcgggtggagactgcactatatgcttaggactgaaatgcaactgcagaagcaacatgtgaccttttagagatgcttgtgggactgcataaagtgaagagggaaactggaaaaaaacaatgaaattgaatagggaaaacctgctttctgcaaacaactgaaaaagctgcatttagaaactgtttctttggccctcatcgagaagctggaacttgtattgttaggccccttatgggacaagctctcaactgctgatcacccagtgattgtcaccatggccagcaagaggaaatccaccacaccatgcatgatcccagtgaagactgtggtgttgcaagatgccagcatggaggcccagcccgctgagaccttgcctgaaggaccccagcaggatctgcccccagaagcatctgctgccagcagtgaggcagcacagaaccccagcagtactgatggctctacactggccaatgggcatcggagcactttagatggctatttatattcctgtaaatactgcgatttcagatcccatgacatgacccaatttgtgggacatatgaactcagagcacacagactttaataaagacccaacctttgtatgcagtgggtgcagttttctggcaaaaacccctgaggggctttccttgcacaatgccacatgtcactccggggaagccagctttgtgtggaacgtggccaagccagacaatcatgtggttgtggagcagagcatccctgagagcaccagcactcctgacctagcgggtgagcccagtgctgaaggggctgatggacaggcagaaatcatcattaccaaaactccaatcatgaagataatgaaaggcaaagctgaagccaaaaaaattcatacactcaaggagaatgtccctagccagcctgtgggtgaggccttaccaaagctgtcgactggagaaatggaggtgagagagggggaccattccttcatcaatggggcagttccagtcagccaggcatctgccagctctgcaaaaaacccccatgccgccaacgggcccctgataggaacagtgccagttttgccagctggcatagcacagttcctctccctccagcagcagcccccagtgcatgcccaacaccatgtccaccagccactgcccacggccaaggcccttcccaaagtgatgatccccctgagcagcattccaacgtacaatgcagccatggactctaacagcttcctgaagaactccttccacaagttcccctaccccaccaaagccgagctctgctatttgactgtggtgaccaagtatccagaagaacagctcaagatctggttcacagcccaaaggctgaagcaggggatcagctggtcccctgaggagattgaggatgcccggaaaaagatgttcaatacagtcatccagtctgtgcctcagcccacaattacggttctaaataccccactcgtcgccagtgctggcaatgtccagcatctcatccaggccgctcttccaggtcacgttgtggggcagccagagggtacaggagggggacttctggtcactcagccattgatggccaatgggttgcaagcaacaagttcccctctccccctcacggtgacatccgtccccaagcagccaggtgtggcacccattaacactgtgtgttcaaatacaacgtcagctgtgaaggtggtcaatgcggcccagtcgctcctcacggcctgccccagcataacctcccaagccttccttgatgctagcatctacaaaaataagaaatctcatgaacagctgtcagctctgaaagggagcttctgtcggaaccagttcccagggcagagcgaagttgaacatctcacaaaagtgacgggcctcagtaccagagaggtgcggaaatggttcagtgatcgtagataccactgccggaacttgaagggctccagagcgatgatacctggagatcacagttccatcatcattgactctgtgccagaggtgtccttctccccatcgtccaaggtccctgaggtaacctgcattccgacaacagccacactagcaacccacccttctgccaaacgacaatcttggcaccagactcctgacttcacaccaaccaaatacaaggagagagcccctgagcagctcagagccctggagagcagttttgcacaaaaccctcttcctcttgatgaggaactggaccgcctgagaagtgaaaccaaaatgacccgacgagaaattgatagctggttttcagagagacggaaaaaagtgaatgctgaggagaccaagaaggctgaggagaatgcctctcaggaggaagaggaggctgctgaggatgagggtggagaagaggatttggccagtgagctaagggtctctggtgaaaatggctctctggaaatgcccagcagccatatcttggcagagcgcaaagtcagccccattaaaatcaacctgaagaacctgagggtcactgaagccaatggcaggaacgagattccagggctgggtgcctgtgaccctgaggatgatgagtcaaacaaactggcagagcagctcccaggcaaagtgagctgcaaaaagactgcccagcagcggcacttgctgcggcagctctttgtccagacacagtggccaagcaaccaggactatgactccatcatggcccagacgggtctgccacggccagaggtggtgcgctggtttggagatagcaggtacgcactgaagaacggccaactcaaatggtacgaagactataagcgaggcaacttcccaccagggctactggtcattgcccctggcaaccgggagctcctgcaggactattacatgacacacaagatgctgtatgaagaggacctgcagaacctctgtgacaagacccagatgagctcccagcaggtcaagcagtggtttgctgagaaaatgggggaggagaccagagccgtggcagacacaggcagtgaggaccagggccctggtactggtgagctcacagcagttcacaaagggatgggtgacacctattcagaggtgtctgagaacagtgagtcgtgggagccccgtgtccctgaggccagctcagagccctttgacacatcgagtccccaggctggacgtcagctcgaaacagactgaatttgatctgattaatgtgaaggactggccagtctgggaaaccgcctgccacgtggaagagccaaacccgactctctgctgccacatgccgttcccatgcccggctgctgggcacctgggagagcttccagaatcctcgcagacagcccagagcctgccgctaccctcggcctgcccaccaccaagcaagcagcaagcaagatggggttctcatcagttcttcctcccacaatgtaggacctttcctttaccttccaatggataaaatagttcagagttcatagtcatattcatagacacagaatcaagcttttaacatatacatccacctctatatgttaaataaaacatcagattatcaacactgtcattacgtagaaactttggttagccaagcagtgcattgtcagttacgtcatctctaaaaatgacctgtgtctgttctctggggattgctgggtcacaggtgcccctcaccttccacagtcaggcagggaagttataggcacaaagctacgtctggaacccctttgtgccccctttgtgttcctcaaggaagcagtacctttgaagagatctctgctgcattaagtgatgaccggctacgtttcatgtcaggcttgctttgccttgtgggctactcagtgcagaacctgctgtaaccctcagttcaaaaaatggactggcaatgtgattagcgttggatgctttaccattctctttagttgttaccgtaattctgctttttcatgggagtttgaatcatggaccataacttttcagttatcagatcaactaaagaaacatttgttgttaagcctaatgtgctgacctatgtgcctgcattttttttttaatctagacatgtttggagtgagagaaagatggaaaaaagacatggggtagggacgtaagtggaaatctatagccacagcctgaagctttgaccactgcggttttcagagccctttctccacactcatttcagagcctcctatggtttgggaaggaataacacactggcccattagtaagggtgaaggctggagggatttgttgacttcttggaattatcagaggtagggtggtctttagcacaaagacttgcatgcagagatccctggcagaacacccagagtgcccgtggctcccaccccagggtctggccggtgtgctggatgcatgcccaagggtgctgggcatcactggtccttgtgaggatgcttttaaagttttatatttatgtccccaaacttggaaacaagaactctactttagcctaaccctcatgtccttttttgaattgagaaaattacaggaaatggtgcctttgaaaattagaaaacttgcttacagagctgttctaaatggtaaatcctcaatttccccaagaccggttgctctgagagtagctggtaaagaggggcgaactaaagacctgtccacctgtagctccgctcatttcttagaaaccacctgcttcccagagtgccaagccacaagtaccaggcttcgtgggcacagacacctcctgggctgggcagagtgacagtgctagaagaccccagagagagggcaagggctttgggcaagaagcactggtggtgttttagggaccgtccttctcccctacccagggaactggacctggcagggcaccgtgctcatgtggctccaaggacaagcatggcggtggccccttctgccttccaggagaggtcttgcttttgaaaccaaaatcatgttcttctaaagtgtcatcttctgccctccctgtcccaatagggaccacatcttatttgtctcaaacagggacttgtgagtacttggcaagttttgcagcctatttttgtattcttaatttggggagtaaagatgtttggtctcaaaaacctttgaggaattgccaagaatggcgagtgattgctttccttcagagaacagacacttggaatttctccttttagtgtttatatacgtgcagattaatttatatatatatatatacacacacacatatacagtataaatactcatttgattctcgtaaaacgcgcatctggcgtgtgcagttgagaaacttggtggcacatgggtgttgggggagtagcctgtgttggagggacaccagtgcactaggcagctggggcggcccaggctgaagccatctccgggtgtctgagaaaccacccagtgcctcacctccagatcctgctggcatcacctccagagccctgcatgcactggctgaagagttggtctgtggagaggattttcttggttacttgtattcacggttaatttacaacccaaacagcaaaacacagttggtggacaagttcatgcaggacctacagtgacccagccatgggcactagctcatctttcaggtggaaaagtacagtgctgcctgccctggtatgtttttcttatagatgttagccctgcccaacagccagggctacactacaaaaggcaagaatgcccatgtaaggagcccagcagtctggacagatccttcttcctctgctgttggatgagagtgagtgagtatgctctggaccttatccttgaaagatgatcaaaagcgatgatgagggaggcagtcatcacgcaggtgcttaaagggacattgtaggaggtactcaagggtttgggggcaaaaccctgaatccagccagtcgtgcacagagacacacccacactagcccagtggcagtgggggatgtgggatggcagcagccaggtatgtagccctgtcacaggacagctcactgtggttttgcacactgcctaagggttaaattgtgttgttgccttcagtagaaggcatttgtgggctgcagagttgagagttgggtgaggttagtctctcctgaagaaaaagcctataaaaagtggctaatcttatcccttttctctgtatgcagttggactcgtcagagatagtaaaatcatcttttagtgtttttttgttgctgatgtcttgtacccatttgttttttacatggggttgtagatcgagttctcaaaggtgaaaccagatgatcattctgataaaggaaatttaaatttgatacatatgctttgtatattttgattacttgttttcgtttttgactataaaggagcttttttattttgggaggggaggagtgtcatttttgagaatcttgggttcctgaaaaagaacgccctagttggatggcttgccagggccttggggtttggtagtgattgtacaacttaaagctcctttctcttggctgagtgacaggtggctgttcaggtggaccaaagcaccttgacacaaggactccacactgtgctctctagtagcacaaggaggaagttggacagaacattgggtagtgccttgcgggctcacacatgtactagtggtctcatctccagctagccttgggaggccgtcccaccaggaaatctctctattccgtagcctgagatgtgcccttgtgggttttatcctgctcagtcagtggcctaggggcaggtcctgtgttctctccctctctctcctggctctgggacatctgtccctggctgcctttcatggaggaaggacactggcctttctggttggatgctgtgtggatgctctctgcttgagcctcgtggtctcttgtctctttttggaccaatatcctcagattggtgcagctttttcagttcagatatcacaccccaagtggataaaggcaacttgcaggagaggagagccagccaagaagaaaattttaaaaccaaacctcgtttaggattttcctaaagtcatcttctcttttttcttgctcagagtttacctgggagatttcaccagtttgactcaccatttgcagatgtgcttttgtattaaatttaaattttcacatatcacatccattctcaaggtagttatatgctggagaagaaaaatcctctagacacatgaaggcccacatagtcaagtcttccagggcaaagccagcagcccacccaggtcaggtagccagcagggctcagttcccctcactccagacacggaccctcctcttcagggtctcttgacccagcttccttctctccttttacctgagagcacagacctctctcagccagcctgcccagaccacggggggctactcccatgtagtttggggagcacttgatctcagaaaagctccattgtctgagcaaatgggcagttgtggagctcaagcctttctcctgtgctcaagtcccttccccaagcaaggcttcaacctcatctacccaccatgtagttttctctggccatttaagtggggcggcagggacatggttgggccatgccacaccagggctggtgaggcaaccagttttgattttgacagagtggctggaggaaaagtggcaatcaaggtgctgcttggtttgctctgagtgcaaatggaaccaacaggtttctgctgcaatctgtgtgttcccagtgccaggtcacaccaggaggggtggggcagggctaaccaagtggtctctgaactcaccgagcgtctgcacttggttgtgaagttaatgggagtacagagagcgtctggccttggagaggggttgagagcctcctttttggttcttcattcctgagctcttgcctgcccacaaatctgacctctttgaatggggacgcagtccttcaacagagaagtttctatggcaaagaagtttctatttagctctagatccagcagagtcatccattctaactgccctgaagtctagagcaggggagggaacccagaggctggggatgagactaggcagaccctggttaccatatggacaaggacaggggaaagcacccccttcctcaatttctgaaagttctatctttgggttcgcaggactttgaggatgataaagaacatataggtactagcttgttgttgctggtccaaagcttccacagccctgagaatttggctttcgtggctgctctggcagctgagcgaagggaggaaggcagccgctctggtggggactctaggcaccttccctgctgtccacttggataggcggtgagccccagggtactgagaggagcctgagcatttacctgccattagtgcctcttccttcaggagactggcttgaaacgtgtgttcatgtgcgcgtgcacacacacacatgagcacctgtatgtgttaatgaatagtttttcttggttaatgctttttaacttctgttcctttccgtaagtggatgattcaaaattaacgtgacttggctgggcgcagtggctcacacctgtaatcccagcactttgggaggccaagggaggcggatcacctgaggtcaggagttcgagaccagcctgatcggcatggtgaaaccccgtttctactaaaaatacaaaaattagccgggcgtggtggtgcgcgcctgtaatcccagctactcaggaggctgaggaaggagaatcacttgaacccgggaggtggaggttgcagtgagctgagatcgtgccactgcactccagcctgggcgacagagcgaaactccgtctcaaaaaaaaaaaaaaaacttaatgtgactggagttaaaagtgaaatgtcaggttgtttagtcactgaatagagagctacaagtgcttggtctttcccaagaatcaaacctgagtagaaatacatttaaaagaaaaatctacatggtacctatgaatcctgtaatttgtttagggagatcttgtcactcatccctggttcctgcccatactgtttggtctcgttcttgcagtttgcttggaacagggccagagccccacatgagattgtcagcaggagtgaggagcgccagtccctactcctcagcagggacccagcacagcaatccggttgttctcggttagactgggtcggggccaggggagaagcagtcacccctgtgtagagggttcccgctgtgcttctgagcagttgctttgttcagaagtgttaggagggtcagattgtgccataattgttattaaagagaaaacacgcccaccttcctttctcccctgctggccattgttcattgagttttactgagggcagcctttgtggaagtcagggaggttgccaaaggcctgtagatgcctcctgacaaggtcttgattcctggttttctagcacccatttgcattttggtcttcagcacaaagccttgttccctgtggccggacttctgggcaataagactggggagtgactgttgagcagtctgctgtcaggagagatggctgaaaaggtgatcatcttggtgctaaacaagtaagaggcaactgccctgtttttgtttgttttgaggcacaatgaaactttagccaaactctgcaagagggtcccatctcctgccatggccaggtgtgagagaccaaaccgagaaaacagcatactctatcacttaagccttgggtagaatgggaattctttaccctgggtaaacgttttaacaaaaaaatggaacttaacttcggtttggactgtggtcgtgctgaggcaggagtggggttgccctcttggggctgaatctccaggcctcacgaggtcccctgtggggatgctgctatttctaagatgcaaattgcacatttcctagattttgtatctgtggatttggataagggaggggaacacggacaaattgcttgtacaatttgaaatgggcctcaatggtacttcaaaccttttgattattcctaaataaaaacataaatatatttcac

SEQ ID NO: 35521 - DNA, 573 bp, Homo sapiens
  source 1..573: mol_type = unassigned DNA
ttctttccagctctggacaggaaaacatgaaaacagatgatcccaaggaggtttctccctaaactaacaattaaagaatatagttttactttttcatttttatttgttgaaactgaatccacaccaggaaaacccgaatggaagaacatcagaaaatagcacatccttgaagttacaaagcaacacatctgactgaaatgcaactgcagaagcaacatgtgaccttttagagatgcttgtgggactgcataaagtgaagagggaaactggaaaaaaacaatgaaattgaatagggaaaacctgctttctgcaaacaactgaaaaagctgcatttagaaactgtttctttggccctcatcgagaagctggaacttgtattgttaggccccttatgggacaagctctcaactgctgatcacccagtgattgtcaccatggccagcaagaggaaatccaccacaccatgcatgatcccagtgaagactgtggtgttgcaagatgccagcatggaggcccagcccgctgagaccttgcctgaaggaccccagcaggatctgcccccagaagcatctg

SEQ ID NO: 35522 - DNA, 3551 bp, Homo sapiens
  source 1..3551: mol_type = unassigned DNA
agcactaacattcttgtgtgctgaattgtgatagccgtcaaaggcagcaaatagactgaatgaaagatgagcttctgcctttatatccttctctcctgctacccaactcattgtggtgaaggaaaaagaaaacgcgggtggagactgcactatatgcttaggactgaaatgcaactgcagaagcaacatgtgaccttttagagatgcttgtgggactgcataaagtgaagagggaaactggaaaaaaacaatgaaattgaatagggaaaacctgctttctgcaaacaactgaaaaagctgcatttagaaactgtttctttggccctcatcgagaagctggaacttgtattgttaggccccttatgggacaagctctcaactgctgatcacccagtgattgtcaccatggccagcaagaggaaatccaccacaccatgcatgatcccagtgaagactgtggtgttgcaagatgccagcatggaggcccagcccgctgagaccttgcctgaaggaccccagcaggatctgcccccagaagcatctgctgccagcagtgaggcagcacagaaccccagcagtactgatggctctacactggccaatgggcatcggagcactttagatggctatttatattcctgtaaatactgcgatttcagatcccatgacatgacccaatttgtgggacatatgaactcagagcacacagactttaataaagacccaacctttgtatgcagtgggtgcagttttctggcaaaaacccctgaggggctttccttgcacaatgccacatgtcactccggggaagccagctttgtgtggaacgtggccaagccagacaatcatgtggttgtggagcagagcatccctgagagcaccagcactcctgacctagcgggtgagcccagtgctgaaggggctgatggacaggcagaaatcatcattaccaaaactccaatcatgaagataatgaaaggcaaagctgaagccaaaaaaattcatacactcaaggagaatgtccctagccagcctgtgggtgaggccttaccaaagctgtcgactggagaaatggaggtgagagagggggaccattccttcatcaatggggcagttccagtcagccaggcatctgccagctctgcaaaaaacccccatgccgccaacgggcccctgataggaacagtgccagttttgccagctggcatagcacagttcctctccctccagcagcagcccccagtgcatgcccaacaccatgtccaccagccactgcccacggccaaggcccttcccaaagtgatgatccccctgagcagcattccaacgtacaatgcagccatggactctaacagcttcctgaagaactccttccacaagttcccctaccccaccaaagccgagctctgctatttgactgtggtgaccaagtatccagaagaacagctcaagatctggttcacagcccaaaggctgaagcaggggatcagctggtcccctgaggagattgaggatgcccggaaaaagatgttcaatacagtcatccagtctgtgcctcagcccacaattacggttctaaataccccactcgtcgccagtgctggcaatgtccagcatctcatccaggccgctcttccaggtcacgttgtggggcagccagagggtacaggagggggacttctggtcactcagccattgatggccaatgggttgcaagcaacaagttcccctctccccctcacggtgacatccgtccccaagcagccaggtgtggcacccattaacactgtgtgttcaaatacaacgtcagctgtgaaggtggtcaatgcggcccagtcgctcctcacggcctgccccagcataacctcccaagccttccttgatgctagcatctacaaaaataagaaatctcatgaacagctgtcagctctgaaagggagcttctgtcggaaccagttcccagggcagagcgaagttgaacatctcacaaaagtgacgggcctcagtaccagagaggtgcggaaatggttcagtgatcgtagataccactgccggaacttgaagggctccagagcgatgatacctggagatcacagttccatcatcattgactctgtgccagaggtgtccttctccccatcgtccaaggtccctgaggtaacctgcattccgacaacagccacactagcaacccacccttctgccaaacgacaatcttggcaccagactcctgacttcacaccaaccaaatacaaggagagagcccctgagcagctcagagccctggagagcagttttgcacaaaaccctcttcctcttgatgaggaactggaccgcctgagaagtgaaaccaaaatgacccgacgagaaattgatagctggttttcagagagacggaaaaaagtgaatgctgaggagaccaagaaggctgaggagaatgcctctcaggaggaagaggaggctgctgaggatgagggtggagaagaggatttggccagtgagctaagggtctctggtgaaaatggctctctggaaatgcccagcagccatatcttggcagagcgcaaagtcagccccattaaaatcaacctgaagaacctgagggtcactgaagccaatggcaggaacgagattccagggctgggtgcctgtgaccctgaggatgatgagtcaaacaaactggcagagcagctcccaggcaaagtgagctgcaaaaagactgcccagcagcggcacttgctgcggcagctctttgtccagacacagtggccaagcaaccaggactatgactccatcatggcccagacgggtctgccacggccagaggtggtgcgctggtttggagatagcaggtacgcactgaagaacggccaactcaaatggtacgaagactataagcgaggcaacttcccaccagggctactggtcattgcccctggcaaccgggagctcctgcaggactattacatgacacacaagatgctgtatgaagaggacctgcagaacctctgtgacaagacccagatgagctcccagcaggtcaagcagtggtttgctgagaaaatgggggaggagaccagagccgtggcagacacaggcagtgaggaccagggccctggtactggtgagctcacagcagttcacaaagggatgggtgacacctattcagaggtgtctgagaacagtgagtcgtgggagccccgtgtccctgaggccagctcagagccctttgacacatcgagtccccaggctggacgtcagctcgaaacagactgaatttgatctgattaatgtgaaggactggccagtctgggaaaccgcctgccacgtggaagagccaaacccgactctctgctgccacatgccgttcccatgcccggctgctgggcacctgggagagcttccagaatcctcgcagacagcccagagcctgccgctaccctcggcctgcccaccaccaagcaagcagcaagcaagatggggttctcatcagttcttcctcccacaatgtaggacctttcctttaccttccaatggataaaatagttcag

SEQ ID NO: 35523 - DNA, 712 bp, Homo sapiens
  source 1..712: mol_type = unassigned DNA
agactgaatgaaagatgagcttctgcctttatatccttctctcctgctacccaactcattgtggtgaaggaaaaagaaaacgcgggtggagactgcactatatgcttaggactgaaatgcaactgcagaagcaacatgtgaccttttagagatgcttgtgggactgcataaagtgaagagggaaactggaaaaaaacaatgaatcccttccataggaaacagggaatgtttgtttctgtcttctggtaggagaaggattggtcccacccccagctccagggatggatcttgattgtttaagcccagtcagtgattctaacccatggaccaagaccctgccttggagattggggaacaggtgttggaagggctctattttggcaaagaatggattatttatgtgagcatatttccgcaaaattgaatagggaaaacctgctttctgcaaacaactgaaaaagctgcatttagaaactgtttctttggccctcatcgagaagctggaacttgtattgttaggccccttatgggacaagctctcaactgctgatcacccagtgattgtcaccatggccagcaagaggaaatccaccacaccatgcatgatcccagtgaagactgtggtgttgcaagatgccagcatggaggcccagcccgctgagaccttgcctgaaggaccccagcaggatctgcccccagaagcatctgctgc

SEQ ID NO: 35524 - DNA, 803 bp, Homo sapiens
  source 1..803: mol_type = unassigned DNA
aaatagactgaatgaaagatgagcttctgcctttatatccttctctcctgctacccaactcattgtggtgaaggaaaaagaaaacgcgggtggagactgcactatatgcttaggactgaaatgcaactgcagaagcaacatgtgaccttttagagatgcttgtgggactgcataaagtgaagagggaaactggaaaaaaacaatgaagtaaggaaaaagctaatcccgaactcctggcctcaaatgatcttcctaccttggcttcccaaagtgctgggattacagacgtgagctgctgtgcctggccaagacttaattttgaatgacattgggactattgccaaaaatcaaatccatcttcatgttgtccacttctcagccttaattgaatagggaaaacctgctttctgcaaacaactgaaaaagctgcatttagaaactgtttctttggccctcatcgagaagctggaacttgtattgttaggccccttatgggacaagctctcaactgctgatcacccagtgattgtcaccatggccagcaagaggaaatccaccacaccatgcatgatcccagtgaagactgtggtgttgcaagatgccagcatggaggcccagcccgctgagaccttgcctgaaggaccccagcaggatctgcccccagaagcatctgctgccagcagtgaggcagcacagaaccccagcagtactgatggctctacactggccaatgggcatcggagcactttagatggctatttatattcctgtaaatactgcgatttcagatcccatgacatgac

SEQ ID NO: 35525 - DNA, 688 bp, Homo sapiens
  source 1..688: mol_type = unassigned DNA
gccggccgcccgcccggccgcggggagggaggcccgcagcgcgggaagagcggcccggtcgcgggcgccgccaccgccgccgctgccaggactgaaatgcaactgcagaagcaacatgtgaccttttagagatgcttgtgggactgcataaagtgaagagggaaactggaaaaaaacaatgaaattgaatagggaaaacctgctttctgcaaacaactgaaaaagctgcatttagaaactgtttctttggccctcatcgagaagctggaacttgtattgttaggccccttatgggacaagctctcaactgctgatcacccagtgattgtcaccatggccagcaagaggaaatccaccacaccatgcatgatcccagtgaagactgtggtgttgcaagatgccagcatggaggcccagcccgctgagaccttgcctgaaggaccccagcaggatctgcccccagaagcatctgctgccagcagtgaggcagcacagaaccccagcagtactgatggctctacactggccaatgggcatcggagcactttagatggctatttatattcctgtaaatactgcgatttcagatcccatgacatgacccaatttgtgggacatatgaactcagagcacacagactttaataaagacccaacctttgtatgcagtgggtgcagttttctggcaa

SEQ ID NO: 35526 - DNA, 9302 bp, Homo sapiens
  source 1..9302: mol_type = unassigned DNA
agcaaatagactgaatgaaagatgagcttctgcctttatatccttctctcctgctacccaactcattgtggtgaaggaaaaagaaaacgcgggtggagactgcactatatgcttaggactgaaatgcaactgcagaagcaacatgtgaccttttagagatgcttgtgggactgcataaagtgaagagggaaactggaaaaaaacaatgaaattgaatagggaaaacctgctttctgcaaacaactgaaaaagctgcatttagaaactgtttctttggccctcatcgagaagctggaacttgtattgttaggccccttatgggacaagctctcaactgctgatcacccagtgattgtcaccatggccagcaagaggaaatccaccacaccatgcatgatcccagtgaagactgtggtgttgcaagatgccagcatggaggcccagcccgctgagaccttgcctgaaggaccccagcaggatctgcccccagaagcatctgctgccagcagtgaggcagcacagaaccccagcagtactgatggctctacactggccaatgggcatcggagcactttagatggctatttatattcctgtaaatactgcgatttcagatcccatgacatgacccaatttgtgggacatatgaactcagagcacacagactttaataaagacccaacctttgtatgcagtgggtgcagttttctggcaaaaacccctgaggggctttccttgcacaatgccacatgtcactccggggaagccagctttgtgtggaacgtggccaagccagacaatcatgtggttgtggagcagagcatccctgagagcaccagcactcctgacctagcgggtgagcccagtgctgaaggggctgatggacaggcagaaatcatcattaccaaaactccaatcatgaagataatgaaaggcaaagctgaagccaaaaaaattcatacactcaaggagaatgtccctagccagcctgtgggtgaggccttaccaaagctgtcgactggagaaatggaggtgagagagggggaccattccttcatcaatggggcagttccagtcagccaggcatctgccagctctgcaaaaaacccccatgccgccaacgggcccctgataggaacagtgccagttttgccagctggcatagcacagttcctctccctccagcagcagcccccagtgcatgcccaacaccatgtccaccagccactgcccacggccaaggcccttcccaaagtgatgatccccctgagcagcattccaacgtacaatgcagccatggactctaacagcttcctgaagaactccttccacaagttcccctaccccaccaaagccgagctctgctatttgactgtggtgaccaagtatccagaagaacagctcaagatctggttcacagcccaaaggctgaagcaggggatcagctggtcccctgaggagattgaggatgcccggaaaaagatgttcaatacagtcatccagtctgtgcctcagcccacaattacggttctaaataccccactcgtcgccagtgctggcaatgtccagcatctcatccaggccgctcttccaggtcacgttgtggggcagccagagggtacaggagggggacttctggtcactcagccattgatggccaatgggttgcaagcaacaagttcccctctccccctcacggtgacatccgtccccaagcagccaggtgtggcacccattaacactgtgtgttcaaatacaacgtcagctgtgaaggtggtcaatgcggcccagtcgctcctcacggcctgccccagcataacctcccaagccttccttgatgctagcatctacaaaaataagaaatctcatgaacagctgtcagctctgaaagggagcttctgtcggaaccagttcccagggcagagcgaagttgaacatctcacaaaagtgacgggcctcagtaccagagaggtgcggaaatggttcagtgatcgtagataccactgccggaacttgaagggctccagagcgatgatacctggagatcacagttccatcatcattgactctgtgccagaggtgtccttctccccatcgtccaaggtccctgaggtaacctgcattccgacaacagccacactagcaacccacccttctgccaaacgacaatcttggcaccagactcctgacttcacaccaaccaaatacaaggagagagcccctgagcagctcagagccctggagagcagttttgcacaaaaccctcttcctcttgatgaggaactggaccgcctgagaagtgaaaccaaaatgacccgacgagaaattgatagctggttttcagagagacggaaaaaagtgaatgctgaggagaccaagaaggctgaggagaatgcctctcaggaggaagaggaggctgctgaggatgagggtggagaagaggatttggccagtgagctaagggtctctggtgaaaatggctctctggaaatgcccagcagccatatcttggcagagcgcaaagtcagccccattaaaatcaacctgaagaacctgagggtcactgaagccaatggcaggaacgagattccagggctgggtgcctgtgaccctgaggatgatgagtcaaacaaactggcagagcagctcccaggcaaagtgagctgcaaaaagactgcccagcagcggcacttgctgcggcagctctttgtccagacacagtggccaagcaaccaggactatgactccatcatggcccagacgggtctgccacggccagaggtggtgcgctggtttggagatagcaggtacgcactgaagaacggccaactcaaatggtacgaagactataagcgaggcaacttcccaccagggctactggtcattgcccctggcaaccgggagctcctgcaggactattacatgacacacaagatgctgtatgaagaggacctgcagaacctctgtgacaagacccagatgagctcccagcaggtcaagcagtggtttgctgagaaaatgggggaggagaccagagccgtggcagacacaggcagtgaggaccagggccctggtactggtgagctcacagcagttcacaaagggatgggtgacacctattcagaggtgtctgagaacagtgagtcgtgggagccccgtgtccctgaggccagctcagagccctttgacacatcgagtccccaggctggacgtcagctcgaaacagactgaatttgatctgattaatgtgaaggactggccagtctgggaaaccgcctgccacgtggaagagccaaacccgactctctgctgccacatgccgttcccatgcccggctgctgggcacctgggagagcttccagaatcctcgcagacagcccagagcctgccgctaccctcggcctgcccaccaccaagcaagcagcaagcaagatggggttctcatcagttcttcctcccacaatgtaggacctttcctttaccttccaatggataaaatagttcagagttcatagtcatattcatagacacagaatcaagcttttaacatatacatccacctctatatgttaaataaaacatcagattatcaacactgtcattacgtagaaactttggttagccaagcagtgcattgtcagttacgtcatctctaaaaatgacctgtgtctgttctctggggattgctgggtcacaggtgcccctcaccttccacagtcaggcagggaagttataggcacaaagctacgtctggaacccctttgtgccccctttgtgttcctcaaggaagcagtacctttgaagagatctctgctgcattaagtgatgaccggctacgtttcatgtcaggcttgctttgccttgtgggctactcagtgcagaacctgctgtaaccctcagttcaaaaaatggactggcaatgtgattagcgttggatgctttaccattctctttagttgttaccgtaattctgctttttcatgggagtttgaatcatggaccataacttttcagttatcagatcaactaaagaaacatttgttgttaagcctaatgtgctgacctatgtgcctgcattttttttttaatctagacatgtttggagtgagagaaagatggaaaaaagacatggggtagggacgtaagtggaaatctatagccacagcctgaagctttgaccactgcggttttcagagccctttctccacactcatttcagagcctcctatggtttgggaaggaataacacactggcccattagtaagggtgaaggctggagggatttgttgacttcttggaattatcagaggtagggtggtctttagcacaaagacttgcatgcagagatccctggcagaacacccagagtgcccgtggctcccaccccagggtctggccggtgtgctggatgcatgcccaagggtgctgggcatcactggtccttgtgaggatgcttttaaagttttatatttatgtccccaaacttggaaacaagaactctactttagcctaaccctcatgtccttttttgaattgagaaaattacaggaaatggtgcctttgaaaattagaaaacttgcttacagagctgttctaaatggtaaatcctcaatttccccaagaccggttgctctgagagtagctggtaaagaggggcgaactaaagacctgtccacctgtagctccgctcatttcttagaaaccacctgcttcccagagtgccaagccacaagtaccaggcttcgtgggcacagacacctcctgggctgggcagagtgacagtgctagaagaccccagagagagggcaagggctttgggcaagaagcactggtggtgttttagggaccgtccttctcccctacccagggaactggacctggcagggcaccgtgctcatgtggctccaaggacaagcatggcggtggccccttctgccttccaggagaggtcttgcttttgaaaccaaaatcatgttcttctaaagtgtcatcttctgccctccctgtcccaatagggaccacatcttatttgtctcaaacagggacttgtgagtacttggcaagttttgcagcctatttttgtattcttaatttggggagtaaagatgtttggtctcaaaaacctttgaggaattgccaagaatggcgagtgattgctttccttcagagaacagacacttggaatttctccttttagtgtttatatacgtgcagattaatttatatatatatatatacacacacacatatacagtataaatactcatttgattctcgtaaaacgcgcatctggcgtgtgcagttgagaaacttggtggcacatgggtgttgggggagtagcctgtgttggagggacaccagtgcactaggcagctggggcggcccaggctgaagccatctccgggtgtctgagaaaccacccagtgcctcacctccagatcctgctggcatcacctccagagccctgcatgcactggctgaagagttggtctgtggagaggattttcttggttacttgtattcacggttaatttacaacccaaacagcaaaacacagttggtggacaagttcatgcaggacctacagtgacccagccatgggcactagctcatctttcaggtggaaaagtacagtgctgcctgccctggtatgtttttcttatagatgttagccctgcccaacagccagggctacactacaaaaggcaagaatgcccatgtaaggagcccagcagtctggacagatccttcttcctctgctgttggatgagagtgagtgagtatgctctggaccttatccttgaaagatgatcaaaagcgatgatgagggaggcagtcatcacgcaggtgcttaaagggacattgtaggaggtactcaagggtttgggggcaaaaccctgaatccagccagtcgtgcacagagacacacccacactagcccagtggcagtgggggatgtgggatggcagcagccaggtatgtagccctgtcacaggacagctcactgtggttttgcacactgcctaagggttaaattgtgttgttgccttcagtagaaggcatttgtgggctgcagagttgagagttgggtgaggttagtctctcctgaagaaaaagcctataaaaagtggctaatcttatcccttttctctgtatgcagttggactcgtcagagatagtaaaatcatcttttagtgtttttttgttgctgatgtcttgtacccatttgttttttacatggggttgtagatcgagttctcaaaggtgaaaccagatgatcattctgataaaggaaatttaaatttgatacatatgctttgtatattttgattacttgttttcgtttttgactataaaggagctttttttcttgctcagagtttacctgggagatttcaccagtttgactcaccatttgcagatgtgcttttgtattaaatttaaattttcacatatcacatccattctcaaggtagttatatgctggagaagaaaaatcctctagacacatgaaggcccacatagtcaagtcttccagggcaaagccagcagcccacccaggtcaggtagccagcagggctcagttcccctcactccagacacggaccctcctcttcagggtctcttgacccagcttccttctctccttttacctgagagcacagacctctctcagccagcctgcccagaccacggggggctactcccatgtagtttggggagcacttgatctcagaaaagctccattgtctgagcaaatgggcagttgtggagctcaagcctttctcctgtgctcaagtcccttccccaagcaaggcttcaacctcatctacccaccatgtagttttctctggccatttaagtggggcggcagggacatggttgggccatgccacaccagggctggtgaggcaaccagttttgattttgacagagtggctggaggaaaagtggcaatcaaggtgctgcttggtttgctctgagtgcaaatggaaccaacaggtttctgctgcaatctgtgtgttcccagtgccaggtcacaccaggaggggtggggcagggctaaccaagtggtctctgaactcaccgagcgtctgcacttggttgtgaagttaatgggagtacagagagcgtctggccttggagaggggttgagagcctcctttttggttcttcattcctgagctcttgcctgcccacaaatctgacctctttgaatggggacgcagtccttcaacagagaagtttctatggcaaagaagtttctatttagctctagatccagcagagtcatccattctaactgccctgaagtctagagcaggggagggaacccagaggctggggatgagactaggcagaccctggttaccatatggacaaggacaggggaaagcacccccttcctcaatttctgaaagttctatctttgggttcgcaggactttgaggatgataaagaacatataggtactagcttgttgttgctggtccaaagcttccacagccctgagaatttggctttcgtggctgctctggcagctgagcgaagggaggaaggcagccgctctggtggggactctaggcaccttccctgctgtccacttggataggcggtgagccccagggtactgagaggagcctgagcatttacctgccattagtgcctcttccttcaggagactggcttgaaacgtgtgttcatgtgcgcgtgcacacacacacatgagcacctgtatgtgttaatgaatagtttttcttggttaatgctttttaacttctgttcctttccgtaagtggatgattcaaaattaacgtgacttggctgggcgcagtggctcacacctgtaatcccagcactttgggaggccaagggaggcggatcacctgaggtcaggagttcgagaccagcctgatcggcatggtgaaaccccgtttctactaaaaatacaaaaattagccgggcgtggtggtgcgcgcctgtaatcccagctactcaggaggctgaggaaggagaatcacttgaacccgggaggtggaggttgcagtgagctgagatcgtgccactgcactccagcctgggcgacagagcgaaactccgtctcaaaaaaaaaaaaaaaacttaatgtgactggagttaaaagtgaaatgtcaggttgtttagtcactgaatagagagctacaagtgcttggtctttcccaagaatcaaacctgagtagaaatacatttaaaagaaaaatctacatggtacctatgaatcctgtaatttgtttagggagatcttgtcactcatccctggttcctgcccatactgtttggtctcgttcttgcagtttgcttggaacagggccagagccccacatgagattgtcagcaggagtgaggagcgccagtccctactcctcagcagggacccagcacagcaatccggttgttctcggttagactgggtcggggccaggggagaagcagtcacccctgtgtagagggttcccgctgtgcttctgagcagttgctttgttcagaagtgttaggagggtcagattgtgccataattgttattaaagagaaaacacgcccaccttcctttctcccctgctggccattgttcattgagttttactgagggcagcctttgtggaagtcagggaggttgccaaaggcctgtagatgcctcctgacaaggtcttgattcctggttttctagcacccatttgcattttggtcttcagcacaaagccttgttccctgtggccggacttctgggcaataagactggggagtgactgttgagcagtctgctgtcaggagagatggctgaaaaggtgatcatcttggtgctaaacaagtaagaggcaactgccctgtttttgtttgttttgaggcacaatgaaactttagccaaactctgcaagagggtcccatctcctgccatggccaggtgtgagagaccaaaccgagaaaacagcatactctatcacttaagccttgggtagaatgggaattctttaccctgggtaaacgttttaacaaaaaaatggaacttaacttcggtttggactgtggtcgtgctgaggcaggagtggggttgccctcttggggctgaatctccaggcctcacgaggtcccctgtggggatgctgctatttctaagatgcaaattgcacatttcctagattttgtatctgtggatttggataagggaggggaacacggacaaattgcttgtacaatttgaaatgggcctcaatggtacttcaaaccttttgattattcctaaataaaaacataaatatatttc

SEQ ID NO: 35527 - DNA, 3474 bp, Homo sapiens
  source 1..3474: mol_type = unassigned DNA
ggaagttctttccagctctggacaggaaaacatgaaaacagatgatcccaaggaggactgaaatgcaactgcagaagcaacatgtgaccttttagagatgcttgtgggactgcataaagtgaagagggaaactggaaaaaaacaatgaagctaatcccgaactcctggcctcaaatgatcttcctaccttggcttcccaaagtgctgggattacagacgtgagctgctgtgcctggccaagacttaattttgaatgacattgggactattgccaaaaatcaaatccatcttcatgttgtccacttctcagccttaattgaatagggaaaacctgctttctgcaaacaactgaaaaagctgcatttagaaactgtttctttggccctcatcgagaagctggaacttgtattgttaggccccttatgggacaagctctcaactgctgatcacccagtgattgtcaccatggccagcaagaggaaatccaccacaccatgcatgatcccagtgaagactgtggtgttgcaagatgccagcatggaggcccagcccgctgagaccttgcctgaaggaccccagcaggatctgcccccagaagcatctgctgccagcagtgaggcagcacagaaccccagcagtactgatggctctacactggccaatgggcatcggagcactttagatggctatttatattcctgtaaatactgcgatttcagatcccatgacatgacccaatttgtgggacatatgaactcagagcacacagactttaataaagacccaacctttgtatgcagtgggtgcagttttctggcaaaaacccctgaggggctttccttgcacaatgccacatgtcactccggggaagccagctttgtgtggaacgtggccaagccagacaatcatgtggttgtggagcagagcatccctgagagcaccagcactcctgacctagcgggtgagcccagtgctgaaggggctgatggacaggcagaaatcatcattaccaaaactccaatcatgaagataatgaaaggcaaagctgaagccaaaaaaattcatacactcaaggagaatgtccctagccagcctgtgggtgaggccttaccaaagctgtcgactggagaaatggaggtgagagagggggaccattccttcatcaatggggcagttccagtcagccaggcatctgccagctctgcaaaaaacccccatgccgccaacgggcccctgataggaacagtgccagttttgccagctggcatagcacagttcctctccctccagcagcagcccccagtgcatgcccaacaccatgtccaccagccactgcccacggccaaggcccttcccaaagtgatgatccccctgagcagcattccaacgtacaatgcagccatggactctaacagcttcctgaagaactccttccacaagttcccctaccccaccaaagccgagctctgctatttgactgtggtgaccaagtatccagaagaacagctcaagatctggttcacagcccaaaggctgaagcaggggatcagctggtcccctgaggagattgaggatgcccggaaaaagatgttcaatacagtcatccagtctgtgcctcagcccacaattacggttctaaataccccactcgtcgccagtgctggcaatgtccagcatctcatccaggccgctcttccaggtcacgttgtggggcagccagagggtacaggagggggacttctggtcactcagccattgatggccaatgggttgcaagcaacaagttcccctctccccctcacggtgacatccgtccccaagcagccaggtgtggcacccattaacactgtgtgttcaaatacaacgtcagctgtgaaggtggtcaatgcggcccagtcgctcctcacggcctgccccagcataacctcccaagccttccttgatgctagcatctacaaaaataagaaatctcatgaacagctgtcagctctgaaagggagcttctgtcggaaccagttcccagggcagagcgaagttgaacatctcacaaaagtgacgggcctcagtaccagagaggtgcggaaatggttcagtgatcgtagataccactgccggaacttgaagggctccagagcgatgatacctggagatcacagttccatcatcattgactctgtgccagaggtgtccttctccccatcgtccaaggtccctgaggtaacctgcattccgacaacagccacactagcaacccacccttctgccaaacgacaatcttggcaccagactcctgacttcacaccaaccaaatacaaggagagagcccctgagcagctcagagccctggagagcagttttgcacaaaaccctcttcctcttgatgaggaactggaccgcctgagaagtgaaaccaaaatgacccgacgagaaattgatagctggttttcagagagacggaaaaaagtgaatgctgaggagaccaagaaggctgaggagaatgcctctcaggaggaagaggaggctgctgaggatgagggtggagaagaggatttggccagtgagctaagggtctctggtgaaaatggctctctggaaatgcccagcagccatatcttggcagagcgcaaagtcagccccattaaaatcaacctgaagaacctgagggtcactgaagccaatggcaggaacgagattccagggctgggtgcctgtgaccctgaggatgatgagtcaaacaaactggcagagcagctcccaggcaaagtgagctgcaaaaagactgcccagcagcggcacttgctgcggcagctctttgtccagacacagtggccaagcaaccaggactatgactccatcatggcccagacgggtctgccacggccagaggtggtgcgctggtttggagatagcaggtacgcactgaagaacggccaactcaaatggtacgaagactataagcgaggcaacttcccaccagggctactggtcattgcccctggcaaccgggagctcctgcaggactattacatgacacacaagatgctgtatgaagaggacctgcagaacctctgtgacaagacccagatgagctcccagcagaaacagactgaatttgatctgattaatgtgaaggactggccagtctgggaaaccgcctgccacgtggaagagccaaacccgactctctgctgccacatgccgttcccatgcccggctgctgggcacctgggagagcttccagaatcctcgcagacagcccagagcctgccgctaccctcggcctgcccaccaccaagcaagcagcaagcaagatggggttctcatcagttcttcctcccacaatgtaggacctttcctttaccttccaatggataaaatagttcagagttcatagtcatattcatagacacagaatcaagcttttaacatatacatccacctctatatgttaaataaaacatcagattatcaaca

SEQ ID NO: 35528 - DNA, 1576 bp, Homo sapiens
  source 1..1576: mol_type = unassigned DNA
aaaggcagcaaatagactgaatgaaagatgagcttctgcctttatatccttctctcctgctacccaactcattgtggtgaaggaaaaagaaaacgcgggtggagactgcactatatgcttaggactgaaatgcaactgcagaagcaacatgtgaccttttagagatgcttgtgggactgcataaagtgaagagggaaactggaaaaaaacaatgaaatgaggaaactgagacacagcttaagaattttgcccaaagctacaaagtgattctaacccatggaccaagaccctgccttggagattggggaacaggtgttggaagggctctattttggcaaagaatggattatttatgtgagcatatttccgcaaaattgaatagggaaaacctgctttctgcaaacaactgaaaaagctgcatttagaaactgtttctttggccctcatcgagaagctggaacttgtattgttaggccccttatgggacaagctctcaactgctgatcacccagtgattgtcaccatggccagcaagaggaaatccaccacaccatgcatgatcccagtgaagactgtggtgttgcaagatgccagcatggaggcccagcccgctgagaccttgcctgaaggaccccagcaggatctgcccccagaagcatctgctgccagcagtgaggcagcacagaaccccagcagtactgatggctctacactggccaatgggcatcggagcactttagatggctatttatattcctgtaaatactgcgatttcagatcccatgacatgacccaatttgtgggacatatgaactcagagcacacagactttaataaagacccaacctttgtatgcagtgggtgcagttttctggcaaaaacccctgaggggctttccttgcacaatgccacatgtcactccggggaagccagctttgtgtggaacgtggccaagccagacaatcatgtggttgtggagcagagcatccctgagagcaccagcactcctgacctagcgggtgagcccagtgctgaaggggctgatggacaggcagaaatcatcattaccaaaactccaatcatgaagataatgaaaggcaaagctgaagccaaaaaaattcatacactcaaggagaatgtccctagccagcctgtgggtgaggccttaccaaagctgtcgactggagaaatggagaaacagactgaatttgatctgattaatgtgaaggactggccagtctgggaaaccgcctgccacgtggaagagccaaacccgactctctgctgccacatgccgttcccatgcccggctgctgggcacctgggagagcttccagaatcctcgcagacagcccagagcctgccgctaccctcggcctgcccaccaccaagcaagcagcaagcaagatggggttctcatcagttcttcctcccacaatgtaggacctttcctttaccttccaatggataaaatagttcagagttcatagtcatattcatagacacagaatcaagcttttaacatatacatccacctctatatgttaaataaaacatcagattatcaacactgtca

SEQ ID NO: 35529 - DNA, 1528 bp, Homo sapiens
  source 1..1528: mol_type = unassigned DNA
cgtagaaggcgcaaaagggggtggtagaggggaagcgggggcgttcgcgcaggcccgcctgaccgtgtgagagtgcatgcccgagtgtgcgttccgcgtgtgcacccgagagccgcctgcgtccacgcccgagggcccttgcactctgctgggatgtggcagcccatgcccccggtgtaaagagcgtcagctcgaccagtgaaggcggcagagccaggactcgaaccactcggggtacagtagcaccctgaatcttgggacccttgtctgcccacgcgaaaacactacacgtgggccccaggtcctcggattccctgagtggcgtattgaatagggaaaacctgctttctgcaaacaactgaaaaagctgcatttagaaactgtttctttggccctcatcgagaagctggaacttgtattgttaggccccttatgggacaagctctcaactgctgatcacccagtgattgtcaccatggccagcaagaggaaatccaccacaccatgcatgatcccagtgaagactgtggtgttgcaagatgccagcatggaggcccagcccgctgagaccttgcctgaaggaccccagcaggatctgcccccagaagcatctgctgccagcagtgaggcagcacagaaccccagcagtactgatggctctacactggccaatgggcatcggagcactttagatggctatttatattcctgtaaatactgcgatttcagatcccatgacatgacccaatttgtgggacatatgaactcagagcacacagactttaataaagacccaacctttgtatgcagtgggtgcagttttctggcaaaaacccctgaggggctttccttgcacaatgccacatgtcactccggggaagccagctttgtgtggaacgtggccaagccagacaatcatgtggttgtggagcagagcatccctgagagcaccagcactcctgacctagcgggtgagcccagtgctgaaggggctgatggacaggcagaaatcatcattaccaaaactccaatcatgaagataatgaaaggcaaagctgaagccaaaaaaattcatacactcaaggagaatgtccctagccagcctgtgggtgaggccttaccaaagctgtcgactggagaaatggagaaacagactgaatttgatctgattaatgtgaaggactggccagtctgggaaaccgcctgccacgtggaagagccaaacccgactctctgctgccacatgccgttcccatgcccggctgctgggcacctgggagagcttccagaatcctcgcagacagcccagagcctgccgctaccctcggcctgcccaccaccaagcaagcagcaagcaagatggggttctcatcagttcttcctcccacaatgtaggacctttcctttaccttccaatggataaaatagttcagagttcatagtcatattcatagacacagaatcaagcttttaacatatacatccacctctatatgttaaataaaacatcagattatcaacactgtca

SEQ ID NO: 35530 - DNA, 6296 bp, Homo sapiens
  source 1..6296: mol_type = unassigned DNA
cctgcgccggccgcccgcccggccgcggggagggaggcccgcagcgcgggaagagcggcccggtcgcgggcgccgccaccgccgccgctgccaggactgaaatgcaactgcagaagcaacatgtgaccttttagagatgcttgtgggactgcataaagtgaagagggaaactggaaaaaaacaatgaagtaaggaaaaaattgaatagggaaaacctgctttctgcaaacaactgaaaaagctgcatttagaaactgtttctttggccctcatcgagaagctggaacttgtattgttaggccccttatgggacaagctctcaactgctgatcacccagtgattgtcaccatggccagcaagaggaaatccaccacaccatgcatgatcccagtgaagactgtggtgttgcaagatgccagcatggaggcccagcccgctgagaccttgcctgaaggaccccagcaggatctgcccccagaagcatctgctgccagcagtgaggcagcacagaaccccagcagtactgatggctctacactggccaatgggcatcggagcactttagatggctatttatattcctgtaaatactgcgatttcagatcccatgacatgacccaatttgtgggacatatgaactcagagcacacagactttaataaagacccaacctttgtatgcagtgggtgcagttttctggcaaaaacccctgaggggctttccttgcacaatgccacatgtcactccggggaagccagctttgtgtggaacgtggccaagccagacaatcatgtggttgtggagcagagcatccctgagagcaccagcactcctgacctagcgggtgagcccagtgctgaaggggctgatggacaggcagaaatcatcattaccaaaactccaatcatgaagataatgaaaggcaaagctgaagccaaaaaaattcatacactcaaggagaatgtccctagccagcctgtgggtgaggccttaccaaagctgtcgactggagaaatggaggtgagagagggggaccattccttcatcaatggggcagttccagtcagccaggcatctgccagctctgcaaaaaacccccatgccgccaacgggcccctgataggaacagtgccagttttgccagctggcatagcacagttcctctccctccagcagcagcccccagtgcatgcccaacaccatgtccaccagccactgcccacggccaaggcccttcccaaagtgatgatccccctgagcagcattccaacgtacaatgcagccatggactctaacagcttcctgaagaactccttccacaagttcccctaccccaccaaagccgagctctgctatttgactgtggtgaccaagtatccagaagaacagctcaagatctggttcacagcccaaaggctgaagcaggggatcagctggtcccctgaggagattgaggatgcccggaaaaagatgttcaatacagtcatccagtctgtgcctcagcccacaattacggttctaaataccccactcgtcgccagtgctggcaatgtccagcatctcatccaggccgctcttccaggtcacgttgtggggcagccagagggtacaggagggggacttctggtcactcagccattgatggccaatgggttgcaagcaacaagttcccctctccccctcacggtgacatccgtccccaagcagccaggtgtggcacccattaacactgtgtgttcaaatacaacgtcagctgtgaaggtggtcaatgcggcccagtcgctcctcacggcctgccccagcataacctcccaagccttccttgatgctagcatctacaaaaataagaaatctcatgaacagctgtcagctctgaaagggagcttctgtcggaaccagttcccagggcagagcgaagttgaacatctcacaaaagtgacgggcctcagtaccagagaggtgcggaaatggttcagtgatcgtagataccactgccggaacttgaagggctccagagcgatgatacctggagatcacagttccatcatcattgactctgtgccagaggtgtccttctccccatcgtccaaggtccctgaggtaacctgcattccgacaacagccacactagcaacccacccttctgccaaacgacaatcttggcaccagactcctgacttcacaccaaccaaatacaaggagagagcccctgagcagctcagagccctggagagcagttttgcacaaaaccctcttcctcttgatgaggaactggaccgcctgagaagtgaaaccaaaatgacccgacgagaaattgatagctggttttcagagagacggaaaaaagtgaatgctgaggagaccaagaaggctgaggagaatgcctctcaggaggaagaggaggctgctgaggatgagggtggagaagaggatttggccagtgagctaagggtctctggtgaaaatggctctctggaaatgcccagcagccatatcttggcagagcgcaaagtcagccccattaaaatcaacctgaagaacctgagggtcactgaagccaatggcaggaacgagattccagggctgggtgcctgtgaccctgaggatgatgagtcaaacaaactggcagagcagctcccaggcaaagtgagctgcaaaaagactgcccagcagcggcacttgctgcggcagctctttgtccagacacagtggccaagcaaccaggactatgactccatcatggcccagacgggtctgccacggccagaggtggtgcgctggtttggagatagcaggtacgcactgaagaacggccaactcaaatggtacgaagactataagcgaggcaacttcccaccagggctactggtcattgcccctggcaaccgggagctcctgcaggactattacatgacacacaagatgctgtatgaagaggacctgcagaacctctgtgacaagacccagatgagctcccagcaggtcaagcagtggtttgctgagaaaatgggggaggagaccagagccgtggcagacacaggcagtgaggaccagggccctggtactggtgagctcacagcagttcacaaagggatgggtgacacctattcagaggtgtctgagaacagtgagtcgtgggagccccgtgtccctgaggccagctcagagccctttgacacatcgagtccccaggctggacgtcagctcgaaacagactgaatttgatctgattaatgtgaaggactggccagtctgggaaaccgcctgccacgtggaagagccaaacccgactctctgctgccacatgccgttcccatgcccggctgctgggcacctgggagagcttccagaatcctcgcagacagcccagagcctgccgctaccctcggcctgcccaccaccaagcaagcagcaagcaagatggggttctcatcagttcttcctcccacaatgtaggacctttcctttaccttccaatggataaaatagttcagagttcatagtcatattcatagacacagaatcaagcttttaacatatacatccacctctatatgttaaataaaacatcagattatcaacactgtcattacgtagaaactttggttagccaagcagtgcattgtcagttacgtcatctctaaaaatgacctgtgtctgttctctggggattgctgggtcacaggtgcccctcaccttccacagtcaggcagggaagttataggcacaaagctacgtctggaacccctttgtgccccctttgtgttcctcaaggaagcagtacctttgaagagatctctgctgcattaagtgatgaccggctacgtttcatgtcaggcttgctttgccttgtgggctactcagtgcagaacctgctgtaaccctcagttcaaaaaatggactggcaatgtgattagcgttggatgctttaccattctctttagttgttaccgtaattctgctttttcatgggagtttgaatcatggaccataacttttcagttatcagatcaactaaagaaacatttgttgttaagcctaatgtgctgacctatgtgcctgcattttttttttaatctagacatgtttggagtgagagaaagatggaaaaaagacatggggtagggacgtaagtggaaatctatagccacagcctgaagctttgaccactgcggttttcagagccctttctccacactcatttcagagcctcctatggtttgggaaggaataacacactggcccattagtaagggtgaaggctggagggatttgttgacttcttggaattatcagaggtagggtggtctttagcacaaagacttgcatgcagagatccctggcagaacacccagagtgcccgtggctcccaccccagggtctggccggtgtgctggatgcatgcccaagggtgctgggcatcactggtccttgtgaggatgcttttaaagttttatatttatgtccccaaacttggaaacaagaactctactttagcctaaccctcatgtccttttttgaattgagaaaattacaggaaatggtgcctttgaaaattagaaaacttgcttacagagctgttctaaatggtaaatcctcaatttccccaagaccggttgctctgagagtagctggtaaagaggggcgaactaaagacctgtccacctgtagctccgctcatttcttagaaaccacctgcttcccagagtgccaagccacaagtaccaggcttcgtgggcacagacacctcctgggctgggcagagtgacagtgctagaagaccccagagagagggcaagggctttgggcaagaagcactggtggtgttttagggaccgtccttctcccctacccagggaactggacctggcagggcaccgtgctcatgtggctccaaggacaagcatggcggtggccccttctgccttccaggagaggtcttgcttttgaaaccaaaatcatgttcttctaaagtgtcatcttctgccctccctgtcccaatagggaccacatcttatttgtctcaaacagggacttgtgagtacttggcaagttttgcagcctatttttgtattcttaatttggggagtaaagatgtttggtctcaaaaacctttgaggaattgccaagaatggcgagtgattgctttccttcagagaacagacacttggaatttctccttttagtgtttatatacgtgcagattaatttatatatatatatatacacacacacatatacagtataaatactcatttgattctcgtaaaacgcgcatctggcgtgtgcagttgagaaacttggtggcacatgggtgttgggggagtagcctgtgttggagggacaccagtgcactaggcagctggggcggcccaggctgaagccatctccgggtgtctgagaaaccacccagtgcctcacctccagatcctgctggcatcacctccagagccctgcatgcactggctgaagagttggtctgtggagaggattttcttggttacttgtattcacggttaatttacaacccaaacagcaaaacacagttggtggacaagttcatgcaggacctacagtgacccagccatgggcactagctcatctttcaggtggaaaagtacagtgctgcctgccctggtatgtttttcttatagatgttagccctgcccaacagccagggctacactacaaaaggcaagaatgcccatgtaaggagcccagcagtctggacagatccttcttcctctgctgttggatgagagtgagtgagtatgctctggaccttatccttgaaagatgatcaaaagcgatgatgagggaggcagtcatcacgcaggtgcttaaagggacattgtaggaggtactcaagggtttgggggcaaaaccctgaatccagccagtcgtgcacagagacacacccacactagcccagtggcagtgggggatgtgggatggcagcagccaggtatgtagccctgtcacaggacagctcactgtggttttgcacactgcctaagggttaaattgtgttgttgccttcagtagaaggcatttgtgggctgcagagttgagagttgggtgaggttagtctctcctgaagaaaaagcctataaaaagtggctaatcttatcccttttctctgtatgcagttggactcgtcagagatagtaaaatcatcttttagtgtttttttgttgctgatgtcttgtacccatttgttttttacatggggttgtagatcgagttctcaaaggtgaaaccagatgatcattctgataaaggaaatttaaatttg

SEQ ID NO: 35531 - DNA, 4140 bp, Homo sapiens
  source 1..4140: mol_type = unassigned DNA
agccgtcaaaggcagcaaatagactgaatgaaagatgagcttctgcctttatatccttctctcctgctacccaactcattgtggtgaaggaaaaagaaaacgcgggtggagactgcactatatgcttaggactgaaatgcaactgcagaagcaacatgtgaccttttagagatgcttgtgggactgcataaagtgaagagggaaactggaaaaaaacaatgaacatttatcaccatccagccactgtagataaatttgattggctgtctccctgccttcccttcacacccagtaccttccctgcctgaaatcctcattgagggcaagaactttatccccaggatctaaaccagtgctggacaatagatgctcatcccttccataggaaacagggaatgtttgtttctgtcttctggtaggagaaggattggtcccacccccagctccagggatggatcttgattgtttaagcccagtcagtgattctaacccatggaccaagaccctgccttggagattggggaacaggtgttggaagggctctattttggcaaagaatggattatttatgtgagcatatttccgcaaagctaatcccgaactcctggcctcaaatgatcttcctaccttggcttcccaaagtgctgggattacagacgtgagctgctgtgcctggccaagacttaattttgaatgacattgggactattgccaaaaatcaaatccatcttcatgttgtccacttctcagccttaattgaatagggaaaacctgctttctgcaaacaactgaaaaagctgcatttagaaactgtttctttggccctcatcgagaagctggaacttgtattgttaggccccttatgggacaagctctcaactgctgatcacccagtgattgtcaccatggccagcaagaggaaatccaccacaccatgcatgatcccagtgaagactgtggtgttgcaagatgccagcatggaggcccagcccgctgagaccttgcctgaaggaccccagcaggatctgcccccagaagcatctgctgccagcagtgaggcagcacagaaccccagcagtactgatggctctacactggccaatgggcatcggagcactttagatggctatttatattcctgtaaatactgcgatttcagatcccatgacatgacccaatttgtgggacatatgaactcagagcacacagactttaataaagacccaacctttgtatgcagtgggtgcagttttctggcaaaaacccctgaggggctttccttgcacaatgccacatgtcactccggggaagccagctttgtgtggaacgtggccaagccagacaatcatgtggttgtggagcagagcatccctgagagcaccagcactcctgacctagcgggtgagcccagtgctgaaggggctgatggacaggcagaaatcatcattaccaaaactccaatcatgaagataatgaaaggcaaagctgaagccaaaaaaattcatacactcaaggagaatgtccctagccagcctgtgggtgaggccttaccaaagctgtcgactggagaaatggaggtgagagagggggaccattccttcatcaatggggcagttccagtcagccaggcatctgccagctctgcaaaaaacccccatgccgccaacgggcccctgataggaacagtgccagttttgccagctggcatagcacagttcctctccctccagcagcagcccccagtgcatgcccaacaccatgtccaccagccactgcccacggccaaggcccttcccaaagtgatgatccccctgagcagcattccaacgtacaatgcagccatggactctaacagcttcctgaagaactccttccacaagttcccctaccccaccaaagccgagctctgctatttgactgtggtgaccaagtatccagaagaacagctcaagatctggttcacagcccaaaggctgaagcaggggatcagctggtcccctgaggagattgaggatgcccggaaaaagatgttcaatacagtcatccagtctgtgcctcagcccacaattacggttctaaataccccactcgtcgccagtgctggcaatgtccagcatctcatccaggccgctcttccaggtcacgttgtggggcagccagagggtacaggagggggacttctggtcactcagccattgatggccaatgggttgcaagcaacaagttcccctctccccctcacggtgacatccgtccccaagcagccaggtgtggcacccattaacactgtgtgttcaaatacaacgtcagctgtgaaggtggtcaatgcggcccagtcgctcctcacggcctgccccagcataacctcccaagccttccttgatgctagcatctacaaaaataagaaatctcatgaacagctgtcagctctgaaagggagcttctgtcggaaccagttcccagggcagagcgaagttgaacatctcacaaaagtgacgggcctcagtaccagagaggtgcggaaatggttcagtgatcgtagataccactgccggaacttgaagggctccagagcgatgatacctggagatcacagttccatcatcattgactctgtgccagaggtgtccttctccccatcgtccaaggtccctgaggtaacctgcattccgacaacagccacactagcaacccacccttctgccaaacgacaatcttggcaccagactcctgacttcacaccaaccaaatacaaggagagagcccctgagcagctcagagccctggagagcagttttgcacaaaaccctcttcctcttgatgaggaactggaccgcctgagaagtgaaaccaaaatgacccgacgagaaattgatagctggttttcagagagacggaaaaaagtgaatgctgaggagaccaagaaggctgaggagaatgcctctcaggaggaagaggaggctgctgaggatgagggtggagaagaggatttggccagtgagctaagggtctctggtgaaaatggctctctggaaatgcccagcagccatatcttggcagagcgcaaagtcagccccattaaaatcaacctgaagaacctgagggtcactgaagccaatggcaggaacgagattccagggctgggtgcctgtgaccctgaggatgatgagtcaaacaaactggcagagcagctcccaggcaaagtgagctgcaaaaagactgcccagcagcggcacttgctgcggcagctctttgtccagacacagtggccaagcaaccaggactatgactccatcatggcccagacgggtctgccacggccagaggtggtgcgctggtttggagatagcaggtacgcactgaagaacggccaactcaaatggtacgaagactataagcgaggcaacttcccaccagggctactggtcattgcccctggcaaccgggagctcctgcaggactattacatgacacacaagatgctgtatgaagaggacctgcagaacctctgtgacaagacccagatgagctcccagcaggtcaagcagtggtttgctgagaaaatgggggaggagaccagagccgtggcagacacaggcagtgaggaccagggccctggtactggtgagctcacagcagttcacaaagggatgggtgacacctattcagaggtgtctgagaacagtgagtcgtgggagccccgtgtccctgaggccagctcagagccctttgacacatcgagtccccaggctggacgtcagctcgaaacagactgaatttgatctgattaatgtgaaggactggccagtctgggaaaccgcctgccacgtggaagagccaaacccgactctctgctgccacatgccgttcccatgcccggctgctgggcacctgggagagcttccagaatcctcgcagacagcccagagcctgccgctaccctcggcctgcccaccaccaagcaagcagcaagcaagatggggttctcatcagttcttcctcccacaatgtaggacctttcctttaccttccaatggataaaatagttcagagttcatagtcatattcatagacacagaatcaagcttttaacatatacatccacctctatatgttaaataaaacatcagattatcaaca

SEQ ID NO: 35532 - DNA, 6296 bp, Homo sapiens; identical to SEQ ID NO: 35530
  source 1..6296: mol_type = unassigned DNA

SEQ ID NO: 35533 - DNA, 3108 bp, Homo sapiens
  source 1..3108: mol_type = unassigned DNA
ctgtgacactgccagcagcgcgcagagggagggatgggggcgggtatcggcgtaggggccctcggaaagaacggatattgctgtgacaccgcggggacgctctgaagggacgagtgtcggtgtggcaccggtgcacgctgaaggagccggcggaaccgggtggccatggggatgtgggcatcgctggacgctttgtgggagatgccggccgagaagcgtatcttcggggccgtgctgctcttttcctggacagtgtatctttgggagaccttcctagcacagcggcagagaaggatatataaaacaacaactcatgtaccaccggagttaggacagatcatggattctgaaacatttgagaaatctcgactctatcaactggataaaagcactttcagcttctggtcaggactctattcagagactgaaggcactcttattcttctctttggaggaataccttatctctggagactttctggacggttctgtggttatgctggctttggaccagaatatgagatcactcagtccctggtgtttctgctgttggctacacttttcagtgcattgactggtttgccatggagtctttataatacttttgtgatagaagaaaaacatggcttcaatcaacagactttggggttcttcatgaaagatgcaatcaagaaatttgttgtgactcagtgtattttgttgcctgtgtcttcacttctactttacattattaaaattgggggtgactatttttttatttatgcctggctgttcacattagttgtgtctctggttcttgtcacaatctatgctgattatattgcccctttatttgacaaattcacacctctgcctgagggaaagcttaaagaagaaattgaagtaatggcaaagagtattgactttcctttgacgaaggtgtatgttgtggaaggatctaaacgctcttcccacagcaatgcttatttttatggcttcttcaagaacaagcgaatagttttgtttgacactctactagaagagtactctgtactaaacaaagacatccaggaggattctggcatggaaccccgcaatgaggaagaagggaacagtgaagaaataaaagctaaagttaaaaataagaaacaaggatgtaaaaatgaggaggtactcgctgtactaggccatgaactggggcactggaagttgggacatacagtcaaaaatatcattattagccagatgaattctttcctgtgtttttttttatttgctgtattaattggtcgaaaggagctttttgctgcatttggtttttatgatagccaacccactcttattggactattgatcatcttccagtttattttttcaccttacaatgaggttctttctttttgcctaacagtcctaagccgcagatttgagtttcaagctgatgcatttgccaagaaacttgggaaggctaaagacttatattctgctttaatcaaacttaacaaagataacttgggattccctgtttctgactggttgttctcaatgtggcattattctcatcctccactgctagagagacttcaagctttgaaaactatgaagcaacactgagatgtccaggatctgtgactgaagacatttctgattatttctgtcctggcagcatgttccagctcttgatgtttttaaacttttttttagaagaaaaattaagtacagaaaagcccagatttaaatacatttaatatgtcattttaaaaatgattttaataattcatttcttaaaacactgaatgaattttgaagcttaatgtttttaaaggcatagttttatctttgacatctaatttaccatcaagttgtaaaattatttggaaaaatacagaactcgttttatttgtatacttatatggaatctgcatgtgaggtgtttgagggcatatgtttgaaagagggagcatcaccacaggaatcctttctgtgaggtggaaacagtggtcctgaatcattgtgctcacacctaacttgaaatctggtcttactttcatgctgttatgatttcacctggtgaatcagtgttttaaataagaaaggtaatagttggtaaggccaatgttatttaaatgaaagtagttagaaaaatgctctcctattctaccaaatttttaatttctttcttccctttcttgctacacagtgatcaagagtttctcatagtgctttgaagttagaaattatgtataggatattttaaatcattgagttttgtggggtttttttgtttgtttgtttcttttgttttttggaaaatccgtgtctttatctttttttcccacgtggtagatatgatcccattggaggtaaattgtagcttcttctcattcatgcagtaaataatacatcctttcactcagcagagatggccatattaaacacgttttgctatgttaaaagtggcagaacaggaaagacgaattaaaaataacattttttaagcgacataaggatgaaatactgatgaatctctgtgacattacagggaaaaaaatatagttttctatctctttcaagggcagaagagttttcatttttatttttgtaattttatctgtaagtcataaatattacttaatcaggcctgattctacttttgaaaattacagttcttgaaatgcagataatgtttactttgaaaacaaatgtcatgaatgatttccagtttttaaagctatatgtttcactgcttcatatctctgtccactttctgaatgagaacttattttgtgcctagagctctcactcactgataatgcttattaccttctgggcatttattccaaagtgggatcaactgtacgcctttggtatctgaccataaagtcttttgctccgctgacatttgggtgatgtcttcacatggaaatataataaaaataaaaatctagtttaatactgcattatttattttcctaaggctaaagaggagcagtcctatgcttttattcagcatcctttatctgtgacttcatgctctgataactgcctttccttccttctgtgcctttgaatacaaatttcagttctgcaaaagtgaaacattaaacattgccaacgcaaatgtatgta

SEQ ID NO: 35534 - DNA, 1429 bp, Homo sapiens
  source 1..1429: mol_type = unassigned DNA
gccgttgcgacggacgggtaggggaggcgaccccggcgttctgctccgcactgtggaggaggtggggaggtgttgggccagggctgaggtaggagggagtctgtccctcgacgcctcctgcgacgccagcccctgagcgatgatgcgaacgtgcgtcctactctccgcggtgctctggtgcctcacaggagtccaatgcccgcgttttaccttattcaataagaagggcttcatttatggcaagacaggacagccagacaaaatatatgtagagttacatcaaaatagtccagtccttatctgtatggattttaagctttctaaaaaagaaatagtggaccccacctacttatggattgggcctaatgaaaagacgttaacaggaaataatagaataaatataactgaaactggacagctgatggtgaaagattttttggagcctttgtctggactttacacatgtactctttcttataagactgttaaagcagaaactcaagaagaaaaaacagtcaaaaagagatatgactttatggtctttgcctatcgggaacctgattattcatatcagatggctgtacgttttaccacaaggtcttgtatagggagatacaatgatgtattctttagagtgctgaagaaaatcttggatagtctaatttctgatttgtcatgccatgtcatagagccatcatataaatgccattctgttgaaattccagaacatggcctcatacatgagctatttatagcatttcaagttaatccttttgcgccggggtggaaaggtgcttgcaatggatctgttgactgtgaagataccactaatcataatatcctccaggcaagagatcgaatagaagacttttttcggagccaagcatatattttctaccataactttaataaaactctaccagcaatgcattttgtggaccacagtttgcaagtagtacgtctggatagctgtcgaccaggctttggaaaaaatgaacgtctacacagtaattgcgctagctgttgtgtggtttgtagtcctgcgacttttagtcctgatgttaatgtaacttgtcagacctgcgtttccgtccttacctatggagctaaatcttgcccacaaacttcaaacaaaaatcagcaatatgaagattagaggtgaaagcattgttacttacttgtggaagtcggggacataagatgattttcacatcccagagcatcatagatagttccattaagtaaaatcagtaagaccaaaccactggaaaacatgcattttggaaactttaaaataaatggttaacatggcatttctaagaaggcatttaatccagtatctctagtgtacaaaggaaacttgaagttttaatggattatttttaatgaaatgttttattgtttacaaacggtatgttgctgtgtacct

SEQ ID NO: 35535 - DNA, 2177 bp, Homo sapiens
  source 1..2177: mol_type = unassigned DNA
gccgttgcgacggacgggtaggggaggcgaccccggcgttctgctccgcactgtggaggaggtggggaggtgttgggccagggctgaggtaggagggagtctgtccctcgacgcctcctgcgacgccagcccctgagcgatgatgcgaacgtgcgtcctactctccgcggtgctctggtgcctcacaggagacaaaatatatgtagagttacatcaaaatagtccagtccttatctgtatggattttaagctttctaaaaaagaaatagtggaccccacctacttatggattgggcctaatgaaaagacgttaacaggaaataatagaataaatataactgaaactggacagctgatggtgaaagattttttggagcctttgtctggactttacacatgtactctttcttataagactgttaaagcagaaactcaagaagaaaaaacagtcaaaaagagatatgactttatggtctttgcctatcgggaacctgattattcatatcagatggctgtacgttttaccacaaggtcttgtatagggagatacaatgatgtattctttagagtgctgaagaaaatcttggatagtctaatttctgatttgtcatgccatgtcatagagccatcatataaatgccattctgttgaaattccagaacatggcctcatacatgagctatttatagcatttcaagttaatccttttgcgccggggtggaaaggtgcttgcaatggatctgttgactgtgaagataccactaatcataatatcctccaggcaagagatcgaatagaagacttttttcggagccaagcatatattttctaccataactttaataaaactctaccagcaatgcattttgtggaccacagtttgcaagtagtacgtctggatagctgtcgaccaggctttggaaaaaatgaacgtctacacagtaattgcgctagctgttgtgtggtttgtagtcctgcgacttttagtcctgatgttaatgtaacttgtcagacctgcgtttccgtccttacctatggagctaaatcttgcccacaaacttcaaacaaaaatcagcaatatgaagattagaggtgaaagcattgttacttacttgtggaagtcggggacataagatgattttcacatcccagagcatcatagatagttccattaagtaaaatcagtaagaccaaaccactggaaaacatgcattttggaaactttaaaataaatggttaacatggcatttctaagaaggcatttaatccagtatctctagtgtacaaaggaaacttgaagttttaatggattatttttaatgaaatgttttattgtttacaaacggtatgttgctgtgtacctaagagtatagtaaggtcaagaagagtatcaaagtataataaaataaaaattgtatactctccatatatttatttgtttggaatcactcttgtgtgatataaaggcgtgtatattatctttgtattagaaccaaaaaagttatttattttggtccctatgattttattttttaagataaattaatatactgtattttttaaagtataggtttaggtttacagaataatagagcagataatatatagagttccatacacccactgcaccccataccctcattcctccttacacaatttctcctattattaagatggtgcattagtgtggcacatttgttacaaatgatgaaccaatattaatttattattaattatagcccatagttcacattaagattcattgtgttgtaaggttatgtgggttttgacaaattcataatggcatgtgtgcaccattgcagtctcatacagaatagtttcaccaccctcaaaatcctgtgcttcacttatttatccctcccgccgtgccctggcaaccactgatctttttactgtctctacagttttgccttttccaaaatgtcatgtagttggttggagttatgcagtatgtagactttttagactggcttctttcacttagcaatatgcatttaaggttcctccatgtctttttgtgacttgatagctcattttttattgctgaataatgttcattgtatggatatagcatagtatgtttatccattcgcccattaaaggaaatcttgattgcttccagttttcagtgattaaaaataaagccgctataaaca

SEQ ID NO: 35536 - DNA, 1954 bp, Homo sapiens
  source 1..1954: mol_type = unassigned DNA
atggcaggaggctcagccacgacctggggttaccctgtggccctgctactgctggttgccaccctggggctgggtaggtggctccagcccgaccctggcctcccaggcctccggcacagctacgactgtgggatcaagggaatgcagctgctggtgttccccaggccaggccagactctccgcttcaaggtggtggatgaatttgggaaccgatttgatgtcaacaactgctccatctgctaccactgggtcacctccaggccgcaggagcctgcagtcttctcggccgattacagaggctgccacgtgctggagaaggatgggcgtttccacctgagggtgttcatggaggctgtgctgcccaatggtcgtgtggatgtggcacaagacgctactctgatctgtcccaaacctgacccctcccggactctggactcccagctggcaccacccgccatgttctctgtctcaaccccacaaaccctttccttcctccccacctctggccatacctcccaaggctctggccatgcctttcccagcccactggacccagggcacagctctgtccacccaacccctgctttaccatcccctggacctggacctaccctcgccaccctggctcaaccccactggggcaccttggaacactgggatgtgaacaaacgagattacataggtacccacctgagccaggagcagtgccaggtggcctcagggcacctcccctgcatcgtgagaagaacttcaaaagaagcctgtcagcaggctggctgctgctatgacaacaccagagaggttccctgttactatggcaacacagctactgtccagtgcttcagagatggctacttcgtcctcgtagtgtcccaagaaatggccttgacacacaggatcacactggccaacatccacctggcctatgcccccaccagctgctccccaacacagcacacggaagctttcgtggtcttctacttccctctcacccactgtggaaccacaatgcaggtggctggcgaccagctcatctatgagaactggctggtgtctggcatccacatccaaaaggggccacagggttccatcacgcgggacagcaccttccagcttcatgtgcgctgtgtcttcaacgccagtgacttcctgcccattcaggcatccattttcccacccccatcgcctgctcctatgacccagcccggccccctgcggcttgagctgcggattgccaaagacgagaccttcagctcgtactatggggaggatgactatcccatcgtgaggctgctccgagaaccagtccatgtggaggtccggcttctgcagaggacagaccccaacctggtcctgctgctgcaccagtgctggggcgctcccagtgccaaccccttccagcagccccagtggcccatcctgtcagacggatgccctttcaagggcgacagctacagaacccaaatggtagccttggacggggccacacctttccagtcgcactaccagcgattcactgttgctaccttcgccctcctggactcaggctcccagagagccctcagaggactggtttacttgttctgcagcacctctgcctgccacacctcagggctggagacttgctccactgcatgtagcactggcactacaagacagcgacgatcctcaggtcaccgtaatgacactgccaggccccaggacatcgtgagctctccggggccagtgggctttgaggattcttatgggcaggagcccacacttgggcccacagactccaatgggaactccagcctgagacctctcctttgggcggtccttttgctgccagctgttgccctggtccttgggtttggtgtctttgtgggcctgagccagacctgggcccagaagctctgggaaagcaacagacagtgaatgggcccaataaacaatcatttcaaacctactgaaa

SEQ ID NO: 35537 - DNA, 1569 bp, Homo sapiens
  source 1..1569: mol_type = unassigned DNA
ggattctgaagcggaaggagagctgtctcctccagctggtggaaactgcttcctatcctcctcctggagagcccaactcccagagcagatggcagaggagacctttagatggggcggtcacatgtcccagctggccttataacaactgtcccagggaactattaatagatctaccttacacacatctggactttcagatctgaaacgccctggtttggatgacagattatatggtgaacctacttttagagtgtagttcaactcatttgtcacatggatgagaaaatcagtccataaagggtttgctggggccaacaccagcctaagtggagagtaagcgtccattctcctagaccggcacttaaagcctggctgtcacccagccatcccgtctctgtgctggatggacaccaaaccccaaggccctcatctgcctttgtcccagctactgtccagtgcttcagagatggctacttcgtcctcgtagtgtcccaagaaatggccttgacacacaggatcacactggccaacatccacctggcctatgcccccaccagctgctccccaacacagcacacggaagctttcgtggtcttctacttccctctcacccactgtggaaccacaatgcaggtggctggcgaccagctcatctatgagaactggctggtgtctggcatccacatccaaaaggggccacagggttccatcacgcgggacagcaccttccagcttcatgtgcgctgtgtcttcaacgccagtgacttcctgcccattcaggcatccattttcccacccccatcgcctgctcctatgacccagcccggccccctgcggcttgagctgcggattgccaaagacgagaccttcagctcgtactatggggaggatgactatcccatcgtgaggctgctccgagaaccagtccatgtggaggtccggcttctgcagaggacagaccccaacctggtcctgctgctgcaccagtgctggggcgctcccagtgccaaccccttccagcagccccagtggcccatcctgtcagacggatgccctttcaagggcgacagctacagaacccaaatggtagccttggacggggccacacctttccagtcgcactaccagcgattcactgttgctaccttcgccctcctggactcaggctcccagagagccctcagaggactggtttacttgttctgcagcacctctgcctgccacacctcagggctggagacttgctccactgcatgtagcactggcactacaagacagcgacgatcctcaggtcaccgtaatgacactgccaggccccaggacatcgtgagctctccggggccagtgggctttgaggattcttatgggcaggagcccacacttgggcccacagactccaatgggaactccagcctgagacctctcctttgggcggtccttttgctgccagctgttgccctggtccttgggtttggtgtctttgtggcctgagccagacctgggcccagaagctctgggaaagcaacagacagtgaatgggcccaataaacaatcatttcaaacctactg

SEQ ID NO: 35538 - DNA, 2268 bp, Homo sapiens
  source 1..2268: mol_type = unassigned DNA
atggcgtgcaggcagagaggaggctcttggagtccctcaggctggttcaatgcaggctggagcacctacaggtcgatttctctcttcttcgcccttgtgacttcagggaactccatagatgtttctcagttggtaaatcctgcctttccaggcactgtcacttgcgatgaaagggaaataacagtggagttcccaagcagtcctggcaccaagaaatggcatgcatctgtggtggatcctcttggtctcgacatgccgaactgcacttacatcctggacccagaaaagctcaccctgagggctacctatgataactgtaccaggagagtgcatggtggacaccagatgaccatcagagtcatgaacaacagtgctgccttaagacacggagctgtcatgtatcagttcttctgtccagctatgcaagtagaagagacccaggggctttcagcatctacaatctgccagaaggatttcatgtctttttccttgccacgggtcttctctggcttggctgacgacagtaaggggaccaaagttcagatgggatggagcattgaggttggtgatggtgcaagagccaaaactctgaccctgccagaggccatgaaggaaggcttcagcctcttgattgacaaccacaggatgaccttccatgtgccattcaatgccactggagtgactcactatgtgcaaggtaacagtcatctctacatggtgtctctgaagcttacatttatatctcctggacagaaggtgatcttctcttcacaagctatttgtgcaccagatcctgtgacctgcaatgccacacacatgactctcaccataccagagtttcctgggaagcttaagtctgtgagctttgaaaaccagaacattgatgtgagccagctgcatgacaatggaattgatctagaagcaacaaatggcatgaaattgcatttcagcaaaactctgctcaaaacgaaattatctgaaaaatgcctactccatcagttctacttagcttcactcaagctgacctttctccttcggccagagacagtatccatggtgatctatcctgagtgtctctgtgagtcacccgtttctatagttacaggggagctgtgcacccaggatgggtttatggacgtcgaggtctacagctaccaaacacaaccagctcttgacctgggtactctgagggtgggaaactcatcctgccagcctgtctttgaggctcagtctcaggggctggtacggttccacatacccctgaatggatgtggaacgagatataagttcgaagatgataaagtcgtctatgaaaacgaaatacatgctctctggacggattttcctccaagcaaaatatctagagacagtgagttcagaatgacagtgaagtgttcttatagcaggaatgacatgctactaaacatcaacgttgaaagccttactcctccagtggcctcagtgaagttgggtccatttaccttgatcctgcaaagctacccagataattcctaccaacaaccttatggggaaaacgagtaccctctagtgagattcctccgccaaccaatttacatggaagtgagagtcctaaacagggatgaccccaacatcaagctggtcttagatgactgctgggcgacgtccaccatggatccagactctttcccccagtggaacgttgtcgtggatggctgtgcatatgacctggacaactaccagaccaccttccatccagtcggctcctctgtgacccatcctgatcactatcagaggtttgacatgaaggcttttgcctttgtatcagaagcccacgtgctctctagcctggtctacttccactgcagtgccttaatctgtaatcgactctcccctgactccccactgtgttctgtgacctgccctgtgtcctctaggcacaggcgagccacaggggccactgaagcagagaaaatgacagtcagcctcccaggacccattctcctgttgtcagatgactcctcattcagaggtgtcggctcatctgatctaaaagcaagtgggagcagtggggagaagagtaggagtgaaacaggggaggaggttggctcacgaggtgctatggacaccaaagggcacaagactgctggagatgttggttccaaagctgtggctgctgtggctgcctttgcaggtgtggtggcaactctaggcttcatctactacctgtacgagaaaaggactgtgtcaaatcactaaatgggcttctaaataaagcagtcaaaataa

SEQ ID NO: 35539 - DNA, 1483 bp, Homo sapiens
  source 1..1483: mol_type = unassigned DNA
ctgcgcagagcgcgcccgcgtcctcgtggtggccgcagttgtgcacaccccagcccaggctctggcaggctgccaggcggggctcgccgccttcgcagtgcacgttgtccagcaggatgtgtccggtgccatagccgaagaaggcgttggtggtggcggccatggccgccccgcagcccagctgacgacagaccacagcggcatccggcagcccccagtcgtcgtcacacacggtgccccacaggccactgtgcaggatctccactcggccctgacacagggtggagccagccatcctgagacgtccgtacagcccgtactggtggagtgtcaggaggccactctgatggtcatggtcagcaaagacctttttggcaccgggaagctcatcagggctgctgacctcaccttgggcccagaggcctgtgagcctctggtctccatggacacagaagatgtggtcaggtttgaggttggactccacgagtgtggcaacagcatgcaggtaactgacgatgccctggtgtacagcaccttcctgctccatgacccccgccccgtgggaaacctgtccatcgtgaggactaaccgcgcagagattcccatcgagtgccgctaccccaggcagggcaatgtgagcagccaggccatcctgcccacctggttgcccttcaggaccacggtgttctcagaggagaagctgactttctctctgcgtctgatggaggagaactggaacgctgagaagaggtcccccaccttccacctgggagatgcagcccacctccaggcagaaatccacactggcagccacgtgccactgcggttgtttgtggaccactgcgtggccacaccgacaccagaccagaatgcctccccttatcacaccatcgtggacttccatggctgtcttgtcgacggtctcactgatgcctcttctgcattcaaagttcctcgacccgggccagatacactccagttcacagtggatgtcttccactttgctaatgactccagaaacatgatatacatcacctgccacctgaaggtcaccctagctgagcaggacccagatgaactcaacaaggcctgttccttcagcaagccttccaacagctggttcccagtggaaggctcggctgacatctgtcaatgctgtaacaaaggtgactgtggcactccaagccattccaggaggcagcctcatgtcatgagccagtggtccaggtctgcttcccgtaaccgcaggcatgtgacagaagaagcagatgtcaccgtggggccactgatcttcctggacaggaggggtgaccatgaagtagagcagtgggctttgccttctgacacctcagtggtgctgctgggcgtaggcctggctgtggtggtgtccctgactctgactgctgttatcctggttctcaccaggaggtgtcgcactgcctcccaccctgtgtctgcttccgaataaaagaagaaagcaata

SEQ ID NO: 35540 - DNA, 1348 bp, Homo sapiens
  source 1..1348: mol_type = unassigned DNA
ccagcatcccacgggtataagatggccagaggcggctgcctgctgctctgcaggtaccatggagctgagctataggctcttcatctgcctcctgctctggggtagtactgagctgtgctacccccaacccctctggctcttgcagggtggagccagccatcctgagacgtccgtacagcccgtactggtggagtgtcaggaggccactctgatggtcatggtcagcaaagacctttttggcaccgggaagctcatcagggctgctgacctcaccttgggcccagaggcctgtgagcctctggtctccatggacacagaagatgtggtcaggtttgaggttggactccacgagtgtggcaacagcatgcaggtaactgacgatgccctggtgtacagcaccttcctgctccatgacccccgccccgtgggaaacctgtccatcgtgaggactaaccgcgcagagattcccatcgagtgccgctaccccaggcagggcaatgtgagcagccaggccatcctgcccacctggttgcccttcaggaccacggtgttctcagaggagaagctgactttctctctgcgtctgatggaggagaactggaacgctgagaagaggtcccccaccttccacctgggagatgcagcccacctccaggcagaaatccacactggcagccacgtgccactgcggttgtttgtggaccactgcgtggccacaccgacaccagaccagaatgcctccccttatcacaccatcgtggacttccatggctgtcttgtcgacggtctcactgatgcctcttctgcattcaaagttcctcgacccgggccagatacactccagttcacagtggatgtcttccactttgctaatgactccagaaacatgatatacatcacctgccacctgaaggtcaccctagctgagcaggacccagatgaactcaacaaggcctgttccttcagcaagccttccaacagctggttcccagtggaaggctcggctgacatctgtcaatgctgtaacaaaggtgactgtggcactccaagccattccaggaggcagcctcatgtcatgagccagtggtccaggtctgcttcccgtaaccgcaggcatgtgacagaagaagcagatgtcaccgtggggccactgatcttcctggacaggaggggtgaccatgaagtagagcagtgggctttgccttctgacacctcagtggtgctgctgggcgtaggcctggctgtggtggtgtccctgactctgactgctgttatcctggttctcaccaggaggtgtcgcactgcctcccaccctgtgtctgcttccgaataaaagaagaaagcaata

SEQ ID NO: 35541 - DNA, 1284 bp, Homo sapiens
  source 1..1284: mol_type = unassigned DNA
atggagctgagctataggctcttcatctgcctcctgctctggggtagtactgagctgtgctacccccaacccctctggctcttgcagggtggagccagccatcctgagacgtccgtacagcccgtactggtggagtgtcaggaggccactctgatggtcatggtcagcaaagacctttttggcaccgggaagctcatcagggctgctgacctcaccttgggcccagaggcctgtgagcctctggtctccatggacacagaagatgtggtcaggtttgaggttggactccacgagtgtggcaacagcatgcaggtaactgacgatgccctggtgtacagcaccttcctgctccatgacccccgccccgtgggaaacctgtccatcgtgaggactaaccgcgcagagattcccatcgagtgccgctaccccaggcagggcaatgtgagcagccaggccatcctgcccacctggttgcccttcaggaccacggtgttctcagaggagaagctgactttctctctgcgtctgatggaggagaactggaacgctgagaagaggtcccccaccttccacctgggagatgcagcccacctccaggcagaaatccacactggcagccacgtgccactgcggttgtttgtggaccactgcgtggccacaccgacaccagaccagaatgcctccccttatcacaccatcgtggacttccatggctgtcttgtcgacggtctcactgatgcctcttctgcattcaaagttcctcgacccgggccagatacactccagttcacagtggatgtcttccactttgctaatgactccagaaacatgatatacatcacctgccacctgaaggtcaccctagctgagcaggacccagatgaactcaacaaggcctgttccttcagcaagccttccaacagctggttcccagtggaaggctcggctgacatctgtcaatgctgtaacaaaggtgactgtggcactccaagccattccaggaggcagcctcatgtcatgagccagtggtccaggtctgcttcccgtaaccgcaggcatgtgacagaagaagcagatgtcaccgtggggactgatcttcctggacaggaggggtgaccatgaagtagagcagtgggctttgccttctgacacctcagtggtgctgctgggcgtaggcctggctgtggtggtgtccctgactctgactgctgttatcctggttctcaccaggaggtgtcgcactgcctcccaccctgtgtctgcttccgaataaaagaagaaagc

SEQ ID NO: 35542 - DNA, 1799 bp, Homo sapiens
  source 1..1799: mol_type = unassigned DNA
gaattcccctttctgaaggcatcccacctgagtgtcacaaagatgtgcagctgaaaacaagcctgacttctgtatataaaggaatctgggcaggcagaccctcggctcttgggagaggaggcggagagtctgcagccggcaggaactcctggtagcattatgtggctgctgcggtgcgttttgctgtgtgtttcattatctcttgctgtgagtggccagcataagcctgaggcaccagattattccagtgtgctccactgtgggccgtggagcttccagtttgctgtaaacctcaaccaggaggcaacgtctcctcctgtactaatagcttgggacaaccaagggctgctgcacgagctgcagaatgactccgactgtggcacctggataagaaaaggtccaggcagctccgtggtgttggaggcaacctatagcagctgctatgtcactgagtgggactcccactacatcatgccagttggagttgaaggagcaggcgcggctgaacacaaggtggttacagagaggaagctgctcaagtgtcctatggatcttctagcccgagatgctccagatactgactggtgtgactccatcccagcacgggacagactgccatgtgcaccttcacccatctctcgaggagactgtgaagggctaggctgttgttatagctctgaagaggtgaattcctgctactatggaaacactgtgaccttgcattgtacccgagagggccatttctctattgctgtgtctcggaacgtgacctcgccaccactgctcttggattctgtgcgcttggcccttaggaatgacagtgcgtgtaaccctgtgatggcaacacaagcttttgttctgttccagtttccatttacttcctgtggcaccacaagacagatcactggagaccgagcagtatatgaaaatgaactggtggcaactagggatgtgaaaaatgggagccgtggctctgtcactcgtgacagcatcttcaggctccatgtcagctgcagctactcagtaagtagcaactctctcccaatcaatgtccaggttttcactctcccaccaccctttcctgagacccagcctggacccctcactctggaacttcagattgccaaagataaaaactatggctcttactacggtgttggtgactacccagtggtgaagttgcttcgggatcccatttacgtggaggtctccatccttcacagaacagacccctacctggggctgctcctacaacagtgttgggcaacacccagcactgaccccctgagtcagccacagtggcccatcctggtaaagggctgcccctacattggagacaactatcagacccagctgatccctgtccagaaagccttggatcttccatttccctctcaccaccagcgcttcagcatcttcaccttcagctttgtgaaccctacagtggagaaacaggccctcaggggaccggtgcatctgcactgcagcgtgtcagtctgccagcctgctgagacaccatcctgtgtggtgacctgtcctgatctcagtcgaagaagaaattttgacaacagttctcagaacactactgctagtgtttctagcaaaggccccatgattctactccaagccactaaggaccctccagaaaagctccgtgttcctgtagactcgaaagttctgtgggtggcaggcctttctgggaccttaatccttggagccttgttagtatcctacttggctgtcaagaaacagaagagttgcccagaccaaatgtgtcaataaaaccagagtgtattccc

SEQ ID NO: 35543 - DNA, 2992 bp, Homo sapiens
  source 1..2992: mol_type = unassigned DNA
agtgcgcccctcgccttccgggcggcggtctgaggcccgcgagactccgtttcccggcaggcctcgcgtcaagacggccggcgggacgggagctgcggcgctggctacgagagtgacccagtcagcgttggttcccgtcttggccatggcctcgttcgtgacagaagttttggcacactccgggaggctggaaaaggaggatctggggacccggatcagccgcctgacccggcgggtggaggagatcaagggtgaggtgtgcaatatgattagcaagaagtacagtgaattcctgcctagcatgcagagcgcgcagggcctgattacccaggtggataagctatctgaagacattgacctgctgaaatccaggatagagagtgaggtccgccgggatcttcacgtatcaaccggtgaatttacagacttaaagcagcagttggaaagagactcagttgtcctaagtttgcttaaacagttgcaggagttttccactgctattgaagaatataattgtgcattaacagagaagaagtatgtcactggtgctcagcgtctggaagaggcacagaaatgcttgaagttattaaaatccagaaaatgctttgatttaaaaatattgaaatctctcagcatggagctcacaatacagaaacagaacatactttatcaccttggagaagagtggcagaagctgattgtatggaagttcccaccatcaaaagataccagcagtttggaatcttacctacaaactgaacttcatttatacactgaacaatcgcacaaagaggagaagacccctatgccacccatcagttctgtcctcttggcattttctgttcttggagaactacacagcaagcttaaatcatttggtcagatgctgctgaagtatatccttaggccgctggcatcttgcccatcccttcatgctgtgatagaaagccagcctaacatagttattattcgttttgaatctataatgactaacttggaatatccatcaccatctgaagtttttacaaagatcagactggtactagaagtgctccagaaacagcttctagatttgccacttgacactgacctggaaaatgaaaaaacatctactgtcccattggctgagatgcttggagacatgatctgggaggacttgtctgagtgcctcatcaaaaactgtttggtttattcgattccaacaaatagcagcaaattacagcaatatgaagagatcatacagtccactgaagaatttgaaaatgccctaaaggaaatgagatttttaaaaggagatactacagatttgctgaaatacgctcgtaacatcaattctcattttgcaaacaaaaagtgccaggatgtgattgtggcagccagaaatctaatgacctcagaaattcataacactgtgaagattattcctgattctaagataaatgtgccagagttacccactcctgatgaggataacaaactggaagtacagaaagtatccaatactcagtaccacgaagtgatgaatttagagcctgaaaatacattggaccaacattccttttccttgcccacatgccgtatcagtgagtctgtgaagaaattaatggaactcgcctatcagactttactagaggcaacaaccagtagtgatcaatgtgctgttcaacttttctactcagtgaggaatatcttccatttgttccatgatgttgtaccaacatatcacaaggagaaccttcaaaaacttccccagttggctgctattcatcacaacaactgtatgtacattgctcaccacttgctgaccctcgggcatcagttcagattgcgtcttgcccccattctttgtgatggcactgctacttttgtggatcttgtacctggcttcaggagacttgggacagaatgctttttggcccaaatgcgggcacagaaaggtgaacttctggaaagattatcaagtgctaggaacttttcaaatatggacgatgaagagaattattctgcagcaagtaaagcagtccggcaggtactgcaccaactaaagagacttggaattgtgtggcaggatgtcctgccagtgaatatatattgcaaggctatggggactttactcaatacagcaatttctgaggtcattggcaaaattactgccctagaggacatatctactgaagatggtgataggttatattccttatgcaaaacagtgatggatgaaggaccccaagtatttgcacctttatctgaagaaagcaagaacaagaaatatcaagaagaggttccagtctatgtgccaaaatggatgccattcaaggaattgatgatgatgctacaagccagcttgcaagaaattggggatcggtgggcagatggaaaaggacccctggcagctgcgttctcttccagtgaagtaaaagctttaattcgtgccttgtttcagaacacagaaagaagagcagctgcccttgctaaaattaaatagctccatcttcttaagaaagctatgtcttgaatatgtggattcttcccttggcataattactcccttaaagacttctttgaatcgcccattggttttggtgaaccagtacatcttggaagtttgactttacagaagaacgtcttacctcctggcctgtacgaggctttgtttaagaactgtttattaagataaattgtcaagtaaagcacctcaattcattgactttctagccatcttcctttgattagctaacaaactgtcaggcagcattatttcatgctgcttccagagccctctgggagctatatacattgtaaatgcaggccctagctttggaacgaggaattgggagattccaggagtcagggtagagaatttctgagcaaatcggagatattttaggggtgtggaggaggggaagggaggaatgggccaccatatttggccttacaggaattaaggagacttcctgtaatatttctttccaataaatattgctttttacaa

SEQ ID NO: 35544 - DNA, 2735 bp, Homo sapiens
  source 1..2735: mol_type = unassigned DNA
gtcagcgttggttcccgtcttggccatggcctcgttcgtgacagaagttttggcacactccgggaggctggaaaaggaggatctggggacccggatcagccgcctgacccggcgggtggaggagatcaagggtgaggtgtgcaatatgattagcaagaagtacagtgaattcctgcctagcatgcagagcgcgcagggcctgattacccaggtggataagctatctgaagacattgacctgctgaaatccaggatagagagtgaggtccgccgggatcttcacgtatcaaccggtgaatttacagacttaaagcagcagttggaaagagactcagttgtcctaagtttgcttaaacagttgcaggagttttccactgctattgaagaatataattgtgcattaacagagaagaagtatgtcactggtgctcagcgtctggaagaggcacagaaatgcttgaagttattaaaatccagaaaatgctttgatttaaaaatattgaaatctctcagcatggagctcacaatacagaaacagaacatactttatcaccttggagaagagtggcagaagctgattgtatggaagttcccaccatcaaaagataccagcagtttggaatcttacctacaaactgaacttcatttatacactgaacaatcgcacaaagaggagaagacccctatgccacccatcagttctgtcctcttggcattttctgttcttggagaactacacagcaagcttaaatcatttggtcagatgctgctgaagtatatccttaggccgctggcatcttgcccatcccttcatgctgtgatagaaagccagcctaacatagttattattcgttttgaatctataatgactaacttggaatatccatcaccatctgaagtttttacaaagatcagactggtactagaagtgctccagaaacagcttctagatttgccacttgacactgacctggaaaatgaaaaaacatctactgtcccattggctgagatgcttggagacatgatctgggaggacttgtctgagtgcctcatcaaaaactgtttggtttattcgattccaacaaatagcagcaaattacagcaatatgaagagatcatacagtccactgaagaatttgaaaatgccctaaaggaaatgagatttttaaaaggagatactacagatttgctgaaatacgctcgtaacatcaattctcattttgcaaacaaaaagtgccaggatgtgattgtggcagccagaaatctaatgacctcagaaattcataacactgtgaagattattcctgattctaagataaatgtgccagagttacccactcctgatgaggataacaaactggaagtacagaaagtatccaatactcagtaccacgaagtgatgaatttagagcctgaaaatacattggaccaacattccttttccttgcccacatgccgtatcagtgagtctgtgaagaaattaatggaactcgcctatcagactttactagaggcaacaaccagtagtgatcaatgtgctgttcaacttttctactcagtgaggaatatcttccatttgttccatgatgttgtaccaacatatcacaaggagaaccttcaaaaacttccccagttggctgctattcatcacaacaactgtatgtacattgctcaccacttgctgaccctcgggcatcagttcagattgcgtcttgcccccattctttgtgatggcactgctacttttgtggatcttgtacctggcttcaggagacttgggacagaatgctttttggcccaaatgcgggcacagaaaggtgaacttctggaaagattatcaagtgctaggaacttttcaaatatggacgatgaagagaattattctgcagcaagtaaagcagtccggcaggtactgcaccaactaaagagacttggaattgtgtggcaggatgtcctgccagtgaatatatattgcaaggctatggggactttactcaatacagcaatttctgaggtcattggcaaaattactgccctagagtgatggatgaaggaccccaagtatttgcacctttatctgaagaaagcaagaacaagaaatatcaagaagaggttccagtctatgtgccaaaatggatgccattcaaggaattgatgatgatgctacaagccagcttgcaagaaattggggatcggtgggcagatggaaaaggacccctggcagctgcgttctcttccagtgaagtaaaagctttaattcgtgccttgtttcagaacacagaaagaagagcagctgcccttgctaaaattaaatagctccatcttcttaagaaagctatgtcttgaatatgtggattcttcccttggcataattactcccttaaagacttctttgaatcgcccattggttttggtgaaccagtacatcttggaagtttgactttacagaagaacgtcttacctcctggcctgtacgaggctttgtttaagaactgtttattaagataaattgtcaagtaaagcacctcaattcattgactttctagccatcttcctttgattagctaacaaactgtcaggcagcattatttcatgctgcttccagagccctctgggagctatatacattgtaaatgcaggccctagctttggaacgaggaattgggagattccaggagtcagggtagagaatttctgagcaaatcggagatattttaggggtgtggaggagggga

SEQ ID NO: 35545 - DNA, 3183 bp, Homo sapiens
  source 1..3183: mol_type = unassigned DNA
agtcgaggtatcttctccccaaccactgctcttattttaattattgcagacggaagttgaagactattgacatagtaaatagctctgggtggcttgaaacgaaagtttaactttgcggacaaacaggacttattgtagggggtggtcaaaatagtcccggcggggcggggccatgacccctgacgtcgccggtccggcgcgcagttcagtttggcggttccggtaccgctctcacattggggcgggatgtgggagcggctgaactgcgcagcagaggacttttattctcgtctccttcagaaatttaatgaagaaaagaaaggaatccgtaaagacccatttctctatgaggctgatgtccaagtgcagttgatcagcaaaggccaaccaaaccctttgaaaaatattctaaatgaaaatgacatagtattcatagtggaaaaagtgcctttagaaaaggaagaaacaagtcatattgaagaacttcaatctgaagaaactgccatatctgatttctctactggcgaaaatgttggaccacttgctttaccagttgggaaggcaaggcagttaattggactttacaccatggctcacaatcctaatatgacccatttgaagattaatctgccagttactgcccttcctcccctttgggtaagatgtgacagttcagatcctgaaggtacttgttggctaggagctgagcttatcacaacaaacaacagcattacaggaattgtcttatatgtggtcagttgtaaagctgataaaaattattctgtaaatcttgaaaacctaaaaaatttacacaagaaaagacatcacttgtctactgtaacatccaaaggctttgcccagtatgagctctttaagtcctctgccttggatgatacaatcacagcatcacaaactgcgatcgctttggatatttcctggagtcctgtggatgagattcttcaaatccctccactctcttcaactgcaactctgaatattaaagtggaatcaggagagcccagaggtcctttgaatcatctctacagagaactgaaatttcttcttgttttggctgatggtttgaggactggtgtcactgaatggctcgagcccctggaagcaaaatctgctgttgaacttgttcaggaatttctgaatgacttaaataagctggatggatttggtgattctacaaaaaaagacactgaggttgagaccttgaagcatgacactgctgcagtcgatcgttccgtcaagcgtcttttcaaagttcggagtgatcttgattttgctgagcaactgtggtgcaaaatgagcagtagtgtgatttcataccaagacttggtgaagtgtttcacattgatcatccagagtctacaacgtggtgatatacagccatggctccatagtggaagtaacagtttactaagtaagctcattcatcagtcttatcatggaaccatggacacagtttctctcagtgggactattccagttcaaatgcttttggaaattggtttggacaaactaaagaaagattatatcagttttttcataggtcaggaacttgcatctttgaatcatttggaatacttcattgctccatcagtagatatacaagaacaggtttatcgtgtccaaaaactccaccatattctagaaatattagtcagttgcatgcctttcattaaatctcaacatgaactcctcttttctttaacacagatctgcataaagtattacaaacaaaatcctcttgatgagcaacacatttttcagctgccagtcagaccaactgctgtaaagaacttatatcaaagtgagaagccacagaaatggagagtggaaatatatagtggtcaaaagaagattaagacagtttggcaactgagtgacagctcacccatagaccatctgaattttcacaaacctgatttttcggaattaacactaaacggtagcctggaagaaaggatattctttactaacatggttacctgcagccaggtgcatttcaagtgaagtgtgctgatgaagtcctctataagcacaagccaaaaagagaaagagaaaaaaaggtaattattgtagaacctgaaaacagcaatgtatggaaaccctcaaagcagaaaagggaggaagatcctgaagattctcttatgaagctccaaaattgataatcctgtctcagctctgcctcctcaggaggagcattagtagaacagcagtgatgaggacacagagggagcagacagtgggtaccacgatctccgtaaccatttgcatgtgacttagcaagggctctgaaatgacaaagagaacgagcaccacaaatgagaacaggatcattttagtaaatacagctttatcccaaaagctttaactgtattgggaaaacttaaaaaatagcatcctcaaattttctgattcttatttgccatgaaatagaacttagtaaattaaatgttatttgaaaatgttataagagctttgtaaatatttcagaaaatatgggataaatgcctgaatttggttcttctacaggtgctataataaagtccatctctcaatacttatactttctaaattcatctcagaatattagcagccatattccacagttcctataatttttactgggggggatttgtgataggaaagtccttgggaaacatttccaatctttcaaaatattattgtgtatcttaagaagtataggaacttgtatgttgaaatgttgtatggtagttcttgtatagttaaataataatctttttaagagttaatgataagcatatgttatgtgcattattaataaaatagtggccacttaggtaatacccacttttatcttgtgtgctgggtactctggttactgagataaataaggcactggacatcctcacgtggagttcacaggctcatcagtgaattctgtaccacatttcaaccttgtttattttagtttaatggaatatacattcttagtattgcctgattatttaaatttgttgagggggattgcatgttgctttattggcctgtaaaaatagctagtttggtaagatttggtctcgcaccttccatctttgctaccacattaaagatgagcttgttaaaaaggaaagcatatttctctgattgcccttatggagaaataaagataaaattcaaagaaacaaa

SEQ ID NO: 35546 - DNA, 3267 bp, Homo sapiens
  source 1..3267: mol_type = unassigned DNA
agtcgaggtatcttctccccaaccactgctcttattttaattattgcagacggaagttgaagactattgacatagtaaatagctctgggtggcttgaaacgaaagtttaactttgcggacaaacaggacttattgtagggggtggtcaaaatagtcccggcggggcggggccatgacccctgacgtcgccggtccggcgcgcagttcagtttggcggttccggtaccgctctcacattggggcgggatgtgggagcggctgaactgcgcagcagaggacttttattctcgtctccttcagtgtcctgcagagataaagtgatgactgactcctgagtgtgaataacgggagagataatgtagttctgtttttcacatgtggttctgcgtttcaggaaatttaatgaagaaaagaaaggaatccgtaaagacccatttctctatgaggctgatgtccaagtgcagttgatcagcaaaggccaaccaaaccctttgaaaaatattctaaatgaaaatgacatagtattcatagtggaaaaagtgcctttagaaaaggaagaaacaagtcatattgaagaacttcaatctgaagaaactgccatatctgatttctctactggcgaaaatgttggaccacttgctttaccagttgggaaggcaaggcagttaattggactttacaccatggctcacaatcctaatatgacccatttgaagattaatctgccagttactgcccttcctcccctttgggtaagatgtgacagttcagatcctgaaggtacttgttggctaggagctgagcttatcacaacaaacaacagcattacaggaattgtcttatatgtggtcagttgtaaagctgataaaaattattctgtaaatcttgaaaacctaaaaaatttacacaagaaaagacatcacttgtctactgtaacatccaaaggctttgcccagtatgagctctttaagtcctctgccttggatgatacaatcacagcatcacaaactgcgatcgctttggatatttcctggagtcctgtggatgagattcttcaaatccctccactctcttcaactgcaactctgaatattaaagtggaatcaggagagcccagaggtcctttgaatcatctctacagagaactgaaatttcttcttgttttggctgatggtttgaggactggtgtcactgaatggctcgagcccctggaagcaaaatctgctgttgaacttgttcaggaatttctgaatgacttaaataagctggatggatttggtgattctacaaaaaaagacactgaggttgagaccttgaagcatgacactgctgcagtcgatcgttccgtcaagcgtcttttcaaagttcggagtgatcttgattttgctgagcaactgtggtgcaaaatgagcagtagtgtgatttcataccaagacttggtgaagtgtttcacattgatcatccagagtctacaacgtggtgatatacagccatggctccatagtggaagtaacagtttactaagtaagctcattcatcagtcttatcatggaaccatggacacagtttctctcagtgggactattccagttcaaatgcttttggaaattggtttggacaaactaaagaaagattatatcagttttttcataggtcaggaacttgcatctttgaatcatttggaatacttcattgctccatcagtagatatacaagaacaggtttatcgtgtccaaaaactccaccatattctagaaatattagtcagttgcatgcctttcattaaatctcaacatgaactcctcttttctttaacacagatctgcataaagtattacaaacaaaatcctcttgatgagcaacacatttttcagctgccagtcagaccaactgctgtaaagaacttatatcaaagtgagaagccacagaaatggagagtggaaatatatagtggtcaaaagaagattaagacagtttggcaactgagtgacagctcacccatagaccatctgaattttcacaaacctgatttttcggaattaacactaaacggtagcctggaagaaaggatattctttactaacatggttacctgcagccaggtgcatttcaagtgaagtgtgctgatgaagtcctctataagcacaagccaaaaagagaaagagaaaaaaaggtaattattgtagaacctgaaaacagcaatgtatggaaaccctcaaagcagaaaagggaggaagatcctgaagattctcttatgaagctccaaaattgataatcctgtctcagctctgcctcctcaggaggagcattagtagaacagcagtgatgaggacacagagggagcagacagtgggtaccacgatctccgtaaccatttgcatgtgacttagcaagggctctgaaatgacaaagagaacgagcaccacaaatgagaacaggatcattttagtaaatacagctttatcccaaaagctttaactgtattgggaaaacttaaaaaatagcatcctcaaattttctgattcttatttgccatgaaatagaacttagtaaattaaatgttatttgaaaatgttataagagctttgtaaatatttcagaaaatatgggataaatgcctgaatttggttcttctacaggtgctataataaagtccatctctcaatacttatactttctaaattcatctcagaatattagcagccatattccacagttcctataatttttactgggggggatttgtgataggaaagtccttgggaaacatttccaatctttcaaaatattattgtgtatcttaagaagtataggaacttgtatgttgaaatgttgtatggtagttcttgtatagttaaataataatctttttaagagttaatgataagcatatgttatgtgcattattaataaaatagtggccacttaggtaatacccacttttatcttgtgtgctgggtactctggttactgagataaataaggcactggacatcctcacgtggagttcacaggctcatcagtgaattctgtaccacatttcaaccttgtttattttagtttaatggaatatacattcttagtattgcctgattatttaaatttgttgagggggattgcatgttgctttattggcctgtaaaaatagctagtttggtaagatttggtctcgcaccttccatctttgctaccacattaaagatgagcttgttaaaaaggaaagcatatttctctgattgcccttatggagaaataaagataaaattc

SEQ ID NO: 35547 - DNA, 1839 bp, Homo sapiens
  source 1..1839: mol_type = unassigned DNA
acattggggcgggatgtgggagcggctgaactgcgcagcagaggacttttattctcgtctccttcagctgatgtccaagtgcagttgatcagcaaaggccaaccaaaccctttgaaaaatattctaaatgaaaatgacatagtattcatagtggaaaaagtgcctttagaaaaggaagaaacaagtcatattgaagaacttcaatctgaagaaactgccatatctgatttctctactggcgaaaatgttggaccacttgctttaccagttgggaaggcaaggcagttaattggactttacaccatggctcacaatcctaatatgacccatttgaagattaatctgccagttactgcccttcctcccctttgggtaagatgtgacagttcagatcctgaaggtacttgttggctaggagctgagcttatcacaacaaacaacagcattacaggaattgtcttatatgtggtcagttgtaaagctgataaaaattattctgtaaatcttgaaaacctaaaaaatttacacaagaaaagacatcacttgtctactgtaacatccaaaggctttgcccagtatgagctctttaagtcctctgccttggatgatacaatcacagcatcacaaactgcgatcgctttggatatttcctggagtcctgtggatgagattcttcaaatccctccactctcttcaactgcaactctgaatattaaagtggaatcaggagagcccagaggtcctttgaatcatctctacagagaactgaaatttcttcttgttttggctgatggtttgaggactggtgtcactgaatggctcgagcccctggaagcaaaatctgctgttgaacttgttcaggaatttctgaatgacttaaataagctggatggatttggtgattctacaaaaaaagacactgaggttgagaccttgaagcatgacactgctgcagtcgatcgttccgtcaagcgtcttttcaaagttcggagtgatcttgattttgctgagcaactgtggtgcaaaatgagcagtagtgtgatttcataccaagacttggtgaagtgtttcacattgatcatccagagtctacaacgtggtgatatacagccatggctccatagtggaagtaacagtttactaagtaagctcattcatcagtcttatcatggaaccatggacacagtttctctcagtgggactattccagttcaaatgcttttggaaattggtttggacaaactaaagaaagattatatcagttttttcataggtcaggaacttgcatctttgaatcatttggaatacttcattgctccatcagtagatatacaagaacaggtttatcgtgtccaaaaactccaccatattctagaaatattagtcagttgcatgcctttcattaaatctcaacatgaactcctcttttctttaacacagatctgcataaagtattacaaacaaaatcctcttgatgagcaacacatttttcagctgccagtcagaccaactgctgtaaagaacttatatcaaagtgagaagccacagaaatggagagtggaaatatatagtggtcaaaagaagattaagacagtttggcaactgagtgacagctcacccatagaccatctgaattttcacaaacctgatttttcggaattaacactaaacggtagcctggaagaaaggatattctttactaacatggttacctgcagccaggtgcatttcaagtgaagtgtgctgatgaagtcctctataagcacaagccaaaaagagaaagagaaaaaaaggtaattattgtagaacctgaaaacagcaatgtatggaaaccctcaa

SEQ ID NO: 35548 - DNA, 1460 bp, Homo sapiens
  source 1..1460: mol_type = unassigned DNA
gcctatttagggtgcggcggcgggcgggagcagtgcgcccatggcggccctgggggacgaggtgctggacggttacgtgttcccggcgtgccccccctgctcgtaccggtacccataccccgcggccaccaagggcaagggcgcggcgggcggcagctggcagcagcgcggcaggggctgccttcccgcctcctccccctgctcggcgggcgcggcctcgttgtccttcccgggctgcgggcggctgacggccgccgagtacttcgacagctaccagcgggagcggctcatggctctcctggcgcaggtggggccgggtctcgggccgcgcgcccgcagggccggcagctgcgacgtggcggtgcaggtgagcccgcgcatcgacgccgcggtacagtgctcgctggggaggcgcacgctgcagcgccgggcccgcgaccccgagtccccggccggccccggggccgagggcaccacgggtggcggctctttctcccagcagccatcccgtcgaggcctggagcagggcagcccccagaacggcgccccgcggcccatgcgcttcccgcgcaccgtcgccgtgtactcgcccctggccttgcgccgtctcaccgccttcctggaggggcccgggcccgcggcgggcgagcagaggtccggggcgtcggacggagagagggggccgccgcccgcgcggcttcaaggcccagaggagggggaggtgtggacgaagaaggcgccccggcggccgcagtccgacgacgacggcgaggcccaggccgcagtccgagcgagctgggagcagccggccgacggtcccgagctgccgccgcgagaggcccaggagggcgaggcggctccgcggtcggcgctaaggagcccggggcaacctccgtcggcggggagggcccgagacggcggcgacggacgggaggcggccgtcgcgggagaggggccgtcgccacggagcccggagctgggcaaggagcggctgcgcttccagttcttagagcagaaatatggctattaccactgcaaggactgcaacatccgctgggagagtgcttatgtgtggtgtgtacagggaactaacaaggtttacttcaaacagttttgcagaacttgtcagaagtcttataacccttaccgagtggaggatatcacctgtcaaagttgtaaacaaacgagatgttcctgcccagtaaaacttcgccacgtggaccctaaacggccccaccgtcaagatttgtgcggtagatgcaaaggcaaacgcctgtcctgtgacagcactttcagcttcaaatacatcatttaggtgaaagtcagtgttgctgtgcatgcgctgatggagtagacgagtgagcttttccgtgcctctcctccacctctcccttctcaaaatacttcatgaaaggcagtgtattctgaaaaagccttcaaataaaggtattgcaacacga

SEQ ID NO: 35549 - DNA, 2493 bp, Homo sapiens
  source 1..2493: mol_type = unassigned DNA
ctgagccgggctggggcggcgggggcggcagtgagtggggtgggggcgagcggacctcggcggagcctccggcctgaggcaggatcagggccccttcctgggggagtttcctgcctggtccgcccttccccgctctccccgccccctctccgggccgctccttgtatggtctgggcgccgctctctccccgccccctctcttctccctccctcctccttccgtgtgtccctccccgcccggctggaggctgctccggaccgggacgcagagtctgcggacccggcgccgaggcggccacccgagacgcggcgcgcacgctccggcctgcgcagcccggcccggccatggcggccccccgcccgtctcccgcgatctccgtttcggtctcggctccggctttttacgccccgcagaagaagttcggccctgtggtggccccaaagcccaaagtgaatcccttccggcccggggacagcgagcctcccccggcacccggggcccagcgcgcacagatgggccgggtgggcgagattcccccgccgcccccggaagactttcccctgcctccacctccccttgctggggatggcgacgatgcagagggtgctctgggaggtgccttcccgccgccccctcccccgatcgaggaatcatttccccctgcgcctctggaggaggagatcttcccttccccgccgcctcctccggaggaggagggagggcctgaggcccccataccgcccccaccacagcccagggagaaggtgagcagtattgatttggagatcgactctctgtcctcactgctggatgacatgaccaagaatgatcctttcaaagcccgggtgtcatctggatatgtgcccccaccagtggccactccattcagttccaagtccagtaccaagcctgcagccgggggcacagcacccctgcctccttggaagtccccttccagctcccagcctctgccccaggttccggctccggctcagagccagacacagttccatgttcagccccagccccagcccaagcctcaggtccaactccatgtccagtcccagacccagcctgtgtctttggctaacacccagccccgagggcccccagcctcatctccggctccagcccctaagttttctccagtgactcctaagtttactcctgtggcttccaagttcagtcctggagccccaggtggatctgggtcacaaccaaatcaaaaattggggcaccccgaagctctttctgctggcacaggctcccctcaacctcccagcttcacctatgcccagcagagggagaagccccgagtgcaggagaagcagcaccccgtgcccccaccggctcagaaccaaaaccaggtgcgctcccctggggccccagggcccctgactctgaaggaggtggaggagctggagcagctgacccagcagctaatgcaggacatggagcatcctcagaggcagaatgtggctgtcaacgaactctgcggccgatgccatcaacccctggcccgggcgcagccagccgtccgcgctctagggcagctgttccacatcgcctgcttcacctgccaccagtgtgcgcagcagctccagggccagcagttctacagtctggagggggcgccgtactgcgagggctgttacactgacaccctggagaagtgtaacacctgcggggagcccatcactgaccgcatgctgagggccacgggcaaggcctatcacccgcactgcttcacctgtgtggtctgcgcccgccccctggagggcacctccttcatcgtggaccaggccaaccggccccactgtgtccccgactaccacaagcagtacgccccgaggtgctccgtctgctctgagcccatcatgcctgagcctggccgagatgagactgtgcgagtggtcgccctggacaagaacttccacatgaagtgttacaagtgtgaggactgcgggaagcccctgtcgattgaggcagatgacaatggctgcttccccctggacggtcacgtgctctgtcggaagtgccacactgctagagcccagacctgagtgaggacaggccctcttcagaccgcagtccatgccccattgtggaccacccacactgagaccacctgcccccacctcagttattgttttgatgtctagcccctcccatttccaacccctccctagcatcccaggtgccctgacccaggacccaacatggtctagggatgcaggatccccgccctggggtctggtcctcgcccatcctgcagggattgcccaccgtcttccagacaccccacctgaggggggcaccaggtttagtgctgctgctttcactgctgcacccgcgccctcggccggccccccgagcagcctttgtactctgcttgcggagggctgggagaccctccaggacattcccaccctcccccatgctgccaagttgtagctatagctacaaataaaaaaaaaccttgttttccagaa

SEQ ID NO: 35550 - DNA, 2050 bp, Homo sapiens
  source 1..2050: mol_type = unassigned DNA
gcggccccccgcccgtctcccgcgatctccgtttcggtctcggctccggctttttacgccccgcagaagaagttcggccctgtggtggccccaaagcccaaagtgaatcccttccggcccggggacagcgagcctcccccggcacccggggcccagcgcgcacagatgggccgggtgggcgagattcccccgccgcccccggaagactttcccctgcctccacctccccttgctggggatggcgacgatgcagagggtgctctgggaggtgccttcccgccgccccctcccccgatcgaggaatcatttccccctgcgcctctggaggaggagatcttcccttccccgccgcctcctccggaggaggagggagggcctgaggcccccataccgcccccaccacaggtgtcatctggatatgtgcccccaccagtggccactccattcagttccaagtccagtaccaagcctgcagccgggggcacagcacccctgcctccttggaagtccccttccagctcccagcctctgccccaggttccggctccggctcagagccagacacagttccatgttcagccccagccccagcccaagcctcaggtccaactccatgtccagtcccagacccagcctgtgtctttggctaacacccagccccgagggcccccagcctcatctccggctccagcccctaagttttctccagtgactcctaagtttactcctgtggcttccaagttcagtcctggagccccaggtggatctgggtcacaaccaaatcaaaaattggggcaccccgaagctctttctgctggcacaggctcccctcaacctcccagcttcacctatgcccagcagagggagaagccccgagtgcaggagaagcagcaccccgtgcccccaccggctcagaaccaaaaccaggtgcgctcccctggggccccagggcccctgactctgaaggaggtggaggagctggagcagctgacccagcagctaatgcaggacatggagcatcctcagaggcagaatgtggctgtcaacgaactctgcggccgatgccatcaacccctggcccgggcgcagccagccgtccgcgctctagggcagctgttccacatcgcctgcttcacctgccaccagtgtgcgcagcagctccagggccagcagttctacagtctggagggggcgccgtactgcgagggctgttacactgacaccctggagaagtgtaacacctgcggggagcccatcactgaccgcatgctgagggccacgggcaaggcctatcacccgcactgcttcacctgtgtggtctgcgcccgccccctggagggcacctccttcatcgtggaccaggccaaccggccccactgtgtccccgactaccacaagcagtacgccccgaggtgctccgtctgctctgagcccatcatgcctgagcctggccgagatgagactgtgcgagtggtcgccctggacaagaacttccacatgaagtgttacaagtgtgaggactgcgggaagcccctgtcgattgaggcagatgacaatggctgcttccccctggacggtcacgtgctctgtcggaagtgccacactgctagagcccagacctgagtgaggacaggccctcttcagaccgcagtccatgccccattgtggaccacccacactgagaccacctgcccccacctcagttattgttttgatgtctagcccctcccatttccaacccctccctagcatcccaggtgccctgacccaggacccaacatggtctagggatgcaggatccccgccctggggtctggtcctcgcccatcctgcagggattgcccaccgtcttccagacaccccacctgaggggggcaccaggtttagtgctgctgctttcactgctgcacccgcgccctcggccggccccccgagcagcctttgtactctgcttgcggagggctgggagaccctccaggacattcccaccctcccccatgctgccaagttgtagctatagctacaaataaaaaaaaaccttgttttccag

SEQ ID NO: 35551 - DNA, 2123 bp, Homo sapiens
  source 1..2123: mol_type = unassigned DNA
agatgttcttacctcatcgtggagctcgtggctgggagccagggctcctgggaccgttccaagtcccccgcctgggagtgggagtcgggaatgtggggcacgaatcttcccctccgggtccgttttccgaagtgtaacgggagctgcaccactcctcggcagtgcgcccggcctttcctgacctgactttcccctgcctccacctccccttgctggggatggcgacgatgcagagggtgctctgggaggtgccttcccgccgccccctcccccgatcgaggaatcatttccccctgcgcctctggaggaggagatcttcccttccccgccgcctcctccggaggaggagggagggcctgaggcccccataccgcccccaccacagcccagggagaaggtgagcagtattgatttggagatcgactctctgtcctcactgctggatgacatgaccaagaatgatcctttcaaagcccgggtgtcatctggatatgtgcccccaccagtggccactccattcagttccaagtccagtaccaagcctgcagccgggggcacagcacccctgcctccttggaagtccccttccagctcccagcctctgccccaggttccggctccggctcagagccagacacagttccatgttcagccccagccccagcccaagcctcaggtccaactccatgtccagtcccagacccagcctgtgtctttggctaacacccagccccgagggcccccagcctcatctccggctccagcccctaagttttctccagtgactcctaagtttactcctgtggcttccaagttcagtcctggagccccaggtggatctgggtcacaaccaaatcaaaaattggggcaccccgaagctctttctgctggcacaggctcccctcaacctcccagcttcacctatgcccagcagagggagaagccccgagtgcaggagaagcagcaccccgtgcccccaccggctcagaaccaaaaccaggtgcgctcccctggggccccagggcccctgactctgaaggaggtggaggagctggagcagctgacccagcagctaatgcaggacatggagcatcctcagaggcagaatgtggctgtcaacgaactctgcggccgatgccatcaacccctggcccgggcgcagccagccgtccgcgctctagggcagctgttccacatcgcctgcttcacctgccaccagtgtgcgcagcagctccagggccagcagttctacagtctggagggggcgccgtactgcgagggctgttacactgacaccctggagaagtgtaacacctgcggggagcccatcactgaccgcatgctgagggccacgggcaaggcctatcacccgcactgcttcacctgtgtggtctgcgcccgccccctggagggcacctccttcatcgtggaccaggccaaccggccccactgtgtccccgactaccacaagcagtacgccccgaggtgctccgtctgctctgagcccatcatgcctgagcctggccgagatgagactgtgcgagtggtcgccctggacaagaacttccacatgaagtgttacaagtgtgaggactgcgggaagcccctgtcgattgaggcagatgacaatggctgcttccccctggacggtcacgtgctctgtcggaagtgccacactgctagagcccagacctgagtgaggacaggccctcttcagaccgcagtccatgccccattgtggaccacccacactgagaccacctgcccccacctcagttattgttttgatgtctagcccctcccatttccaacccctccctagcatcccaggtgccctgacccaggacccaacatggtctagggatgcaggatccccgccctggggtctggtcctcgcccatcctgcagggattgcccaccgtcttccagacaccccacctgaggggggcaccaggtttagtgctgctgctttcactgctgcacccgcgccctcggccggccccccgagcagcctttgtactctgcttgcggagggctgggagaccctccaggacattcccaccctcccccatgctgccaagttgtagctatagctacaaataaaaaaaaaccttgttttccag

SEQ ID NO: 35552 - DNA, 2050 bp, Homo sapiens; identical to SEQ ID NO: 35550
  source 1..2050: mol_type = unassigned DNA

SEQ ID NO: 35553 - DNA, 703 bp, Homo sapiens
  source 1..703: mol_type = unassigned DNA
cggcgccgaggcggccacccgagacgcggcgcgcacgctccggcctgcggtgaggcgcggggagcggcagggcggccccacggggagggggcgcggggcgccgggagggggcgagtgggggtcaccaaggggagctgggaccgcctggggctcctgagcccggctccgcgctgcgtaacccggcgacccaccccagcagcccggcccggccatggcggccccccgcccgtctcccgcgatctccgtttcggtctcggctccggctttttacgccccgcagaagaagttcggccctgtggtggccccaaagcccaaagtgaatcccttccggcccggggacagcgagcctcccccggcacccggggcccagcgcgcacagatgggccgggtgggcgagattcccccgccgcccccggaagactttcccctgcctccacctccccttgctggggatggcgacgatgcagagggtgctctgggaggtgccttcccgccgccccctcccccgatcgaggaatcatttccccctgcgcctctggaggaggagatcttcccttccccgccgcctcctccggaggaggagggagggcctgaggcccccataccgcccccaccacagcccagggagaaggtgagcagtattgatttggagatcgactctctgtcctcactgctggatgacatgaccaagaatgatcctttc

SEQ ID NO: 35554 - DNA, 2445 bp, synthetic construct
  misc_feature 1..2445: note = Description of Artificial Sequence: Synthetic coding sequence
  source 1..2445: mol_type = other DNA
atgcccaccgtgatcagcgccagcgtggccccccgcaccgccgccgagccccgcagccccggccccgtgccccaccccgcccagagcaaggccaccgaggccggcggcggcaaccccagcggcatctacagcgccatcatcagccgcaacttccccatcatcggcgtgaaggagaagaccttcgagcagctgcacaagaagtgcctggagaagaaggtgctgtacgtggaccccgagttcccccccgacgagaccagcctgttctacagccagaagttccccatccagttcgtgtggaagcgcccccccgagatctgcgagaacccccgcttcatcatcgacggcgccaaccgcaccgacatctgccagggcgagctgggcgactgctggttcctggccgccatcgcctgcctgaccctgaaccagcacctgctgttccgcgtgatcccccacgaccagagcttcatcgagaactacgccggcatcttccacttccagttctggcgctacggcgagtgggtggacgtggtgatcgacgactgcctgcccacctacaacaaccagctggtgttcaccaagagcaaccaccgcaacgagttctggagcgccctgctggagaaggcctacgccaagctgcacggcagctacgaggccctgaagggcggcaacaccaccgaggccatggaggacttcaccggcggcgtggccgagttcttcgagatccgcgacgcccccagcgacatgtacaagatcatgaagaaggccatcgagcgcggcagcctgatgggctgcagcatcgacgacggcaccaacatgacctacggcaccagccccagcggcctgaacatgggcgagctgatcgcccgcatggtgcgcaacatggacaacagcctgctgcaggacagcgacctggacccccgcggcagcgacgagcgccccacccgcaccatcatccccgtgcagtacgagacccgcatggcctgcggcctggtgcgcggccacgcctacagcgtgaccggcctggacgaggtgcccttcaagggcgagaaggtgaagctggtgcgcctgcgcaacccctggggccaggtggagtggaacggcagctggagcgaccgctggaaggactggagcttcgtggacaaggacgagaaggcccgcctgcagcaccaggtgaccgaggacggcgagttctggatgagctacgaggacttcatctaccacttcaccaagctggagatctgcaacctgaccgccgacgccctgcagagcgacaagctgcagacctggaccgtgagcgtgaacgagggccgctgggtgcgcggctgcagcgccggcggctgccgcaacttccccgacaccttctggaccaacccccagtaccgcctgaagctgctggaggaggacgacgaccccgacgacagcgaggtgatctgcagcttcctggtggccctgatgcagaagaaccgccgcaaggaccgcaagctgggcgccagcctgttcaccatcggcttcgccatctacgaggtgccccaccagatgcacggcaacaagcagcacctgcagaaggacttcttcctgtacaacgccagcaaggcccgcagcaagacctacatcaacatgcgcgaggtgagccagcgcttccgcctgccccccagcgagtacgtgatcgtgcccagcacctacgagccccaccaggagggcgagttcatcctgcgcgtgttcagcgagaagcgcaacctgagcgaggaggtggagaacaccatcagcgtggaccgccccgtgcccatcatcttcgtgagcgaccgcgccaacagcaacaaggagctgggcgtggaccaggagagcgaggagggcaagggcaagaccagccccgacaagcagaagcagagcccccagccccagcccggcagcagcgaccaggagagcgaggagcagcagcagttccgcaacatcttcaagcagatcgccggcgacgacatggagatctgcgccgacgagctgaagaaggtgctgaacaccgtggtgaacaagcacaaggacctgaagacccacggcttcaccctggagagctgccgcagcatgatcgccctgatggacaccgacggcagcggcaagctgaacctgcaggagttccaccacctgtggaacaagatcaaggcctggcagaagatcttcaagcactacgacaccgaccagagcggcaccatcaacagctacgagatgcgcaacgccgtgaacgacgccggcttccacctgaacaaccagctgtacgacatcatcaccatgcgctacgccgacaagcacatgaacatcgacttcgacagcttcatctgctgcttcgtgcgcctggagggcatgttccgcgccttccacgccttcgacaaggacggcgacggcatcatcaagctgaacgtgctggagtggctgcagctgaccatgtacgcc

SEQ ID NO: 35555 - DNA, 468 bp, synthetic construct
  misc_feature 1..468: note = Description of Artificial Sequence: Synthetic coding sequence
  source 1..468: mol_type = other DNA
atggagatctgcgccgacgagctgaagaaggtgctgaacaccgtggtgaacaagcacaaggacctgaagacccacggcttcaccctggagagctgccgcagcatgatcgccctgatggacaccgacggcagcggcaagctgaacctgcaggagttccaccacctgtggaacaagatcaaggcctggcagaagatcttcaagcactacgacaccgaccagagcggcaccatcaacagctacgagatgcgcaacgccgtgaacgacgccggcttccacctgaacaaccagctgtacgacatcatcaccatgcgctacgccgacaagcacatgaacatcgacttcgacagcttcatctgctgcttcgtgcgcctggagggcatgttccgcgccttccacgccttcgacaaggacggcgacggcatcatcaagctgaacgtgctggagtggctgcagctgaccatgtacgcc

SEQ ID NO: 35556 - DNA, 2187 bp, synthetic construct
  misc_feature 1..2187: note = Description of Artificial Sequence: Synthetic coding sequence
  source 1..2187: mol_type = other DNA
atgcccaccgtgatcagcgccagcgtggccccccgcaccgccgccgagccccgcagccccggccccgtgccccaccccgcccagagcaaggccaccgaggccggcggcggcaaccccagcggcatctacagcgccatcatcagccgcaacttccccatcatcggcgtgaaggagaagaccttcgagcagctgcacaagaagtgcctggagaagaaggtgctgtacgtggaccccgagttcccccccgacgagaccagcctgttctacagccagaagttccccatccagttcgtgtggaagcgcccccccgagatctgcgagaacccccgcttcatcatcgacggcgccaaccgcaccgacatctgccagggcgagctgggcgactgctggttcctggccgccatcgcctgcctgaccctgaaccagcacctgctgttccgcgtgatcccccacgaccagagcttcatcgagaactacgccggcatcttccacttccagttctggcgctacggcgagtgggtggacgtggtgatcgacgactgcctgcccacctacaacaaccagctggtgttcaccaagagcaaccaccgcaacgagttctggagcgccctgctggagaaggcctacgccaagctgcacggcagctacgaggccctgaagggcggcaacaccaccgaggccatggaggacttcaccggcggcgtggccgagttcttcgagatccgcgacgcccccagcgacatgtacaagatcatgaagaaggccatcgagcgcggcagcctgatgggctgcagcatcgacaccatcatccccgtgcagtacgagacccgcatggcctgcggcctggtgcgcggccacgcctacagcgtgaccggcctggacgaggtgcccttcaagggcgagaaggtgaagctggtgcgcctgcgcaacccctggggccaggtggagtggaacggcagctggagcgaccgctggaaggactggagcttcgtggacaaggacgagaaggcccgcctgcagcaccaggtgaccgaggacggcgagttctggatgagctacgaggacttcatctaccacttcaccaagctggagatctgcaacctgaccgccgacgccctgcagagcgacaagctgcagacctggaccgtgagcgtgaacgagggccgctgggtgcgcggctgcagcgccggcggctgccgcaacttccccgacaccttctggaccaacccccagtaccgcctgaagctgctggaggaggacgacgaccccgacgacagcgaggtgatctgcagcttcctggtggccctgatgcagaagaaccgccgcaaggaccgcaagctgggcgccagcctgttcaccatcggcttcgccatctacgaggtgcccaaggagatgcacggcaacaagcagcacctgcagaaggacttcttcctgtacaacgccagcaaggcccgcagcaagacctacatcaacatgcgcgaggtgagccagcgcttccgcctgccccccagcgagtacgtgatcgtgcccagcacctacgagccccaccaggagggcgagttcatcctgcgcgtgttcagcgagaagcgcaacctgagcgaggaggtggagaacaccatcagcgtggaccgccccgtgccccagcccggcagcagcgaccaggagagcgaggagcagcagcagttccgcaacatcttcaagcagatcgccggcgacgacatggagatctgcgccgacgagctgaagaaggtgctgaacaccgtggtgaacaagcacaaggacctgaagacccacggcttcaccctggagagctgccgcagcatgatcgccctgatggacaccgacggcagcggcaagctgaacctgcaggagttccaccacctgtggaacaagatcaaggcctggcagaagatcttcaagcactacgacaccgaccagagcggcaccatcaacagctacgagatgcgcaacgccgtgaacgacgccggcttccacctgaacaaccagctgtacgacatcatcaccatgcgctacgccgacaagcacatgaacatcgacttcgacagcttcatctgctgcttcgtgcgcctggagggcatgttccgcgccttccacgccttcgacaaggacggcgacggcatcatcaagctgaacgtgctggagtggctgcagctgaccatgtacgcc

SEQ ID NO: 35557 - DNA, 2184 bp, synthetic construct
  misc_feature 1..2184: note = Description of Artificial Sequence: Synthetic coding sequence
  source 1..2184: mol_type = other DNA
atgagctggcagatcagcctgaagacccagaccacccagcagaagaacgagatctgcgagaacccccgcttcatcatcgacggcgccaaccgcaccgacatctgccagggcgagctgggcgactgctggttcctggccgccatcgcctgcctgaccctgaaccagcacctgctgttccgcgtgatcccccacgaccagagcttcatcgagaactacgccggcatcttccacttccagttctggcgctacggcgagtgggtggacgtggtgatcgacgactgcctgcccacctacaacaaccagctggtgttcaccaagagcaaccaccgcaacgagttctggagcgccctgctggagaaggcctacgccaagctgcacggcagctacgaggccctgaagggcggcaacaccaccgaggccatggaggacttcaccggcggcgtggccgagttcttcgagatccgcgacgcccccagcgacatgtacaagatcatgaagaaggccatcgagcgcggcagcctgatgggctgcagcatcgacgacggcaccaacatgacctacggcaccagccccagcggcctgaacatgggcgagctgatcgcccgcatggtgcgcaacatggacaacagcctgctgcaggacagcgacctggacccccgcggcagcgacgagcgccccacccgcaccatcatccccgtgcagtacgagacccgcatggcctgcggcctggtgcgcggccacgcctacagcgtgaccggcctggacgaggtgcccttcaagggcgagaaggtgaagctggtgcgcctgcgcaacccctggggccaggtggagtggaacggcagctggagcgaccgctggaaggactggagcttcgtggacaaggacgagaaggcccgcctgcagcaccaggtgaccgaggacggcgagttctggatgagctacgaggacttcatctaccacttcaccaagctggagatctgcaacctgaccgccgacgccctgcagagcgacaagctgcagacctggaccgtgagcgtgaacgagggccgctgggtgcgcggctgcagcgccggcggctgccgcaacttccccgacaccttctggaccaacccccagtaccgcctgaagctgctggaggaggacgacgaccccgacgacagcgaggtgatctgcagcttcctggtggccctgatgcagaagaaccgccgcaaggaccgcaagctgggcgccagcctgttcaccatcggcttcgccatctacgaggtgcccaaggagatgcacggcaacaagcagcacctgcagaaggacttcttcctgtacaacgccagcaaggcccgcagcaagacctacatcaacatgcgcgaggtgagccagcgcttccgcctgccccccagcgagtacgtgatcgtgcccagcacctacgagccccaccaggagggcgagttcatcctgcgcgtgttcagcgagaagcgcaacctgagcgaggaggtggagaacaccatcagcgtggaccgccccgtgcccatcatcttcgtgagcgaccgcgccaacagcaacaaggagctgggcgtggaccaggagagcgaggagggcaagggcaagaccagccccgacaagcagaagcagagcccccagccccagcccggcagcagcgaccaggagagcgaggagcagcagcagttccgcaacatcttcaagcagatcgccggcgacgacatggagatctgcgccgacgagctgaagaaggtgctgaacaccgtggtgaacaagcacaaggacctgaagacccacggcttcaccctggagagctgccgcagcatgatcgccctgatggacaccgacggcagcggcaagctgaacctgcaggagttccaccacctgtggaacaagatcaaggcctggcagaagatcttcaagcactacgacaccgaccagagcggcaccatcaacagctacgagatgcgcaacgccgtgaacgacgccggcttccacctgaacaaccagctgtacgacatcatcaccatgcgctacgccgacaagcacatgaacatcgacttcgacagcttcatctgctgcttcgtgcgcctggagggcatgttccgcgccttccacgccttcgacaaggacggcgacggcatcatcaagctgaacgtgctggagtggctgcagctgaccatgtacgcc

SEQ ID NO: 35558 - DNA, 2445 bp, synthetic construct
  misc_feature 1..2445: note = Description of Artificial Sequence: Synthetic coding sequence
  source 1..2445: mol_type = other DNA
atgcccaccgtgatcagcgccagcgtggccccccgcaccgccgccgagccccgcagccccggccccgtgccccaccccgcccagagcaaggccaccgaggccggcggcggcaaccccagcggcatctacagcgccatcatcagccgcaacttccccatcatcggcgtgaaggagaagaccttcgagcagctgcacaagaagtgcctggagaagaaggtgctgtacgtggaccccgagttcccccccgacgagaccagcctgttctacagccagaagttccccatccagttcgtgtggaagcgcccccccgagatctgcgagaacccccgcttcatcatcgacggcgccaaccgcaccgacatctgccagggcgagctgggcgactgctggttcctggccgccatcgcctgcctgaccctgaaccagcacctgctgttccgcgtgatcccccacgaccagagcttcatcgagaactacgccggcatcttccacttccagttctggcgctacggcgagtgggtggacgtggtgatcgacgactgcctgcccacctacaacaaccagctggtgttcaccaagagcaaccaccgcaacgagttctggagcgccctgctggagaaggcctacgccaagctgcacggcagctacgaggccctgaagggcggcaacaccaccgaggccatggaggacttcaccggcggcgtggccgagttcttcgagatccgcgacgcccccagcgacatgtacaagatcatgaagaaggccatcgagcgcggcagcctgatgggctgcagcatcgacgacggcaccaacatgacctacggcaccagccccagcggcctgaacatgggcgagctgatcgcccgcatggtgcgcaacatggacaacagcctgctgcaggacagcgacctggacccccgcggcagcgacgagcgccccacccgcaccatcatccccgtgcagtacgagacccgcatggcctgcggcctggtgcgcggccacgcctacagcgtgaccggcctggacgaggtgcccttcaagggcgagaaggtgaagctggtgcgcctgcgcaacccctggggccaggtggagtggaacggcagctggagcgaccgctggaaggactggagcttcgtggacaaggacgagaaggcccgcctgcagcaccaggtgaccgaggacggcgagttctggatgagctacgaggacttcatctaccacttcaccaagctggagatctgcaacctgaccgccgacgccctgcagagcgacaagctgcagacctggaccgtgagcgtgaacgagggccgctgggtgcgcggctgcagcgccggcggctgccgcaacttccccgacaccttctggaccaacccccagtaccgcctgaagctgctggaggaggacgacgaccccgacgacagcgaggtgatctgcagcttcctggtggccctgatgcagaagaaccgccgcaaggaccgcaagctgggcgccagcctgttcaccatcggcttcgccatctacgaggtgcccaaggagatgcacggcaacaagcagcacctgcagaaggacttcttcctgtacaacgccagcaaggcccgcagcaagacctacatcaacatgcgcgaggtgagccagcgcttccgcctgccccccagcgagtacgtgatcgtgcccagcacctacgagccccaccaggagggcgagttcatcctgcgcgtgttcagcgagaagcgcaacctgagcgaggaggtggagaacaccatcagcgtggaccgccccgtgcccatcatcttcgtgagcgaccgcgccaacagcaacaaggagctgggcgtggaccaggagagcgaggagggcaagggcaagaccagccccgacaagcagaagcagagcccccagccccagcccggcagcagcgaccaggagagcgaggagcagcagcagttccgcaacatcttcaagcagatcgccggcgacgacatggagatctgcgccgacgagctgaagaaggtgctgaacaccgtggtgaacaagcacaaggacctgaagacccacggcttcaccctggagagctgccgcagcatgatcgccctgatggacaccgacggcagcggcaagctgaacctgcaggagttccaccacctgtggaacaagatcaaggcctggcagaagatcttcaagcactacgacaccgaccagagcggcaccatcaacagctacgagatgcgcaacgccgtgaacgacgccggcttccacctgaacaaccagctgtacgacatcatcaccatgcgctacgccgacaagcacatgaacatcgacttcgacagcttcatctgctgcttcgtgcgcctggagggcatgttccgcgccttccacgccttcgacaaggacggcgacggcatcatcaagctgaacgtgctggagtggctgcagctgaccatgtacgcc

SEQ ID NO: 35559 - DNA, 2463 bp, synthetic construct
  misc_feature 1..2463: note = Description of Artificial Sequence: Synthetic coding sequence
  source 1..2463: mol_type = other DNA
atgcccaccgtgatcagcgccagcgtggccccccgcaccgccgccgagccccgcagccccggccccgtgccccaccccgcccagagcaaggccaccgaggccggcggcggcaaccccagcggcatctacagcgccatcatcagccgcaacttccccatcatcggcgtgaaggagaagaccttcgagcagctgcacaagaagtgcctggagaagaaggtgctgtacgtggaccccgagttcccccccgacgagaccagcctgttctacagccagaagttccccatccagttcgtgtggaagcgcccccccgagatctgcgagaacccccgcttcatcatcgacggcgccaaccgcaccgacatctgccagggcgagctgggcgactgctggttcctggccgccatcgcctgcctgaccctgaaccagcacctgctgttccgcgtgatcccccacgaccagagcttcatcgagaactacgccggcatcttccacttccagttctggcgctacggcgagtgggtggacgtggtgatcgacgactgcctgcccacctacaacaaccagctggtgttcaccaagagcaaccaccgcaacgagttctggagcgccctgctggagaaggcctacgccaagctgcacggcagctacgaggccctgaagggcggcaacaccaccgaggccatggaggacttcaccggcggcgtggccgagttcttcgagatccgcgacgcccccagcgacatgtacaagatcatgaagaaggccatcgagcgcggcagcctgatgggctgcagcatcgacgacggcaccaacatgacctacggcaccagccccagcggcctgaacatgggcgagctgatcgcccgcatggtgcgcaacatggacaacagcctgctgcaggacagcgacctggacccccgcggcagcgacgagcgccccacccgcaccatcatccccgtgcagtacgagacccgcatggcctgcggcctggtgcgcggccacgcctacagcgtgaccggcctggacgaggtgcccttcaagggcgagaaggtgaagctggtgcgcctgcgcaacccctggggccaggtggagtggaacggcagctggagcgaccgctggaaggactggagcttcgtggacaaggacgagaaggcccgcctgcagcaccaggtgaccgaggacggcgagttctggatgagctacgaggacttcatctaccacttcaccaagctggagatctgcaacctgaccgccgacgccctgcagagcgacaagctgcagacctggaccgtgagcgtgaacgagggccgctgggtgcgcggctgcagcgccggcggctgccgcaacttccccgacaccttctggaccaacccccagtaccgcctgaagctgctggaggaggacgacgaccccgacgacagcgaggtgatctgcagcttcctggtggccctgatgcagaagaaccgccgcaaggaccgcaagctgggcgccagcctgttcaccatcggcttcgccatctacgaggtgcccaaggagatgcacggcaacaagcagcacctgcagaaggacttcttcctgtacaacgccagcaaggcccgcagcaagacctacatcaacatgcgcgaggtgagccagcgcttccgcctgccccccagcgagtacgtgatcgtgcccagcacctacgagccccaccaggagggcgagttcatcctgcgcgtgttcagcgagaagcgcaacctgagcgaggaggtggagaacaccatcagcgtggaccgccccgtgaagaagaagaagaccaagcccatcatcttcgtgagcgaccgcgccaacagcaacaaggagctgggcgtggaccaggagagcgaggagggcaagggcaagaccagccccgacaagcagaagcagagcccccagccccagcccggcagcagcgaccaggagagcgaggagcagcagcagttccgcaacatcttcaagcagatcgccggcgacgacatggagatctgcgccgacgagctgaagaaggtgctgaacaccgtggtgaacaagcacaaggacctgaagacccacggcttcaccctggagagctgccgcagcatgatcgccctgatggacaccgacggcagcggcaagctgaacctgcaggagttccaccacctgtggaacaagatcaaggcctggcagaagatcttcaagcactacgacaccgaccagagcggcaccatcaacagctacgagatgcgcaacgccgtgaacgacgccggcttccacctgaacaaccagctgtacgacatcatcaccatgcgctacgccgacaagcacatgaacatcgacttcgacagcttcatctgctgcttcgtgcgcctggagggcatgttccgcgccttccacgccttcgacaaggacggcgacggcatcatcaagctgaacgtgctggagtggctgcagctgaccatgtacgcc

SEQ ID NO: 35560 - DNA, 927 bp, synthetic construct
  misc_feature 1..927: note = Description of Artificial Sequence: Synthetic coding sequence
  source 1..927: mol_type = other DNA
atgcacggcaacaagcagcacctgcagaaggacttcttcctgtacaacgccagcaaggcccgcagcaagacctacatcaacatgcgcgaggtgagccagcgcttccgcctgccccccagcgagtacgtgatcgtgcccagcacctacgagccccaccaggagggcgagttcatcctgcgcgtgttcagcgagaagcgcaacctgagcgaggaggtggagaacaccatcagcgtggaccgccccgtgaagaagaagaagaccaagcccatcatcttcgtgagcgaccgcgccaacagcaacaaggagctgggcgtggaccaggagagcgaggagggcaagggcaagaccagccccgacaagcagaagcagagcccccagccccagcccggcagcagcgaccaggagagcgaggagcagcagcagttccgcaacatcttcaagcagatcgccggcgacgacatggagatctgcgccgacgagctgaagaaggtgctgaacaccgtggtgaacaagcacaaggacctgaagacccacggcttcaccctggagagctgccgcagcatgatcgccctgatggacaccgacggcagcggcaagctgaacctgcaggagttccaccacctgtggaacaagatcaaggcctggcagaagatcttcaagcactacgacaccgaccagagcggcaccatcaacagctacgagatgcgcaacgccgtgaacgacgccggcttccacctgaacaaccagctgtacgacatcatcaccatgcgctacgccgacaagcacatgaacatcgacttcgacagcttcatctgctgcttcgtgcgcctggagggcatgttccgcgccttccacgccttcgacaaggacggcgacggcatcatcaagctgaacgtgctggagtggctgcagctgaccatgtacgcc

SEQ ID NO: 35561 - DNA, 1845 bp, synthetic construct
  misc_feature 1..1845: note = Description of Artificial Sequence: Synthetic coding sequence
  source 1..1845: mol_type = other DNA
atgcgcgccctgctgctgctgggcttcctgctggtgagcctggagagcaccctgagcatccccccctgggaggcccccaaggagcacaagtacaaggccgaggagcacaccgtggtgctgaccgtgaccggcgagccctgccacttccccttccagtaccaccgccagctgtaccacaagtgcacccacaagggccgccccggcccccagccctggtgcgccaccacccccaacttcgaccaggaccagcgctggggctactgcctggagcccaagaaggtgaaggaccactgcagcaagcacagcccctgccagaagggcggcacctgcgtgaacatgcccagcggcccccactgcctgtgcccccagcacctgaccggcaaccactgccagaaggagaagtgcttcgagccccagctgctgcgcttcttccacaagaacgagatctggtaccgcaccgagcaggccgccgtggcccgctgccagtgcaagggccccgacgcccactgccagcgcctggccagccaggcctgccgcaccaacccctgcctgcacggcggccgctgcctggaggtggagggccaccgcctgtgccactgccccgtgggctacaccggcgccttctgcgacgtggacaccaaggccagctgctacgacggccgcggcctgagctaccgcggcctggcccgcaccaccctgagcggcgccccctgccagccctgggccagcgaggccacctaccgcaacgtgaccgccgagcaggcccgcaactggggcctgggcggccacgccttctgccgcaaccccgacaacgacatccgcccctggtgcttcgtgctgaaccgcgaccgcctgagctgggagtactgcgacctggcccagtgccagacccccacccaggccgccccccccacccccgtgagcccccgcctgcacgtgcccctgatgcccgcccagcccgccccccccaagccccagcccaccacccgcacccccccccagagccagacccccggcgccctgcccgccaagcgcgagcagccccccagcctgacccgcaacggccccctgagctgcggccagcgcctgcgcaagagcctgagcagcatgacccgcgtggtgggcggcctggtggccctgcgcggcgcccacccctacatcgccgccctgtactggggccacagcttctgcgccggcagcctgatcgccccctgctgggtgctgaccgccgcccactgcctgcaggaccgccccgcccccgaggacctgaccgtggtgctgggccaggagcgccgcaaccacagctgcgagccctgccagaccctggccgtgcgcagctaccgcctgcacgaggccttcagccccgtgagctaccagcacgacctggccctgctgcgcctgcaggaggacgccgacggcagctgcgccctgctgagcccctacgtgcagcccgtgtgcctgcccagcggcgccgcccgccccagcgagaccaccctgtgccaggtggccggctggggccaccagttcgagggcgccgaggagtacgccagcttcctgcaggaggcccaggtgcccttcctgagcctggagcgctgcagcgcccccgacgtgcacggcagcagcatcctgcccggcatgctgtgcgccggcttcctggagggcggcaccgacgcctgccagggcgacagcggcggccccctggtgtgcgaggaccaggccgccgagcgccgcctgaccctgcagggcatcatcagctggggcagcggctgcggcgaccgcaacaagcccggcgtgtacaccgacgtggcctactacctggcctggatccgcgagcacaccgtgagc

SEQ ID NO: 35562 - DNA, 1512 bp, synthetic construct
  misc_feature 1..1512: note = Description of Artificial Sequence: Synthetic coding sequence
  source 1..1512: mol_type = other DNA
atgatgaccaccagcctgatctggggcatcgccatcgccgcctgctgctgcctgtggctgatcctgggcatccgccgccgccagaccggcgagccccccctggagaacggcctgatcccctacctgggctgcgccctgcagttcggcgccaaccccctggagttcctgcgcgccaaccagcgcaagcacggccacgtgttcacctgcaagctgatgggcaagtacgtgcacttcatcaccaaccccctgagctaccacaaggtgctgtgccacggcaagtacttcgactggaagaagttccacttcgccaccagcgccaaggccttcggccaccgcagcatcgaccccatggacggcaacaccaccgagaacatcaacgacaccttcatcaagaccctgcagggccacgccctgaacagcctgaccgagagcatgatggagaacctgcagcgcatcatgcgcccccccgtgagcagcaacagcaagaccgccgcctgggtgaccgagggcatgtacagcttctgctaccgcgtgatgttcgaggccggctacctgaccatcttcggccgcgacctgacccgccgcgacacccagaaggcccacatcctgaacaacctggacaacttcaagcagttcgacaaggtgttccccgccctggtggccggcctgcccatccacatgttccgcaccgcccacaacgcccgcgagaagctggccgagagcctgcgccacgagaacctgcagaagcgcgagagcatcagcgagctgatcagcctgcgcatgttcctgaacgacaccctgagcaccttcgacgacctggagaaggccaagacccacctggtggtgctgtgggccagccaggccaacaccatccccgccaccttctggagcctgttccagatgatccgcaaccccgaggccatgaaggccgccaccgaggaggtgaagcgcaccctggagaacgccggccagaaggtgagcctggagggcaaccccatctgcctgagccaggccgagctgaacgacctgcccgtgctggacagcatcatcaaggagagcctgcgcctgagcagcgccagcctgaacatccgcaccgccaaggaggacttcaccctgcacctggaggacggcagctacaacatccgcaaggacgacatcatcgccctgtacccccagctgatgcacctggaccccgagatctaccccgaccccctgaccttcaagtacgaccgctacctggacgagaacggcaagaccaagaccaccttctactgcaacggcctgaagctgaagtactactacatgcccttcggcagcggcgccaccatctgccccggccgcctgttcgccatccacgagatcaagcagttcctgatcctgatgctgagctacttcgagctggagctgatcgagggccaggccaagtgcccccccctggaccagagccgcgccggcctgggcatcctgccccccctgaacgacatcgagttcaagtacaagttcaagcacctg

SEQ ID NO: 35563 - DNA, 1887 bp, synthetic construct
  misc_feature 1..1887: note = Description of Artificial Sequence: Synthetic coding sequence
  source 1..1887: mol_type = other DNA
atgagcgccgaggtgcgcctgcgccgcctgcagcagctggtgctggaccccggcttcctgggcctggagcccctgctggacctgctgctgggcgtgcaccaggagctgggcgccagcgagctggcccaggacaagtacgtggccgacttcctgcagtgggccgagcccatcgtggtgcgcctgaaggaggtgcgcctgcagcgcgacgacttcgagatcctgaaggtgatcggccgcggcgccttcagcgaggtggccgtggtgaagatgaagcagaccggccaggtgtacgccatgaagatcatgaacaagtgggacatgctgaagcgcggcgaggtgagctgcttccgcgaggagcgcgacgtgctggtgaacggcgaccgccgctggatcacccagctgcacttcgccttccaggacgagaactacctgtacctggtgatggagtactacgtgggcggcgacctgctgaccctgctgagcaagttcggcgagcgcatccccgccgagatggcccgcttctacctggccgagatcgtgatggccatcgacagcgtgcaccgcctgggctacgtgcaccgcgacatcaagcccgacaacatcctgctggaccgctgcggccacatccgcctggccgacttcggcagctgcctgaagctgcgcgccgacggcaccgtgcgcagcctggtggccgtgggcacccccgactacctgagccccgagatcctgcaggccgtgggcggcggccccggcaccggcagctacggccccgagtgcgactggtgggccctgggcgtgttcgcctacgagatgttctacggccagacccccttctacgccgacagcaccgccgagacctacggcaagatcgtgcactacaaggagcacctgagcctgcccctggtggacgagggcgtgcccgaggaggcccgcgacttcatccagcgcctgctgtgcccccccgagacccgcctgggccgcggcggcgccggcgacttccgcacccaccccttcttcttcggcctggactgggacggcctgcgcgacagcgtgccccccttcacccccgacttcgagggcgccaccgacacctgcaacttcgacctggtggaggacggcctgaccgccatggtgagcggcggcggcgagaccctgagcgacatccgcgagggcgcccccctgggcgtgcacctgcccttcgtgggctacagctacagctgcatggccctgcgcgacagcgaggtgcccggccccacccccatggagctggaggccgagcagctgctggagccccacgtgcaggcccccagcctggagcccagcgtgagcccccaggacgagaccgccgaggtggccgtgcccgccgccgtgcccgccgccgaggccgaggccgaggtgaccctgcgcgagctgcaggaggccctggaggaggaggtgctgacccgccagagcctgagccgcgagatggaggccatccgcaccgacaaccagaacttcgccagccagctgcgcgaggccgaggcccgcaaccgcgacctggaggcccacgtgcgccagctgcaggagcgcatggagctgctgcaggccgagggcgccaccgccgtgaccggcgtgcccagcccccgcgccaccgacccccccagccacctggacggcccccccgccgtggccgtgggccagtgccccctggtgggccccggccccatgcaccgccgccacctgctgctgcccgcccgcgtgccccgccccggcctgagcgaggccctgagcctgctgctgttcgccgtggtgctgagccgcgccgccgccctgggctgcatcggcctggtggcccacgccggccagctgaccgccgtgtggcgccgccccggcgccgcccgcgccccc

SEQ ID NO: 35564 - DNA, 1917 bp, synthetic construct
  misc_feature 1..1917: note = Description of Artificial Sequence: Synthetic coding sequence
  source 1..1917: mol_type = other DNA
atgggcggccacttctggccccccgagccctacaccgtgttcatgtggggcagcccctgggaggccgacagcccccgcgtgaagctgcgcggccgcgagaagggccgccagaccgagggcggcgccttccccctggtgagcagcgccctgagcggcgacccccgcttcttcagccccaccaccccccccgccgagcccatcgtggtgcgcctgaaggaggtgcgcctgcagcgcgacgacttcgagatcctgaaggtgatcggccgcggcgccttcagcgaggtggccgtggtgaagatgaagcagaccggccaggtgtacgccatgaagatcatgaacaagtgggacatgctgaagcgcggcgaggtgagctgcttccgcgaggagcgcgacgtgctggtgaacggcgaccgccgctggatcacccagctgcacttcgccttccaggacgagaactacctgtacctggtgatggagtactacgtgggcggcgacctgctgaccctgctgagcaagttcggcgagcgcatccccgccgagatggcccgcttctacctggccgagatcgtgatggccatcgacagcgtgcaccgcctgggctacgtgcaccgcgacatcaagcccgacaacatcctgctggaccgctgcggccacatccgcctggccgacttcggcagctgcctgaagctgcgcgccgacggcaccgtgcgcagcctggtggccgtgggcacccccgactacctgagccccgagatcctgcaggccgtgggcggcggccccggcaccggcagctacggccccgagtgcgactggtgggccctgggcgtgttcgcctacgagatgttctacggccagacccccttctacgccgacagcaccgccgagacctacggcaagatcgtgcactacaaggagcacctgagcctgcccctggtggacgagggcgtgcccgaggaggcccgcgacttcatccagcgcctgctgtgcccccccgagacccgcctgggccgcggcggcgccggcgacttccgcacccaccccttcttcttcggcctggactgggacggcctgcgcgacagcgtgccccccttcacccccgacttcgagggcgccaccgacacctgcaacttcgacctggtggaggacggcctgaccgccatggtgagcggcggcggcgagaccctgagcgacatccgcgagggcgcccccctgggcgtgcacctgcccttcgtgggctacagctacagctgcatggccctgcgcgacagcgaggtgcccggccccacccccatggagctggaggccgagcagctgctggagccccacgtgcaggcccccagcctggagcccagcgtgagcccccaggacgagaccgccgaggtggccgtgcccgccgccgtgcccgccgccgaggccgaggccgaggtgaccctgcgcgagctgcaggaggccctggaggaggaggtgctgacccgccagagcctgagccgcgagatggaggccatccgcaccgacaaccagaacttcgccagccagctgcgcgaggccgaggcccgcaaccgcgacctggaggcccacgtgcgccagctgcaggagcgcatggagctgctgcaggccgagggcgccaccgccgtgaccggcgtgcccagcccccgcgccaccgacccccccagccacctggacggcccccccgccgtggccgtgggccagtgccccctggtgggccccggccccatgcaccgccgccacctgctgctgcccgcccgcgtgccccgccccggcctgagcgaggccctgagcctgctgctgttcgccgtggtgctgagccgcgccgccgccctgggctgcatcggcctggtggcccacgccggccagctgaccgccgtgtggcgccgccccggcgccgcccgcgccccc

SEQ ID NO: 35565 - DNA, 1590 bp, synthetic construct
  misc_feature 1..1590: note = Description of Artificial Sequence: Synthetic coding sequence
  source 1..1590: mol_type = other DNA
atgagcgccgaggtgcgcctgcgccgcctgcagcagctggtgctggaccccggcttcctgggcctggagcccctgctggacctgctgctgggcgtgcaccaggagctgggcgccagcgagctggcccaggacaagtacgtggccgacttcctgcagtgggccgagcccatcgtggtgcgcctgaaggaggtgcgcctgcagcgcgacgacttcgagatcctgaaggtgatcggccgcggcgccttcagcgaggtggccgtggtgaagatgaagcagaccggccaggtgtacgccatgaagatcatgaacaagtgggacatgctgaagcgcggcgaggtgagctgcttccgcgaggagcgcgacgtgctggtgaacggcgaccgccgctggatcacccagctgcacttcgccttccaggacgagaactacctgtacctggtgatggagtactacgtgggcggcgacctgctgaccctgctgagcaagttcggcgagcgcatccccgccgagatggcccgcttctacctggccgagatcgtgatggccatcgacagcgtgcaccgcctgggctacgtgcaccgcgacatcaagcccgacaacatcctgctggaccgctgcggccacatccgcctggccgacttcggcagctgcctgaagctgcgcgccgacggcaccgtgcgcagcctggtggccgtgggcacccccgactacctgagccccgagatcctgcaggccgtgggcggcggccccggcaccggcagctacggccccgagtgcgactggtgggccctgggcgtgttcgcctacgagatgttctacggccagacccccttctacgccgacagcaccgccgagacctacggcaagatcgtgcactacaaggagcacctgagcctgcccctggtggacgagggcgtgcccgaggaggcccgcgacttcatccagcgcctgctgtgcccccccgagacccgcctgggccgcggcggcgccggcgacttccgcacccaccccttcttcttcggcctggactgggacggcctgcgcgacagcgtgccccccttcacccccgacttcgagggcgccaccgacacctgcaacttcgacctggtggaggacggcctgaccgccatggagaccctgagcgacatccgcgagggcgcccccctgggcgtgcacctgcccttcgtgggctacagctacagctgcatggccctgcgcgacagcgaggtgcccggccccacccccatggagctggaggccgagcagctgctggagccccacgtgcaggcccccagcctggagcccagcgtgagcccccaggacgagaccgccgaggtggccgtgcccgccgccgtgcccgccgccgaggccgaggccgaggtgaccctgcgcgagctgcaggaggccctggaggaggaggtgctgacccgccagagcctgagccgcgagatggaggccatccgcaccgacaaccagaacttcgccagccagctgcgcgaggccgaggcccgcaaccgcgacctggaggcccacgtgcgccagctgcaggagcgcatggagctgctgcaggccgagggcgccaccggcccc

SEQ ID NO: 35566 - DNA, 1872 bp, synthetic construct
  misc_feature 1..1872: note = Description of Artificial Sequence: Synthetic coding sequence
  source 1..1872: mol_type = other DNA
atgagcgccgaggtgcgcctgcgccgcctgcagcagctggtgctggaccccggcttcctgggcctggagcccctgctggacctgctgctgggcgtgcaccaggagctgggcgccagcgagctggcccaggacaagtacgtggccgacttcctgcagtgggccgagcccatcgtggtgcgcctgaaggaggtgcgcctgcagcgcgacgacttcgagatcctgaaggtgatcggccgcggcgccttcagcgaggtggccgtggtgaagatgaagcagaccggccaggtgtacgccatgaagatcatgaacaagtgggacatgctgaagcgcggcgaggtgagctgcttccgcgaggagcgcgacgtgctggtgaacggcgaccgccgctggatcacccagctgcacttcgccttccaggacgagaactacctgtacctggtgatggagtactacgtgggcggcgacctgctgaccctgctgagcaagttcggcgagcgcatccccgccgagatggcccgcttctacctggccgagatcgtgatggccatcgacagcgtgcaccgcctgggctacgtgcaccgcgacatcaagcccgacaacatcctgctggaccgctgcggccacatccgcctggccgacttcggcagctgcctgaagctgcgcgccgacggcaccgtgcgcagcctggtggccgtgggcacccccgactacctgagccccgagatcctgcaggccgtgggcggcggccccggcaccggcagctacggccccgagtgcgactggtgggccctgggcgtgttcgcctacgagatgttctacggccagacccccttctacgccgacagcaccgccgagacctacggcaagatcgtgcactacaaggagcacctgagcctgcccctggtggacgagggcgtgcccgaggaggcccgcgacttcatccagcgcctgctgtgcccccccgagacccgcctgggccgcggcggcgccggcgacttccgcacccaccccttcttcttcggcctggactgggacggcctgcgcgacagcgtgccccccttcacccccgacttcgagggcgccaccgacacctgcaacttcgacctggtggaggacggcctgaccgccatggagaccctgagcgacatccgcgagggcgcccccctgggcgtgcacctgcccttcgtgggctacagctacagctgcatggccctgcgcgacagcgaggtgcccggccccacccccatggagctggaggccgagcagctgctggagccccacgtgcaggcccccagcctggagcccagcgtgagcccccaggacgagaccgccgaggtggccgtgcccgccgccgtgcccgccgccgaggccgaggccgaggtgaccctgcgcgagctgcaggaggccctggaggaggaggtgctgacccgccagagcctgagccgcgagatggaggccatccgcaccgacaaccagaacttcgccagccagctgcgcgaggccgaggcccgcaaccgcgacctggaggcccacgtgcgccagctgcaggagcgcatggagctgctgcaggccgagggcgccaccgccgtgaccggcgtgcccagcccccgcgccaccgacccccccagccacctggacggcccccccgccgtggccgtgggccagtgccccctggtgggccccggccccatgcaccgccgccacctgctgctgcccgcccgcgtgccccgccccggcctgagcgaggccctgagcctgctgctgttcgccgtggtgctgagccgcgccgccgccctgggctgcatcggcctggtggcccacgccggccagctgaccgccgtgtggcgccgccccggcgccgcccgcgccccc

SEQ ID NO: 35567 - DNA, 1875 bp, synthetic construct
  misc_feature 1..1875: note = Description of Artificial Sequence: Synthetic coding sequence
  source 1..1875: mol_type = other DNA
atgagcgccgaggtgcgcctgcgccgcctgcagcagctggtgctggaccccggcttcctgggcctggagcccctgctggacctgctgctgggcgtgcaccaggagctgggcgccagcgagctggcccaggacaagtacgtggccgacttcctgcagtgggccgagcccatcgtggtgcgcctgaaggaggtgcgcctgcagcgcgacgacttcgagatcctgaaggtgatcggccgcggcgccttcagcgaggtggccgtggtgaagatgaagcagaccggccaggtgtacgccatgaagatcatgaacaagtgggacatgctgaagcgcggcgaggtgagctgcttccgcgaggagcgcgacgtgctggtgaacggcgaccgccgctggatcacccagctgcacttcgccttccaggacgagaactacctgtacctggtgatggagtactacgtgggcggcgacctgctgaccctgctgagcaagttcggcgagcgcatccccgccgagatggcccgcttctacctggccgagatcgtgatggccatcgacagcgtgcaccgcctgggctacgtgcaccgcgacatcaagcccgacaacatcctgctggaccgctgcggccacatccgcctggccgacttcggcagctgcctgaagctgcgcgccgacggcaccgtgcgcagcctggtggccgtgggcacccccgactacctgagccccgagatcctgcaggccgtgggcggcggccccggcaccggcagctacggccccgagtgcgactggtgggccctgggcgtgttcgcctacgagatgttctacggccagacccccttctacgccgacagcaccgccgagacctacggcaagatcgtgcactacaaggagcacctgagcctgcccctggtggacgagggcgtgcccgaggaggcccgcgacttcatccagcgcctgctgtgcccccccgagacccgcctgggccgcggcggcgccggcgacttccgcacccaccccttcttcttcggcctggactgggacggcctgcgcgacagcgtgccccccttcacccccgacttcgagggcgccaccgacacctgcaacttcgacctggtggaggacggcctgaccgccatggagaccctgagcgacatccgcgagggcgcccccctgggcgtgcacctgcccttcgtgggctacagctacagctgcatggccctgcgcgacagcgaggtgcccggccccacccccatggagctggaggccgagcagctgctggagccccacgtgcaggcccccagcctggagcccagcgtgagcccccaggacgagaccgccgaggtggccgtgcccgccgccgtgcccgccgccgaggccgaggccgaggtgaccctgcgcgagctgcaggaggccctggaggaggaggtgctgacccgccagagcctgagccgcgagatggaggccatccgcaccgacaaccagaacttcgccagccagctgcgcgaggccgaggcccgcaaccgcgacctggaggcccacgtgcgccagctgcaggagcgcatggagctgctgcaggccgagggcgccaccgccgtgaccggcgtgcccagcccccgcgccaccgacccccccagccacatggccccccgcccctggctgtgggccagcgcccgctggtggggccaggccccctgcaccgccgccacctgctgcagcctgcccggcagcctgggcctggcctaccgccgccgcttcccctgcagctgcagccccctgttctgcctggtgccccccccctgggccgccctgggctggtggcccacccccgccaacagcccccagagcggcgccgcccaggagccccccgccctgcccgagccc

SEQ ID NO: 35568 - DNA, 126 bp, synthetic construct
  misc_feature 1..126: note = Description of Artificial Sequence: Synthetic coding sequence
  source 1..126: mol_type = other DNA
atggagctgctgcaggccgagggcgccaccgcccgctggccccccggccgcggctgcggccccgtgcccgccggcggcgcccgcccccacgccccccccccccccgccgccccctgccagggcccc

SEQ ID NO: 35569 - DNA, 3399 bp, synthetic construct
  misc_feature 1..3399: note = Description of Artificial Sequence: Synthetic coding sequence
  source 1..3399: mol_type = other DNA
atgcccagcagcctgatgctggaggtgcccgccctggccgacttcaaccgcgcctggaccgagctgaccgactggctgagcctgctggaccaggtgatcaagagccagcgcgtgatggtgggcgacctggaggacatcaacgagatgatcatcaagcagaaggccaccatgcaggacctggagcagcgccgcccccagctggaggagctgatcaccgccgcccagaacctgaagaacaagaccagcaaccaggaggcccgcaccatcatcaccgaccgcatcgagcgcatccagaaccagtgggacgaggtgcaggagcacctgcagaaccgccgccagcagctgaacgagatgctgaaggacagcacccagtggctggaggccaaggaggaggccgagcaggtgctgggccaggcccgcgccaagctggagagctggaaggagggcccctacaccgtggacgccatccagaagaagatcaccgagaccaagcagctggccaaggacctgcgccagtggcagaccaacgtggacgtggccaacgacctggccctgaagctgctgcgcgactacagcgccgacgacacccgcaaggtgcacatgatcaccgagaacatcaacgccagctggcgcagcatccacaagcgcgtgagcgagcgcgaggccgccctggaggagacccaccgcctgctgcagcagttccccctggacctggagaagttcctggcctggctgaccgaggccgagaccaccgccaacgtgctgcaggacgccacccgcaaggagcgcctgctggaggacagcaagggcgtgaaggagctgatgaagcagtggcaggacctgcagggcgagatcgaggcccacaccgacgtgtaccacaacctggacgagaacagccagaagatcctgcgcagcctggagggcagcgacgacgccgtgctgctgcagcgccgcctggacaacatgaacttcaagtggagcgagctgcgcaagaagagcctgaacatccgcagccacctggaggccagcagcgaccagtggaagcgcctgcacctgagcctgcaggagctgctggtgtggctgcagctgaaggacgacgagctgagccgccaggcccccatcggcggcgacttccccgccgtgcagaagcagaacgacgtgcaccgcgccttcaagcgcgagctgaagaccaaggagcccgtgatcatgagcaccctggagaccgtgcgcatcttcctgaccgagcagcccctggagggcctggagaagctgtaccaggagccccgcgagctgccccccgaggagcgcgcccagaacgtgacccgcctgctgcgcaagcaggccgaggaggtgaacaccgagtgggagaagctgaacctgcacagcgccgactggcagcgcaagatcgacgagaccctggagcgcctgcgcgagctgcaggaggccaccgacgagctggacctgaagctgcgccaggccgaggtgatcaagggcagctggcagcccgtgggcgacctgctgatcgacagcctgcaggaccacctggagaaggtgaaggccctgcgcggcgagatcgcccccctgaaggagaacgtgagccacgtgaacgacctggcccgccagctgaccaccctgggcatccagctgagcccctacaacctgagcaccctggaggacctgaacacccgctggaagctgctgcaggtggccgtggaggaccgcgtgcgccagctgcacgaggcccaccgcgacttcggccccgccagccagcacttcctgagcaccagcgtgcagggcccctgggagcgcgccatcagccccaacaaggtgccctactacatcaaccacgagacccagaccacctgctgggaccaccccaagatgaccgagctgtaccagagcctggccgacctgaacaacgtgcgcttcagcgcctaccgcaccgccatgaagctgcgccgcctgcagaaggccctgtgcctggacctgctgagcctgagcgccgcctgcgacgccctggaccagcacaacctgaagcagaacgaccagcccatggacatcctgcagatcatcaactgcctgaccaccatctacgaccgcctggagcaggagcacaacaacctggtgaacgtgcccctgtgcgtggacatgtgcctgaactggctgctgaacgtgtacgacaccggccgcaccggccgcatccgcgtgctgagcttcaagaccggcatcatcagcctgtgcaaggcccacctggaggacaagtaccgctacctgttcaagcaggtggccagcagcaccggcttctgcgaccagcgccgcctgggcctgctgctgcacgacagcatccagatcccccgccagctgggcgaggtggccagcttcggcggcagcaacatcgagcccagcgtgcgcagctgcttccagttcgccaacaacaagcccgagatcgaggccgccctgttcctggactggatgcgcctggagccccagagcatggtgtggctgcccgtgctgcaccgcgtggccgccgccgagaccgccaagcaccaggccaagtgcaacatctgcaaggagtgccccatcatcggcttccgctaccgcagcctgaagcacttcaactacgacatctgccagagctgcttcttcagcggccgcgtggccaagggccacaagatgcactaccccatggtggagtactgcacccccaccaccagcggcgaggacgtgcgcgacttcgccaaggtgctgaagaacaagttccgcaccaagcgctacttcgccaagcacccccgcatgggctacctgcccgtgcagaccgtgctggagggcgacaacatggagaccaacctgcaggccgagtacgaccgcctgaagcagcagcacgagcacaagggcctgagccccctgcccagcccccccgagatgatgcccaccagcccccagagcccccgcgacgccgagctgatcgccgaggccaagctgctgcgccagcacaagggccgcctggaggcccgcatgcagatcctggaggaccacaacaagcagctggagagccagctgcaccgcctgcgccagctgctggagcagccccaggccgaggccaaggtgaacggcaccaccgtgagcagccccagcaccagcctgcagcgcagcgacagcagccagcccatgctgctgcgcgtggtgggcagccagaccagcgacagcatgggcgaggaggacctgctgagccccccccaggacaccagcaccggcctggaggaggtgatggagcagctgaacaacagcttccccagcagccgcggccacaacgtgggcagcctgttccacatggccgacgacctgggccgcgccatggagagcctggtgagcgtgatgaccgacgaggagggcgccgag

SEQ ID NO: 35570 - DNA, 11055 bp, synthetic construct
  misc_feature 1..11055: note = Description of Artificial Sequence: Synthetic coding sequence
  source 1..11055: mol_type = other DNA
atgctgtggtgggaggaggtggaggactgctacgagcgcgaggacgtgcagaagaagaccttcaccaagtgggtgaacgcccagttcagcaagttcggcaagcagcacatcgagaacctgttcagcgacctgcaggacggccgccgcctgctggacctgctggagggcctgaccggccagaagctgcccaaggagaagggcagcacccgcgtgcacgccctgaacaacgtgaacaaggccctgcgcgtgctgcagaacaacaacgtggacctggtgaacatcggcagcaccgacatcgtggacggcaaccacaagctgaccctgggcctgatctggaacatcatcctgcactggcaggtgaagaacgtgatgaagaacatcatggccggcctgcagcagaccaacagcgagaagatcctgctgagctgggtgcgccagagcacccgcaactacccccaggtgaacgtgatcaacttcaccaccagctggagcgacggcctggccctgaacgccctgatccacagccaccgccccgacctgttcgactggaacagcgtggtgtgccagcagagcgccacccagcgcctggagcacgccttcaacatcgcccgctaccagctgggcatcgagaagctgctggaccccgaggacgtggacaccacctaccccgacaagaagagcatcctgatgtacatcaccagcctgttccaggtgctgccccagcaggtgagcatcgaggccatccaggaggtggagatgctgccccgcccccccaaggtgaccaaggaggagcacttccagctgcaccaccagatgcactacagccagcagatcaccgtgagcctggcccagggctacgagcgcaccagcagccccaagccccgcttcaagagctacgcctacacccaggccgcctacgtgaccaccagcgaccccacccgcagccccttccccagccagcacctggaggcccccgaggacaagagcttcggcagcagcctgatggagagcgaggtgaacctggaccgctaccagaccgccctggaggaggtgctgagctggctgctgagcgccgaggacaccctgcaggcccagggcgagatcagcaacgacgtggaggtggtgaaggaccagttccacacccacgagggctacatgatggacctgaccgcccaccagggccgcgtgggcaacatcctgcagctgggcagcaagctgatcggcaccggcaagctgagcgaggacgaggagaccgaggtgcaggagcagatgaacctgctgaacagccgctgggagtgcctgcgcgtggccagcatggagaagcagagcaacctgcaccgcgtgctgatggacctgcagaaccagaagctgaaggagctgaacgactggctgaccaagaccgaggagcgcacccgcaagatggaggaggagcccctgggccccgacctggaggacctgaagcgccaggtgcagcagcacaaggtgctgcaggaggacctggagcaggagcaggtgcgcgtgaacagcctgacccacatggtggtggtggtggacgagagcagcggcgaccacgccaccgccgccctggaggagcagctgaaggtgctgggcgaccgctgggccaacatctgccgctggaccgaggaccgctgggtgctgctgcaggacatcctgctgaagtggcagcgcctgaccgaggagcagtgcctgttcagcgcctggctgagcgagaaggaggacgccgtgaacaagatccacaccaccggcttcaaggaccagaacgagatgctgagcagcctgcagaagctggccgtgctgaaggccgacctggagaagaagaagcagagcatgggcaagctgtacagcctgaagcaggacctgctgagcaccctgaagaacaagagcgtgacccagaagaccgaggcctggctggacaacttcgcccgctgctgggacaacctggtgcagaagctggagaagagcaccgcccagatcagccaggccgtgaccaccacccagcccagcctgacccagaccaccgtgatggagaccgtgaccaccgtgaccacccgcgagcagatcctggtgaagcacgcccaggaggagctgccccccccccccccccagaagaagcgccagatcaccgtggacagcgagatccgcaagcgcctggacgtggacatcaccgagctgcacagctggatcacccgcagcgaggccgtgctgcagagccccgagttcgccatcttccgcaaggagggcaacttcagcgacctgaaggagaaggtgaacgccatcgagcgcgagaaggccgagaagttccgcaagctgcaggacgccagccgcagcgcccaggccctggtggagcagatggtgaacgagggcgtgaacgccgacagcatcaagcaggccagcgagcagctgaacagccgctggatcgagttctgccagctgctgagcgagcgcctgaactggctggagtaccagaacaacatcatcgccttctacaaccagctgcagcagctggagcagatgaccaccaccgccgagaactggctgaagatccagcccaccacccccagcgagcccaccgccatcaagagccagctgaagatctgcaaggacgaggtgaaccgcctgagcgacctgcagccccagatcgagcgcctgaagatccagagcatcgccctgaaggagaagggccagggccccatgttcctggacgccgacttcgtggccttcaccaaccacttcaagcaggtgttcagcgacgtgcaggcccgcgagaaggagctgcagaccatcttcgacaccctgccccccatgcgctaccaggagaccatgagcgccatccgcacctgggtgcagcagagcgagaccaagctgagcatcccccagctgagcgtgaccgactacgagatcatggagcagcgcctgggcgagctgcaggccctgcagagcagcctgcaggagcagcagagcggcctgtactacctgagcaccaccgtgaaggagatgagcaagaaggcccccagcgagatcagccgcaagtaccagagcgagttcgaggagatcgagggccgctggaagaagctgagcagccagctggtggagcactgccagaagctggaggagcagatgaacaagctgcgcaagatccagaaccacatccagaccctgaagaagtggatggccgaggtggacgtgttcctgaaggaggagtggcccgccctgggcgacagcgagatcctgaagaagcagctgaagcagtgccgcctgctggtgagcgacatccagaccatccagcccagcctgaacagcgtgaacgagggcggccagaagatcaagaacgaggccgagcccgagttcgccagccgcctggagaccgagctgaaggagctgaacacccagtgggaccacatgtgccagcaggtgtacgcccgcaaggaggccctgaagggcggcctggagaagaccgtgagcctgcagaaggacctgagcgagatgcacgagtggatgacccaggccgaggaggagtacctggagcgcgacttcgagtacaagacccccgacgagctgcagaaggccgtggaggagatgaagcgcgccaaggaggaggcccagcagaaggaggccaaggtgaagctgctgaccgagagcgtgaacagcgtgatcgcccaggccccccccgtggcccaggaggccctgaagaaggagctggagaccctgaccaccaactaccagtggctgtgcacccgcctgaacggcaagtgcaagaccctggaggaggtgtgggcctgctggcacgagctgctgagctacctggagaaggccaacaagtggctgaacgaggtggagttcaagctgaagaccaccgagaacatccccggcggcgccgaggagatcagcgaggtgctggacagcctggagaacctgatgcgccacagcgaggacaaccccaaccagatccgcatcctggcccagaccctgaccgacggcggcgtgatggacgagctgatcaacgaggagctggagaccttcaacagccgctggcgcgagctgcacgaggaggccgtgcgccgccagaagctgctggagcagagcatccagagcgcccaggagaccgagaagagcctgcacctgatccaggagagcctgaccttcatcgacaagcagctggccgcctacatcgccgacaaggtggacgccgcccagatgccccaggaggcccagaagatccagagcgacctgaccagccacgagatcagcctggaggagatgaagaagcacaaccagggcaaggaggccgcccagcgcgtgctgagccagatcgacgtggcccagaagaagctgcaggacgtgagcatgaagttccgcctgttccagaagcccgccaacttcgagcagcgcctgcaggagagcaagatgatcctggacgaggtgaagatgcacctgcccgccctggagaccaagagcgtggagcaggaggtggtgcagagccagctgaaccactgcgtgaacctgtacaagagcctgagcgaggtgaagagcgaggtggagatggtgatcaagaccggccgccagatcgtgcagaagaagcagaccgagaaccccaaggagctggacgagcgcgtgaccgccctgaagctgcactacaacgagctgggcgccaaggtgaccgagcgcaagcagcagctggagaagtgcctgaagctgagccgcaagatgcgcaaggagatgaacgtgctgaccgagtggctggccgccaccgacatggagctgaccaagcgcagcgccgtggagggcatgcccagcaacctggacagcgaggtggcctggggcaaggccacccagaaggagatcgagaagcagaaggtgcacctgaagagcatcaccgaggtgggcgaggccctgaagaccgtgctgggcaagaaggagaccctggtggaggacaagctgagcctgctgaacagcaactggatcgccgtgaccagccgcgccgaggagtggctgaacctgctgctggagtaccagaagcacatggagaccttcgaccagaacgtggaccacatcaccaagtggatcatccaggccgacaccctgctggacgagagcgagaagaagaagccccagcagaaggaggacgtgctgaagcgcctgaaggccgagctgaacgacatccgccccaaggtggacagcacccgcgaccaggccgccaacctgatggccaaccgcggcgaccactgccgcaagctggtggagccccagatcagcgagctgaaccaccgcttcgccgccatcagccaccgcatcaagaccggcaaggccagcatccccctgaaggagctggagcagttcaacagcgacatccagaagctgctggagcccctggaggccgagatccagcagggcgtgaacctgaaggaggaggacttcaacaaggacatgaacgaggacaacgagggcaccgtgaaggagctgctgcagcgcggcgacaacctgcagcagcgcatcaccgacgagcgcaagcgcgaggagatcaagatcaagcagcagctgctgcagaccaagcacaacgccctgaaggacctgcgcagccagcgccgcaagaaggccctggagatcagccaccagtggtaccagtacaagcgccaggccgacgacctgctgaagtgcctggacgacatcgagaagaagctggccagcctgcccgagccccgcgacgagcgcaagatcaaggagatcgaccgcgagctgcagaagaagaaggaggagctgaacgccgtgcgccgccaggccgagggcctgagcgaggacggcgccgccatggccgtggagcccacccagatccagctgagcaagcgctggcgcgagatcgagagcaagttcgcccagttccgccgcctgaacttcgcccagatccacaccgtgcgcgaggagaccatgatggtgatgaccgaggacatgcccctggagatcagctacgtgcccagcacctacctgaccgagatcacccacgtgagccaggccctgctggaggtggagcagctgctgaacgcccccgacctgtgcgccaaggacttcgaggacctgttcaagcaggaggagagcctgaagaacatcaaggacagcctgcagcagagcagcggccgcatcgacatcatccacagcaagaagaccgccgccctgcagagcgccacccccgtggagcgcgtgaagctgcaggaggccctgagccagctggacttccagtgggagaaggtgaacaagatgtacaaggaccgccagggccgcttcgaccgcagcgtggagaagtggcgccgcttccactacgacatcaagatcttcaaccagtggctgaccgaggccgagcagttcctgcgcaagacccagatccccgagaactgggagcacgccaagtacaagtggtacctgaaggagctgcaggacggcatcggccagcgccagaccgtggtgcgcaccctgaacgccaccggcgaggagatcatccagcagagcagcaagaccgacgccagcatcctgcaggagaagctgggcagcctgaacctgcgctggcaggaggtgtgcaagcagctgagcgaccgcaagaagcgcctggaggagcagaagaacatcctgagcgagttccagcgcgacctgaacgagttcgtgctgtggctggaggaggccgacaacatcgccagcatccccctggagcccggcaaggagcagcagctgaaggagaagctggagcaggtgaagctgctggtggaggagctgcccctgcgccagggcatcctgaagcagctgaacgagaccggcggccccgtgctggtgagcgcccccatcagccccgaggagcaggacaagctggagaacaagctgaagcagaccaacctgcagtggatcaaggtgagccgcgccctgcccgagaagcagggcgagatcgaggcccagatcaaggacctgggccagctggagaagaagctggaggacctggaggagcagctgaaccacctgctgctgtggctgagccccatccgcaaccagctggagatctacaaccagcccaaccaggagggccccttcgacgtgaaggagaccgagatcgccgtgcaggccaagcagcccgacgtggaggagatcctgagcaagggccagcacctgtacaaggagaagcccgccacccagcccgtgaagcgcaagctggaggacctgagcagcgagtggaaggccgtgaaccgcctgctgcaggagctgcgcgccaagcagcccgacctggcccccggcctgaccaccatcggcgccagccccacccagaccgtgaccctggtgacccagcccgtggtgaccaaggagaccgccatcagcaagctggagatgcccagcagcctgatgctggaggtgcccgccctggccgacttcaaccgcgcctggaccgagctgaccgactggctgagcctgctggaccaggtgatcaagagccagcgcgtgatggtgggcgacctggaggacatcaacgagatgatcatcaagcagaaggccaccatgcaggacctggagcagcgccgcccccagctggaggagctgatcaccgccgcccagaacctgaagaacaagaccagcaaccaggaggcccgcaccatcatcaccgaccgcatcgagcgcatccagaaccagtgggacgaggtgcaggagcacctgcagaaccgccgccagcagctgaacgagatgctgaaggacagcacccagtggctggaggccaaggaggaggccgagcaggtgctgggccaggcccgcgccaagctggagagctggaaggagggcccctacaccgtggacgccatccagaagaagatcaccgagaccaagcagctggccaaggacctgcgccagtggcagaccaacgtggacgtggccaacgacctggccctgaagctgctgcgcgactacagcgccgacgacacccgcaaggtgcacatgatcaccgagaacatcaacgccagctggcgcagcatccacaagcgcgtgagcgagcgcgaggccgccctggaggagacccaccgcctgctgcagcagttccccctggacctggagaagttcctggcctggctgaccgaggccgagaccaccgccaacgtgctgcaggacgccacccgcaaggagcgcctgctggaggacagcaagggcgtgaaggagctgatgaagcagtggcaggacctgcagggcgagatcgaggcccacaccgacgtgtaccacaacctggacgagaacagccagaagatcctgcgcagcctggagggcagcgacgacgccgtgctgctgcagcgccgcctggacaacatgaacttcaagtggagcgagctgcgcaagaagagcctgaacatccgcagccacctggaggccagcagcgaccagtggaagcgcctgcacctgagcctgcaggagctgctggtgtggctgcagctgaaggacgacgagctgagccgccaggcccccatcggcggcgacttccccgccgtgcagaagcagaacgacgtgcaccgcgccttcaagcgcgagctgaagaccaaggagcccgtgatcatgagcaccctggagaccgtgcgcatcttcctgaccgagcagcccctggagggcctggagaagctgtaccaggagccccgcgagctgccccccgaggagcgcgcccagaacgtgacccgcctgctgcgcaagcaggccgaggaggtgaacaccgagtgggagaagctgaacctgcacagcgccgactggcagcgcaagatcgacgagaccctggagcgcctgcgcgagctgcaggaggccaccgacgagctggacctgaagctgcgccaggccgaggtgatcaagggcagctggcagcccgtgggcgacctgctgatcgacagcctgcaggaccacctggagaaggtgaaggccctgcgcggcgagatcgcccccctgaaggagaacgtgagccacgtgaacgacctggcccgccagctgaccaccctgggcatccagctgagcccctacaacctgagcaccctggaggacctgaacacccgctggaagctgctgcaggtggccgtggaggaccgcgtgcgccagctgcacgaggcccaccgcgacttcggccccgccagccagcacttcctgagcaccagcgtgcagggcccctgggagcgcgccatcagccccaacaaggtgccctactacatcaaccacgagacccagaccacctgctgggaccaccccaagatgaccgagctgtaccagagcctggccgacctgaacaacgtgcgcttcagcgcctaccgcaccgccatgaagctgcgccgcctgcagaaggccctgtgcctggacctgctgagcctgagcgccgcctgcgacgccctggaccagcacaacctgaagcagaacgaccagcccatggacatcctgcagatcatcaactgcctgaccaccatctacgaccgcctggagcaggagcacaacaacctggtgaacgtgcccctgtgcgtggacatgtgcctgaactggctgctgaacgtgtacgacaccggccgcaccggccgcatccgcgtgctgagcttcaagaccggcatcatcagcctgtgcaaggcccacctggaggacaagtaccgctacctgttcaagcaggtggccagcagcaccggcttctgcgaccagcgccgcctgggcctgctgctgcacgacagcatccagatcccccgccagctgggcgaggtggccagcttcggcggcagcaacatcgagcccagcgtgcgcagctgcttccagttcgccaacaacaagcccgagatcgaggccgccctgttcctggactggatgcgcctggagccccagagcatggtgtggctgcccgtgctgcaccgcgtggccgccgccgagaccgccaagcaccaggccaagtgcaacatctgcaaggagtgccccatcatcggcttccgctaccgcagcctgaagcacttcaactacgacatctgccagagctgcttcttcagcggccgcgtggccaagggccacaagatgcactaccccatggtggagtactgcacccccaccaccagcggcgaggacgtgcgcgacttcgccaaggtgctgaagaacaagttccgcaccaagcgctacttcgccaagcacccccgcatgggctacctgcccgtgcagaccgtgctggagggcgacaacatggagacccccgtgaccctgatcaacttctggcccgtggacagcgcccccgccagcagcccccagctgagccacgacgacacccacagccgcatcgagcactacgccagccgcctggccgagatggagaacagcaacggcagctacctgaacgacagcatcagccccaacgagagcatcgacgacgagcacctgctgatccagcactactgccagagcctgaaccaggacagccccctgagccagccccgcagccccgcccagatcctgatcagcctggagagcgaggagcgcggcgagctggagcgcatcctggccgacctggaggaggagaaccgcaacctgcaggccgagtacgaccgcctgaagcagcagcacgagcacaagggcctgagccccctgcccagcccccccgagatgatgcccaccagcccccagagcccccgcgacgccgagctgatcgccgaggccaagctgctgcgccagcacaagggccgcctggaggcccgcatgcagatcctggaggaccacaacaagcagctggagagccagctgcaccgcctgcgccagctgctggagcagccccaggccgaggccaaggtgaacggcaccaccgtgagcagccccagcaccagcctgcagcgcagcgacagcagccagcccatgctgctgcgcgtggtgggcagccagaccagcgacagcatgggcgaggaggacctgctgagccccccccaggacaccagcaccggcctggaggaggtgatggagcagctgaacaacagcttccccagcagccgcggccgcaacacccccggcaagcccatgcgcgaggacaccatg

SEQ ID NO: 35571 - DNA, 3690 bp, synthetic construct
  misc_feature 1..3690: note = Description of Artificial Sequence: Synthetic coding sequence
  source 1..3690: mol_type = other DNA
atgcccagcagcctgatgctggaggtgcccgccctggccgacttcaaccgcgcctggaccgagctgaccgactggctgagcctgctggaccaggtgatcaagagccagcgcgtgatggtgggcgacctggaggacatcaacgagatgatcatcaagcagaaggccaccatgcaggacctggagcagcgccgcccccagctggaggagctgatcaccgccgcccagaacctgaagaacaagaccagcaaccaggaggcccgcaccatcatcaccgaccgcatcgagcgcatccagaaccagtgggacgaggtgcaggagcacctgcagaaccgccgccagcagctgaacgagatgctgaaggacagcacccagtggctggaggccaaggaggaggccgagcaggtgctgggccaggcccgcgccaagctggagagctggaaggagggcccctacaccgtggacgccatccagaagaagatcaccgagaccaagcagctggccaaggacctgcgccagtggcagaccaacgtggacgtggccaacgacctggccctgaagctgctgcgcgactacagcgccgacgacacccgcaaggtgcacatgatcaccgagaacatcaacgccagctggcgcagcatccacaagcgcgtgagcgagcgcgaggccgccctggaggagacccaccgcctgctgcagcagttccccctggacctggagaagttcctggcctggctgaccgaggccgagaccaccgccaacgtgctgcaggacgccacccgcaaggagcgcctgctggaggacagcaagggcgtgaaggagctgatgaagcagtggcaggacctgcagggcgagatcgaggcccacaccgacgtgtaccacaacctggacgagaacagccagaagatcctgcgcagcctggagggcagcgacgacgccgtgctgctgcagcgccgcctggacaacatgaacttcaagtggagcgagctgcgcaagaagagcctgaacatccgcagccacctggaggccagcagcgaccagtggaagcgcctgcacctgagcctgcaggagctgctggtgtggctgcagctgaaggacgacgagctgagccgccaggcccccatcggcggcgacttccccgccgtgcagaagcagaacgacgtgcaccgcgccttcaagcgcgagctgaagaccaaggagcccgtgatcatgagcaccctggagaccgtgcgcatcttcctgaccgagcagcccctggagggcctggagaagctgtaccaggagccccgcgagctgccccccgaggagcgcgcccagaacgtgacccgcctgctgcgcaagcaggccgaggaggtgaacaccgagtgggagaagctgaacctgcacagcgccgactggcagcgcaagatcgacgagaccctggagcgcctgcgcgagctgcaggaggccaccgacgagctggacctgaagctgcgccaggccgaggtgatcaagggcagctggcagcccgtgggcgacctgctgatcgacagcctgcaggaccacctggagaaggtgaaggccctgcgcggcgagatcgcccccctgaaggagaacgtgagccacgtgaacgacctggcccgccagctgaccaccctgggcatccagctgagcccctacaacctgagcaccctggaggacctgaacacccgctggaagctgctgcaggtggccgtggaggaccgcgtgcgccagctgcacgaggcccaccgcgacttcggccccgccagccagcacttcctgagcaccagcgtgcagggcccctgggagcgcgccatcagccccaacaaggtgccctactacatcaaccacgagacccagaccacctgctgggaccaccccaagatgaccgagctgtaccagagcctggccgacctgaacaacgtgcgcttcagcgcctaccgcaccgccatgaagctgcgccgcctgcagaaggccctgtgcctggacctgctgagcctgagcgccgcctgcgacgccctggaccagcacaacctgaagcagaacgaccagcccatggacatcctgcagatcatcaactgcctgaccaccatctacgaccgcctggagcaggagcacaacaacctggtgaacgtgcccctgtgcgtggacatgtgcctgaactggctgctgaacgtgtacgacaccggccgcaccggccgcatccgcgtgctgagcttcaagaccggcatcatcagcctgtgcaaggcccacctggaggacaagtaccgctacctgttcaagcaggtggccagcagcaccggcttctgcgaccagcgccgcctgggcctgctgctgcacgacagcatccagatcccccgccagctgggcgaggtggccagcttcggcggcagcaacatcgagcccagcgtgcgcagctgcttccagttcgccaacaacaagcccgagatcgaggccgccctgttcctggactggatgcgcctggagccccagagcatggtgtggctgcccgtgctgcaccgcgtggccgccgccgagaccgccaagcaccaggccaagtgcaacatctgcaaggagtgccccatcatcggcttccgctaccgcagcctgaagcacttcaactacgacatctgccagagctgcttcttcagcggccgcgtggccaagggccacaagatgcactaccccatggtggagtactgcacccccaccaccagcggcgaggacgtgcgcgacttcgccaaggtgctgaagaacaagttccgcaccaagcgctacttcgccaagcacccccgcatgggctacctgcccgtgcagaccgtgctggagggcgacaacatggagacccccgccagcagcccccagctgagccacgacgacacccacagccgcatcgagcactacgccagccgcctggccgagatggagaacagcaacggcagctacctgaacgacagcatcagccccaacgagagcatcgacgacgagcacctgctgatccagcactactgccagagcctgaaccaggacagccccctgagccagccccgcagccccgcccagatcctgatcagcctggagagcgaggagcgcggcgagctggagcgcatcctggccgacctggaggaggagaaccgcaacctgcaggccgagtacgaccgcctgaagcagcagcacgagcacaagggcctgagccccctgcccagcccccccgagatgatgcccaccagcccccagagcccccgcgacgccgagctgatcgccgaggccaagctgctgcgccagcacaagggccgcctggaggcccgcatgcagatcctggaggaccacaacaagcagctggagagccagctgcaccgcctgcgccagctgctggagcagccccaggccgaggccaaggtgaacggcaccaccgtgagcagccccagcaccagcctgcagcgcagcgacagcagccagcccatgctgctgcgcgtggtgggcagccagaccagcgacagcatgggcgaggaggacctgctgagccccccccaggacaccagcaccggcctggaggaggtgatggagcagctgaacaacagcttccccagcagccgcggccacaacgtgggcagcctgttccacatggccgacgacctgggccgcgccatggagagcctggtgagcgtgatgaccgacgaggagggcgccgag

SEQ ID NO: 35572 - DNA, 1866 bp, synthetic construct
  misc_feature 1..1866: note = Description of Artificial Sequence: Synthetic coding sequence
  source 1..1866: mol_type = other DNA
atgcgcgagcagctgaagggccacgagacccagaccacctgctgggaccaccccaagatgaccgagctgtaccagagcctggccgacctgaacaacgtgcgcttcagcgcctaccgcaccgccatgaagctgcgccgcctgcagaaggccctgtgcctggacctgctgagcctgagcgccgcctgcgacgccctggaccagcacaacctgaagcagaacgaccagcccatggacatcctgcagatcatcaactgcctgaccaccatctacgaccgcctggagcaggagcacaacaacctggtgaacgtgcccctgtgcgtggacatgtgcctgaactggctgctgaacgtgtacgacaccggccgcaccggccgcatccgcgtgctgagcttcaagaccggcatcatcagcctgtgcaaggcccacctggaggacaagtaccgctacctgttcaagcaggtggccagcagcaccggcttctgcgaccagcgccgcctgggcctgctgctgcacgacagcatccagatcccccgccagctgggcgaggtggccagcttcggcggcagcaacatcgagcccagcgtgcgcagctgcttccagttcgccaacaacaagcccgagatcgaggccgccctgttcctggactggatgcgcctggagccccagagcatggtgtggctgcccgtgctgcaccgcgtggccgccgccgagaccgccaagcaccaggccaagtgcaacatctgcaaggagtgccccatcatcggcttccgctaccgcagcctgaagcacttcaactacgacatctgccagagctgcttcttcagcggccgcgtggccaagggccacaagatgcactaccccatggtggagtactgcacccccaccaccagcggcgaggacgtgcgcgacttcgccaaggtgctgaagaacaagttccgcaccaagcgctacttcgccaagcacccccgcatgggctacctgcccgtgcagaccgtgctggagggcgacaacatggagacccccgccagcagcccccagctgagccacgacgacacccacagccgcatcgagcactacgccagccgcctggccgagatggagaacagcaacggcagctacctgaacgacagcatcagccccaacgagagcatcgacgacgagcacctgctgatccagcactactgccagagcctgaaccaggacagccccctgagccagccccgcagccccgcccagatcctgatcagcctggagagcgaggagcgcggcgagctggagcgcatcctggccgacctggaggaggagaaccgcaacctgcaggccgagtacgaccgcctgaagcagcagcacgagcacaagggcctgagccccctgcccagcccccccgagatgatgcccaccagcccccagagcccccgcgacgccgagctgatcgccgaggccaagctgctgcgccagcacaagggccgcctggaggcccgcatgcagatcctggaggaccacaacaagcagctggagagccagctgcaccgcctgcgccagctgctggagcagccccaggccgaggccaaggtgaacggcaccaccgtgagcagccccagcaccagcctgcagcgcagcgacagcagccagcccatgctgctgcgcgtggtgggcagccagaccagcgacagcatgggcgaggaggacctgctgagccccccccaggacaccagcaccggcctggaggaggtgatggagcagctgaacaacagcttccccagcagccgcggccacaacgtgggcagcctgttccacatggccgacgacctgggccgcgccatggagagcctggtgagcgtgatgaccgacgaggagggcgccgag

SEQ ID NO: 35573 - DNA, 11043 bp, synthetic construct
  misc_feature 1..11043: note = Description of Artificial Sequence: Synthetic coding sequence
  source 1..11043: mol_type = other DNA
atgagcgaggtgagcagcgacgagcgcgaggacgtgcagaagaagaccttcaccaagtgggtgaacgcccagttcagcaagttcggcaagcagcacatcgagaacctgttcagcgacctgcaggacggccgccgcctgctggacctgctggagggcctgaccggccagaagctgcccaaggagaagggcagcacccgcgtgcacgccctgaacaacgtgaacaaggccctgcgcgtgctgcagaacaacaacgtggacctggtgaacatcggcagcaccgacatcgtggacggcaaccacaagctgaccctgggcctgatctggaacatcatcctgcactggcaggtgaagaacgtgatgaagaacatcatggccggcctgcagcagaccaacagcgagaagatcctgctgagctgggtgcgccagagcacccgcaactacccccaggtgaacgtgatcaacttcaccaccagctggagcgacggcctggccctgaacgccctgatccacagccaccgccccgacctgttcgactggaacagcgtggtgtgccagcagagcgccacccagcgcctggagcacgccttcaacatcgcccgctaccagctgggcatcgagaagctgctggaccccgaggacgtggacaccacctaccccgacaagaagagcatcctgatgtacatcaccagcctgttccaggtgctgccccagcaggtgagcatcgaggccatccaggaggtggagatgctgccccgcccccccaaggtgaccaaggaggagcacttccagctgcaccaccagatgcactacagccagcagatcaccgtgagcctggcccagggctacgagcgcaccagcagccccaagccccgcttcaagagctacgcctacacccaggccgcctacgtgaccaccagcgaccccacccgcagccccttccccagccagcacctggaggcccccgaggacaagagcttcggcagcagcctgatggagagcgaggtgaacctggaccgctaccagaccgccctggaggaggtgctgagctggctgctgagcgccgaggacaccctgcaggcccagggcgagatcagcaacgacgtggaggtggtgaaggaccagttccacacccacgagggctacatgatggacctgaccgcccaccagggccgcgtgggcaacatcctgcagctgggcagcaagctgatcggcaccggcaagctgagcgaggacgaggagaccgaggtgcaggagcagatgaacctgctgaacagccgctgggagtgcctgcgcgtggccagcatggagaagcagagcaacctgcaccgcgtgctgatggacctgcagaaccagaagctgaaggagctgaacgactggctgaccaagaccgaggagcgcacccgcaagatggaggaggagcccctgggccccgacctggaggacctgaagcgccaggtgcagcagcacaaggtgctgcaggaggacctggagcaggagcaggtgcgcgtgaacagcctgacccacatggtggtggtggtggacgagagcagcggcgaccacgccaccgccgccctggaggagcagctgaaggtgctgggcgaccgctgggccaacatctgccgctggaccgaggaccgctgggtgctgctgcaggacatcctgctgaagtggcagcgcctgaccgaggagcagtgcctgttcagcgcctggctgagcgagaaggaggacgccgtgaacaagatccacaccaccggcttcaaggaccagaacgagatgctgagcagcctgcagaagctggccgtgctgaaggccgacctggagaagaagaagcagagcatgggcaagctgtacagcctgaagcaggacctgctgagcaccctgaagaacaagagcgtgacccagaagaccgaggcctggctggacaacttcgcccgctgctgggacaacctggtgcagaagctggagaagagcaccgcccagatcagccaggccgtgaccaccacccagcccagcctgacccagaccaccgtgatggagaccgtgaccaccgtgaccacccgcgagcagatcctggtgaagcacgcccaggaggagctgccccccccccccccccagaagaagcgccagatcaccgtggacagcgagatccgcaagcgcctggacgtggacatcaccgagctgcacagctggatcacccgcagcgaggccgtgctgcagagccccgagttcgccatcttccgcaaggagggcaacttcagcgacctgaaggagaaggtgaacgccatcgagcgcgagaaggccgagaagttccgcaagctgcaggacgccagccgcagcgcccaggccctggtggagcagatggtgaacgagggcgtgaacgccgacagcatcaagcaggccagcgagcagctgaacagccgctggatcgagttctgccagctgctgagcgagcgcctgaactggctggagtaccagaacaacatcatcgccttctacaaccagctgcagcagctggagcagatgaccaccaccgccgagaactggctgaagatccagcccaccacccccagcgagcccaccgccatcaagagccagctgaagatctgcaaggacgaggtgaaccgcctgagcgacctgcagccccagatcgagcgcctgaagatccagagcatcgccctgaaggagaagggccagggccccatgttcctggacgccgacttcgtggccttcaccaaccacttcaagcaggtgttcagcgacgtgcaggcccgcgagaaggagctgcagaccatcttcgacaccctgccccccatgcgctaccaggagaccatgagcgccatccgcacctgggtgcagcagagcgagaccaagctgagcatcccccagctgagcgtgaccgactacgagatcatggagcagcgcctgggcgagctgcaggccctgcagagcagcctgcaggagcagcagagcggcctgtactacctgagcaccaccgtgaaggagatgagcaagaaggcccccagcgagatcagccgcaagtaccagagcgagttcgaggagatcgagggccgctggaagaagctgagcagccagctggtggagcactgccagaagctggaggagcagatgaacaagctgcgcaagatccagaaccacatccagaccctgaagaagtggatggccgaggtggacgtgttcctgaaggaggagtggcccgccctgggcgacagcgagatcctgaagaagcagctgaagcagtgccgcctgctggtgagcgacatccagaccatccagcccagcctgaacagcgtgaacgagggcggccagaagatcaagaacgaggccgagcccgagttcgccagccgcctggagaccgagctgaaggagctgaacacccagtgggaccacatgtgccagcaggtgtacgcccgcaaggaggccctgaagggcggcctggagaagaccgtgagcctgcagaaggacctgagcgagatgcacgagtggatgacccaggccgaggaggagtacctggagcgcgacttcgagtacaagacccccgacgagctgcagaaggccgtggaggagatgaagcgcgccaaggaggaggcccagcagaaggaggccaaggtgaagctgctgaccgagagcgtgaacagcgtgatcgcccaggccccccccgtggcccaggaggccctgaagaaggagctggagaccctgaccaccaactaccagtggctgtgcacccgcctgaacggcaagtgcaagaccctggaggaggtgtgggcctgctggcacgagctgctgagctacctggagaaggccaacaagtggctgaacgaggtggagttcaagctgaagaccaccgagaacatccccggcggcgccgaggagatcagcgaggtgctggacagcctggagaacctgatgcgccacagcgaggacaaccccaaccagatccgcatcctggcccagaccctgaccgacggcggcgtgatggacgagctgatcaacgaggagctggagaccttcaacagccgctggcgcgagctgcacgaggaggccgtgcgccgccagaagctgctggagcagagcatccagagcgcccaggagaccgagaagagcctgcacctgatccaggagagcctgaccttcatcgacaagcagctggccgcctacatcgccgacaaggtggacgccgcccagatgccccaggaggcccagaagatccagagcgacctgaccagccacgagatcagcctggaggagatgaagaagcacaaccagggcaaggaggccgcccagcgcgtgctgagccagatcgacgtggcccagaagaagctgcaggacgtgagcatgaagttccgcctgttccagaagcccgccaacttcgagcagcgcctgcaggagagcaagatgatcctggacgaggtgaagatgcacctgcccgccctggagaccaagagcgtggagcaggaggtggtgcagagccagctgaaccactgcgtgaacctgtacaagagcctgagcgaggtgaagagcgaggtggagatggtgatcaagaccggccgccagatcgtgcagaagaagcagaccgagaaccccaaggagctggacgagcgcgtgaccgccctgaagctgcactacaacgagctgggcgccaaggtgaccgagcgcaagcagcagctggagaagtgcctgaagctgagccgcaagatgcgcaaggagatgaacgtgctgaccgagtggctggccgccaccgacatggagctgaccaagcgcagcgccgtggagggcatgcccagcaacctggacagcgaggtggcctggggcaaggccacccagaaggagatcgagaagcagaaggtgcacctgaagagcatcaccgaggtgggcgaggccctgaagaccgtgctgggcaagaaggagaccctggtggaggacaagctgagcctgctgaacagcaactggatcgccgtgaccagccgcgccgaggagtggctgaacctgctgctggagtaccagaagcacatggagaccttcgaccagaacgtggaccacatcaccaagtggatcatccaggccgacaccctgctggacgagagcgagaagaagaagccccagcagaaggaggacgtgctgaagcgcctgaaggccgagctgaacgacatccgccccaaggtggacagcacccgcgaccaggccgccaacctgatggccaaccgcggcgaccactgccgcaagctggtggagccccagatcagcgagctgaaccaccgcttcgccgccatcagccaccgcatcaagaccggcaaggccagcatccccctgaaggagctggagcagttcaacagcgacatccagaagctgctggagcccctggaggccgagatccagcagggcgtgaacctgaaggaggaggacttcaacaaggacatgaacgaggacaacgagggcaccgtgaaggagctgctgcagcgcggcgacaacctgcagcagcgcatcaccgacgagcgcaagcgcgaggagatcaagatcaagcagcagctgctgcagaccaagcacaacgccctgaaggacctgcgcagccagcgccgcaagaaggccctggagatcagccaccagtggtaccagtacaagcgccaggccgacgacctgctgaagtgcctggacgacatcgagaagaagctggccagcctgcccgagccccgcgacgagcgcaagatcaaggagatcgaccgcgagctgcagaagaagaaggaggagctgaacgccgtgcgccgccaggccgagggcctgagcgaggacggcgccgccatggccgtggagcccacccagatccagctgagcaagcgctggcgcgagatcgagagcaagttcgcccagttccgccgcctgaacttcgcccagatccacaccgtgcgcgaggagaccatgatggtgatgaccgaggacatgcccctggagatcagctacgtgcccagcacctacctgaccgagatcacccacgtgagccaggccctgctggaggtggagcagctgctgaacgcccccgacctgtgcgccaaggacttcgaggacctgttcaagcaggaggagagcctgaagaacatcaaggacagcctgcagcagagcagcggccgcatcgacatcatccacagcaagaagaccgccgccctgcagagcgccacccccgtggagcgcgtgaagctgcaggaggccctgagccagctggacttccagtgggagaaggtgaacaagatgtacaaggaccgccagggccgcttcgaccgcagcgtggagaagtggcgccgcttccactacgacatcaagatcttcaaccagtggctgaccgaggccgagcagttcctgcgcaagacccagatccccgagaactgggagcacgccaagtacaagtggtacctgaaggagctgcaggacggcatcggccagcgccagaccgtggtgcgcaccctgaacgccaccggcgaggagatcatccagcagagcagcaagaccgacgccagcatcctgcaggagaagctgggcagcctgaacctgcgctggcaggaggtgtgcaagcagctgagcgaccgcaagaagcgcctggaggagcagaagaacatcctgagcgagttccagcgcgacctgaacgagttcgtgctgtggctggaggaggccgacaacatcgccagcatccccctggagcccggcaaggagcagcagctgaaggagaagctggagcaggtgaagctgctggtggaggagctgcccctgcgccagggcatcctgaagcagctgaacgagaccggcggccccgtgctggtgagcgcccccatcagccccgaggagcaggacaagctggagaacaagctgaagcagaccaacctgcagtggatcaaggtgagccgcgccctgcccgagaagcagggcgagatcgaggcccagatcaaggacctgggccagctggagaagaagctggaggacctggaggagcagctgaaccacctgctgctgtggctgagccccatccgcaaccagctggagatctacaaccagcccaaccaggagggccccttcgacgtgaaggagaccgagatcgccgtgcaggccaagcagcccgacgtggaggagatcctgagcaagggccagcacctgtacaaggagaagcccgccacccagcccgtgaagcgcaagctggaggacctgagcagcgagtggaaggccgtgaaccgcctgctgcaggagctgcgcgccaagcagcccgacctggcccccggcctgaccaccatcggcgccagccccacccagaccgtgaccctggtgacccagcccgtggtgaccaaggagaccgccatcagcaagctggagatgcccagcagcctgatgctggaggtgcccgccctggccgacttcaaccgcgcctggaccgagctgaccgactggctgagcctgctggaccaggtgatcaagagccagcgcgtgatggtgggcgacctggaggacatcaacgagatgatcatcaagcagaaggccaccatgcaggacctggagcagcgccgcccccagctggaggagctgatcaccgccgcccagaacctgaagaacaagaccagcaaccaggaggcccgcaccatcatcaccgaccgcatcgagcgcatccagaaccagtgggacgaggtgcaggagcacctgcagaaccgccgccagcagctgaacgagatgctgaaggacagcacccagtggctggaggccaaggaggaggccgagcaggtgctgggccaggcccgcgccaagctggagagctggaaggagggcccctacaccgtggacgccatccagaagaagatcaccgagaccaagcagctggccaaggacctgcgccagtggcagaccaacgtggacgtggccaacgacctggccctgaagctgctgcgcgactacagcgccgacgacacccgcaaggtgcacatgatcaccgagaacatcaacgccagctggcgcagcatccacaagcgcgtgagcgagcgcgaggccgccctggaggagacccaccgcctgctgcagcagttccccctggacctggagaagttcctggcctggctgaccgaggccgagaccaccgccaacgtgctgcaggacgccacccgcaaggagcgcctgctggaggacagcaagggcgtgaaggagctgatgaagcagtggcaggacctgcagggcgagatcgaggcccacaccgacgtgtaccacaacctggacgagaacagccagaagatcctgcgcagcctggagggcagcgacgacgccgtgctgctgcagcgccgcctggacaacatgaacttcaagtggagcgagctgcgcaagaagagcctgaacatccgcagccacctggaggccagcagcgaccagtggaagcgcctgcacctgagcctgcaggagctgctggtgtggctgcagctgaaggacgacgagctgagccgccaggcccccatcggcggcgacttccccgccgtgcagaagcagaacgacgtgcaccgcgccttcaagcgcgagctgaagaccaaggagcccgtgatcatgagcaccctggagaccgtgcgcatcttcctgaccgagcagcccctggagggcctggagaagctgtaccaggagccccgcgagctgccccccgaggagcgcgcccagaacgtgacccgcctgctgcgcaagcaggccgaggaggtgaacaccgagtgggagaagctgaacctgcacagcgccgactggcagcgcaagatcgacgagaccctggagcgcctgcgcgagctgcaggaggccaccgacgagctggacctgaagctgcgccaggccgaggtgatcaagggcagctggcagcccgtgggcgacctgctgatcgacagcctgcaggaccacctggagaaggtgaaggccctgcgcggcgagatcgcccccctgaaggagaacgtgagccacgtgaacgacctggcccgccagctgaccaccctgggcatccagctgagcccctacaacctgagcaccctggaggacctgaacacccgctggaagctgctgcaggtggccgtggaggaccgcgtgcgccagctgcacgaggcccaccgcgacttcggccccgccagccagcacttcctgagcaccagcgtgcagggcccctgggagcgcgccatcagccccaacaaggtgccctactacatcaaccacgagacccagaccacctgctgggaccaccccaagatgaccgagctgtaccagagcctggccgacctgaacaacgtgcgcttcagcgcctaccgcaccgccatgaagctgcgccgcctgcagaaggccctgtgcctggacctgctgagcctgagcgccgcctgcgacgccctggaccagcacaacctgaagcagaacgaccagcccatggacatcctgcagatcatcaactgcctgaccaccatctacgaccgcctggagcaggagcacaacaacctggtgaacgtgcccctgtgcgtggacatgtgcctgaactggctgctgaacgtgtacgacaccggccgcaccggccgcatccgcgtgctgagcttcaagaccggcatcatcagcctgtgcaaggcccacctggaggacaagtaccgctacctgttcaagcaggtggccagcagcaccggcttctgcgaccagcgccgcctgggcctgctgctgcacgacagcatccagatcccccgccagctgggcgaggtggccagcttcggcggcagcaacatcgagcccagcgtgcgcagctgcttccagttcgccaacaacaagcccgagatcgaggccgccctgttcctggactggatgcgcctggagccccagagcatggtgtggctgcccgtgctgcaccgcgtggccgccgccgagaccgccaagcaccaggccaagtgcaacatctgcaaggagtgccccatcatcggcttccgctaccgcagcctgaagcacttcaactacgacatctgccagagctgcttcttcagcggccgcgtggccaagggccacaagatgcactaccccatggtggagtactgcacccccaccaccagcggcgaggacgtgcgcgacttcgccaaggtgctgaagaacaagttccgcaccaagcgctacttcgccaagcacccccgcatgggctacctgcccgtgcagaccgtgctggagggcgacaacatggagacccccgtgaccctgatcaacttctggcccgtggacagcgcccccgccagcagcccccagctgagccacgacgacacccacagccgcatcgagcactacgccagccgcctggccgagatggagaacagcaacggcagctacctgaacgacagcatcagccccaacgagagcatcgacgacgagcacctgctgatccagcactactgccagagcctgaaccaggacagccccctgagccagccccgcagccccgcccagatcctgatcagcctggagagcgaggagcgcggcgagctggagcgcatcctggccgacctggaggaggagaaccgcaacctgcaggccgagtacgaccgcctgaagcagcagcacgagcacaagggcctgagccccctgcccagcccccccgagatgatgcccaccagcccccagagcccccgcgacgccgagctgatcgccgaggccaagctgctgcgccagcacaagggccgcctggaggcccgcatgcagatcctggaggaccacaacaagcagctggagagccagctgcaccgcctgcgccagctgctggagcagccccaggccgaggccaaggtgaacggcaccaccgtgagcagccccagcaccagcctgcagcgcagcgacagcagccagcccatgctgctgcgcgtggtgggcagccagaccagcgacagcatgggcgaggaggacctgctgagccccccccaggacaccagcaccggcctggaggaggtgatggagcagctgaacaacagcttccccagcagccgcggccgcaacacccccggcaagcccatgcgcgaggacaccatg

SEQ ID NO: 35574 - DNA, 1851 bp, synthetic construct
  misc_feature 1..1851: note = Description of Artificial Sequence: Synthetic coding sequence
  source 1..1851: mol_type = other DNA
atgcgcgagcagctgaagggccacgagacccagaccacctgctgggaccaccccaagatgaccgagctgtaccagagcctggccgacctgaacaacgtgcgcttcagcgcctaccgcaccgccatgaagctgcgccgcctgcagaaggccctgtgcctggacctgctgagcctgagcgccgcctgcgacgccctggaccagcacaacctgaagcagaacgaccagcccatggacatcctgcagatcatcaactgcctgaccaccatctacgaccgcctggagcaggagcacaacaacctggtgaacgtgcccctgtgcgtggacatgtgcctgaactggctgctgaacgtgtacgacaccggccgcaccggccgcatccgcgtgctgagcttcaagaccggcatcatcagcctgtgcaaggcccacctggaggacaagtaccgctacctgttcaagcaggtggccagcagcaccggcttctgcgaccagcgccgcctgggcctgctgctgcacgacagcatccagatcccccgccagctgggcgaggtggccagcttcggcggcagcaacatcgagcccagcgtgcgcagctgcttccagttcgccaacaacaagcccgagatcgaggccgccctgttcctggactggatgcgcctggagccccagagcatggtgtggctgcccgtgctgcaccgcgtggccgccgccgagaccgccaagcaccaggccaagtgcaacatctgcaaggagtgccccatcatcggcttccgctaccgcagcctgaagcacttcaactacgacatctgccagagctgcttcttcagcggccgcgtggccaagggccacaagatgcactaccccatggtggagtactgcacccccaccaccagcggcgaggacgtgcgcgacttcgccaaggtgctgaagaacaagttccgcaccaagcgctacttcgccaagcacccccgcatgggctacctgcccgtgcagaccgtgctggagggcgacaacatggagacccccgtgaccctgatcaacttctggcccgtggacagcgcccccgccagcagcccccagctgagccacgacgacacccacagccgcatcgagcactacgccagccgcctggccgagatggagaacagcaacggcagctacctgaacgacagcatcagccccaacgagagcatcgacgacgagcacctgctgatccagcactactgccagagcctgaaccaggacagccccctgagccagccccgcagccccgcccagatcctgatcagcctggagagcgaggagcgcggcgagctggagcgcatcctggccgacctggaggaggagaaccgcaacctgcaggccgagtacgaccgcctgaagcagcagcacgagcacaagggcctgagccccctgcccagcccccccgagatgatgcccaccagcccccagagcccccgcgacgccgagctgatcgccgaggccaagctgctgcgccagcacaagggccgcctggaggcccgcatgcagatcctggaggaccacaacaagcagctggagagccagctgcaccgcctgcgccagctgctggagcagccccaggccgaggccaaggtgaacggcaccaccgtgagcagccccagcaccagcctgcagcgcagcgacagcagccagcccatgctgctgcgcgtggtgggcagccagaccagcgacagcatgggcgaggaggacctgctgagccccccccaggacaccagcaccggcctggaggaggtgatggagcagctgaacaacagcttccccagcagccgcggccgcaacacccccggcaagcccatgcgcgaggacaccatg

SEQ ID NO: 35575 - DNA, 3675 bp, synthetic construct
  misc_feature 1..3675: note = Description of Artificial Sequence: Synthetic coding sequence
  source 1..3675: mol_type = other DNA
atgcccagcagcctgatgctggaggtgcccgccctggccgacttcaaccgcgcctggaccgagctgaccgactggctgagcctgctggaccaggtgatcaagagccagcgcgtgatggtgggcgacctggaggacatcaacgagatgatcatcaagcagaaggccaccatgcaggacctggagcagcgccgcccccagctggaggagctgatcaccgccgcccagaacctgaagaacaagaccagcaaccaggaggcccgcaccatcatcaccgaccgcatcgagcgcatccagaaccagtgggacgaggtgcaggagcacctgcagaaccgccgccagcagctgaacgagatgctgaaggacagcacccagtggctggaggccaaggaggaggccgagcaggtgctgggccaggcccgcgccaagctggagagctggaaggagggcccctacaccgtggacgccatccagaagaagatcaccgagaccaagcagctggccaaggacctgcgccagtggcagaccaacgtggacgtggccaacgacctggccctgaagctgctgcgcgactacagcgccgacgacacccgcaaggtgcacatgatcaccgagaacatcaacgccagctggcgcagcatccacaagcgcgtgagcgagcgcgaggccgccctggaggagacccaccgcctgctgcagcagttccccctggacctggagaagttcctggcctggctgaccgaggccgagaccaccgccaacgtgctgcaggacgccacccgcaaggagcgcctgctggaggacagcaagggcgtgaaggagctgatgaagcagtggcaggacctgcagggcgagatcgaggcccacaccgacgtgtaccacaacctggacgagaacagccagaagatcctgcgcagcctggagggcagcgacgacgccgtgctgctgcagcgccgcctggacaacatgaacttcaagtggagcgagctgcgcaagaagagcctgaacatccgcagccacctggaggccagcagcgaccagtggaagcgcctgcacctgagcctgcaggagctgctggtgtggctgcagctgaaggacgacgagctgagccgccaggcccccatcggcggcgacttccccgccgtgcagaagcagaacgacgtgcaccgcgccttcaagcgcgagctgaagaccaaggagcccgtgatcatgagcaccctggagaccgtgcgcatcttcctgaccgagcagcccctggagggcctggagaagctgtaccaggagccccgcgagctgccccccgaggagcgcgcccagaacgtgacccgcctgctgcgcaagcaggccgaggaggtgaacaccgagtgggagaagctgaacctgcacagcgccgactggcagcgcaagatcgacgagaccctggagcgcctgcgcgagctgcaggaggccaccgacgagctggacctgaagctgcgccaggccgaggtgatcaagggcagctggcagcccgtgggcgacctgctgatcgacagcctgcaggaccacctggagaaggtgaaggccctgcgcggcgagatcgcccccctgaaggagaacgtgagccacgtgaacgacctggcccgccagctgaccaccctgggcatccagctgagcccctacaacctgagcaccctggaggacctgaacacccgctggaagctgctgcaggtggccgtggaggaccgcgtgcgccagctgcacgaggcccaccgcgacttcggccccgccagccagcacttcctgagcaccagcgtgcagggcccctgggagcgcgccatcagccccaacaaggtgccctactacatcaaccacgagacccagaccacctgctgggaccaccccaagatgaccgagctgtaccagagcctggccgacctgaacaacgtgcgcttcagcgcctaccgcaccgccatgaagctgcgccgcctgcagaaggccctgtgcctggacctgctgagcctgagcgccgcctgcgacgccctggaccagcacaacctgaagcagaacgaccagcccatggacatcctgcagatcatcaactgcctgaccaccatctacgaccgcctggagcaggagcacaacaacctggtgaacgtgcccctgtgcgtggacatgtgcctgaactggctgctgaacgtgtacgacaccggccgcaccggccgcatccgcgtgctgagcttcaagaccggcatcatcagcctgtgcaaggcccacctggaggacaagtaccgctacctgttcaagcaggtggccagcagcaccggcttctgcgaccagcgccgcctgggcctgctgctgcacgacagcatccagatcccccgccagctgggcgaggtggccagcttcggcggcagcaacatcgagcccagcgtgcgcagctgcttccagttcgccaacaacaagcccgagatcgaggccgccctgttcctggactggatgcgcctggagccccagagcatggtgtggctgcccgtgctgcaccgcgtggccgccgccgagaccgccaagcaccaggccaagtgcaacatctgcaaggagtgccccatcatcggcttccgctaccgcagcctgaagcacttcaactacgacatctgccagagctgcttcttcagcggccgcgtggccaagggccacaagatgcactaccccatggtggagtactgcacccccaccaccagcggcgaggacgtgcgcgacttcgccaaggtgctgaagaacaagttccgcaccaagcgctacttcgccaagcacccccgcatgggctacctgcccgtgcagaccgtgctggagggcgacaacatggagacccccgtgaccctgatcaacttctggcccgtggacagcgcccccgccagcagcccccagctgagccacgacgacacccacagccgcatcgagcactacgccagccgcctggccgagatggagaacagcaacggcagctacctgaacgacagcatcagccccaacgagagcatcgacgacgagcacctgctgatccagcactactgccagagcctgaaccaggacagccccctgagccagccccgcagccccgcccagatcctgatcagcctggagagcgaggagcgcggcgagctggagcgcatcctggccgacctggaggaggagaaccgcaacctgcaggccgagtacgaccgcctgaagcagcagcacgagcacaagggcctgagccccctgcccagcccccccgagatgatgcccaccagcccccagagcccccgcgacgccgagctgatcgccgaggccaagctgctgcgccagcacaagggccgcctggaggcccgcatgcagatcctggaggaccacaacaagcagctggagagccagctgcaccgcctgcgccagctgctggagcagccccaggccgaggccaaggtgaacggcaccaccgtgagcagccccagcaccagcctgcagcgcagcgacagcagccagcccatgctgctgcgcgtggtgggcagccagaccagcgacagcatgggcgaggaggacctgctgagccccccccaggacaccagcaccggcctggaggaggtgatggagcagctgaacaacagcttccccagcagccgcggccgcaacacccccggcaagcccatgcgcgaggacaccatg

SEQ ID NO: 35576 - DNA, 1905 bp, synthetic construct
  misc_feature 1..1905: note = Description of Artificial Sequence: Synthetic coding sequence
  source 1..1905: mol_type = other DNA
atgcgcgagcagctgaagggccacgagacccagaccacctgctgggaccaccccaagatgaccgagctgtaccagagcctggccgacctgaacaacgtgcgcttcagcgcctaccgcaccgccatgaagctgcgccgcctgcagaaggccctgtgcctggacctgctgagcctgagcgccgcctgcgacgccctggaccagcacaacctgaagcagaacgaccagcccatggacatcctgcagatcatcaactgcctgaccaccatctacgaccgcctggagcaggagcacaacaacctggtgaacgtgcccctgtgcgtggacatgtgcctgaactggctgctgaacgtgtacgacaccggccgcaccggccgcatccgcgtgctgagcttcaagaccggcatcatcagcctgtgcaaggcccacctggaggacaagtaccgctacctgttcaagcaggtggccagcagcaccggcttctgcgaccagcgccgcctgggcctgctgctgcacgacagcatccagatcccccgccagctgggcgaggtggccagcttcggcggcagcaacatcgagcccagcgtgcgcagctgcttccagttcgccaacaacaagcccgagatcgaggccgccctgttcctggactggatgcgcctggagccccagagcatggtgtggctgcccgtgctgcaccgcgtggccgccgccgagaccgccaagcaccaggccaagtgcaacatctgcaaggagtgccccatcatcggcttccgctaccgcagcctgaagcacttcaactacgacatctgccagagctgcttcttcagcggccgcgtggccaagggccacaagatgcactaccccatggtggagtactgcacccccaccaccagcggcgaggacgtgcgcgacttcgccaaggtgctgaagaacaagttccgcaccaagcgctacttcgccaagcacccccgcatgggctacctgcccgtgcagaccgtgctggagggcgacaacatggagacccccgtgaccctgatcaacttctggcccgtggacagcgcccccgccagcagcccccagctgagccacgacgacacccacagccgcatcgagcactacgccagccgcctggccgagatggagaacagcaacggcagctacctgaacgacagcatcagccccaacgagagcatcgacgacgagcacctgctgatccagcactactgccagagcctgaaccaggacagccccctgagccagccccgcagccccgcccagatcctgatcagcctggagagcgaggagcgcggcgagctggagcgcatcctggccgacctggaggaggagaaccgcaacctgcaggccgagtacgaccgcctgaagcagcagcacgagcacaagggcctgagccccctgcccagcccccccgagatgatgcccaccagcccccagagcccccgcgacgccgagctgatcgccgaggccaagctgctgcgccagcacaagggccgcctggaggcccgcatgcagatcctggaggaccacaacaagcagctggagagccagctgcaccgcctgcgccagctgctggagcagccccaggccgaggccaaggtgaacggcaccaccgtgagcagccccagcaccagcctgcagcgcagcgacagcagccagcccatgctgctgcgcgtggtgggcagccagaccagcgacagcatgggcgaggaggacctgctgagccccccccaggacaccagcaccggcctggaggaggtgatggagcagctgaacaacagcttccccagcagccgcggccacaacgtgggcagcctgttccacatggccgacgacctgggccgcgccatggagagcctggtgagcgtgatgaccgacgaggagggcgccgag

SEQ ID NO: 35577 - DNA, 3729 bp, synthetic construct
  misc_feature 1..3729: note = Description of Artificial Sequence: Synthetic coding sequence
  source 1..3729: mol_type = other DNA
atgcccagcagcctgatgctggaggtgcccgccctggccgacttcaaccgcgcctggaccgagctgaccgactggctgagcctgctggaccaggtgatcaagagccagcgcgtgatggtgggcgacctggaggacatcaacgagatgatcatcaagcagaaggccaccatgcaggacctggagcagcgccgcccccagctggaggagctgatcaccgccgcccagaacctgaagaacaagaccagcaaccaggaggcccgcaccatcatcaccgaccgcatcgagcgcatccagaaccagtgggacgaggtgcaggagcacctgcagaaccgccgccagcagctgaacgagatgctgaaggacagcacccagtggctggaggccaaggaggaggccgagcaggtgctgggccaggcccgcgccaagctggagagctggaaggagggcccctacaccgtggacgccatccagaagaagatcaccgagaccaagcagctggccaaggacctgcgccagtggcagaccaacgtggacgtggccaacgacctggccctgaagctgctgcgcgactacagcgccgacgacacccgcaaggtgcacatgatcaccgagaacatcaacgccagctggcgcagcatccacaagcgcgtgagcgagcgcgaggccgccctggaggagacccaccgcctgctgcagcagttccccctggacctggagaagttcctggcctggctgaccgaggccgagaccaccgccaacgtgctgcaggacgccacccgcaaggagcgcctgctggaggacagcaagggcgtgaaggagctgatgaagcagtggcaggacctgcagggcgagatcgaggcccacaccgacgtgtaccacaacctggacgagaacagccagaagatcctgcgcagcctggagggcagcgacgacgccgtgctgctgcagcgccgcctggacaacatgaacttcaagtggagcgagctgcgcaagaagagcctgaacatccgcagccacctggaggccagcagcgaccagtggaagcgcctgcacctgagcctgcaggagctgctggtgtggctgcagctgaaggacgacgagctgagccgccaggcccccatcggcggcgacttccccgccgtgcagaagcagaacgacgtgcaccgcgccttcaagcgcgagctgaagaccaaggagcccgtgatcatgagcaccctggagaccgtgcgcatcttcctgaccgagcagcccctggagggcctggagaagctgtaccaggagccccgcgagctgccccccgaggagcgcgcccagaacgtgacccgcctgctgcgcaagcaggccgaggaggtgaacaccgagtgggagaagctgaacctgcacagcgccgactggcagcgcaagatcgacgagaccctggagcgcctgcgcgagctgcaggaggccaccgacgagctggacctgaagctgcgccaggccgaggtgatcaagggcagctggcagcccgtgggcgacctgctgatcgacagcctgcaggaccacctggagaaggtgaaggccctgcgcggcgagatcgcccccctgaaggagaacgtgagccacgtgaacgacctggcccgccagctgaccaccctgggcatccagctgagcccctacaacctgagcaccctggaggacctgaacacccgctggaagctgctgcaggtggccgtggaggaccgcgtgcgccagctgcacgaggcccaccgcgacttcggccccgccagccagcacttcctgagcaccagcgtgcagggcccctgggagcgcgccatcagccccaacaaggtgccctactacatcaaccacgagacccagaccacctgctgggaccaccccaagatgaccgagctgtaccagagcctggccgacctgaacaacgtgcgcttcagcgcctaccgcaccgccatgaagctgcgccgcctgcagaaggccctgtgcctggacctgctgagcctgagcgccgcctgcgacgccctggaccagcacaacctgaagcagaacgaccagcccatggacatcctgcagatcatcaactgcctgaccaccatctacgaccgcctggagcaggagcacaacaacctggtgaacgtgcccctgtgcgtggacatgtgcctgaactggctgctgaacgtgtacgacaccggccgcaccggccgcatccgcgtgctgagcttcaagaccggcatcatcagcctgtgcaaggcccacctggaggacaagtaccgctacctgttcaagcaggtggccagcagcaccggcttctgcgaccagcgccgcctgggcctgctgctgcacgacagcatccagatcccccgccagctgggcgaggtggccagcttcggcggcagcaacatcgagcccagcgtgcgcagctgcttccagttcgccaacaacaagcccgagatcgaggccgccctgttcctggactggatgcgcctggagccccagagcatggtgtggctgcccgtgctgcaccgcgtggccgccgccgagaccgccaagcaccaggccaagtgcaacatctgcaaggagtgccccatcatcggcttccgctaccgcagcctgaagcacttcaactacgacatctgccagagctgcttcttcagcggccgcgtggccaagggccacaagatgcactaccccatggtggagtactgcacccccaccaccagcggcgaggacgtgcgcgacttcgccaaggtgctgaagaacaagttccgcaccaagcgctacttcgccaagcacccccgcatgggctacctgcccgtgcagaccgtgctggagggcgacaacatggagacccccgtgaccctgatcaacttctggcccgtggacagcgcccccgccagcagcccccagctgagccacgacgacacccacagccgcatcgagcactacgccagccgcctggccgagatggagaacagcaacggcagctacctgaacgacagcatcagccccaacgagagcatcgacgacgagcacctgctgatccagcactactgccagagcctgaaccaggacagccccctgagccagccccgcagccccgcccagatcctgatcagcctggagagcgaggagcgcggcgagctggagcgcatcctggccgacctggaggaggagaaccgcaacctgcaggccgagtacgaccgcctgaagcagcagcacgagcacaagggcctgagccccctgcccagcccccccgagatgatgcccaccagcccccagagcccccgcgacgccgagctgatcgccgaggccaagctgctgcgccagcacaagggccgcctggaggcccgcatgcagatcctggaggaccacaacaagcagctggagagccagctgcaccgcctgcgccagctgctggagcagccccaggccgaggccaaggtgaacggcaccaccgtgagcagccccagcaccagcctgcagcgcagcgacagcagccagcccatgctgctgcgcgtggtgggcagccagaccagcgacagcatgggcgaggaggacctgctgagccccccccaggacaccagcaccggcctggaggaggtgatggagcagctgaacaacagcttccccagcagccgcggccacaacgtgggcagcctgttccacatggccgacgacctgggccgcgccatggagagcctggtgagcgtgatgaccgacgaggagggcgccgag

SEQ ID NO: 35578 - DNA, 3345 bp, synthetic construct
  misc_feature 1..3345: note = Description of Artificial Sequence: Synthetic coding sequence
  source 1..3345: mol_type = other DNA
atgcccagcagcctgatgctggaggtgcccgccctggccgacttcaaccgcgcctggaccgagctgaccgactggctgagcctgctggaccaggtgatcaagagccagcgcgtgatggtgggcgacctggaggacatcaacgagatgatcatcaagcagaaggccaccatgcaggacctggagcagcgccgcccccagctggaggagctgatcaccgccgcccagaacctgaagaacaagaccagcaaccaggaggcccgcaccatcatcaccgaccgcatcgagcgcatccagaaccagtgggacgaggtgcaggagcacctgcagaaccgccgccagcagctgaacgagatgctgaaggacagcacccagtggctggaggccaaggaggaggccgagcaggtgctgggccaggcccgcgccaagctggagagctggaaggagggcccctacaccgtggacgccatccagaagaagatcaccgagaccaagcagctggccaaggacctgcgccagtggcagaccaacgtggacgtggccaacgacctggccctgaagctgctgcgcgactacagcgccgacgacacccgcaaggtgcacatgatcaccgagaacatcaacgccagctggcgcagcatccacaagcgcgtgagcgagcgcgaggccgccctggaggagacccaccgcctgctgcagcagttccccctggacctggagaagttcctggcctggctgaccgaggccgagaccaccgccaacgtgctgcaggacgccacccgcaaggagcgcctgctggaggacagcaagggcgtgaaggagctgatgaagcagtggcaggacctgcagggcgagatcgaggcccacaccgacgtgtaccacaacctggacgagaacagccagaagatcctgcgcagcctggagggcagcgacgacgccgtgctgctgcagcgccgcctggacaacatgaacttcaagtggagcgagctgcgcaagaagagcctgaacatccgcagccacctggaggccagcagcgaccagtggaagcgcctgcacctgagcctgcaggagctgctggtgtggctgcagctgaaggacgacgagctgagccgccaggcccccatcggcggcgacttccccgccgtgcagaagcagaacgacgtgcaccgcgccttcaagcgcgagctgaagaccaaggagcccgtgatcatgagcaccctggagaccgtgcgcatcttcctgaccgagcagcccctggagggcctggagaagctgtaccaggagccccgcgagctgccccccgaggagcgcgcccagaacgtgacccgcctgctgcgcaagcaggccgaggaggtgaacaccgagtgggagaagctgaacctgcacagcgccgactggcagcgcaagatcgacgagaccctggagcgcctgcgcgagctgcaggaggccaccgacgagctggacctgaagctgcgccaggccgaggtgatcaagggcagctggcagcccgtgggcgacctgctgatcgacagcctgcaggaccacctggagaaggtgaaggccctgcgcggcgagatcgcccccctgaaggagaacgtgagccacgtgaacgacctggcccgccagctgaccaccctgggcatccagctgagcccctacaacctgagcaccctggaggacctgaacacccgctggaagctgctgcaggtggccgtggaggaccgcgtgcgccagctgcacgaggcccaccgcgacttcggccccgccagccagcacttcctgagcaccagcgtgcagggcccctgggagcgcgccatcagccccaacaaggtgccctactacatcaaccacgagacccagaccacctgctgggaccaccccaagatgaccgagctgtaccagagcctggccgacctgaacaacgtgcgcttcagcgcctaccgcaccgccatgaagctgcgccgcctgcagaaggccctgtgcctggacctgctgagcctgagcgccgcctgcgacgccctggaccagcacaacctgaagcagaacgaccagcccatggacatcctgcagatcatcaactgcctgaccaccatctacgaccgcctggagcaggagcacaacaacctggtgaacgtgcccctgtgcgtggacatgtgcctgaactggctgctgaacgtgtacgacaccggccgcaccggccgcatccgcgtgctgagcttcaagaccggcatcatcagcctgtgcaaggcccacctggaggacaagtaccgctacctgttcaagcaggtggccagcagcaccggcttctgcgaccagcgccgcctgggcctgctgctgcacgacagcatccagatcccccgccagctgggcgaggtggccagcttcggcggcagcaacatcgagcccagcgtgcgcagctgcttccagttcgccaacaacaagcccgagatcgaggccgccctgttcctggactggatgcgcctggagccccagagcatggtgtggctgcccgtgctgcaccgcgtggccgccgccgagaccgccaagcaccaggccaagtgcaacatctgcaaggagtgccccatcatcggcttccgctaccgcagcctgaagcacttcaactacgacatctgccagagctgcttcttcagcggccgcgtggccaagggccacaagatgcactaccccatggtggagtactgcacccccaccaccagcggcgaggacgtgcgcgacttcgccaaggtgctgaagaacaagttccgcaccaagcgctacttcgccaagcacccccgcatgggctacctgcccgtgcagaccgtgctggagggcgacaacatggagaccaacctgcaggccgagtacgaccgcctgaagcagcagcacgagcacaagggcctgagccccctgcccagcccccccgagatgatgcccaccagcccccagagcccccgcgacgccgagctgatcgccgaggccaagctgctgcgccagcacaagggccgcctggaggcccgcatgcagatcctggaggaccacaacaagcagctggagagccagctgcaccgcctgcgccagctgctggagcagccccaggccgaggccaaggtgaacggcaccaccgtgagcagccccagcaccagcctgcagcgcagcgacagcagccagcccatgctgctgcgcgtggtgggcagccagaccagcgacagcatgggcgaggaggacctgctgagccccccccaggacaccagcaccggcctggaggaggtgatggagcagctgaacaacagcttccccagcagccgcggccgcaacacccccggcaagcccatgcgcgaggacaccatg

SEQ ID NO: 35579 - DNA, 1383 bp, synthetic construct
  misc_feature 1..1383: note = Description of Artificial Sequence: Synthetic coding sequence
  source 1..1383: mol_type = other DNA
atgagccgcatcaacaagaacgtggtgctggccctgctgaccctgaccagcagcgccttcctgctgttccagctgtactactacaagcactacctgagcaccaagaacggcgccggcctgagcaagagcaagggcagccgcatcggcttcgacagcacccagtggcgcgccgtgaagaagttcatcatgctgaccagcaaccagaacgtgcccgtgttcctgatcgaccccctgatcctggagctgatcaacaagaacttcgagcaggtgaagaacaccagccacggcagcaccagccagtgcaagttcttctgcgtgccccgcgacttcaccgccttcgccctgcagtaccacctgtggaagaacgaggagggctggttccgcatcgccgagaacatgggcttccagtgcctgaagatcgagagcaaggacccccgcctggacggcatcgacagcctgagcggcaccgagatccccctgcactacatctgcaagctggccacccacgccatccacctggtggtgttccacgagcgcagcggcaactacctgtggcacggccacctgcgcctgaaggagcacatcgaccgcaagttcgtgcccttccgcaagctgcagttcggccgctaccccggcgccttcgaccgccccgagctgcagcaggtgaccgtggacggcctggaggtgctgatccccaaggaccccatgcacttcgtggaggaggtgccccacagccgcttcatcgagtgccgctacaaggaggcccgcgccttcttccagcagtacctggacgacaacaccgtggaggccgtggccttccgcaagagcgccaaggagctgctgcagctggccgccaagaccctgaacaagctgggcgtgcccttctggctgagcagcggcacctgcctgggctggtaccgccagtgcaacatcatcccctacagcaaggacgtggacctgggcatcttcatccaggactacaagagcgacatcatcctggccttccaggacgccggcctgcccctgaagcacaagttcggcaaggtggaggacagcctggagctgagcttccagggcaaggacgacgtgaagctggacgtgttcttcttctacgaggagaccgaccacatgtggaacggcggcacccaggccaagaccggcaagaagttcaagtacctgttccccaagttcaccctgtgctggaccgagttcgtggacatgaaggtgcacgtgccctgcgagaccctggagtacatcgaggccaactacggcaagacctggaagatccccgtgaagacctgggactggaagcgcagcccccccaacgtgcagcccaacggcatctggcccatcagcgagtgggacgaggtgatccagctgtac

SEQ ID NO: 35580 - DNA, 1290 bp, synthetic construct
  misc_feature 1..1290: note = Description of Artificial Sequence: Synthetic coding sequence
  source 1..1290: mol_type = other DNA
atgagccgcatcaacaagaacgtggtgctggccctgctgaccctgaccagcagcgccttcctgctgttccagctgtactactacaagcactacctgagcaccaagaacggcgccggcctgagcaagagcaagggcagccgcatcggcttcgacagcacccagtggcgcgccgtgaagaagttcatcatgctgaccagcaaccagaacgtgcccgtgttcctgatcgaccccctgatcctggagctgatcaacaagaacttcgagcaggtgaagaacaccagccacggcagcaccagccagtgcaagttcttctgcgtgccccgcgacttcaccgccttcgccctgcagtaccacctgtggaagaacgaggagggctggttccgcatcgccgagaacatgggcttccagtgcctgaagatcgagagcaaggacccccgcctggacggcatcgacagcctgagcggcaccgagatccccctgcactacatctgcaagctggccacccacgccatccacctggtggtgttccacgagcgcagcggcaactacctgtggcacggccacctgcgcctgaaggagcacatcgaccgcaagttcgtgcccttccgcaagctgcagttcggccgctaccccggcgccttcgaccgccccgagctgcagcaggtgaccgtggacggcctggaggtgctgatccccaaggaccccatgcacttcgtggaggaggtgccccacagccgcttcatcgagtgccgctacaaggaggcccgcgccttcttccagcagtacctggacgacaacaccgtggaggccgtggccttccgcaagagcgccaaggagctgctgcagctggccgccaagaccctgaacaagctgggcgtgcccttctggctgagcagcggcacctgcctgggctggtaccgccagtgcaacatcatcccctacagcaaggacgtggacctgggcatcttcatccaggactacaagagcgacatcatcctggccttccaggacgccggcctgcccctgaagcacaagttcggcaaggtggaggacagcctggagctgagcttccagggcaaggacgacgtgaagctggacgtgttcttcttctacgaggagaccgaccacatgtggaacggcggcacccaggccaagaccggcaagaagttcaagtacctgttccccaagttcaccctgtgctggaccgagttcgtggacatgaaggtgcacgtgccctgcgagaccctggagtacatcgaggccaactacggcaagaaccagcagggcgcc

SEQ ID NO: 35581 - DNA, 705 bp, synthetic construct
  misc_feature 1..705: note = Description of Artificial Sequence: Synthetic coding sequence
  source 1..705: mol_type = other DNA
atgatcctggaggtgggcgagaacaacggcttcttcagcaagagcctgctgccccgctacgccagcaagaagctgaagagcagcctgccccacagccgcgccgtgaagaagttcatcatgctgaccagcaaccagaacgtgcccgtgttcctgatcgaccccctgatcctggagctgatcaacaagaacttcgagcaggtgaagaacaccagccacggcagcaccagccagtgcaagttcttctgcgtgccccgcgacttcaccgccttcgccctgcagtaccacctgtggaagaacgaggagggctggttccgcatcgccgagaacatgggcttccagtgcctgaagatcgagagcaaggacccccgcctggacggcatcgacagcctgagcggcaccgagatccccctgcactacatctgcaagctggccacccacgccatccacctggtggtgttccacgagcgcagcggcaactacctgtggcacggccacctgcgcctgaaggagcacatcgaccgcaagttcgtgcccttccgcaagctgcagttcggccgctaccccggcgccttcgaccgccccgagctgcagcaggtgaccgtggacggcctggaggtgctgatccccaaggaccccatgcacttcgtggaggaggtgccccacagccgcttcatcgagtgccgctacaaggaggcccgcgccttc

SEQ ID NO: 35582 - DNA, 549 bp, synthetic construct
  misc_feature 1..549: note = Description of Artificial Sequence: Synthetic coding sequence
  source 1..549: mol_type = other DNA
atgagccgcatcaacaagaacgtggtgctggccctgctgaccctgaccagcagcgccttcctgctgttccagctgtactactacaagcactacctgagcaccaagaacggcgccggcctgagcaagagcaagggcagccgcatcggcttcgacagcacccagtggcgcgccgtgaagaagttcatcatgctgaccagcaaccagaacgtgcccgtgttcctgatcgaccccctgatcctggagctgatcaacaagaacttcgagcaggtgaagaacaccagccacggcagcaccagccagtgcaagttcttctgcgtgccccgcgacttcaccgccttcgccctgcagtaccacctgtggaagaacgaggagggctggttccgcatcgccgagaacatgggcttccagtgcctgaagatcgagagcaaggacccccgcctggacggcatcgacagcctgagcggcaccgagatccccctgcactacatctgcaagctggccacccacgccatccacctggtggtgttccacgagcgcagcggcaactac

SEQ ID NO: 35583 - DNA, 477 bp, synthetic construct
  misc_feature 1..477: note = Description of Artificial Sequence: Synthetic coding sequence
  source 1..477: mol_type = other DNA
tggtaccgccagtgcaacatcatcccctacagcaaggacgtggacctgggcatcttcatccaggactacaagagcgacatcatcctggccttccaggacgccggcctgcccctgaagcacaagttcggcaaggtggaggacagcctggagctgagcttccagggcaaggacgacgtgaagctggacgtgttcttcttctacgaggagaccgaccacatgtggaacggcggcacccaggccaagaccggcaagaagttcaagtacctgttccccaagttcaccctgtgctggaccgagttcgtggacatgaaggtgcacgtgccctgcgagaccctggagtacatcgaggccaactacggcaaggaggccgagagctacatcctgagcatgctgttccgcaccaccttctggagcctggccgacttccccctgacccccgagaacaacagcagcctgaagaacggcaacctgaacgtg

SEQ ID NO: 35584 - DNA, 813 bp, synthetic construct
  misc_feature 1..813: note = Description of Artificial Sequence: Synthetic coding sequence
  source 1..813: mol_type = other DNA
atgagccgcatcaacaagaacgtggtgctggccctgctgaccctgaccagcagcgccttcctgctgttccagctgtactactacaagcactacctgagcaccaagaacggcgccggcctgagcaagagcaagggcagccgcatcggcttcgacagcacccagtggcgcgccgtgaagaagttcatcatgctgaccagcaaccagaacgtgcccgtgttcctgatcgaccccctgatcctggagctgatcaacaagaacttcgagcaggtgaagaacaccagccacggcagcaccagccagtgcaagttcttctgcgtgccccgcgacttcaccgccttcgccctgcagtaccacctgtggaagaacgaggagggctggttccgcatcgccgagaacatgggcttccagtgcctgaagatcgagagcaaggacccccgcctggacggcatcgacagcctgagcggcaccgagatccccctgcactacatctgcaagctggccacccacgccatccacctggtggtgttccacgagcgcagcggcaactacctgtggcacggccacctgcgcctgaaggagcacatcgaccgcaagttcgtgcccttccgcaagctgcagttcggccgctaccccggcgccttcgaccgccccgagctgcagcaggtgaccgtggacggcctggaggtgctgatccccaaggaccccatgcacttcgtggaggaggtgccccacagccgcttcatcgagtgccgctacaaggaggcccgcgccttcttccagatccccgtgagcgaggtgtacaccgtgctggac

SEQ ID NO: 35585 - DNA, 1485 bp, synthetic construct
  misc_feature 1..1485: note = Description of Artificial Sequence: Synthetic coding sequence
  source 1..1485: mol_type = other DNA
atgcgcctgacccgctgccaggccgccctggccgccgccatcaccctgaacctgctggtgctgttctacgtgagctggctgcagcaccagccccgcaacagccgcgcccgcggcccccgccgcgccagcgccgccggcccccgcgtgaccgtgctggtgcgcgagttcgaggccttcgacaacgccgtgcccgagctggtggacagcttcctgcagcaggaccccgcccagcccgtggtggtggccgccgacaccctgccctacccccccctggccctgccccgcatccccaacgtgcgcctggccctgctgcagcccgccctggaccgccccgccgccgccagccgccccgagacctacgtggccaccgagttcgtggccctggtgcccgacggcgcccgcgccgaggcccccggcctgctggagcgcatggtggaggccctgcgcgccggcagcgcccgcctggtggccgcccccgtggccaccgccaaccccgcccgctgcctggccctgaacgtgagcctgcgcgagtggaccgcccgctacggcgccgcccccgccgccccccgctgcgacgccctggacggcgacgccgtggtgctgctgcgcgcccgcgacctgttcaacctgagcgcccccctggcccgccccgtgggcaccagcctgttcctgcagaccgccctgcgcggctgggccgtgcagctgctggacctgaccttcgccgccgcccgccagccccccctggccaccgcccacgcccgctggaaggccgagcgcgagggccgcgcccgccgcgccgccctgctgcgcgccctgggcatccgcctggtgagctgggagggcggccgcctggagtggttcggctgcaacaaggagaccacccgctgcttcggcaccgtggtgggcgacacccccgcctacctgtacgaggagcgctggacccccccctgctgcctgcgcgccctgcgcgagaccgcccgctacgtggtgggcgtgctggaggccgccggcgtgcgctactggctggagggcggcagcctgctgggcgccgcccgccacggcgacatcatcccctgggactacgacgtggacctgggcatctacctggaggacgtgggcaactgcgagcagctgcgcggcgccgaggccggcagcgtggtggacgagcgcggcttcgtgtgggagaaggccgtggagggcgacttcttccgcgtgcagtacagcgagagcaaccacctgcacgtggacctgtggcccttctacccccgcaacggcgtgatgaccaaggacacctggctggaccaccgccaggacgtggagttccccgagcacttcctgcagcccctggtgcccctgcccttcgccggcttcgtggcccaggcccccaacaactaccgccgcttcctggagctgaagttcggccccggcgtgatcgagaacccccagtaccccaaccccgccctgctgagcctgaccggcagcggc

SEQ ID NO: 35586 - DNA, 1809 bp, synthetic construct
  misc_feature 1..1809: note = Description of Artificial Sequence: Synthetic coding sequence
  source 1..1809: mol_type = other DNA
atggccagcgccagcaccagcaagtacaacagccacagcctggagaacgagagcatcaagcgcaccagccgcgacggcgtgaaccgcgacctgaccgaggccgtgccccgcctgcccggcgagaccctgatcaccgacaaggaggtgatctacatctgccccttcaacggccccatcaagggccgcgtgtacatcaccaactaccgcctgtacctgcgcagcctggagaccgacagcagcctgatcctggacgtgcccctgggcgtgatcagccgcatcgagaagatgggcggcgccaccagccgcggcgagaacagctacggcctggacatcacctgcaaggacatgcgcaacctgcgcttcgccctgaagcaggagggccacagccgccgcgacatgttcgagatcctgacccgctacgccttccccctggcccacagcctgcccctgttcgccttcctgaacgaggagaagttcaacgtggacggctggaccgtgtacaaccccgtggaggagtaccgccgccagggcctgcccaaccaccactggcgcatcaccttcatcaacaagtgctacgagctgtgcgacacctaccccgccctgctggtggtgccctaccgcgccagcgacgacgacctgcgccgcgtggccaccttccgcagccgcaaccgcatccccgtgctgagctggatccaccccgagaacaagaccgtgatcgtgcgctgcagccagcccctggtgggcatgagcggcaagcgcaacaaggacgacgagaagtacctggacgtgatccgcgagaccaacaagcagatcagcaagctgaccatctacgacgcccgccccagcgtgaacgccgtggccaacaaggccaccggcggcggctacgagagcgacgacgcctaccacaacgccgagctgttcttcctggacatccacaacatccacgtgatgcgcgagagcctgaagaaggtgaaggacatcgtgtaccccaacgtggaggagagccactggctgagcagcctggagagcacccactggctggagcacatcaagctggtgctgaccggcgccatccaggtggccgacaaggtgagcagcggcaagagcagcgtgctggtgcactgcagcgacggctgggaccgcaccgcccagctgaccagcctggccatgctgatgctggacagcttctaccgcagcatcgagggcttcgagatcctggtgcagaaggagtggatcagcttcggccacaagttcgccagccgcatcggccacggcgacaagaaccacaccgacgccgaccgcagccccatcttcctgcagttcatcgactgcgtgtggcagatgagcaagcagttccccaccgccttcgagttcaacgagcagttcctgatcatcatcctggaccacctgtacagctgccgcttcggcaccttcctgttcaactgcgagagcgcccgcgagcgccagaaggtgaccgagcgcaccgtgagcctgtggagcctgatcaacagcaacaaggagaagttcaagaaccccttctacaccaaggagatcaaccgcgtgctgtaccccgtggccagcatgcgccacctggagctgtgggtgaactactacatccgctggaacccccgcatcaagcagcagcagcccaaccccgtggagcagcgctacatggagctgctggccctgcgcgacgagtacatcaagcgcctggaggagctgcagctggccaacagcgccaagctgagcgacccccccaccagccccagcagccccagccagatgatgccccacgtgcagacccacttc

SEQ ID NO: 35587 - DNA, 1698 bp, synthetic construct
  misc_feature 1..1698: note = Description of Artificial Sequence: Synthetic coding sequence
  source 1..1698: mol_type = other DNA
atggccagcgccagcaccagcaagtacaacagccacagcctggagaacgagagcatcaagcgcaccagccgcgacggcgtgaaccgcgacctgaccgaggccgtgccccgcctgcccggcgagaccctgatcaccgacaaggaggtgatctacatctgccccttcaacggccccatcaagggccgcgtgtacatcaccaactaccgcctgtacctgcgcagcctggagaccgacatgcgcaacctgcgcttcgccctgaagcaggagggccacagccgccgcgacatgttcgagatcctgacccgctacgccttccccctggcccacagcctgcccctgttcgccttcctgaacgaggagaagttcaacgtggacggctggaccgtgtacaaccccgtggaggagtaccgccgccagggcctgcccaaccaccactggcgcatcaccttcatcaacaagtgctacgagctgtgcgacacctaccccgccctgctggtggtgccctaccgcgccagcgacgacgacctgcgccgcgtggccaccttccgcagccgcaaccgcatccccgtgctgagctggatccaccccgagaacaagaccgtgatcgtgcgctgcagccagcccctggtgggcatgagcggcaagcgcaacaaggacgacgagaagtacctggacgtgatccgcgagaccaacaagcagatcagcaagctgaccatctacgacgcccgccccagcgtgaacgccgtggccaacaaggccaccggcggcggctacgagagcgacgacgcctaccacaacgccgagctgttcttcctggacatccacaacatccacgtgatgcgcgagagcctgaagaaggtgaaggacatcgtgtaccccaacgtggaggagagccactggctgagcagcctggagagcacccactggctggagcacatcaagctggtgctgaccggcgccatccaggtggccgacaaggtgagcagcggcaagagcagcgtgctggtgcactgcagcgacggctgggaccgcaccgcccagctgaccagcctggccatgctgatgctggacagcttctaccgcagcatcgagggcttcgagatcctggtgcagaaggagtggatcagcttcggccacaagttcgccagccgcatcggccacggcgacaagaaccacaccgacgccgaccgcagccccatcttcctgcagttcatcgactgcgtgtggcagatgagcaagcagttccccaccgccttcgagttcaacgagcagttcctgatcatcatcctggaccacctgtacagctgccgcttcggcaccttcctgttcaactgcgagagcgcccgcgagcgccagaaggtgaccgagcgcaccgtgagcctgtggagcctgatcaacagcaacaaggagaagttcaagaaccccttctacaccaaggagatcaaccgcgtgctgtaccccgtggccagcatgcgccacctggagctgtgggtgaactactacatccgctggaacccccgcatcaagcagcagcagcccaaccccgtggagcagcgctacatggagctgctggccctgcgcgacgagtacatcaagcgcctggaggagctgcagctggccaacagcgccaagctgagcgacccccccaccagccccagcagccccagccagatgatgccccacgtgcagacccacttc

SEQ ID NO: 35588 - DNA, 1248 bp, synthetic construct
  misc_feature 1..1248: note = Description of Artificial Sequence: Synthetic coding sequence
  source 1..1248: mol_type = other DNA
atgggcggcgccaccagccgcggcgagaacagctacggcctggacatcacctgcaaggacatgcgcaacctgcgcttcgccctgaagcaggagggccacagccgccgcgacatgttcgagatcctgacccgctacgccttccccctggcccacagcctgcccctgttcgccttcctgaacgaggagaagttcaacgtggacggctggaccgtgtacaaccccgtggaggagtaccgccgccagggcctgcccaaccaccactggcgcatcaccttcatcaacaagtgctacgagctgtgcgacacctaccccgccctgctggtggtgccctaccgcgccagcgacgacgacctgcgccgcgtggccaccttccgcagccgcaaccgcatccccgtgctgagctggatccaccccgagaacaagaccgtgatcgtgcgctgcagccagcccctggtgggcatgagcggcaagcgcaacaaggacgacgagaagtacctggacgtgatccgcgagaccaacaagcagatcagcaagctgaccatctacgacgcccgccccagcgtgaacgccgtggccaacaaggccaccggcggcggctacgagagcgacgacgcctaccacaacgccgagctgttcttcctggacatccacaacatccacgtgatgcgcgagagcctgaagaaggtgaaggacatcgtgtaccccaacgtggaggagagccactggctgagcagcctggagagcacccactggctggagcacatcaagctggtgctgaccggcgccatccaggtggccgacaaggtgagcagcggcaagagcagcgtgctggtgcactgcagcgacggctgggaccgcaccgcccagctgaccagcctggccatgctgatgctggacagcttctaccgcagcatcgagggcttcgagatcctggtgcagaaggagtggatcagcttcggccacaagttcgccagccgcatcggccacggcgacaagaaccacaccgacgccgaccgcagccccatcttcctgcagttcatcgactgcgtgtggcagatgagcaagcagttccccaccgccttcgagttcaacgagcagttcctgatcatcatcctggaccacctgtacagctgccgcttcggcaccttcctgttcaactgcgagagcgcccgcgagcgccaggccctgcacttcctgagcctgagcctgtgccgccgcctgcagaagggcctgttcctgtacggccac

SEQ ID NO: 35589 - DNA, 1464 bp, synthetic construct
  misc_feature 1..1464: note = Description of Artificial Sequence: Synthetic coding sequence
  source 1..1464: mol_type = other DNA
atgcgcaacctgcgcttcgccctgaagcaggagggccacagccgccgcgacatgttcgagatcctgacccgctacgccttccccctggcccacagcctgcccctgttcgccttcctgaacgaggagaagttcaacgtggacggctggaccgtgtacaaccccgtggaggagtaccgccgccagggcctgcccaaccaccactggcgcatcaccttcatcaacaagtgctacgagctgtgcgacacctaccccgccctgctggtggtgccctaccgcgccagcgacgacgacctgcgccgcgtggccaccttccgcagccgcaaccgcatccccgtgctgagctggatccaccccgagaacaagaccgtgatcgtgcgctgcagccagcccctggtgggcatgagcggcaagcgcaacaaggacgacgagaagtacctggacgtgatccgcgagaccaacaagcagatcagcaagctgaccatctacgacgcccgccccagcgtgaacgccgtggccaacaaggccaccggcggcggctacgagagcgacgacgcctaccacaacgccgagctgttcttcctggacatccacaacatccacgtgatgcgcgagagcctgaagaaggtgaaggacatcgtgtaccccaacgtggaggagagccactggctgagcagcctggagagcacccactggctggagcacatcaagctggtgctgaccggcgccatccaggtggccgacaaggtgagcagcggcaagagcagcgtgctggtgcactgcagcgacggctgggaccgcaccgcccagctgaccagcctggccatgctgatgctggacagcttctaccgcagcatcgagggcttcgagatcctggtgcagaaggagtggatcagcttcggccacaagttcgccagccgcatcggccacggcgacaagaaccacaccgacgccgaccgcagccccatcttcctgcagttcatcgactgcgtgtggcagatgagcaagcagttccccaccgccttcgagttcaacgagcagttcctgatcatcatcctggaccacctgtacagctgccgcttcggcaccttcctgttcaactgcgagagcgcccgcgagcgccagaaggtgaccgagcgcaccgtgagcctgtggagcctgatcaacagcaacaaggagaagttcaagaaccccttctacaccaaggagatcaaccgcgtgctgtaccccgtggccagcatgcgccacctggagctgtgggtgaactactacatccgctggaacccccgcatcaagcagcagcagcccaaccccgtggagcagcgctacatggagctgctggccctgcgcgacgagtacatcaagcgcctggaggagctgcagctggccaacagcgccaagctgagcgacccccccaccagccccagcagccccagccagatgatgccccacgtgcagacccacttc

SEQ ID NO: 35590 - DNA, 1161 bp, synthetic construct
  misc_feature 1..1161: note = Description of Artificial Sequence: Synthetic coding sequence
  source 1..1161: mol_type = other DNA
atggccgagaccctgttctggacccccctgctggtggtgctgctggccggcctgggcgacaccgaggcccagcagaccaccctgcaccccctggtgggccgcgtgttcgtgcacaccctggaccacgagaccttcctgagcctgcccgagcacgtggccgtgccccccgccgtgcacatcacctaccacgcccacctgcagggccaccccgacctgccccgctggctgcgctacacccagcgcagcccccaccaccccggcttcctgtacggcagcgccacccccgaggaccgcggcctgcaggtgatcgaggtgaccgcctacaaccgcgacagcttcgacaccacccgccagcgcctggtgctggagatcggcgaccccgagggccccctgctgccctaccaggccgagttcctggtgcgcagccacgacgccgaggaggtgctgcccagcacccccgccagccgcttcctgagcgccctgggcggcctgtgggagcccggcgagctgcagctgctgaacgtgaccagcgccctggaccgcggcggccgcgtgcccctgcccatcgagggccgcaaggagggcgtgtacatcaaggtgggcagcgccagccccttcagcacctgcctgaagatggtggccagccccgacagccacgcccgctgcgcccagggccagccccccctgctgagctgctacgacaccctggccccccacttccgcgtggactggtgcaacgtgaccctggtggacaagagcgtgcccgagcccgccgacgaggtgcccacccccggcgacggcatcctggagcacgaccccttcttctgcccccccaccgaggcccccgaccgcgacttcctggtggacgccctggtgaccctgctggtgcccctgctggtggccctgctgctgaccctgctgctggcctacgtgatgtgctgccgccgcgagggccgcctgaagcgcgacctggccaccagcgacatccagatggtgcaccactgcaccatccacggcaacaccgaggagctgcgccagatggccgccagccgcgaggtgccccgccccctgagcaccctgcccatgttcaacgtgcacaccggcgagcgcctgcccccccgcgtggacagcgcccaggtgcccctgatcctggaccagcac

SEQ ID NO: 35591 - DNA, 789 bp, synthetic construct
  misc_feature 1..789: note = Description of Artificial Sequence: Synthetic coding sequence
  source 1..789: mol_type = other DNA
atggccgagaccctgttctggacccccctgctggtggtgctgctggccggcctgggcgacaccgaggcccagcagaccaccctgcaccccctggtgggccgcgtgttcgtgcacaccctggaccacgagaccttcctgagcctgcccgagcacgtggccgtgccccccgccgtgcacatcacctaccacgcccacctgcagggccaccccgacctgccccgctggctgcgctacacccagcgcagcccccaccaccccggcttcctgtacggcagcgccacccccgaggaccgcggcctgcaggtgatcgaggtgaccgcctacaaccgcgacagcttcgacaccacccgccagcgcctggtgctggagatcggcgaccccgagggccccctgctgccctaccaggccgagttcctggtgcgcagccacgacgccgaggaggtgctgcccagcacccccgccagccgcttcctgagcgccctgggcggcctgtgggagcccggcgagctgcagctgctgaacgtgaccagcgccctggaccgcggcggccgcgtgcccctgcccatcgagggccgcaaggagggcctgaagcgcgacctggccaccagcgacatccagatggtgcaccactgcaccatccacggcaacaccgaggagctgcgccagatggccgccagccgcgaggtgccccgccccctgagcaccctgcccatgttcaacgtgcacaccggcgagcgcctgcccccccgcgtggacagcgcccaggtgcccctgatcctggaccagcac

SEQ ID NO: 35592 - DNA, 534 bp, synthetic construct
  misc_feature 1..534: note = Description of Artificial Sequence: Synthetic coding sequence
  source 1..534: mol_type = other DNA
atgagcgtgaccgcctacaaccgcgacagcttcgacaccacccgccagcgcctggtgctggagatcggcgaccccgagggccccctgctgccctaccaggccgagttcctggtgcgcagccacgacgccgaggaggtgctgcccagcacccccgccagccgcttcctgagcgccctgggcggcctgtgggagcccggcgagctgcagctgctgaacgtgaccagcgccctggaccgcggcggccgcgtgcccctgcccatcgagggccgcaaggagggcgtgtacatcaaggtgggcagcgccagccccttcagcacctgcctgaagatggtggccagccccgacagccacgcccgctgcgcccagggccagccccccctgctgagctgctacgacaccctggccccccacttccgcgtggactggtgcaacgtgaccctggtgcgccgcgaccccggcagcggcggcggcgtgggccacggcccccaccccagcccccccagcctgccctgctgcttcctgagccccagcctg

SEQ ID NO: 35593 - DNA, 789 bp, synthetic construct
  misc_feature 1..789: note = Description of Artificial Sequence: Synthetic coding sequence
  source 1..789: mol_type = other DNA
atggccgagaccctgttctggacccccctgctggtggtgctgctggccggcctgggcgacaccgaggcccagcagaccaccctgcaccccctggtgggccgcgtgttcgtgcacaccctggaccacgagaccttcctgagcctgcccgagcacgtggccgtgccccccgccgtgcacatcacctaccacgcccacctgcagggccaccccgacctgccccgctggctgcgctacacccagcgcagcccccaccaccccggcttcctgtacggcagcgccacccccgaggaccgcggcctgcaggtgatcgaggtgaccgcctacaaccgcgacagcttcgacaccacccgccagcgcctggtgctggagatcggcgaccccgagggccccctgctgccctaccaggccgagttcctggtgcgcagccacgacgccgaggaggtgctgcccagcacccccgccagccgcttcctgagcgccctgggcggcctgtgggagcccggcgagctgcagctgctgaacgtgaccagcgccctggaccgcggcggccgcgtgcccctgcccatcgagggccgcaaggaggtgctgctgcgccacctgggcacccccctgatccagatggtgcaccactgcaccatccacggcaacaccgaggagctgcgccagatggccgccagccgcgaggtgccccgccccctgagcaccctgcccatgttcaacgtgcacaccggcgagcgcctgcccccccgcgtggacagcgcccaggtgcccctgatcctggaccagcac

SEQ ID NO: 35594 - DNA, 954 bp, synthetic construct
  misc_feature 1..954: note = Description of Artificial Sequence: Synthetic coding sequence
  source 1..954: mol_type = other DNA
atggccgccgccgccgccgccgccgccgagcagcagagcagcaacggccccgtgaagaagagcatgcgcgagaaggccgtggagcgccgcagcgtgaacaaggagcacaacagcaacttcaaggccggctacatccccatcgacgaggaccgcctgcacaagaccggcctgcgcggccgcaagggcaacctggccatctgcgtgatcatcctgctgttcatcctggccgtgatcaacctgatcatcaccctggtgatctgggccgtgatccgcatcggccccaacggctgcgacagcatggagttccacgagagcggcctgctgcgcttcaagcaggtgagcgacatgggcgtgatccaccccctgtacaagagcaccgtgggcggccgccgcaacgagaacctggtgatcaccggcaacaaccagcccatcgtgttccagcagggcaccaccaagctgagcgtggagaacaacaagaccagcatcaccagcgacatcggcatgcagttcttcgacccccgcacccagaacatcctgttcagcaccgactacgagacccacgagttccacctgcccagcggcgtgaagagcctgaacgtgcagaaggccagcaccgagcgcatcaccagcaacgccaccagcgacctgaacatcaaggtggacggccgcgccatcgtgcgcggcaacgagggcgtgttcatcatgggcaagaccatcgagttccacatgggcggcaacatggagctgaaggccgagaacagcatcatcctgaacggcagcgtgatggtgagcaccacccgcctgcccagcagcagcagcggcgaccagctgggcagcggcgactgggtgcgctacaagctgtgcatgtgcgccgacggcaccctgttcaaggtgcaggtgaccagccagaacatgggctgccagatcagcgacaacccctgcggcaacacccac

SEQ ID NO: 35595 - DNA, 744 bp, synthetic construct
  misc_feature 1..744: note = Description of Artificial Sequence: Synthetic coding sequence
  source 1..744: mol_type = other DNA
atggccgccgccgccgccgccgccgccgagcagatcaccctggtgatctgggccgtgatccgcatcggccccaacggctgcgacagcatggagttccacgagagcggcctgctgcgcttcaagcaggtgagcgacatgggcgtgatccaccccctgtacaagagcaccgtgggcggccgccgcaacgagaacctggtgatcaccggcaacaaccagcccatcgtgttccagcagggcaccaccaagctgagcgtggagaacaacaagaccagcatcaccagcgacatcggcatgcagttcttcgacccccgcacccagaacatcctgttcagcaccgactacgagacccacgagttccacctgcccagcggcgtgaagagcctgaacgtgcagaaggccagcaccgagcgcatcaccagcaacgccaccagcgacctgaacatcaaggtggacggccgcgccatcgtgcgcggcaacgagggcgtgttcatcatgggcaagaccatcgagttccacatgggcggcaacatggagctgaaggccgagaacagcatcatcctgaacggcagcgtgatggtgagcaccacccgcctgcccagcagcagcagcggcgaccagctgggcagcggcgactgggtgcgctacaagctgtgcatgtgcgccgacggcaccctgttcaaggtgcaggtgaccagccagaacatgggctgccagatcagcgacaacccctgcggcaacacccac

SEQ ID NO: 35596 - DNA, 870 bp, synthetic construct
  misc_feature 1..870: note = Description of Artificial Sequence: Synthetic coding sequence
  source 1..870: mol_type = other DNA
atgatgccccaggagcagtacacccaccaccgcagcaccatgcccggcagcgtgggcccccaggtgtacaaggtgggcatctacggctggcgcaagcgctgcctgtacttcttcgtgctgctgctgatgatcctgatcctggtgaacctggccatgaccatctggatcctgaaggtgatgaacttcaccatcgacggcatgggcaacctgcgcatcaccgagaagggcctgaagctggagggcgacagcgagttcctgcagcccctgtacgccaaggagatccagagccgccccggcaacgccctgtacttcaagagcgcccgcaacgtgaccgtgaacatcctgaacgaccagaccaaggtgctgacccagctgatcaccggccccaaggccgtggaggcctacggcaagaagttcgaggtgaagaccgtgagcggcaagctgctgttcagcgccgacaacaacgaggtggtggtgggcgccgagcgcctgcgcgtgctgggcgccgagggcaccgtgttccccaagagcatcgagacccccaacgtgcgcgccgaccccttcaaggagctgcgcctggagagccccacccgcagcctggtgatggaggcccccaagggcgtggagatcaacgccgaggccggcaacatggaggccacctgccgcaccgagctgcgcctggagagcaaggacggcgagatcaagctggacgccgccaagatccgcctgccccgcctgccccacggcagctacacccccaccggcacccgccagaaggtgttcgagatctgcgtgtgcgccaacggccgcctgttcctgagccaggccggcgccggcagcacctgccagatcaacaccagcgtgtgcctg

SEQ ID NO: 35597 - DNA, 867 bp, synthetic construct
  misc_feature 1..867: note = Description of Artificial Sequence: Synthetic coding sequence
  source 1..867: mol_type = other DNA
atgccccaggagcagtacacccaccaccgcagcaccatgcccggcagcgtgggcccccaggtgtacaaggtgggcatctacggctggcgcaagcgctgcctgtacttcttcgtgctgctgctgatgatcctgatcctggtgaacctggccatgaccatctggatcctgaaggtgatgaacttcaccatcgacggcatgggcaacctgcgcatcaccgagaagggcctgaagctggagggcgacagcgagttcctgcagcccctgtacgccaaggagatccagagccgccccggcaacgccctgtacttcaagagcgcccgcaacgtgaccgtgaacatcctgaacgaccagaccaaggtgctgacccagctgatcaccggccccaaggccgtggaggcctacggcaagaagttcgaggtgaagaccgtgagcggcaagctgctgttcagcgccgacaacaacgaggtggtggtgggcgccgagcgcctgcgcgtgctgggcgccgagggcaccgtgttccccaagagcatcgagacccccaacgtgcgcgccgaccccttcaaggagctgcgcctggagagccccacccgcagcctggtgatggaggcccccaagggcgtggagatcaacgccgaggccggcaacatggaggccacctgccgcaccgagctgcgcctggagagcaaggacggcgagatcaagctggacgccgccaagatccgcctgccccgcctgccccacggcagctacacccccaccggcacccgccagaaggtgttcgagatctgcgtgtgcgccaacggccgcctgttcctgagccaggccggcgccggcagcacctgccagatcaacaccagcgtgtgcctg

SEQ ID NO: 35598 - DNA, 768 bp, synthetic construct
  misc_feature 1..768: note = Description of Artificial Sequence: Synthetic coding sequence
  source 1..768: mol_type = other DNA
atgatgccccaggagcagtacacccaccaccgcagcaccatgcccggcagcgtgggcccccaggtgtacaaggtgggcatctacggctggcgcaagcgctgcctgtacttcttcgtgctgctgctgatgatcctgatcctggtgaacctggccatgaccatctggatcctgaaggtgatgaacttcaccatcgacggcatgggcaacctgcgcatcaccgagaagggcctgaagctggagggcgacagcgagttcctgcagcccctgtacgccaaggagatccagagccgccccggcaacgccctgtacttcaagagcgcccgcaacgtgaccgtgaacatcctgaacgaccagaccaaggtgctgacccagctgatcaccggccccaaggccgtggaggcctacggcaagaagttcgaggtgaagaccgtgagcggcaagctgctgttcagcgccgacaacaacgaggtggtggtgggcgccgagcgcctgcgcgtgctgggcgccgagggcaccgtgttccccaagagcatcgagacccccaacgtgcgcgccgaccccttcaaggagctgcgcctggagagccccacccgcagcctggtgatggaggcccccaagggcgtggagatcaacgccgaggccggcaacatggaggccacctgccgcaccgagctgcgcctggagagcaaggacggcgaggtgcgcgacgagaaggaccgcagcagcaagagctacagcttcaaccgccccaccctgcccatcaccggc

SEQ ID NO: 35599 - DNA, 873 bp, synthetic construct
  misc_feature 1..873: note = Description of Artificial Sequence: Synthetic coding sequence
  source 1..873: mol_type = other DNA
atggtgcgcgagcagtacaccaccgccaccgagggcatctgcatcgagcgccccgagaaccagtacgtgtacaagatcggcatctacggctggcgcaagcgctgcctgtacctgttcgtgctgctgctgctgatcatcctggtggtgaacctggccctgaccatctggatcctgaaggtgatgtggttcagccccgccggcatgggccacctgtgcgtgaccaaggacggcctgcgcctggagggcgagagcgagttcctgttccccctgtacgccaaggagatccacagccgcgtggacagcagcctgctgctgcagagcacccagaacgtgaccgtgaacgcccgcaacagcgagggcgaggtgaccggccgcctgaaggtgggccccaagatggtggaggtgcagaaccagcagttccagatcaacagcaacgacggcaagcccctgttcaccgtggacgagaaggaggtggtggtgggcaccgacaagctgcgcgtgaccggccccgagggcgccctgttcgagcacagcgtggagacccccctggtgcgcgccgaccccttccaggacctgcgcctggagagccccacccgcagcctgagcatggacgccccccgcggcgtgcacatccaggcccacgccggcaagatcgaggccctgagccagatggacatcctgttccacagcagcgacggcatgctggtgctggacgccgagaccgtgtgcctgcccaagctggtgcagggcacctggggccccagcggcagcagccagagcctgtacgagatctgcgtgtgccccgacggcaagctgtacctgagcgtggccggcgtgagcaccacctgccaggagcacaaccacatctgcctg

SEQ ID NO: 35600 - DNA, 786 bp, synthetic construct
  misc_feature 1..786: note = Description of Artificial Sequence: Synthetic coding sequence
  source 1..786: mol_type = other DNA
atggccatgagcagcggcggcagcggcggcggcgtgcccgagcaggaggacagcgtgctgttccgccgcggcaccggccagagcgacgacagcgacatctgggacgacaccgccctgatcaaggcctacgacaaggccgtggccagcttcaagcacgccctgaagaacggcgacatctgcgagaccagcggcaagcccaagaccacccccaagcgcaagcccgccaagaagaacaagagccagaagaagaacaccgccgccagcctgcagcagtggaaggtgggcgacaagtgcagcgccatctggagcgaggacggctgcatctaccccgccaccatcgccagcatcgacttcaagcgcgagacctgcgtggtggtgtacaccggctacggcaaccgcgaggagcagaacctgagcgacctgctgagccccatctgcgaggtggccaacaacatcgagcagaacgcccaggagaacgagaacgagagccaggtgagcaccgacgagagcgagaacagccgcagccccggcaacaagagcgacaacatcaagcccaagagcgccccctggaacagcttcctgcccccccccccccccatgcccggcccccgcctgggccccggcaagatcatccccccccccccccccatctgccccgacagcctggacgacgccgacgccctgggcagcatgctgatcagctggtacatgagcggctaccacaccggctactacatgggcttccgccagaaccagaaggagggccgctgcagccacagcctgaac

SEQ ID NO: 35601 - DNA, 882 bp, synthetic construct
  misc_feature 1..882: note = Description of Artificial Sequence: Synthetic coding sequence
  source 1..882: mol_type = other DNA
atggccatgagcagcggcggcagcggcggcggcgtgcccgagcaggaggacagcgtgctgttccgccgcggcaccggccagagcgacgacagcgacatctgggacgacaccgccctgatcaaggcctacgacaaggccgtggccagcttcaagcacgccctgaagaacggcgacatctgcgagaccagcggcaagcccaagaccacccccaagcgcaagcccgccaagaagaacaagagccagaagaagaacaccgccgccagcctgcagcagtggaaggtgggcgacaagtgcagcgccatctggagcgaggacggctgcatctaccccgccaccatcgccagcatcgacttcaagcgcgagacctgcgtggtggtgtacaccggctacggcaaccgcgaggagcagaacctgagcgacctgctgagccccatctgcgaggtggccaacaacatcgagcagaacgcccaggagaacgagaacgagagccaggtgagcaccgacgagagcgagaacagccgcagccccggcaacaagagcgacaacatcaagcccaagagcgccccctggaacagcttcctgcccccccccccccccatgcccggcccccgcctgggccccggcaagcccggcctgaagttcaacggccccccccccccccccccccccccccccccccacctgctgagctgctggctgccccccttccccagcggcccccccatcatccccccccccccccccatctgccccgacagcctggacgacgccgacgccctgggcagcatgctgatcagctggtacatgagcggctaccacaccggctactacatgggcttccgccagaaccagaaggagggccgctgcagccacagcctgaac

SEQ ID NO: 35602 - DNA, 846 bp, synthetic construct
  misc_feature 1..846: note = Description of Artificial Sequence: Synthetic coding sequence
  source 1..846: mol_type = other DNA
atggccatgagcagcggcggcagcggcggcggcgtgcccgagcaggaggacagcgtgctgttccgccgcggcaccggccagagcgacgacagcgacatctgggacgacaccgccctgatcaaggcctacgacaaggccgtggccagcttcaagcacgccctgaagaacggcgacatctgcgagaccagcggcaagcccaagaccacccccaagcgcaagcccgccaagaagaacaagagccagaagaagaacaccgccgccagcctgcagcagtggaaggtgggcgacaagtgcagcgccatctggagcgaggacggctgcatctaccccgccaccatcgccagcatcgacttcaagcgcgagacctgcgtggtggtgtacaccggctacggcaaccgcgaggagcagaacctgagcgacctgctgagccccatctgcgaggtggccaacaacatcgagcagaacgcccaggagaacgagaacgagagccaggtgagcaccgacgagagcgagaacagccgcagccccggcaacaagagcgacaacatcaagcccaagagcgccccctggaacagcttcctgcccccccccccccccatgcccggcccccgcctgggccccggcaagcccggcctgaagttcaacggccccccccccccccccccccccccccccccccacctgctgagctgctggctgccccccttccccagcggcccccccatcatccccccccccccccccatctgccccgacagcctggacgacgccgacgccctgggcagcatgctgatcagctggtacatgagcggctaccacaccggctactacatggagatgctggcc

SEQ ID NO: 35603 - DNA, 882 bp, synthetic construct
  misc_feature 1..882: note = Description of Artificial Sequence: Synthetic coding sequence
  source 1..882: mol_type = other DNA
atggccatgagcagcggcggcagcggcggcggcgtgcccgagcaggaggacagcgtgctgttccgccgcggcaccggccagagcgacgacagcgacatctgggacgacaccgccctgatcaaggcctacgacaaggccgtggccagcttcaagcacgccctgaagaacggcgacatctgcgagaccagcggcaagcccaagaccacccccaagcgcaagcccgccaagaagaacaagagccagaagaagaacaccgccgccagcctgcagcagtggaaggtgggcgacaagtgcagcgccatctggagcgaggacggctgcatctaccccgccaccatcgccagcatcgacttcaagcgcgagacctgcgtggtggtgtacaccggctacggcaaccgcgaggagcagaacctgagcgacctgctgagccccatctgcgaggtggccaacaacatcgagcagaacgcccaggagaacgagaacgagagccaggtgagcaccgacgagagcgagaacagccgcagccccggcaacaagagcgacaacatcaagcccaagagcgccccctggaacagcttcctgcccccccccccccccatgcccggcccccgcctgggccccggcaagcccggcctgaagttcaacggccccccccccccccccccccccccccccccccacctgctgagctgctggctgccccccttccccagcggcccccccatcatccccccccccccccccatctgccccgacagcctggacgacgccgacgccctgggcagcatgctgatcagctggtacatgagcggctaccacaccggctactacatgaccggcttccactgcgtgagccaggacggcctgaacctgctgaccccc

SEQ ID NO: 35604 - DNA, 681 bp, synthetic construct
  misc_feature 1..681: note = Description of Artificial Sequence: Synthetic coding sequence
  source 1..681: mol_type = other DNA
atggccatgagcagcggcggcagcggcggcggcgtgcccgagcaggaggacagcgtgctgttccgccgcggcaccggccagagcgacgacagcgacatctgggacgacaccgccctgatcaaggcctacgacaaggccgtggccagcttcaagcacgccctgaagaacggcgacatctgcgagaccagcggcaagcccaagaccacccccaagcgcaagcccgccaagaagaacaagagccagaagaagaacaccgccgccagcctgcagcagaacgagaacgagagccaggtgagcaccgacgagagcgagaacagccgcagccccggcaacaagagcgacaacatcaagcccaagagcgccccctggaacagcttcctgcccccccccccccccatgcccggcccccgcctgggccccggcaagcccggcctgaagttcaacggccccccccccccccccccccccccccccccccacctgctgagctgctggctgccccccttccccagcggcccccccatcatccccccccccccccccatctgccccgacagcctggacgacgccgacgccctgggcagcatgctgatcagctggtacatgagcggctaccacaccggctactacatgggcttccgccagaaccagaaggagggccgctgcagccacagcctgaac

SEQ ID NO: 35605 - DNA, 501 bp, synthetic construct
  misc_feature 1..501: note = Description of Artificial Sequence: Synthetic coding sequence
  source 1..501: mol_type = other DNA
atggccaccagcgagctgagctgcgaggtgagcgaggagaactgcgagcgccgcgaggccttctgggccgagtggaaggacctgaccctgagcacccgccccgaggagggctgcagcctgcacgaggaggacacccagcgccacgagacctaccaccagcagggccagtgccaggtgctggtgcagcgcagcccctggctgatgatgcgcatgggcatcctgggccgcggcctgcaggagtaccagctgccctaccagcgcgtgctgcccctgcccatcttcacccccgccaagatgggcgccaccaaggaggagcgcgaggacacccccatccagctgcaggagctgctggccctggagaccgccctgggcggccagtgcgtggaccgccaggaggtggccgagatcaccaagcagctgccccccgtggtgcccgtgagcaagcccggcgccctgcgccgcagcctgagccgcagcatgagccaggaggcccagcgcggc

SEQ ID NO: 35606 - DNA, 1959 bp, synthetic construct
  misc_feature 1..1959: note = Description of Artificial Sequence: Synthetic coding sequence
  source 1..1959: mol_type = other DNA
atggccgccgccgccgccagccacctgaacctggacgccctgcgcgaggtgctggagtgccccatctgcatggagagcttcaccgaggagcagctgcgccccaagctgctgcactgcggccacaccatctgccgccagtgcctggagaagctgctggccagcagcatcaacggcgtgcgctgccccttctgcagcaagatcacccgcatcaccagcctgacccagctgaccgacaacctgaccgtgctgaagatcatcgacaccgccggcctgagcgaggccgtgggcctgctgatgtgccgcagctgcggccgccgcctgccccgccagttctgccgcagctgcggcctggtgctgtgcgagccctgccgcgaggccgaccaccagccccccggccactgcaccctgcccgtgaaggaggccgccgaggagcgccgccgcgacttcggcgagaagctgacccgcctgcgcgagctgatgggcgagctgcagcgccgcaaggccgccctggagggcgtgagcaaggacctgcaggcccgctacaaggccgtgctgcaggagtacggccacgaggagcgccgcgtgcaggacgagctggcccgcagccgcaagttcttcaccggcagcctggccgaggtggagaagagcaacagccaggtggtggaggagcagagctacctgctgaacatcgccgaggtgcaggccgtgagccgctgcgactacttcctggccaagatcaagcaggccgacgtggccctgctggaggagaccgccgacgaggaggagcccgagctgaccgccagcctgccccgcgagctgaccctgcaggacgtggagctgctgaaggtgggccacgtgggccccctgcagatcggccaggccgtgaagaagccccgcaccgtgaacgtggaggacagctgggccatggaggccaccgccagcgccgccagcaccagcgtgaccttccgcgagatggacatgagccccgaggaggtggtggccagcccccgcgccagccccgccaagcagcgcggccccgaggccgccagcaacatccagcagtgcctgttcctgaagaagatgggcgccaagggcagcacccccggcatgttcaacctgcccgtgagcctgtacgtgaccagccagggcgaggtgctggtggccgaccgcggcaactaccgcatccaggtgttcacccgcaagggcttcctgaaggagatccgccgcagccccagcggcatcgacagcttcgtgctgagcttcctgggcgccgacctgcccaacctgacccccctgagcgtggccatgaactgccagggcctgatcggcgtgaccgacagctacgacaacagcctgaaggtgtacaccctggacggccactgcgtggcctgccaccgcagccagctgagcaagccctggggcatcaccgccctgcccagcggccagttcgtggtgaccgacgtggagggcggcaagctgtggtgcttcaccgtggaccgcggcagcggcgtggtgaagtacagctgcctgtgcagcgccgtgcgccccaagttcgtgacctgcgacgccgagggcaccgtgtacttcacccagggcctgggcctgaacctggagaaccgccagaacgagcaccacctggagggcggcttcagcatcggcagcgtgggccccgacggccagctgggccgccagatcagccacttcttcagcgagaacgaggacttccgctgcatcgccggcatgtgcgtggacgcccgcggcgacctgatcgtggccgacagcagccgcaaggagatcctgcacttccccaagggcggcggctacagcgtgctgatccgcgagggcctgacctgccccgtgggcatcgccctgacccccaagggccagctgctggtgctggactgctgggaccactgcatcaagatctacagctaccacctgcgccgctacagcaccccc

SEQ ID NO: 35607 - DNA, 519 bp, synthetic construct
  misc_feature 1..519: note = Description of Artificial Sequence: Synthetic coding sequence
  source 1..519: mol_type = other DNA
atggccgccgccgccgccagccacctgaacctggacgccctgcgcgaggtgctggagtgccccatctgcatggagagcttcaccgaggagcagctgcgccccaagctgctgcactgcggccacaccatctgccgccagtgcctggagaagctgctggccagcagcatcaacggcgtgcgctgccccttctgcagcaagatcacccgcatcaccagcctgacccagctgaccgacaacctgaccgtgctgaagatcatcgacaccgccggcctgagcgaggccgtgggcctgctgatgtgccgcagctgcggccgccgcctgccccgccagttctgccgcagctgcggcctggtgctgtgcgagccctgccgcgaggccgaccaccagccccccggccactgcaccctgcccgtgaaggaggccgccgaggagcgccgccgcgacttcggcgagaagctgacccgcctgcgcgagctgatgggcgagctgcagcgccgcaaggccgccctggagggcgtg

SEQ ID NO: 35608 - protein, 283 aa, Homo sapiens
MDLWPGAWMLLLLLFLLLLFLLPTLWFCSPSAKYFFKMAFYNGWILFLAVLAIPVCAVRGRNVENMKILRLMLLHIKYLYGIRVEVRGAHHFPPSQPYVVVSNHQSSLDLLGMMEVLPGRCVPIAKRELLWAGSAGLACWLAGVIFIDRKRTGDAISVMSEVAQTLLTQDVRVWVFPEGTRNHNGSMLPFKRGAFHLAVQAQVPIVPIVMSSYQDFYCKKERRFTSGQCQVRVLPPVPTEGLTPDDVPALADRVRHSMLTVFREISTDGRGGGDYLKKPGGGG

SEQ ID NO: 35609 - protein, 283 aa, Homo sapiens; identical to SEQ ID NO: 35608

SEQ ID NO: 35610 - protein, 283 aa, Homo sapiens; identical to SEQ ID NO: 35608

SEQ ID NO: 35611 - protein, 283 aa, Homo sapiens; identical to SEQ ID NO: 35608

SEQ ID NO: 35612 - protein, 283 aa, Homo sapiens; identical to SEQ ID NO: 35608

SEQ ID NO: 35613 - protein, 283 aa, Homo sapiens; identical to SEQ ID NO: 35608

SEQ ID NO: 35614 - protein, 283 aa, Homo sapiens; identical to SEQ ID NO: 35608

SEQ ID NO: 35615 - protein, 283 aa, Homo sapiens; identical to SEQ ID NO: 35608

SEQ ID NO: 35616 - protein, 283 aa, Homo sapiens; identical to SEQ ID NO: 35608

SEQ ID NO: 35617 - protein, 283 aa, Homo sapiens; identical to SEQ ID NO: 35608

SEQ ID NO: 35618 - protein, 283 aa, Homo sapiens; identical to SEQ ID NO: 35608

SEQ ID NO: 35619 - protein, 283 aa, Homo sapiens; identical to SEQ ID NO: 35608

SEQ ID NO: 35620 - protein, 171 aa, Homo sapiens
MMEVLPGRCVPIAKRELLWAGSAGLACWLAGVIFIDRKRTGDAISVMSEVAQTLLTQDVRVWVFPEGTRNHNGSMLPFKRGAFHLAVQAQVPIVPIVMSSYQDFYCKKERRFTSGQCQVRVLPPVPTEGLTPDDVPALADRVRHSMLTVFREISTDGRGGGDYLKKPGGGG

SEQ ID NO: 35621 - protein, 283 aa, Homo sapiens; identical to SEQ ID NO: 35608

SEQ ID NO: 35622 - protein, 283 aa, Homo sapiens; identical to SEQ ID NO: 35608

SEQ ID NO: 35623 - protein, 283 aa, Homo sapiens; identical to SEQ ID NO: 35608

SEQ ID NO: 35624 - protein, 283 aa, Homo sapiens; identical to SEQ ID NO: 35608

SEQ ID NO: 35625 - protein, 283 aa, Homo sapiens; identical to SEQ ID NO: 35608

SEQ ID NO: 35626 - protein, 283 aa, Homo sapiens; identical to SEQ ID NO: 35608

SEQ ID NO: 35627 - protein, 283 aa, Homo sapiens; identical to SEQ ID NO: 35608

SEQ ID NO: 35628 - protein, 283 aa, Homo sapiens; identical to SEQ ID NO: 35608

SEQ ID NO: 35629 - protein, 283 aa, Homo sapiens; identical to SEQ ID NO: 35608

SEQ ID NO: 35630 - protein, 283 aa, Homo sapiens; identical to SEQ ID NO: 35608

SEQ ID NO: 35631 - protein, 283 aa, Homo sapiens; identical to SEQ ID NO: 35608

SEQ ID NO: 35632 - protein, 283 aa, Homo sapiens; identical to SEQ ID NO: 35608

SEQ ID NO: 35633 - protein, 283 aa, Homo sapiens; identical to SEQ ID NO: 35608

SEQ ID NO: 35634 - protein, 283 aa, Homo sapiens; identical to SEQ ID NO: 35608

SEQ ID NO: 35635 - protein, 283 aa, Homo sapiens; identical to SEQ ID NO: 35608

SEQ ID NO: 35636 - protein, 283 aa, Homo sapiens; identical to SEQ ID NO: 35608

SEQ ID NO: 35637 - protein, 283 aa, Homo sapiens; identical to SEQ ID NO: 35608

SEQ ID NO: 35638 - protein, 283 aa, Homo sapiens; identical to SEQ ID NO: 35608

SEQ ID NO: 35639 - protein, 283 aa, Homo sapiens; identical to SEQ ID NO: 35608

SEQ ID NO: 35640 - protein, 283 aa, Homo sapiens; identical to SEQ ID NO: 35608

SEQ ID NO: 35641 - protein, 283 aa, Homo sapiens; identical to SEQ ID NO: 35608

SEQ ID NO: 35642 - protein, 283 aa, Homo sapiens; identical to SEQ ID NO: 35608

SEQ ID NO: 35643 - protein, 283 aa, Homo sapiens; identical to SEQ ID NO: 35608

SEQ ID NO: 35644 - protein, 283 aa, Homo sapiens; identical to SEQ ID NO: 35608

SEQ ID NO: 35645 - protein, 283 aa, Homo sapiens; identical to SEQ ID NO: 35608

SEQ ID NO: 35646 - protein, 283 aa, Homo sapiens; identical to SEQ ID NO: 35608

SEQ ID NO: 35647 - protein, 283 aa, Homo sapiens; identical to SEQ ID NO: 35608

SEQ ID NO: 35648 - protein, 283 aa, Homo sapiens; identical to SEQ ID NO: 35608

SEQ ID NO: 35649 - protein, 283 aa, Homo sapiens; identical to SEQ ID NO: 35608

SEQ ID NO: 35650 - protein, 283 aa, Homo sapiens; identical to SEQ ID NO: 35608

SEQ ID NO: 35651 - protein, 91 aa, Homo sapiens
HSASTPILTHSHPAQGMMEVLPGRCVPIAKRELLWAGSAGLACWLAGVIFIDRKRTGDAISVMSEVAQTLLTQDVSHPGLLLQEGASLHLG

SEQ ID NO: 35652 - protein, 91 aa, Homo sapiens; identical to SEQ ID NO: 35651

SEQ ID NO: 35653 - protein, 91 aa, Homo sapiens; identical to SEQ ID NO: 35651

SEQ ID NO: 35654 - protein, 171 aa, Homo sapiens; identical to SEQ ID NO: 35620

SEQ ID NO: 35655 - protein, 171 aa, Homo sapiens; identical to SEQ ID NO: 35620

SEQ ID NO: 35656 - protein, 91 aa, Homo sapiens; identical to SEQ ID NO: 35651

SEQ ID NO: 35657 - protein, 91 aa, Homo sapiens; identical to SEQ ID NO: 35651

SEQ ID NO: 35658 - protein, 91 aa, Homo sapiens; identical to SEQ ID NO: 35651

SEQ ID NO: 35659 - protein, 171 aa, Homo sapiens; identical to SEQ ID NO: 35620

SEQ ID NO: 35660 - protein, 171 aa, Homo sapiens; identical to SEQ ID NO: 35620

SEQ ID NO: 35661 - protein, 91 aa, Homo sapiens; identical to SEQ ID NO: 35651

SEQ ID NO: 35662 - protein, 171 aa, Homo sapiens; identical to SEQ ID NO: 35620

SEQ ID NO: 35663 - protein, 171 aa, Homo sapiens; identical to SEQ ID NO: 35620

SEQ ID NO: 35664 - protein, 246 aa, Homo sapiens
MELWPCLAAALLLLLLLVQLSRAAEFYAKVALYCALCFTVSAVASLVCLLRHGGRTVENMSIIGWFVRSFKYFYGLRFEVRDPRRLQEARPCVIVSNHQSILDMMGLMEVLPERCVQIAKRELLFLGPVGLIMYLGGVFFINRQRSSTAMTVMADLGERMVRENVPIVPVVYSSFSSFYNTKKKFFTSGTVTVQVLEAIPTSGLTAADVPALVDTCHRAMRTTFLHISKTPQENGATAGSGVQPAQ

SEQ ID NO: 35665 - protein, 278 aa, Homo sapiens
MELWPCLAAALLLLLLLVQLSRAAEFYAKVALYCALCFTVSAVASLVCLLRHGGRTVENMSIIGWFVRSFKYFYGLRFEVRDPRRLQEARPCVIVSNHQSILDMMGLMEVLPERCVQIAKRELLFLGPVGLIMYLGGVFFINRQRSSTAMTVMADLGERMVRENLKVWIYPEGTRNDNGDLLPFKKGAFYLAVQAQVPIVPVVYSSFSSFYNTKKKFFTSGTVTVQVLEAIPTSGLTAADVPALVDTCHRAMRTTFLHISKTPQENGATAGSGVQPAQ

SEQ ID NO: 35666 - protein, 278 aa, Homo sapiens; identical to SEQ ID NO: 35665

SEQ ID NO: 35667 - protein, 456 aa, Homo sapiens
MFLLLPFDSLIVNLLGISLTVLFTLLLVFIIVPAIFGVSFGIRKLYMKSLLKIFAWATLRMERGAKEKNHQLYKPYTNGIIAKDPTSLEEEIKEIRRSGSSKALDNTPEFELSDIFYFCRKGMETIMDDEVTKRFSAEELESWNLLSRTNYNFQYISLRLTVLWGLGVLIRYCFLLPLRIALAFTGISLLVVGTTVVGYLPNGRFKEFMSKHVHLMCYRICVRALTAIITYHDRENRPRNGGICVANHTSPIDVIILASDGYYAMVGQVHGGLMGVIQRAMVKACPHVWFERSEVKDRHLVAKRLTEHVQDKSKLPILIFPEGTCINNTSVMMFKKGSFEIGATVYPVAIKYDPQFGDAFWNSSKYGMVTYLLRMMTSWAIVCSVWYLPPMTREADEDAVQFANRVKSAIARQGGLVDLLWDGGLKREKVKDTFKEEQQKLYSKMIVGNHKDRSRS

SEQ ID NO: 35668 - protein, 434 aa, Homo sapiens
MEGAELAGKILSTWLTLVLGFILLPSVFGVSLGISEIYMKILVKTLEWATIRIEKGTPKESILKNSASVGIIQRDESPMEKGLSGLRGRDFELSDVFYFSKKGLEAIVEDEVTQRFSSEELVSWNLLTRTNVNFQYISLRLTMVWVLGVIVRYCVLLPLRVTLAFIGISLLVIGTTLVGQLPDSSLKNWLSELVHLTCCRICVRALSGTIHYHNKQYRPQKGGICVANHTSPIDVLILTTDGCYAMVGQVHGGLMGIIQRAMVKACPHVWFERSEMKDRHLVTKRLKEHIADKKKLPILIFPEGTCINNTSVMMFKKGSFEIGGTIHPVAIKYNPQFGDAFWNSSKYNMVSYLLRMMTSWAIVCDVWYMPPMTREEGEDAVQFANRVKSAIAIQGGLTELPWDGGLKRAKVKDIFKEEQQKNYSKMIVGNGSLS

SEQ ID NO: 35669 - protein, 434 aa, Homo sapiens; identical to SEQ ID NO: 35668

SEQ ID NO: 35670 - protein, 501 aa, Homo sapiens
MFTLPQKDFRAPTTCLGPTCMQDLGSSHGEDLEGECSRKLDQKLPELRGVGDPAMISSDTSYLSSRGRMIKWFWDSAEEGYRTYHMDEYDEDKNPSGIINLGTSENKLCFDLLSWRLSQRDMQRVEPSLLQYADWRGHLFLREEVAKFLSFYCKSPVPLRPENVVVLNGGASLFSALATVLCEAGEAFLIPTPYYGAITQHVCLYGNIRLAYVYLDSEVTGLDTRPFQLTVEKLEMALREAHSEGVKVKGLILISPQNPLGDVYSPEELQEYLVFAKRHRLHVIVDEVYMLSVFEKSVGYRSVLSLERLPDPQRTHVMWATSKDFGMSGLRFGTLYTENQDVATAVASLCRYHGLSGLVQYQMAQLLRDRDWINQVYLPENHARLKAAHTYVSEELRALGIPFLSRGAGFFIWVDLRKYLPKGTFEEEMLLWRRFLDNKVLLSFGKAFECKEPGWFRFVFSDQVHRLCLGMQRVQQVLAGKSQVAEDPRPSQSQEPSDQRR

SEQ ID NO: 35671 - protein, 158 aa, Homo sapiens
MFTLPQKDFRAPTTCLGPTCMQDLGSSHGEDLEGECSRKLDQKLPELRGVGDPAMISSDTSYLSSRGRMIKWFWDSAEEGYRTYHMDEYDEDKNPSGIINLGTSENKLCFDLLSWRPPGGSGQVPVFLLQEPSTPQTRECGCPEWWCLALLCSGHGAV

SEQ ID NO: 35672 - protein, 139 aa, Homo sapiens
MFTLPQKDFRAPTTCLGPTCMQDLGSSHGEDLEGECSRKLDQKLPELRGVGDPAMISSDTSYLSSRGRMIKWFWDSAEEGYRTYHMDEYDEDKNPSGIINLGTSENKLCFDLLSWRLSQRDMQRVEPSLLQYADWRGHL

SEQ ID NO: 35673 - protein, 77 aa, Homo sapiens
MFTLPQKDFRAPTTCLGPTCMQDLGSSHGEDLEGECSRKLDQKLPELRGVGDPAMISSDTSYLSSRGRMIKWFWDSA

SEQ ID NO: 35674 - protein, 259 aa, Homo sapiens
MSKYKLIMLRHGEGAWNKENRFCSWVDQKLNSEGMEEARNCGKQLKALNFEFDLVFTSVLNRSIHTAWLILEELGQEWVPVESSWRLNERHYGALIGLNREQMALNHGEEQVRLWRRSYNVTPPPIEESHPYYQEIYNDRRYKVCDVPLDQLPRSESLKDVLERLLPYWNERIAPEVLRGKTILISAHGNSSRALLKHLEGISDEDIINITLPTGVPILLELDENLRAVGPHQFLGDQEAIQAAIKKVEDQGKVKQAKK

SEQ ID NO: 35675 - protein, 259 aa, Homo sapiens; identical to SEQ ID NO: 35674

SEQ ID NO: 35676 - protein, 259 aa, Homo sapiens; identical to SEQ ID NO: 35674

SEQ ID NO: 35677 - protein, 78 aa, Homo sapiens
MSKYKLIMLRHGEGAWNKENRFCSWVDQKLNSEGMEEARNCGKQLKALNFEFDLVFTSVLNRSIHTAWLILEELGQEW

SEQ ID NO: 35678 - protein, 297 aa, Homo sapiens
MNRGFSRKSHTFLPKIFFRKMSSSGAKDKPELQFPFLQDEDTVATLLECKTLFILRGLPGSGKSTLARVIVDKYRDGTKMVSADAYKITPGARGALKELRQFVPGDEPREKMDLVTYFGKRPPGVLHCTTKFCDYGKAPGAEEYAQQDVLKKSYSKAFTLTISALFVTPKTTGARVELSEQQLQLWPSDVDKLSPTDNLPRGSRAHITLGCAADVEAVQTGLDLLEILRQEKGGSRGEEVGELSRGKLYSLGNGRWMLTLAKNMEVRAIFTGYYGKGKPVPTQGSRKGGALQSCTII

SEQ ID NO: 35679 - protein, 401 aa, Homo sapiens
MSSSGAKDKPELQFPFLQDEDTVATLLECKTLFILRGLPGSGKSTLARVIVDKYRDGTKMVSADAYKITPGARGAFSEEYKRLDEDLAAYCRRRDIRILVLDDTNHERERLEQLFEMADQYQYQVVLVEPKTAWRLDCAQLKEKNQWQLSADDLKKLKPGLEKDFLPLYFGWFLTKKSSETLRKAGQVFLEELGNHKAFKKELRQFVPGDEPREKMDLVTYFGKRPPGVLHCTTKFCDYGKAPGAEEYAQQDVLKKSYSKAFTLTISALFVTPKTTGARVELSEQQLQLWPSDVDKLSPTDNLPRGSRAHITLGCAADVEAVQTGLDLLEILRQEKGGSRGEEVGELSRGKLYSLGNGRWMLTLAKNMEVRAIFTGYYGKGKPVPTQGSRKGGALQSCTII

SEQ ID NO: 35680 - protein, 421 aa, Homo sapiens
MNRGFSRKSHTFLPKIFFRKMSSSGAKDKPELQFPFLQDEDTVATLLECKTLFILRGLPGSGKSTLARVIVDKYRDGTKMVSADAYKITPGARGAFSEEYKRLDEDLAAYCRRRDIRILVLDDTNHERERLEQLFEMADQYQYQVVLVEPKTAWRLDCAQLKEKNQWQLSADDLKKLKPGLEKDFLPLYFGWFLTKKSSETLRKAGQVFLEELGNHKAFKKELRQFVPGDEPREKMDLVTYFGKRPPGVLHCTTKFCDYGKAPGAEEYAQQDVLKKSYSKAFTLTISALFVTPKTTGARVELSEQQLQLWPSDVDKLSPTDNLPRGSRAHITLGCAADVEAVQTGLDLLEILRQEKGGSRGEEVGELSRGKLYSLGNGRWMLTLAKNMEVRAIFTGYYGKGKPVPTQGSRKGGALQSCTII

SEQ ID NO: 35681 - protein, 57 aa, Homo sapiens
MSSSGAKDKPELQFPFLQDEDTVATLLECKTLFILRGLPGSGKSTLARVIVDKYRDG

SEQ ID NO: 35682 - protein, 335 aa, Homo sapiens
MKLPARVFFTLGSRLPCGLAPRRFFSYGTKILYQNTEALQSKFFSPLQKAMLPPNSFQGKVAFITGGGTGLGKGMTTLLSSLGAQCVIASRKMDVLKATAEQISSQTGNKVHAIQCDVRDPDMVQNTVSELIKVAGHPNIVINNAAGNFISPTERLSPNAWKTITDIVLNGTAFVTLEIGKQLIKAQKGAAFLSITTIYAETGSGFVVPSASAKAGVEAMSKSLAAEWGKYGMRFNVIQPGPIKTKGAFSRLDPTGTFEKEMIGRIPCGRLGTVEELANLAAFLCSDYASWINGAVIKFDGGEEVLISGEFNDLRKVTKEQWDTIEELIRKTKGS

SEQ ID NO: 35683 - protein, 326 aa, Homo sapiens
MSGLGKKHLLLMGEFFSYGTKILYQNTEALQSKFFSPLQKAMLPPNSFQGKVAFITGGGTGLGKGMTTLLSSLGAQCVIASRKMDVLKATAEQISSQTGNKVHAIQCDVRDPDMVQNTVSELIKVAGHPNIVINNAAGNFISPTERLSPNAWKTITDIVLNGTAFVTLEIGKQLIKAQKGAAFLSITTIYAETGSGFVVPSASAKAGVEAMSKSLAAEWGKYGMRFNVIQPGPIKTKGAFSRLDPTGTFEKEMIGRIPCGRLGTVEELANLAAFLCSDYASWINGAVIKFDGGEEVLISGEFNDLRKVTKEQWDTIEELIRKTKGS

SEQ ID NO: 35684 - protein, 516 aa, Homo sapiens
MEPAVSLAVCALLFLLWVRLKGLEFVLIHQRWVFVCLFLLPLSLIFDIYYYVRAWVVFKLSSAPRLHEQRVRDIQKQVREWKEQGSKTFMCTGRPGWLTVSLRVGKYKKTHKNIMINLMDILEVDTKKQIVRVEPLVTMGQVTALLTSIGWTLPVLPELDDLTVGGLIMGTGIESSSHKYGLFQHICTAYELVLADGSFVRCTPSENSDLFYAVPWSCGTLGFLVAAEIRIIPAKKYVKLRFEPVRGLEAICAKFTHESQRQENHFVEGLLYSLDEAVIMTGVMTDEAEPSKLNSIGNYYKPWFFKHVENYLKTNREGLEYIPLRHYYHRHTRSIFWELQDIIPFGNNPIFRYLFGWMVPPKISLLKLTQGETLRKLYEQHHVVQDMLVPMKCLQQALHTFQNDIHVYPIWLCPFILPSQPGLVHPKGNEAELYIDIGAYGEPRVKHFEARSCMRQLEKFVRSVHGFQMLYADCYMNREEFWEMFDGSLYHKLREKLGCQDAFPEVYDKICKAARH

SEQ ID NO: 35685 - protein, 154 aa, Homo sapiens
  VARIANT 1: note = MOD_RES - Any amino acid
XSLLKLTQGETLRKLYEQHHVVQDMLVPMKCLQQALHTFQNDIHVYPIWLCPFILPSQPGLVHPKGNEAELYIDIGAYGEPRVKHFEARSCMRQLEKFVRSVHGFQMLYADCYMNREEFWEMFDGSLYHKLREKLGCQDAFPEVYDKICKAARH

SEQ ID NO: 35686 - protein, 475 aa, Homo sapiens
MGAGEQNRQSAHCVQGICGYLEGDEEGEEGEVRSTQVREWKEQGSKTFMCTGRPGWLTVSLRVGKYKKTHKNIMINLMDILEVDTKKQIVRVEPLVTMGQVTALLTSIGWTLPVLPELDDLTVGGLIMGTGIESSSHKYGLFQHICTAYELVLADGSFVRCTPSENSDLFYAVPWSCGTLGFLVAAEIRIIPAKKYVKLRFEPVRGLEAICAKFTHESQRQENHFVEGLLYSLDEAVIMTGVMTDEAEPSKLNSIGNYYKPWFFKHVENYLKTNREGLEYIPLRHYYHRHTRSIFWELQDIIPFGNNPIFRYLFGWMVPPKISLLKLTQGETLRKLYEQHHVVQDMLVPMKCLQQALHTFQNDIHVYPIWLCPFILPSQPGLVHPKGNEAELYIDIGAYGEPRVKHFEARSCMRQLEKFVRSVHGFQMLYADCYMNREEFWEMFDGSLYHKLREKLGCQDAFPEVYDKICKAARH

SEQ ID NO: 35687 - protein, 300 aa, Homo sapiens
MGTGIESSSHKYGLFQHICTAYELVLADGSFVRCTPSENSDLFYAVPWSCGTLGFLVAAEIRIIPAKKYVKLRFEPVRGLEAICAKFTHESQRQENHFVEGLLYSLDEAVIMTGVMTDEAEPSKDIIPFGNNPIFRYLFGWMVPPKISLLKLTQGETLRKLYEQHHVVQDMLVPMKCLQQALHTFQNDIHVYPIWLCPFILPSQPGLVHPKGNEAELYIDIGAYGEPRVKHFEARSCMRQLEKFVRSVHGFQMLYADCYMNREEFWEMFDGSLYHKLREKLGCQDAFPEVYDKICKAARH

SEQ ID NO: 35688 - protein, 242 aa, Homo sapiens
MEPAVSLAVCALLFLLWVRLKGLEFVLIHQRWVFVCLFLLPLSLIFDIYYYVRAWVVFKLSSAPRLHEQRVRDIQKQVREWKEQGSKTFMCTGRPGWLTVSLRVGKYKKTHKNIMINLMDILEVDTFQNDIHVYPIWLCPFILPSQPGLVHPKGNEAELYIDIGAYGEPRVKHFEARSCMRQLEKFVRSVHGFQMLYADCYMNREEFWEMFDGSLYHKLREKLGCQDAFPEVYDKICKAARH

SEQ ID NO: 35689 - protein, 400 aa, Homo sapiens
MMDLRNTPAKSLDKFIEDYLLPDTCFRMQINHAIDIICGFLKERCFRGSSYPVCVSKVVKGGSSGKGTTLRGRSDADLVVFLSPLTTFQDQLNRRGEFIQEIRRQLEACQRERAFSVKFEVQAPRWGNPRALSFVLSSLQLGEGVEFDVLPAFDALGQLTGGYKPNPQIYVKLIEECTDLQKEGEFSTCFTELQRDFLKQRPTKLKSLIRLVKHWYQNCKKKLGKLPPQYALELLTVYAWERGSMKTHFNTAQGFRTVLELVINYQQLCIYWTKYYDFKNPIIEKYLRRQLTKPRPVILDPADPTGNLGGGDPKGWRQLAQEAEAWLNYPCFKNWDGSPVSSWILLAESNSADDETDDPRRYQKYGYIGTHEYPHFSHRPSTLQAASTPQAEEDWTCTIL

SEQ ID NO: 35690 - protein, 381 aa, Homo sapiens
MMDLRNTPAKSLDKFIEDYLLPDTCFRMQINHAIDIICGFLKERCFRGSSYPVCVSKVVKGGSSGKGTTLRGRSDADLVVFLSPLTTFQDQLNRRGEFIQEIRRQLEACQRERAFSVKFEVQAPRWGNPRALSFVLSSLQLGEGVEFDVLPAFDALGQLTGGYKPNPQIYVKLIEECTDLQKEGEFSTCFTELQRDFLKQRPTKLKSLIRLVKHWYQNCKKKLGKLPPQYALELLTVYAWERGSMKTHFNTAQGFRTVLELVINYQQLCIYWTKYYDFKNPIIEKYLRRQLTKPRPVILDPADPTGNLGGGDPKGWRQLAQEAEAWLNYPCFKNWDGSPVSSWILLVNLTLVGRRNYIISEHAVNLQQTRGASLSYSFQVA

SEQ ID NO: 35691 - protein, 414 aa, Homo sapiens
MMDLRNTPAKSLDKFIEDYLLPDTCFRMQINHAIDIICGFLKERCFRGSSYPVCVSKVVKGGSSGKGTTLRGRSDADLVVFLSPLTTFQDQLNRRGEFIQEIRRQLEACQRERAFSVKFEVQAPRWGNPRALSFVLSSLQLGEGVEFDVLPAFDALGQLTGGYKPNPQIYVKLIEECTDLQKEGEFSTCFTELQRDFLKQRPTKLKSLIRLVKHWYQNCKKKLGKLPPQYALELLTVYAWERGSMKTHFNTAQGFRTVLELVINYQQLCIYWTKYYDFKNPIIEKYLRRQLTKPRPVILDPADPTGNLGGGDPKGWRQLAQEAEAWLNYPCFKNWDGSPVSSWILLTQHTPGSIHPTGRRGLDLHHPLNASASWGKGLQCYLDQFLHFQVGLLIQRGQSSSVSWCIIQDRTQVS

SEQ ID NO: 35692 - protein, 364 aa, Homo sapiens
MMDLRNTPAKSLDKFIEDYLLPDTCFRMQINHAIDIICGFLKERCFRGSSYPVCVSKVVKGGSSGKGTTLRGRSDADLVVFLSPLTTFQDQLNRRGEFIQEIRRQLEACQRERAFSVKFEVQAPRWGNPRALSFVLSSLQLGEGVEFDVLPAFDALGQLTGGYKPNPQIYVKLIEECTDLQKEGEFSTCFTELQRDFLKQRPTKLKSLIRLVKHWYQNCKKKLGKLPPQYALELLTVYAWERGSMKTHFNTAQGFRTVLELVINYQQLCIYWTKYYDFKNPIIEKYLRRQLTKPRPVILDPADPTGNLGGGDPKGWRQLAQEAEAWLNYPCFKNWDGSPVSSWILLVRPPASSLPFIPAPLHEA

SEQ ID NO: 35693 - protein, 719 aa, Homo sapiens
MGNGESQLSSVPAQKLGWFIQEYLKPYEECQTLIDEMVNTICDVLQEPEQFPLVQGVAIGGSYGRKTVLRGNSDGTLVLFFSDLKQFQDQKRSQRDILDKTGDKLKFCLFTKWLKNNFEIQKSLDGFTIQVFTKNQRISFEVLAAFNALSLNDNPSPWIYRELKRSLDKTNASPGEFAVCFTELQQKFFDNRPGKLKDLILLIKHWHQQCQKKIKDLPSLSPYALELLTVYAWEQGCRKDNFDIAEGVRTVLELIKCQEKLCIYWMVNYNFEDETIRNILLHQLQSARPVILDPVDPTNNVSGDKICWQWLKKEAQTWLTSPNLDNELPAPSWNVLPAPLFTTPGHLLDKFIKEFLQPNKCFLEQIDSAVNIIRTFLKENCFRQSTAKIQIVRGGSTAKGTALKTGSDADLVVFHNSLKSYTSQKNERHKIVKEIHEQLKAFWREKEEELEVSFEPPKWKAPRVLSFSLKSKVLNESVSFDVLPAFNALGQLSSGSTPSPEVYAGLIDLYKSSDLPGGEFSTCFTVLQRNFIRSRPTKLKDLIRLVKHWYKECERKLKPKGSLPPKYALELLTIYAWEQGSGVPDFDTAEGFRTVLELVTQYQQLCIFWKVNYNFEDETVRKFLLSQLQKTRPVILDPAEPTGDVGGGDRWCWHLLAKEAKEWLSSPCFKDGTGNPIPPWKVPTMQTPGSCGARIHPIVNEMFSSRSHRILNNNSKRNF

SEQ ID NO: 35694 - protein, 687 aa, Homo sapiens
MGNGESQLSSVPAQKLGWFIQEYLKPYEECQTLIDEMVNTICDVLQEPEQFPLVQGVAIGGSYGRKTVLRGNSDGTLVLFFSDLKQFQDQKRSQRDILDKTGDKLKFCLFTKWLKNNFEIQKSLDGFTIQVFTKNQRISFEVLAAFNALSLNDNPSPWIYRELKRSLDKTNASPGEFAVCFTELQQKFFDNRPGKLKDLILLIKHWHQQCQKKIKDLPSLSPYALELLTVYAWEQGCRKDNFDIAEGVRTVLELIKCQEKLCIYWMVNYNFEDETIRNILLHQLQSARPVILDPVDPTNNVSGDKICWQWLKKEAQTWLTSPNLDNELPAPSWNVLPAPLFTTPGHLLDKFIKEFLQPNKCFLEQIDSAVNIIRTFLKENCFRQSTAKIQIVRGGSTAKGTALKTGSDADLVVFHNSLKSYTSQKNERHKIVKEIHEQLKAFWREKEEELEVSFEPPKWKAPRVLSFSLKSKVLNESVSFDVLPAFNALGQLSSGSTPSPEVYAGLIDLYKSSDLPGGEFSTCFTVLQRNFIRSRPTKLKDLIRLVKHWYKECERKLKPKGSLPPKYALELLTIYAWEQGSGVPDFDTAEGFRTVLELVTQYQQLCIFWKVNYNFEDETVRKFLLSQLQKTRPVILDPAEPTGDVGGGDRWCWHLLAKEAKEWLSSPCFKDGTGNPIPPWKVPVKVI

SEQ ID NO: 35695 - protein, 172 aa, Homo sapiens
MGNGESQLSSVPAQKLGWFIQEYLKPYEECQTLIDEMVNTICDVLQEPEQFPLVQGVAIGGSYGRKTVLRGNSDGTLVLFFSDLKQFQDQKRSQRDILDKTGDKLKFCLFTKWLKNNFEIQKSLDGFTIQVFTKNQRISFEVLAAFNALSKHCWVSGEKSQRSGCQTALCNL

SEQ ID NO: 35696 - protein, 1087 aa, Homo sapiens
MDLYSTPAAALDRFVARRLQPRKEFVEKARRALGALAAALRERGGRLGAAAPRVLKTVKGGSSGRGTALKGGCDSELVIFLDCFKSYVDQRARRAEILSEMRASLESWWQNPVPGLRLTFPEQSVPGALQFRLTSVDLEDWMDVSLVPAFNVLGQAGSGVKPKPQVYSTLLNSGCQGGEHAACFTELRRNFVNIRPAKLKNLILLVKHWYHQVCLQGLWKETLPPVYALELLTIFAWEQGCKKDAFSLAEGLRTVLGLIQQHQHLCVFWTVNYGFEDPAVGQFLQRQLKRPRPVILDPADPTWDLGNGAAWHWDLLAQEAASCYDHPCFLRGMGDPVQSWKGPGLPRAGCSGLGHPIQLDPNQKTPENSKSLNAVYPRAGSKPPSCPAPGPTGAASIVPSVPGMALDLSQIPTKELDRFIQDHLKPSPQFQEQVKKAIDIILRCLHENCVHKASRVSKGGSFGRGTDLRDGCDVELIIFLNCFTDYKDQGPRRAEILDEMRAQLESWWQDQVPSLSLQFPEQNVPEALQFQLVSTALKSWTDVSLLPAFDAVGQLSSGTKPNPQVYSRLLTSGCQEGEHKACFAELRRNFMNIRPVKLKNLILLVKHWYRQVAAQNKGKGPAPASLPPAYALELLTIFAWEQGCRQDCFNMAQGFRTVLGLVQQHQQLCVYWTVNYSTEDPAMRMHLLGQLRKPRPLVLDPADPTWNVGHGSWELLAQEAAALGMQACFLSRDGTSVQPWDVMPALLYQTPAGDLDKFISEFLQPNRQFLAQVNKAVDTICSFLKENCFRNSPIKVIKVVKGGSSAKGTALRGRSDADLVVFLSCFSQFTEQGNKRAEIISEIRAQLEACQQERQFEVKFEVSKWENPRVLSFSLTSQTMLDQSVDFDVLPAFDALGQLVSGSRPSSQVYVDLIHSYSNAGEYSTCFTELQRDFIISRPTKLKSLIRLVKHWYQQCTKISKGRGSLPPQHGLELLTVYAWEQGGKDSQFNMAEGFRTVLELVTQYRQLCIYWTINYNAKDKTVGDFLKQQLQKPRPIILDPADPTGNLGHNARWDLLAKEAAACTSALCCMGRNGIPIQPWPVKAAV

SEQ ID NO: 35697 - protein, 1086 aa, Homo sapiens
MDLYSTPAAALDRFVARRLQPRKEFVEKARRALGALAAALRERGGRLGAAAPRVLKTVKGGSSGRGTALKGGCDSELVIFLDCFKSYVDQRARRAEILSEMRASLESWWQNPVPGLRLTFPEQSVPGALQFRLTSVDLEDWMDVSLVPAFNVLGQAGSGVKPKPQVYSTLLNSGCQGGEHAACFTELRRNFVNIRPAKLKNLILLVKHWYHQVCLQGLWKETLPPVYALELLTIFAWEQGCKKDAFSLAEGLRTVLGLIQQHQHLCVFWTVNYGFEDPAVGQFLQRQLKRPRPVILDPADPTWDLGNGAAWHWDLLAQEAASCYDHPCFLRGMGDPVQSWKGPGLPRAGCSGLGHPIQLDPNQKTPENSKSLNAVYPRAGSKPPSCPAPGPTGQPASSSVPGMALDLSQIPTKELDRFIQDHLKPSPQFQEQVKKAIDIILRCLHENCVHKASRVSKGGSFGRGTDLRDGCDVELIIFLNCFTDYKDQGPRRAEILDEMRAQLESWWQDQVPSLSLQFPEQNVPEALQFQLVSTALKSWTDVSLLPAFDAVGQLSSGTKPNPQVYSRLLTSGCQEGEHKACFAELRRNFMNIRPVKLKNLILLVKHWYRQVAAQNKGKGPAPASLPPAYALELLTIFAWEQGCRQDCFNMAQGFRTVLGLVQQHQQLCVYWTVNYSTEDPAMRMHLLGQLRKPRPLVLDPADPTWNVGHGSWELLAQEAAALGMQACFLSRDGTSVQPWDVMPALLYQTPAGDLDKFISEFLQPNRQFLAQVNKAVDTICSFLKENCFRNSPIKVIKVVKGGSSAKGTALRGRSDADLVVFLSCFSQFTEQGNKRAEIISEIRAQLEACQQERQFEVKFEVSKWENPRVLSFSLTSQTMLDQSVDFDVLPAFDALGQLVSGSRPSSQVYVDLIHSYSNAGEYSTCFTELQRDFIISRPTKLKSLIRLVKHWYQQCTKISKGRGSLPPQHGLELLTVYAWEQGGKDSQFNMAEGFRTVLELVTQYRQLCIYWTINYNAKDKTVGDFLKQQLQKPRPIILDPADPTGNLGHNARWDLLAKEAAACTSALCCMGRNGIPIQPWPVKAAV

SEQ ID NO: 35698 - protein, 514 aa, Homo sapiens
MALMQELYSTPASRLDSFVAQWLQPHREWKEEVLDAVRTVEEFLRQEHFQGKRGLDQDVRVLKVVKVGSFGNGTVLRSTREVELVAFLSCFHSFQEAAKHHKDVLRLIWKTMWQSQDLLDLGLEDLRMEQRVPDALVFTIQTRGTAEPITVTIVPAYRALGPSLPNSQPPPEVYVSLIKACGGPGNFCPSFSELQRNFVKHRPTKLKSLLRLVKHWYQQYVKARSPRANLPPLYALELLTIYAWEMGTEEDENFMLDEGFTTVMDLLLEYEVICIYWTKYYTLHNAIIEDCVRKQLKKERPIILDPADPTLNVAEGYRWDIVAQRASQCLKQDCCYDNRENPISSWNVKRARDIHLTVEQRGYPDFNLIVNPYEPIRKVKEKIRRTRGYSGLQRLSFQVPGSERQLLSSRCSLAKYGIFSHTHIYLLETIPSEIQVFVKNPDGGSYAYAINPNSFILGLKQQIEDQQGLPKKQQQLEFQGQVLQDWLGLGIYGIQDSDTLILSKKKGEALFPAS

SEQ ID NO: 35699 - protein, 255 aa, Homo sapiens
MALMQELYSTPASRLDSFVAQWLQPHREWKEEVLDAVRTVEEFLRQEHFQGKRGLDQDVRVLKVVKVGSFGNGTVLRSTREVELVAFLSCFHSFQEAAKHHKDVLRLIWKTMWQSQDLLDLGLEDLRMEQRVPDALVFTIQTRGTAEPITVTIVPAYRALGPSLPNSQPPPEVYVSLIKACGGPGNFCPSFSELQRNFVKHRPTKLKSLLRLVKHWYQQAHHPGSGRPHPQRGRRVQMGHRCSEGLPVPETGLLL

SEQ ID NO: 35700 - protein, 578 aa, Homo sapiens [sequence omitted]

SEQ ID NO: 35701 - protein, 520 aa, Homo sapiens
MPGSLPLNAEACWPKDVGIVALEIYFPSQYVDQAELEKYDGVDAGKYTIGLGQAKMGFCTDREDINSLCMTVVQNLMERNNLSYDCIGRLEVGTETIIDKSKSVKTNLMQLFEESGNTDIEGIDTTNACYGGTAAVFNAVNWIESSSWDGRYALVVAGDIAVYATGNARPTGGVGAVALLIGPNAPLIFERGLRGTHMQHAYDFYKPDMLSEYPIVDGKLSIQCYLSALDRCYSVYCKKIHAQWQKEGNDKDFTLNDFGFMIFHSPYCKLVQKSLARMLLNDFLNDQNRDKNSIYSGLEAFGDVKLEDTYFDRDVEKAFMKASSELFSQKTKASLLVSNQNGNMYTSSVYGSLASVLAQYSPQQLAGKRIGVFSYGSGLAATLYSLKVTQDATPGSALDKITASLCDLKSRLDSRTGVAPDVFAENMKLREDTHHLVNYIPQGSIDSLFEGTWYLVRVDEKHRRTYARRPTPNDDTLDEGVGLVHSNIATEHIPSPAKKVPRLPATAAEPEAAVISNGEH

SEQ ID NO: 35702 - protein, 520 aa, Homo sapiens; identical to SEQ ID NO: 35701

SEQ ID NO: 35703 - protein, 96 aa, Homo sapiens
MPGSLPLNAEACWPKDVGIVALEIYFPSQYVDQAELEKYDGVDAGKYTIGLGQAKMGFCTDREDINSLCMTVVQNLMERNNLSYDCIGRLEVGTET

SEQ ID NO: 35704 - protein, 509 aa, Homo sapiens
MPGSLPLNAEACWPKDVGIVALEIYFPSQYVDQAELEKYDGVDAGKYTIGLGQAKMGFCTDREDINSLCMTVVQNLMERNNLSYDCIGRLEVGTETIIDKSKSVKTNLMQLFEESGNTDIEGIDTTNAVNWIESSSWDGRYALVVAGDIAVYATGNARPTGGVGAVALLIGPNAPLIFERGLRGTHMQHAYDFYKPDMLSEYPIVDGKLSIQCYLSALDRCYSVYCKKIHAQWQKEGNDKDFTLNDFGFMIFHSPYCKLVQKSLARMLLNDFLNDQNRDKNSIYSGLEAFGDVKLEDTYFDRDVEKAFMKASSELFSQKTKASLLVSNQNGNMYTSSVYGSLASVLAQYSPQQLAGKRIGVFSYGSGLAATLYSLKVTQDATPGSALDKITASLCDLKSRLDSRTGVAPDVFAENMKLREDTHHLVNYIPQGSIDSLFEGTWYLVRVDEKHRRTYARRPTPNDDTLDEGVGLVHSNIATEHIPSPAKKVPRLPATAAEPEAAVISNGEH

SEQ ID NO: 35705 - protein, 508 aa, Homo sapiens
MQRLLTPVKRILQLTRAVQETSLTPARLLPVAHQRFSTASAVPLAKTDTWPKDVGILALEVYFPAQYVDQTDLEKYNNVEAGKYTVGLGQTRMGFCSVQEDINSLCLTVVQRLMERIQLPWDSVGRLEVGTETIIDKSKAVKTVLMELFQDSGNTDIEGIDTTNACYGGTASLFNAANWMESSSWDGRYAMVVCGDIAVYPSGNARPTGGAGAVAMLIGPKAPLALERGLRGTHMENVYDFYKPNLASEYPIVDGKLSIQCYLRALDRCYTSYRKKIQNQWKQAGSDRPFTLDDLQYMIFHTPFCKMVQKSLARLMFNDFLSASSDTQTSLYKGLEAFGGLKLEDTYTNKDLDKALLKASQDMFDKKTKASLYLSTHNGNMYTSSLYGCLASLLSHHSAQELAGSRIGAFSYGSGLAASFFSFRVSQDAAPGSPLDKLVSSTSDLPKRLASRKCVSPEEFTEIMNQREQFYHKVNFSPPGDTNSLFPGTWYLERVDEQHRRKYARRPV

SEQ ID NO: 35706 - protein, 466 aa, Homo sapiens
MQRLLTPVKRILQLTRAVQETSLTPARLLPVAHQRFSTASAVPLAKTDTWPKDVGILALEVYFPAQYVDQTDLEKYNNVEAGKYTVGLGQTRMGFCSVQEDINSLCLTVVQRLMERIQLPWDSVGRLEVGTETIIDKSKAVKTVLMELFQDSGNTDIEGIDTTNACYGGTASLFNAANWMESSSWDGLRGTHMENVYDFYKPNLASEYPIVDGKLSIQCYLRALDRCYTSYRKKIQNQWKQAGSDRPFTLDDLQYMIFHTPFCKMVQKSLARLMFNDFLSASSDTQTSLYKGLEAFGGLKLEDTYTNKDLDKALLKASQDMFDKKTKASLYLSTHNGNMYTSSLYGCLASLLSHHSAQELAGSRIGAFSYGSGLAASFFSFRVSQDAAPGSPLDKLVSSTSDLPKRLASRKCVSPEEFTEIMNQREQFYHKVNFSPPGDTNSLFPGTWYLERVDEQHRRKYARRPV

SEQ ID NO: 35707 - protein, 386 aa, Homo sapiens
MGQREMWRLMSRFNAFKRTNTILHHLRMSKHTDAAEEVLLEKKGCTGVITLNRPKFLNALTLNMIRQIYPQLKKWEQDPETFLIIIKGAGGKAFCAGGDIRVISEAEKAKQKIAPVFFREEYMLNNAVGSCQKPYVALIHGITMGGGVGLSVHGQFRVATEKCLFAMPETAIGLFPDVGGGYFLPRLQGKLGYFLALTGFRLKGRDVYRAGIATHFVDSEKLAMLEEDLLALKSPSKENIASVLENYHTESKIDRDKSFILEEHMDKINSCFSANTVEEIIENLQQDGSSFALEQLKVINKMSPTSLKITLRQLMEGSSKTLQEVLTMEYRLSQACMRGHDFHEGVRAVLIDKDQSPKWKPADLKEVTEEDLNNHFKSLGSSDLKF

SEQ ID NO: 35708 - protein, 338 aa, Homo sapiens
MGQREMWRLMSRFNAFKRTNTILHHLRMSKHTDAAEEVLLEKKGCTGVITLNRPKFLNALTLNMIRQIYPQLKKWEQDPETFLIIIKGAGGKAFCAGGDIRVISEAEKAKQKIAPVFFREEYMLNNAVGSCQKPYVALIHGITMGGGVGLSVHGQFRVATEKCLFAMPETAIGLFPDVGGGYFLPRLQGKLGYFLALTGFRLKGRDVYRAGIATHFVDSEKLAMLEEDLLALKSPSKENIASVLENYHTESKIDRDKSFILEEHMDKINSCFSANTVEEIIENLQQDGSSFALEQLKVINKMSPTSLKITLRQLMEGSSKTLQEVLTMEYRLSQACMF

SEQ ID NO: 35709 - protein, 38 aa, Homo sapiens
  VARIANT 1: note = MOD_RES - Any amino acid
XLIDKDQSPKWKPADLKEVTEEDLNNHFKSLGSSDLKF

SEQ ID NO: 35710 - protein, 300 aa, Homo sapiens
MGTLPKRVKIVEVGPRDGLQNEKNIVSTPVKIKLIDMLSEAGLSVIETTSFVSPKWVPQMGDHTEVLKGIQKFPGINYPVLTPNLKGFEAAVAAGAKEVVIFGAASELFTKKNINCSIEESFQRFDAILKAAQSANISVRGYVSCALGCPYEGKISPAKVAEVTKKFYSMGCYEISLGDTIGVGTPGIMKDMLSAVMQEVPLAALAVHCHDTYGQALANTLMALQMGVSVVDSSVAGLGGCPYAQGASGNLATEDLVYMLEGLGIHTGVNLQKLLEAGNFICQALNRKTSSKVAQATCKL

SEQ ID NO: 35711 - protein, 325 aa, Homo sapiens
MAAMRKALPRRLVGLASLRAVSTSSMGTLPKRVKIVEVGPRDGLQNEKNIVSTPVKIKLIDMLSEAGLSVIETTSFVSPKWVPQMGDHTEVLKGIQKFPGINYPVLTPNLKGFEAAVAAGAKEVVIFGAASELFTKKNINCSIEESFQRFDAILKAAQSANISVRGYVSCALGCPYEGKISPAKVAEVTKKFYSMGCYEISLGDTIGVGTPGIMKDMLSAVMQEVPLAALAVHCHDTYGQALANTLMALQMGVSVVDSSVAGLGGCPYAQGASGNLATEDLVYMLEGLGIHTGVNLQKLLEAGNFICQALNRKTSSKVAQATCKL

SEQ ID NO: 35712 - protein, 254 aa, Homo sapiens
MAAMRKALPRRLVGLASLRAVSTSSMGTLPKRVKIVEVGPRDGLQNEKNIVSTPVKIKLIDMLSEAGLSVIETTSFVSPKWVPQMGDHTEVLKGIQKFPGINYPVLTPNLKGFEAAVTKKFYSMGCYEISLGDTIGVGTPGIMKDMLSAVMQEVPLAALAVHCHDTYGQALANTLMALQMGVSVVDSSVAGLGGCPYAQGASGNLATEDLVYMLEGLGIHTGVNLQKLLEAGNFICQALNRKTSSKVAQATCKL

SEQ ID NO: 35713 - protein, 166 aa, Homo sapiens
MGTLPKRVKIVEVGPRDGLQNEKNIVSTPVKIKLIDMLSEAGLSVIETTSFVSPKWVPQMGDHTEVLKGIQKFPGINYPVLTPNLKGFEAAMGVSVVDSSVAGLGGCPYAQGASGNLATEDLVYMLEGLGIHTGVNLQKLLEAGNFICQALNRKTSSKVAQATCKL

SEQ ID NO: 35714 - protein, 520 aa, Homo sapiens
MAALKLLSSGLRLCASARGSGATWYKGCVCSFSTSAHRHTKFYTDPVEAVKDIPDGATVLVGGFGLCGIPENLIDALLKTGVKGLTAVSNNAGVDNFGLGLLLRSKQIKRMVSSYVGENAEFERQYLSGELEVELTPQGTLAERIRAGGAGVPAFYTPTGYGTLVQEGGSPIKYNKDGSVAIASKPREVREFNGQHFILEEAITGDFALVKAWKADRAGNVIFRKSARNFNLPMCKAAETTVVEVEEIVDIGAFAPEDIHIPQIYVHRLIKGEKYEKRIERLSIRKEGDGEAKSAKPGDDVRERIIKRAALEFEDGMYANLGIGIPLLASNFISPNITVHLQSENGVLGLGPYPRQHEADADLINAGKETVTILPGASFFSSDESFAMIRGGHVDLTMLGAMQVSKYGDLANWMIPGKMVKGMGGAMDLVSSAKTKVVVTMEHSAKGNAHKIMEKCTLPLTGKQCVNRIITEKAVFDVDKKKGLTLIELWEGLTVDDVQKSTGCDFAVSPKLMPMQQIAN

SEQ ID NO: 35715 - protein, 334 aa, Homo sapiens
MMVREFNGQHFILEEAITGDFALVKAWKADRAGNVIFRKSARNFNLPMCKAAETTVVEVEEIVDIGAFAPEDIHIPQIYVHRLIKGEKYEKRIERLSIRKEGDGEAKSAKPGDDVRERIIKRAALEFEDGMYANLGIGIPLLASNFISPNITVHLQSENGVLGLGPYPRQHEADADLINAGKETVTILPGASFFSSDESFAMIRGGHVDLTMLGAMQVSKYGDLANWMIPGKMVKGMGGAMDLVSSAKTKVVVTMEHSAKGNAHKIMEKCTLPLTGKQCVNRIITEKAVFDVDKKKGLTLIELWEGLTVDDVQKSTGCDFAVSPKLMPMQQIAN

SEQ ID NO: 35716 - protein, 123 aa, Homo sapiens
MLGAMQVSKYGDLANWMIPGKMVKGMGGAMDLVSSAKTKVVVTMEHSAKGNAHKIMEKCTLPLTGKQCVNRIITEKAVFDVDKKKGLTLIELWEGLTVDDVQKSTGCDFAVSPKLMPMQQIAN

SEQ ID NO: 35717 - protein, 123 aa, Homo sapiens; identical to SEQ ID NO: 35716

SEQ ID NO: 35718 - protein, 150 aa, Homo sapiens
SNAYKVDNFGLGLLLRSKQIKRMVSSYVGENAEFERQYLSGELEVELTPQGTLAERIRAGGAGVPAFYTPTGYGTLVQEGGSPIKYNKDGSVAIASKPREVREFNGQHFILEEAITGDFALVKAWKADRAGNVIFRKSARNFNLPMCKAA

SEQ ID NO: 35719 - protein, 376 aa, Homo sapiens
MSNCLQNFLKITSTRLLCSRLCQQLRSKRKFFGTVPISRLHRRVVITGIGLVTPLGVGTHLVWDRLIGGESGIVSLVGEEYKSIPCSVAAYVPRGSDEGQFNEQNFVSKSDIKSMSSPTIMAIGAAELAMKDSGWHPQSEADQVATGVAIGMGMIPLEVVSETALNFQTKGYNKVSPFFVPKILVNMAAGQVSIRYKLKGPNHAVSTACTTGAHAVGDSFRFIAHGDAGHITAPDPEGEGALRCMAAALKDAGVQPEEISYINAHATSTPLGDAAENKAIKHLFKDHAYALAVSSTKGATGHLLGAAGAVEAAFTTLACYYQKLPPTLNLDCSEPEFDLNYVPLKAQEWKTEKRFIGLTNSFGFGGTNATLCIAGL

SEQ ID NO: 35720 - protein, 459 aa, Homo sapiens
MSNCLQNFLKITSTRLLCSRLCQQLRSKRKFFGTVPISRLHRRVVITGIGLVTPLGVGTHLVWDRLIGGESGIVSLVGEEYKSIPCSVAAYVPRGSDEGQFNEQNFVSKSDIKSMSSPTIMAIGAAELAMKDSGWHPQSEADQVATGVAIGMGMIPLEVVSETALNFQTKGYNKVSPFFVPKILVNMAAGQVSIRYKLKGPNHAVSTACTTGAHAVGDSFRFIAHGDADVMVAGGTDSCISPLSLAGFSRARALSTNSDPKLACRPFHPKRDGFVMGEGAAVLVLEEYEHAVQRRARIYAEVLGYGLSGDAGHITAPDPEGEGALRCMAAALKDAGVQPEEISYINAHATSTPLGDAAENKAIKHLFKDHAYALAVSSTKGATGHLLGAAGAVEAAFTTLACYYQKLPPTLNLDCSEPEFDLNYVPLKAQEWKTEKRFIGLTNSFGFGGTNATLCIAGL

SEQ ID NO: 35721 - protein, 231 aa, Homo sapiens
MSNCLQNFLKITSTRLLCSRLCQQLRSKRKFFGTVPISRLHRRVVITGIGLVTPLGVGTHLVWDRLIGGESGIVSLVGEEYKSIPCSVAAYVPRGSDEGQFNEQNFVSKSDIKSMSSPTIMAIGAAELAMKDSGWHPQSEADQVATGVAIGMGMIPLEVVSETALNFQTKGYNKVSPFFVPKILVNMAAGQVSIRYKLKGPNHAVSTACTTGAHAVGDSFRFIAHGDADVM

SEQ ID NO: 35722 - protein, 220 aa, Homo sapiens
MSNCLQNFLKITSTRLLCSRLCQQLRSKRKFFGTVPISRLHRRVVITGIGLVTPLGVGTHLVWDRLIGGESGIVSLVGEEYKSIPCSVAAYVPRGSDEGQFNEQNFVSKSDIKSMSSPTIMAIGAAELAMKDSGWHPQSEADQVATGVAIGMGMIPLEVVSETALNFQTKGYNKVSPFFVPKILVNMAAGQVSIRYKLKGPNHAVSTACTTGAHAVGDSF

SEQ ID NO: 35723 - protein, 624 aa, Homo sapiens
MEIPGSLCKKVKLSNNAQNWGMQRATNVTYQAHHVSRNKRGQVVGTRGGFRGCTVWLTGLSGAGKTTVSMALEEYLVCHGIPCYTLDGDNIRQGLNKNLGFSPEDREENVRRIAEVAKLFADAGLVCITSFISPYTQDRNNARQIHEGASLPFFEVFVDAPLHVCEQRDVKGLYKKARAGEIKGFTGIDSEYEKPEAPELVLKTDSCDVNDCVQQVVELLQERDIVPVDASYEVKELYVPENKLHLAKTDAETLPALKINKVDMQWVQVLAEGWATPLNGFMREREYLQCLHFDCLLDGGVINLSVPIVLTATHEDKERLDGCTAFALMYEGRRVAILRNPEFFEHRKEERCARQWGTTCKNHPYIKMVMEQGDWLIGGDLQVLDRVYWNDGLDQYRLTPTELKQKFKDMNADAVFAFQLRNPVHNGHALLMQDTHKQLLERGYRRPVLLLHPLGGWTKDDDVPLMWRMKQHAAVLEEGVLNPETTVVAIFPSPMMYAGPTEVQWHCRARMVAGANFYIVGRDPAGMPHPETGKDLYEPSHGAKVLTMAPGLITLEIVPFRVAAYNKKKKRMDYYDSEHHEDFEFISGTRMRKLAREGQKPPEGFMAPKAWTVLTEYYKSLEKA

SEQ ID NO: 35724 - protein, 614 aa, Homo sapiens
MSGIKKQKTENQQKSTNVVYQAHHVSRNKRGQVVGTRGGFRGCTVWLTGLSGAGKTTISFALEEYLVSHAIPCYSLDGDNVRHGLNRNLGFSPGDREENIRRIAEVAKLFADAGLVCITSFISPFAKDRENARKIHESAGLPFFEIFVDAPLNICESRDVKGLYKRARAGEIKGFTGIDSDYEKPETPERVLKTNLSTVSDCVHQVVELLQEQNIVPYTIIKDIHELFVPENKLDHVRAEAETLPSLSITKLDLQWVQVLSEGWATPLKGFMREKEYLQVMHFDTLLDDGVINMSIPIVLPVSAEDKTRLEGCSKFVLAHGGRRVAILRDAEFYEHRKEERCSRVWGTTCTKHPHIKMVMESGDWLVGGDLQVLEKIRWNDGLDQYRLTPLELKQKCKEMNADAVFAFQLRNPVHNGHALLMQDTRRRLLERGYKHPVLLLHPLGGWTKDDDVPLDWRMKQHAAVLEEGVLDPKSTIVAIFPSPMLYAGPTEVQWHCRSRMIAGANFYIVGRDPAGMPHPETKKDLYEPTHGGKVLSMAPGLTSVEIIPFRVAAYNKAKKAMDFYDPARHNEFDFISGTRMRKLAREGENPPDGFMAPKAWKVLTDYYRSLEKN

SEQ ID NO: 35725 - protein, 618 aa, Homo sapiens
SGKKQEKEENQQKSTNVVYQAHHVSRNKRGQVVGTRGGFRGCTVWLTGLSGAGKTTISFALEEYLVSHAIPCYSLDGDNVRHGLNRNLGFSPGDREENIRRIAEVAKLFADAGLVCITSFISPFAKDRENARKIHESAGLPFFEIFVDAPLNICESRDVKGLYKRARAGEIKGFTGIDSDYEKPETPERVLKTNLSTVSDCVHQVVELLQEQNIVPYTIIKDIHELFVPENKLDHVRAEAETLPSLSITKLDLQWVQVLSEGWATPLKGFMREKEYLQVMHFDTLLDGMFLLDGVINMSIPIVLPVSAEDKTRLEGCSKFVLAHGGRRVAILRDAEFYEHRKEERCSRVWGTTCTKHPHIKMVMESGDWLVGGDLQVLEKIRWNDGLDQYRLTPLELKQKCKEMNADAVFAFQLRNPVHNGHALLMQDTRRRLLERGYKHPVLLLHPLGGWTKDDDVPLDWRMKQHAAVLEEGVLDPKSTIVAIFPSPMLYAGPTEVQWHCRSRMIAGANFYIVGRDPAGMPHPETKKDLYEPTHGGKVLSMAPGLTSVEIIPFRVAAYNKAKKAMDFYDPARHNEFDFISGTRMRKLAREGENPPDGFMAPKAWKVLTDYYRSLEKN

SEQ ID NO: 35726 - protein, 618 aa, Homo sapiens
MIVLVTEWVDLSLENQQKSTNVVYQAHHVSRNKRGQVVGTRGGFRGCTVWLTGLSGAGKTTISFALEEYLVSHAIPCYSLDGDNVRHGLNRNLGFSPGDREENIRRIAEVAKLFADAGLVCITSFISPFAKDRENARKIHESAGLPFFEIFVDAPLNICESRDVKGLYKRARAGEIKGFTGIDSDYEKPETPERVLKTNLSTVSDCVHQVVELLQEQNIVPYTIIKDIHELFVPENKLDHVRAEAETLPSLSITKLDLQWVQVLSEGWATPLKGFMREKEYLQVMHFDTLLDDGVINMSIPIVLPVSAEDKTRLEGCSKFVLAHGGRRVAILRDAEFYEHRKEERCSRVWGTTCTKHPHIKMVMESGDWLVGGDLQVLEKIRWNDGLDQYRLTPLELKQKCKEMNADAVFAFQLRNPVHNGHALLMQDTRRRLLERGYKHPVLLLHPLGGWTKDDDVPLDWRMKQHAAVLEEGVLDPKSTIVAIFPSPMLYAGPTEVQWHCRSRMIAGANFYIVGRDPAGMPHPETKKDLYEPTHGGKVLSMAPGLTSVEIIPFRVAAYNKAKKAMDFYDPARHNEFDFISGTRMRKLAREGENPPDGFMAPKAWKVLTDYYRSLEKN

SEQ ID NO: 35727 - protein, 619 aa, Homo sapiens
MSGIKKQKTENQQKSTNVVYQAHHVSRNKRGQVVGTRGGFRGCTVWLTGLSGAGKTTISFALEEYLVSHAIPCYSLDGDNVRHGLNRNLGFSPGDREENIRRIAEVAKLFADAGLVCITSFISPFAKDRENARKIHESAGLPFFEIFVDAPLNICESRDVKGLYKRARAGEIKGFTGIDSDYEKPETPERVLKTNLSTVSDCVHQVVELLQEQNIVPYTIIKDIHELFVPENKLDHVRAEAETLPSLSITKLDLQWVQVLSEGWATPLKGFMREKEYLQVMHFDTLLDGMALPDGVINMSIPIVLPVSAEDKTRLEGCSKFVLAHGGRRVAILRDAEFYEHRKEERCSRVWGTTCTKHPHIKMVMESGDWLVGGDLQVLEKIRWNDGLDQYRLTPLELKQKCKEMNADAVFAFQLRNPVHNGHALLMQDTRRRLLERGYKHPVLLLHPLGGWTKDDDVPLDWRMKQHAAVLEEGVLDPKSTIVAIFPSPMLYAGPTEVQWHCRSRMIAGANFYIVGRDPAGMPHPETKKDLYEPTHGGKVLSMAPGLTSVEIIPFRVAAYNKAKKAMDFYDPARHNEFDFISGTRMRKLAREGENPPDGFMAPKAWKVLTDYYRSLEKN

SEQ ID NO: 35728 - protein, 500 aa, Homo sapiens
MASMLLAQRLACSFQHSYRLLVPGSRHISQAAAKVDVEFDYDGPLMKTEVPGPRSQELMKQLNIIQNAEAVHFFCNYEESRGNYLVDVDGNRMLDLYSQISSVPIGYSHPALLKLIQQPQNASMFVNRPALGILPPENFVEKLRQSLLSVAPKGMSQLITMACGSCSNENALKTIFMWYRSKERGQRGFSQEELETCMINQAPGCPDYSILSFMGAFHGRTMGCLATTHSKAIHKIDIPSFDWPIAPFPRLKYPLEEFVKENQQEEARCLEEVEDLIVKYRKKKKTVAGIIVEPIQSEGGDNHASDDFFRKLRDIARKHGCAFLVDEVQTGGGCTGKFWAHEHWGLDDPADVMTFSKKMMTGGFFHKEEFRPNAPYRIFNTWLGDPSKNLLLAEVINIIKREDLLNNAAHAGKALLTGLLDLQARYPQFISRVRGRGTFCSFDTPDDSIRNKLILIARNKGVVLGGCGDKSIRFRPTLVFRDHHAHLFLNIFSDILADFK

SEQ ID NO: 35729 - protein, 500 aa, Homo sapiens; identical to SEQ ID NO: 35728

SEQ ID NO: 35730 - protein, 500 aa, Homo sapiens; identical to SEQ ID NO: 35728

SEQ ID NO: 35731 - protein, 153 aa, Homo sapiens
VDMDGVLADFEAGLLRGFRRRFPEEPHVPLEQRRGFLAREQYRALRPDLADKVASVYEAPGFFLDLEPIPGALDAVREMNDLPDTQVFICTSPLLKYHHCVGEKEETPSWEHILFTCCHNRHLVLPPTRRRLLSWSDNWREILDSKRGAAQRE

SEQ ID NO: 35732 - protein, 201 aa, Homo sapiens
MARSVRVLVDMDGVLADFEAGLLRGFRRRFPEEPHVPLEQRRGFLAREQYRALRPDLADKVASVYEAPGFFLDLEPIPGALDAVREMNDLPDTQVFICTSPLLKYHHCVGEKYRWVEQHLGPQFVERIILTRDKTVVLGDLLIDDKDTVRGQEETPSWEHILFTCCHNRHLVLPPTRRRLLSWSDNWREILDSKRGAAQRE

SEQ ID NO: 35733 - protein, 228 aa, Homo sapiens
MIRLGGWCARRLCSAAVPAGRRGAAGGLGLAGGRALRVLVDMDGVLADFEGGFLRKFRARFPDQPFIALEDRRGFWVSEQYGRLRPGLSEKAISIWESKNFFFELEPLPGAVEAVKEMASLQNTDVFICTSPIKMFKYCPYEKYAWVEKYFGPDFLEQIVLTRDKTVVSADLLIDDRPDITGAEPTPSWEHVLFTACHNQHLQLQPPRRRLHSWADDWKAILDSKRPC

SEQ ID NO: 35734 - protein, 239 aa, Homo sapiens
MIRLGGWCARRLCSAAVPAGRRGAAGGLGLAGGRALRVLVDMDGVLADFEGGFLRKFRARFPDQPFIALEDRRGFWVSEQYGRLRPGLSEKAISIWESKNFFFELEPLPGAVEAVKEMASLQNTDVFICTSPIKMFKYCPYEKYAWVEKYFGPDFLEQIVLTRDKTVVSADLLIDDRPDITGNQPPAGSMSSSPPATTSTCSCSPPAAGCTRGRTTGRPFWTASGPAELDCASGSSVGL

SEQ ID NO: 35735 - protein, 950 aa, Homo sapiens
MGVPAFFRWLSRKYPSIIVNCVEEKPKECNGVKIPVDASKPNPNDVEFDNLYLDMNGIIHPCTHPEDKPAPKNEDEMMVAIFEYIDRLFSIVRPRRLLYMAIDGVAPRAKMNQQRSRRFRASKEGMEAAVEKQRVREEILAKGGFLPPEEIKERFDSNCITPGTEFMDNLAKCLRYYIADRLNNDPGWKNLTVILSDASAPGEGEHKIMDYIRRQRAQPNHDPNTHHCLCGADADLIMLGLATHEPNFTIIREEFKPNKPKPCGLCNQFGHEVKDCEGLPREKKGKHDELADSLPCAEGEFIFLRLNVLREYLERELTMASLPFTFDVERSIDDWVFMCFFVGNDFLPHLPSLEIRENAIDRLVNIYKNVVHKTGGYLTESGYVNLQRVQMIMLAVGEVEDSIFKKRKDDEDSFRRRQKEKRKRMKRDQPAFTPSGILTPHALGSRNSPGSQVASNPRQAAYEMRMQNNSSPSISPNTSFTSDGSPSPLGGIKRKAEDSDSEPEPEDNVRLWEAGWKQRYYKNKFDVDAADEKFRRKVVQSYVEGLCWVLRYYYQGCASWKWYYPFHYAPFASDFEGIADMPSDFEKGTKPFKPLEQLMGVFPAASGNFLPPSWRKLMSDPDSSIIDFYPEDFAIDLNGKKYAWQGVALLPFVDERRLRAALEEVYPDLTPEETRRNSLGGDVLFVGKHHPLHDFILELYQTGSTEPVEVPPELCHGIQGKFSLDEEAILPDQIVCSPVPMLRDLTQNTVVSINFKDPQFAEDYIFKAVMLPGARKPAAVLKPSDWEKSSNGRQWKPQLGFNRDRRPVHLDQAAFRTLGHVMPRGSGTGIYSNAAPPPVTYQGNLYRPLLRGQAQIPKLMSNMRPQDSWRGPPPLFQQQRFDRGVGAEPLLPWNRMLQTQNAAFQPNQYQMLAGPGGYPPRRDDRGGRQGYPREGRKYPLPPPSGRYNWN

SEQ ID NO: 35736 - protein, 874 aa, Homo sapiens
MMVAIFEYIDRLFSIVRPRRLLYMAIDGVAPRAKMNQQRSRRFRASKEGMEAAVEKQRVREEILAKGGFLPPEEIKERFDSNCITPGTEFMDNLAKCLRYYIADRLNNDPGWKNLTVILSDASAPGEGEHKIMDYIRRQRAQPNHDPNTHHCLCGADADLIMLGLATHEPNFTIIREEFKPNKPKPCGLCNQFGHEVKDCEGLPREKKGKHDELADSLPCAEGEFIFLRLNVLREYLERELTMASLPFTFDVERSIDDWVFMCFFVGNDFLPHLPSLEIRENAIDRLVNIYKNVVHKTGGYLTESGYVNLQRVQMIMLAVGEVEDSIFKKRKDDEDSFRRRQKEKRKRMKRDQPAFTPSGILTPHALGSRNSPGSQVASNPRQAAYEMRMQNNSSPSISPNTSFTSDGSPSPLGGIKRKAEDSDSEPEPEDNVRLWEAGWKQRYYKNKFDVDAADEKFRRKVVQSYVEGLCWVLRYYYQGCASWKWYYPFHYAPFASDFEGIADMPSDFEKGTKPFKPLEQLMGVFPAASGNFLPPSWRKLMSDPDSSIIDFYPEDFAIDLNGKKYAWQGVALLPFVDERRLRAALEEVYPDLTPEETRRNSLGGDVLFVGKHHPLHDFILELYQTGSTEPVEVPPELCHGIQGKFSLDEEAILPDQIVCSPVPMLRDLTQNTVVSINFKDPQFAEDYIFKAVMLPGARKPAAVLKPSDWEKSSNGRQWKPQLGFNRDRRPVHLDQAAFRTLGHVMPRGSGTGIYSNAAPPPVTYQGNLYRPLLRGQAQIPKLMSNMRPQDSWRGPPPLFQQQRFDRGVGAEPLLPWNRMLQTQNAAFQPNQYQMLAGPGGYPPRRDDRGGRQGYPREGRKYPLPPPSGRYNWN

SEQ ID NO: 35737 - protein, 896 aa, Homo sapiens
MNGIIHPCTHPEDKPAPKNEDEMMVAIFEYIDRLFSIVRPRRLLYMAIDGVAPRAKMNQQRSRRFRASKEGMEAAVEKQRVREEILAKGGFLPPEEIKERFDSNCITPGTEFMDNLAKCLRYYIADRLNNDPGWKNLTVILSDASAPGEGEHKIMDYIRRQRAQPNHDPNTHHCLCGADADLIMLGLATHEPNFTIIREEFKPNKPKPCGLCNQFGHEVKDCEGLPREKKGKHDELADSLPCAEGEFIFLRLNVLREYLERELTMASLPFTFDVERSIDDWVFMCFFVGNDFLPHLPSLEIRENAIDRLVNIYKNVVHKTGGYLTESGYVNLQRVQMIMLAVGEVEDSIFKKRKDDEDSFRRRQKEKRKRMKRDQPAFTPSGILTPHALGSRNSPGSQVASNPRQAAYEMRMQNNSSPSISPNTSFTSDGSPSPLGGIKRKAEDSDSEPEPEDNVRLWEAGWKQRYYKNKFDVDAADEKFRRKVVQSYVEGLCWVLRYYYQGCASWKWYYPFHYAPFASDFEGIADMPSDFEKGTKPFKPLEQLMGVFPAASGNFLPPSWRKLMSDPDSSIIDFYPEDFAIDLNGKKYAWQGVALLPFVDERRLRAALEEVYPDLTPEETRRNSLGGDVLFVGKHHPLHDFILELYQTGSTEPVEVPPELCHGIQGKFSLDEEAILPDQIVCSPVPMLRDLTQNTVVSINFKDPQFAEDYIFKAVMLPGARKPAAVLKPSDWEKSSNGRQWKPQLGFNRDRRPVHLDQAAFRTLGHVMPRGSGTGIYSNAAPPPVTYQGNLYRPLLRGQAQIPKLMSNMRPQDSWRGPPPLFQQQRFDRGVGAEPLLPWNRMLQTQNAAFQPNQYQMLAGPGGYPPRRDDRGGRQGYPREGRKYPLPPPSGRYNWN

SEQ ID NO: 35738 - protein, 592 aa, Homo sapiens
MAPGQLALFSVSDKTGLVEFARNLTALGLNLVASGGTAKALRDAGLAVRDVSELTGFPEMLGGRVKTLHPAVHAGILARNIPEDNADMARLDFNLIRVVACNLYPFVKTVASPGVTVEEAVEQIDIGGVTLLRAAAKNHARVTVVCEPEDYVVVSTEMQSSESKDTSLETRRQLALKAFTHTAQYDEAISDYFRKQYSKGVSQMPLRYGMNPHQTPAQLYTLQPKLPITVLNGAPGFINLCDALNAWQLVKELKEALGIPAAASFKHVSPAGAAVGIPLSEDEAKVCMVYDLYKTLTPISAAYARARGADRMSSFGDFVALSDVCDVPTAKIISREVSDGIIAPGYEEEALTILSKKKNGNYCVLQMDQSYKPDENEVRTLFGLHLSQKRNNGVVDKSLFSNVVTKNKDLPESALRDLIVATIAVKYTQSNSVCYAKNGQVIGIGAGQQSRIHCTRLAGDKANYWWLRHHPQVLSMKFKTGVKRAEISNAIDQYVTGTIGEDEDLIKWKALFEEVPELLTEAEKKEWVEKLTEVSISSDAFFPFRDNVDRAKRSGVAYIAAPSGSAADKVVIEACDELGIILAHTNLRLFHH

SEQ ID NO: 35739 - protein, 533 aa, Homo sapiens
MLGGRVKTLHPAVHAGILARNIPEDNADMARLDFNLIRVVACNLYPFVKTVASPGVTVEEAVEQIDIGGVTLLRAAAKNHARVTVVCEPEDYVVVSTEMQSSESKDTSLETRRQLALKAFTHTAQYDEAISDYFRKQYSKGVSQMPLRYGMNPHQTPAQLYTLQPKLPITVLNGAPGFINLCDALNAWQLVKELKEALGIPAAASFKHVSPAGAAVGIPLSEDEAKVCMVYDLYKTLTPISAAYARARGADRMSSFGDFVALSDVCDVPTAKIISREVSDGIIAPGYEEEALTILSKKKNGNYCVLQMDQSYKPDENEVRTLFGLHLSQKRNNGVVDKSLFSNVVTKNKDLPESALRDLIVATIAVKYTQSNSVCYAKNGQVIGIGAGQQSRIHCTRLAGDKANYWWLRHHPQVLSMKFKTGVKRAEISNAIDQYVTGTIGEDEDLIKWKALFEEVPELLTEAEKKEWVEKLTEVSISSDAFFPFRDNVDRAKRSGVAYIAAPSGSAADKVVIEACDELGIILAHTNLRLFHH

SEQ ID NO: 35740 - protein, 1083 aa, Homo sapiens
MKGTRAIGSVPERSPAGVDLSLTGLPPPVSRRPGSAATTKPIVRSVSVVTGSEQKRKVLEATGPGGSQAINNLRRSNSTTQVSQPRSGSPRPTEPTDFLMLFEGSPSGKKRPASLSTAPSEKGATWNVLDDQPRGFTLPSNARSSSALDSPAGPRRKECTVALAPNFTANNRSNKGAVGNCVTTMVHNRYTPSERAPPLKSSNQTAPSLNNIIKAATCEGSESSGFGKLPKNVSSATHSARNNTGGSTGLPRRKEVTEEEAERFIHQVNQATVTIQRWYRHQVQRRGAGAARLEHLLQAKREEQRQRSGEGTLLDLHQQKEAARRKAREEKARQARRAAIQELQQKRALRAQKASTAERGPPENPRETRVPGMRQPAQELSPTPGGTAHQALKANNTGGGLPAAGPGDRCLPTSDSSPEPQQPPEDRTQDVLAQDAAGDNLEMMAPSRGSAKSRGPLEELLHTLQLLEKEPDVLPRPRTHHRGRYAWASEVTTEDDASSLTADNLEKFGKLSAFPEPPEDGTLLSEAKLQSIMSFLDEMEKSGQDQLDSQQEGWVPEAGPGPLELGSEVSTSVMRLKLEVEEKKQAMLLLQRALAQQRDLTARRVKETEKALSRQLQRQREHYEATIQRHLAFIDQLIEDKKVLSEKCEAVVAELKQEDQRCTERVAQAQAQHELEIKKLKELMSATEKARREKWISEKTKKIKEVTVRGLEPEIQKLIARHKQEVRRLKSLHEAELLQSDERASQRCLRQAEELREQLEREKEALGQQERERARQRFQQHLEQEQWALQQQRQRLYSEVAEERERLGQQAARQRAELEELRQQLEESSSALTRALRAEFEKGREEQERRHQMELNTLKQQLELERQAWEAGRTRKEEAWLLNREQELREEIRKGRDKEIELVIHRLEADMALAKEESEKAAESRIKRLRDKYEAELSELEQSERKLQERCSELKGQLGEAEGENLRLQGLVRQKERALEDAQAVNEQLSSERSNLAQVIRQEFEDRLAASEEETRQAKAELATLQARQQLELEEVHRRVKTALARKEEAVSSLRTQHEAAVKRADHLEELLEQHRRPTPSTK

SEQ ID NO: 35741 - protein, 1044 aa, Homo sapiens
MKGTRAIGSVPERSPAGVDLSLTGLPPPVSRRPGSAATTKPIVRSVSVVTGSEQKRKVLEATGPGGSQAINNLRRSNSTTQVSQPRSGSPRPTEPTDFLMLFEGSPSGKKRPASLSTAPSEKGATWNVLDDQPRGFTLPSNARSSSALDSPAGPRRKECTVALAPNFTANNRSNKGAVGNCVTTMVHNRYTPSERAPPLKSSNQTAPSLNNIIKAATCEGSESSGFGKLPKNVSSATHSARNNTGGSTGLPRRKEVTEEEAERFIHQVNQATVTIQRWYRHQVQRRGAGAARLEHLLQAKREEQRQRSGEGTLLDLHQQKEAARRKAREEKARQARRAAIQELQQKRALRAQKASTAERGPPENPRETRVPGMRQPAQELSPTPGGTAHQALKANNTGGGLPAAGPGDRCLPTSDSSPEPQQPPEDRTQDVLAQDAAGDNLEMMAPSRGSAKSRGPLEELLHTLQLLEKEPDVLPRPRTHHRGRYAWASEEDDASSLTADNLEKFGKLSAFPEPPEDGTLLSEAKLQSIMSFLDEMEKSGQDQLDSQQEGWVPEAGPGPLELGSEVSTSVMRLKLEVEEKKQAMLLLQRALAQQRDLTARRVKETEKALSRQLQRQREHYEATIQRHLAFIDQLIEDKKVLSEKCEAVVAELKQEDQRCTERVAQAQAQHELEIKKLKELMSATEKARREKWISEKTKKIKEVTVRGLEPEIQKLIARHKQEVRRLKSLHEAELLQSDERASQRCLRQAEELREQLEREKEALGQQERERARQRQRAELEELRQQLEESSSALTRALRAEFEKGREEQERRHQMELNTLKQQLELERQAWEAGRTRKEEAWLLNREQELREEIRKGRDKEIELVIHRLEADMALAKEESEKAAESRIKRLRDKYEAELSELEQSERKLQERCSELKGQLGEAEGENLRLQGLVRQKERALEDAQAVNEQLSSERSNLAQVIRQEFEDRLAASEEETRQAKAELATLQARQQLELEEVHRRVKTALARKEEAVSSLRTQHEAAVKRADHLEELLEQHRRPTPSTK

SEQ ID NO: 35742 - protein, 1080 aa, Homo sapiens
MKGTRAIGSVPERSPAGVDLSLTGLPPPVSRRPGSAATTKPIVRSVSVVTGSEQKRKVLEATGPGGSQAINNLRRSNSTTQVSQPRSGSPRPTEPTDFLMLFEGSPSGKKRPASLSTAPSEKGATWNVLDDQPRGFTLPSNARSSSALDSPAGPRRKECTVALAPNFTANNRSNKGAVGNCVTTMVHNRYTPSERAPPLKSSNQTAPSLNNIIKAATCEGSESSGFGKLPKNVSSATHSARNNTGGSTGLPRRKEVTEEEAERFIHQVNQATVTIQRWYRHQVQRRGAGAARLEHLLQAKREEQRQRSGEGTLLDLHQQKEAARRKAREEKARQARRAAIQELQQKRALRAQKASTAERGPPENPRETRVPGMRQPAQELSPTPGGTAHQALKANNTGGGLPAAGPGDRCLPTSDSSPEPQQPPEDRTQDVLAQDAAGDNLEMMAPSRGSAKSRGPLEELLHTLQLLEKEPDVLPRPRTHHRGRYAWASEEDDASSLTADNLEKFGKLSAFPEPPEDGTLLSEAKLQSIMSFLDEMEKSGQDQLDSQQEGWVPEAGPGPLELGSEVSTSVMRLKLEVEEKKQAMLLLQRALAQQRDLTARRVKETEKALSRQLQRQREHYEATIQRHLAFIDQLIEDKKVLSEKCEAVVAELKQEDQRCTERVAQAQAQHELEIKKLKELMSATEKARREKWISEKTKKIKEVTVRGLEPEIQKLIARHKQEVRRLKSLHEAELLQSDERASQRCLRQAEELREQLEREKEALGQQERERARQRFQQHLEQEQWALQQQRQRLYSEVAEERERLGQQAARQRAELEELRQQLEESSSALTRALRAEFEKGREEQERRHQMELNTLKQQLELERQAWEAGRTRKEEAWLLNREQELREEIRKGRDKEIELVIHRLEADMALAKEESEKAAESRIKRLRDKYEAELSELEQSERKLQERCSELKGQLGEAEGENLRLQGLVRQKERALEDAQAVNEQLSSERSNLAQVIRQEFEDRLAASEEETRQAKAELATLQARQQLELEEVHRRVKTALARKEEAVSSLRTQHEAAVKRADHLEELLEQHRRPTPSTK

SEQ ID NO: 35743 - protein, 232 aa, Homo sapiens
MDALVEDDICILNHEKAHKRDTVTPVSIYSGDESVASHFALVTAYEDIKKRLKDSEKENSLLKKRIRFLEEKLIARFEEETSSVGREQVNKAYHAYREVCIDRDNLKSKLDKMNKDNSESLKVLNEQLQSKEVELLQLRTEVETQQVMRNLNPPSSNWEVEKLSCDLKIHGLEQELELMRKECSDLKIELQKAKQTDPYQEDNLKSRDLQKLSISRVSVAQPGVQWRNHGIA

SEQ ID NO: 35744 - protein, 215 aa, Homo sapiens
MDALVEDDICILNHEKAHKRDTVTPVSIYSGDESVASHFALVTAYEDIKKRLKDSEKENSLLKKRIRFLEEKLIARFEEETSSVGREQVNKAYHAYREVCIDRDNLKSKLDKMNKDNSESLKVLNEQLQSKEVELLQLRTEVETQQVMRNLNPPSSNWEVEKLSCDLKIHGLEQELELMRKECSDLKIELQKAKQTDPYQEDNLKSRDLQKLSIS

SEQ ID NO: 35745 - protein, 95 aa, Homo sapiens
MDALVEDDICILNHEKAHKRDTVTPVSIYSGDESVASHFALVTAYEDIKKRLKDSEKENSLLKKRIRFLEEKLIARFEEETSSVGREQVNKAYHA

SEQ ID NO: 35746 - protein, 243 aa, Homo sapiens
MDALVEDDICILNHEKAHKRDTVTPVSIYSGDESVASHFALVTAYEDIKKRLKDSEKENSLLKKRIRFLEEKLIARFEEETSSVGREQVNKAYHAYREVCIDRDNLKSKLDKMNKDNSESLKVLNEQLQSKEVELLQLRTEVETQQVMRNLNPPSSNWEVEKLSCDLKIHGLEQELELMRKECSDLKIELQKAKQTDPYQEDNLKSRDLQKLSISRQSICSTAWSAVAQSWDSMNFEDCSLFA

SEQ ID NO: 35747 - protein, 243 aa, Homo sapiens; identical to SEQ ID NO: 35746

SEQ ID NO: 35748 - protein, 392 aa, Homo sapiens
MDALVEDDICILNHEKAHKRDTVTPVSIYSGDESVASHFALVTAYEDIKKRLKDSEKENSLLKKRIRFLEEKLIARFEEETSSVGREQVNKAYHAYREVCIDRDNLKSKLDKMNKDNSESLKVLNEQLQSKEVELLQLRTEVETQQVMRNLNPPSSNWEVEKLSCDLKIHGLEQELELMRKECSDLKIELQKAKQTDPYQEDNLKSRDLQKLSISSDNMQHAYWELKREMSNLHLVTQVQAELLRKLKTSTAIKKACAPVGCSEDLGRDSTKLHLMNFTATYTRHPPLLPNGKALCHTTSSPLPGDVKVLSEKAILQSWTDNERSIPNDGTCFQEHSSYGRNSLEDNSWVFPSPPKSSETAFGETKTKTLPLPNLPPLHYLDQHNQNCLYKN

SEQ ID NO: 35749 - protein, 422 aa, Homo sapiens
MDVLSPGQGNNTTSPPAPFETGGNTTGISDVTVSYQVITSLLLGTLIFCAVLGNACVVAAIALERSLQNVANYLIGSLAVTDLMVSVLVLPMAALYQVLNKWTLGQVTCDLFIALDVLCCTSSILHLCAIALDRYWAITDPIDYVNKRTPRRAAALISLTWLIGFLISIPPMLGWRTPEDRSDPDACTISKDHGYTIYSTFGAFYIPLLLMLVLYGRIFRAARFRIRKTVKKVEKTGADTRHGASPAPQPKKSVNGESGSRNWRLGVESKAGGALCANGAVRQGDDGAALEVIEVHRVGNSKEHLPLPSEAGPTPCAPASFERKNERNAEAKRKMALARERKTVKTLGIIMGTFILCWLPFFIVALVLPFCESSCHMPTLLGAIINWLGYSNSLLNPVIYAYFNKDFQNAFKKIIKCKFCRQ

SEQ ID NO: 35750 - protein, 42 aa, Homo sapiens
MDVLSPGQGNNTTSPPAPFETGGNTTGISDVTVSYQVITSLL

SEQ ID NO: 35751 - protein, 390 aa, Homo sapiens
MEEPGAQCAPPPPAGSETWVPQANLSSAPSQNCSAKDYIYQDSISLPWKVLLVMLLALITLATTLSNAFVIATVYRTRKLHTPANYLIASLAVTDLLVSILVMPISTMYTVTGRWTLGQVVCDFWLSSDITCCTASILHLCVIALDRYWAITDAVEYSAKRTPKRAAVMIALVWVFSISISLPPFFWRQAKAEEEVSECVVNTDHILYTVYSTVGAFYFPTLLLIALYGRIYVEARSRILKQTPNRTGKRLTRAQLITDSPGSTSSVTSINSRVPDVPSESGSPVYVNQVKVRVSDALLEKKKLMAARERKATKTLGIILGAFIVCWLPFFIISLVMPICKDACWFHLAIFDFFTWLGYLNSLINPIIYTMSNEDFKQAFHKLIRFKCTS

SEQ ID NO: 35752 - protein, 377 aa, Homo sapiens
MSPLNQSAEGLPQEASNRSLNATETSEAWDPRTLQALKISLAVVLSVITLATVLSNAFVLTTILLTRKLHTPANYLIGSLATTDLLVSILVMPISIAYTITHTWNFGQILCDIWLSSDITCCTASILHLCVIALDRYWAITDALEYSKRRTAGHAATMIAIVWAISICISIPPLFWRQAKAQEEMSDCLVNTSQISYTIYSTCGAFYIPSVLLIILYGRIYRAARNRILNPPSLYGKRFTTAHLITGSAGSSLCSLNSSLHEGHSHSAGSPLFFNHVKIKLADSALERKRISAARERKATKILGIILGAFIICWLPFFVVSLVLPICRDSCWIHPALFDFFTWLGYLNSLINPIIYTVFNEEFRQAFQKIVPFRKAS

SEQ ID NO: 35753 - protein, 377 aa, Homo sapiens; identical to SEQ ID NO: 35752

SEQ ID NO: 35754 - protein, 365 aa, Homo sapiens
MNITNCTTEASMAIRPKTITEKMLICMTLVVITTLTTLLNLAVIMAIGTTKKLHQPANYLICSLAVTDLLVAVLVMPLSIIYIVMDRWKLGYFLCEVWLSVDMTCCTCSILHLCVIALDRYWAITNAIEYARKRTAKRAALMILTVWTISIFISMPPLFWRSHRRLSPPPSQCTIQHDHVIYTIYSTLGAFYIPLTLILILYYRIYHAAKSLYQKRGSSRHLSNRSTDSQNSFASCKLTQTFCVSDFSTSDPTTEFEKFHASIRIPPFDNDLDHPGERQQISSTRERKAARILGLILGAFILSWLPFFIKELIVGLSIYTVSSEVADFLTWLGYVNSLINPLLYTSFNEDFKLAFKKLIRCREHT

SEQ ID NO: 35755 - protein, 365 aa, Homo sapiens; identical to SEQ ID NO: 35754

SEQ ID NO: 35756 - protein, 366 aa, Homo sapiens
MDFLNSSDQNLTSEELLNRMPSKILVSLTLSGLALMTTTINSLVIAAIIVTRKLHHPANYLICSLAVTDFLVAVLVMPFSIVYIVRESWIMGQVVCDIWLSVDITCCTCSILHLSAIALDRYRAITDAVEYARKRTPKHAGIMITIVWIISVFISMPPLFWRHQGTSRDDECIIKHDHIVSTIYSTFGAFYIPLALILILYYKIYRAAKTLYHKRQASRIAKEEVNGQVLLESGEKSTKSVSTSYVLEKSLSDPSTDFDKIHSTVRSLRSEFKHEKSWRRQKISGTRERKAATTLGLILGAFVICWLPFFVKELVVNVCDKCKISEEMSNFLAWLGYLNSLINPLIYTIFNEDFKKAFQKLVRCRC

SEQ ID NO: 35757 - protein, 471 aa, Homo sapiens
MDILCEENTSLSSTTNSLMQLNDDTRLYSNDFNSGEANTSDAFNWTVDSENRTNLSCEGCLSPSCLSLLHLQEKNWSALLTAVVIILTIAGNILVIMAVSLEKKLQNATNYFLMSLAIADMLLGFLVMPVSMLTILYGYRWPLPSKLCAVWIYLDVLFSTASIMHLCAISLDRYVAIQNPIHHSRFNSRTKAFLKIIAVWTISVGISMPIPVFGLQDDSKVFKEGSCLLADDNFVLIGSFVSFFIPLTIMVITYFLTIKSLQKEATLCVSDLGTRAKLASFSFLPQSSLSSEKLFQRSIHREPGSYTGRRTMQSISNEQKACKVLGIVFFLFVVMWCPFFITNIMAVICKESCNEDVIGALLNVFVWIGYLSSAVNPLVYTLFNKTYRSAFSRYIQCQYKENKKPLQLILVNTIPALAYKSSQLQMGQKKNSKQDAKTTDNDCSMVALGKQHSEEASKDNSDGVNEKVSCV

SEQ ID NO: 35758 - protein, 471 aa, Homo sapiens; identical to SEQ ID NO: 35757

SEQ ID NO: 35759 - protein, 387 aa, Homo sapiens
MQFLKSAKQKPNYYHIMLVEDQEEGTLHQFNYCERCSESQNNKCISCVDPEDKWYRWPLPSKLCAVWIYLDVLFSTASIMHLCAISLDRYVAIQNPIHHSRFNSRTKAFLKIIAVWTISVGISMPIPVFGLQDDSKVFKEGSCLLADDNFVLIGSFVSFFIPLTIMVITYFLTIKSLQKEATLCVSDLGTRAKLASFSFLPQSSLSSEKLFQRSIHREPGSYTGRRTMQSISNEQKACKVLGIVFFLFVVMWCPFFITNIMAVICKESCNEDVIGALLNVFVWIGYLSSAVNPLVYTLFNKTYRSAFSRYIQCQYKENKKPLQLILVNTIPALAYKSSQLQMGQKKNSKQDAKTTDNDCSMVALGKQHSEEASKDNSDGVNEKVSCV

SEQ ID NO: 35760 - protein, 481 aa, Homo sapiens
MALSYRVSELQSTIPEHILQSTFVHVISSNWSGLQTESIPEEMKQIVEEQGNKLHWAALLILMVIIPTIGGNTLVILAVSLEKKLQYATNYFLMSLAVADLLVGLFVMPIALLTIMFEAMWPLPLVLCPAWLFLDVLFSTASIMHLCAISVDRYIAIKKPIQANQYNSRATAFIKITVVWLISIGIAIPVPIKGIETDVDNPNNITCVLTKERFGDFMLFGSLAAFFTPLAIMIVTYFLTIHALQKKAYLVKNKPPQRLTWLTVSTVFQRDETPCSSPEKVAMLDGSRKDKALPNSGDETLMRRTSTIGKKSVQTISNEQRASKVLGIVFFLFLLMWCPFFITNITLVLCDSCNQTTLQMLLEIFVWIGYVSSGVNPLVYTLFNKTFRDAFGRYITCNYRATKSVKTLRKRSSKIYFRNPMAENSKFFKKHGIRNGINPAMYQSPMRLRSSTIQSSSIILLDTLLLTENEGDKTEEQVSYV

SEQ ID NO: 35761 - protein, 64 aa, Homo sapiens
MVIIPTIGGNTLVILAVSLEKKLQYATNYFLMSLAVADLLVGLFVMPIALLTIMFGIAIPVPIK

SEQ ID NO: 35762 - protein, 458 aa, Homo sapiens
MVNLRNAVHSFLVHLIGLLVWQCDISVSPVAAIVTDIFNTSDGGRFKFPDGVQNWPALSIVIIIIMTIGGNILVIMAVSMEKKLHNATNYFLMSLAIADMLVGLLVMPLSLLAILYDYVWPLPRYLCPVWISLDVLFSTASIMHLCAISLDRYVAIRNPIEHSRFNSRTKAIMKIAIVWAISIGVSVPIPVIGLRDEEKVFVNNTTCVLNDPNFVLIGSFVAFFIPLTIMVITYCLTIYVLRRQALMLLHGHTEEPPGLSLDFLKCCKRNTAEEENSANPNQDQNARRRKKKERRPRGTMQAINNERKASKVLGIVFFVFLIMWCPFFITNILSVLCEKSCNQKLMEKLLNVFVWIGYVCSGINPLVYTLFNKIYRRAFSNYLRCNYKVEKKPPVRQIPRVAATALSGRELNVNIYRHTNEPVIEKASDNEPGIEMQVENLELPVNPSSVVSERISSV

SEQ ID NO: 35763 - protein, 248 aa, Homo sapiens
MVNLRNAVHSFLVHLIGLLVWQCDISVSPVAAIVTDIFNTSDGGRFKFPDGVQNWPALSIVIIIIMTIGGNILVIMAVSMEKKLHNATNYFLMSLAIADMLVGLLVMPLSLLAILYDYVWPLPRYLCPVWISLDVLFSTASIMHLCAISLDRCISSYPCDWTEGRRKGVREQHDVRAQRPKFRSYWVLRSFLHTADDYGDYVLPDHLRSAPTSFDVTARPHRGTAWTKSGFPEVLQEEYGRGRELCKP

SEQ ID NO: 35764 - protein, 458 aa, Homo sapiens; identical to SEQ ID NO: 35762

SEQ ID NO: 35765 - protein, 279 aa, Homo sapiens
MASMSIVKATSNTISQCGWSASANWTPSISPSMDRGERSPSALSPTQVAIRRRCRPSPYVVNFLVPSGILIAIDALSFYLPLESGNCAPFKMTVLLGYSVFLLMMNDLLPATSTSSHASLVRPHPSRDQKRGVYFALCLSLMVGSLLETIFITHLLHVATTQPLPLPRWLHSLLLHCTGQGRCCPTAPQKGNKGPGLTPTHLPGVKEPEVSAGQMPGPGEAELTGGSEWTRAQREHEAQKQHSVELWVQFSHAMDALLFRLYLLFMASSIITVICLWNT

SEQ ID NO: 35766 - protein, 454 aa, Homo sapiens
MQKHSPGPPALALLSQSLLTTGNGDTLIINCPGFGQHRVDPAAFQAVFDRKAIGPVTNYSVATHVNISFTLSAIWNCYSRIHTFNCHHARPWHNQFVQWNPDECGGIKKSGMATENLWLSDVFIEESVDQTPAGLMASMSIVKATSNTISQCGWSASANWTPSISPSMDRARAWRRMSRSFQIHHRTSFRTRREWVLLGIQKRTIKVTVATNQYEQAIFHVAIRRRCRPSPYVVNFLVPSGILIAIDALSFYLPLESGNCAPFKMTVLLGYSVFLLMMNDLLPATSTSSHASLVAPLALMQTPLPAGVYFALCLSLMVGSLLETIFITHLLHVATTQPLPLPRWLHSLLLHCTGQGRCCPTAPQKGNKGPGLTPTHLPGVKEPEVSAGQMPGPGEAELTGGSEWTRAQREHEAQKQHSVELWVQFSHAMDALLFRLYLLFMASSIITVICLWNT

SEQ ID NO: 35767 - protein, 404 aa, Homo sapiens
MERGWFHGKGFLLGFILHLLLQDSHLQLVTSFLWLNMWNPDECGGIKKSGMATENLWLSDVFIEESVDQTPAGLMASMSIVKATSNTISQCGWSASANWTPSISPSMDRGERSPSALSPTQVTRAWRRMSRSFQIHHRTSFRTRREWVLLGIQKRTIKVTVATNQYEQAIFHVAIRRRCRPSPYVVNFLVPSGILIAIDALSFYLPLESGNCAPFKMTVLLGYSVFLLMMNDLLPATSTSSHASLVRPHPSRDQKRGVYFALCLSLMVGSLLETIFITHLLHVATTQPLPLPRWLHSLLLHCTGQGRCCPTAPQKGNKGPGLTPTHLPGVKEPEVSAGQMPGPGEAELTGGSEWTRAQREHEAQKQHSVELWVQFSHAMDALLFRLYLLFMASSIITVICLWNT

SEQ ID NO: 35768 - protein, 233 aa, Homo sapiens
MVAIRRRCRPSPYVVNFLVPSGILIAIDALSFYLPLESGNCAPFKMTVLLGYSVFLLMMNDLLPATSTSSHASLVRPHPSRDQKRGVYFALCLSLMVGSLLETIFITHLLHVATTQPLPLPRWLHSLLLHCTGQGRCCPTAPQKGNKGPGLTPTHLPGVKEPEVSAGQMPGPGEAELTGGSEWTRAQREHEAQKQHSVELWVQFSHAMDALLFRLYLLFMASSIITVICLWNT

SEQ ID NO: 35769 - protein, 447 aa, Homo sapiens
MEGGWPARQSALLCLTVSLLLQGRGDAFTINCSGFDQHGVDPAVFQAVFDRKAFRPFTNYSIPTRVNISFTLSAILGVDAQLQLLTSFLWMDLVWDNPFINWNPKECVGINKLTVLAENLWLPDIFIVESMDVDQTPSGLTAYISSEGRIKYDKPMRVTSICNLDIFYFPFDQQNCTFTFSSFLYTVDSMLLGMDKEVWEITDTSRKVIQTQGEWELLGINKATPKMSMGNNLYDQIMFYVAIRRRPSLYIINLLVPSSFLVAIDALSFYLPAESENRAPFKITLLLGYNVFLLMMNDLLPASGTPLISVYFALCLSLMVVSLLETVFITYLLHVATTQPPPMPRWLHSLLLHCTSPGRCCPTAPQKGNKGLGLTLTHLPGPKEPGELAGKKLGPRETEPDGGSGWTKTQLMELWVQFSHAMDTLLFRLYLLFMASSILTVIVLWNT

SEQ ID NO: 35770 - protein, 471 aa, Homo sapiens
MLAFILSRATPRPALGPLSYREHRVALLHLTHSMSTTGRGVTFTINCSGFGQHGADPTALNSVFNRKPFRPVTNISVPTQVNISFAMSAILDVNEQLHLLSSFLWLEMVWDNPFISWNPEECEGITKMSMAAKNLWLPDIFIIELMDVDKTPKGLTAYVSNEGRIRYKKPMKVDSICNLDIFYFPFDQQNCTLTFSSFLYTVDSMLLDMEKEVWEITDASRNILQTHGEWELLGLSKATAKLSRGGNLYDQIVFYVAIRRRPSLYVINLLVPSGFLVAIDALSFYLPVKSGNRVPFKITLLLGYNVFLLMMSDLLPTSGTPLIGVYFALCLSLMVGSLLETIFITHLLHVATTQPPPLPRWLHSLLLHCNSPGRCCPTAPQKENKGPGLTPTHLPGVKEPEVSAGQMPGPAEAELTGGSEWTRAQREHEAQKQHSVELWLQFSHAMDAMLFRLYLLFMASSIITVICLWNT

SEQ ID NO: 35771 - protein, 456 aa, Homo sapiens
MEGSWFHRKRFSFYLLLGFLLQGRGVTFTINCSGFGQHGADPTALNSVFNRKPFRPVTNISVPTQVNISFAMSAILDVNEQLHLLSSFLWLEMVWDNPFISWNPEECEGITKMSMAAKNLWLPDIFIIELMDVDKTPKGLTAYVSNEGRIRYKKPMKVDSICNLDIFYFPFDQQNCTLTFSSFLYTVDSMLLDMEKEVWEITDASRNILQTHGEWELLGLSKATAKLSRGGNLYDQIVFYVAIRRRPSLYVINLLVPSGFLVAIDALSFYLPVKSGNRVPFKITLLLGYNVFLLMMSDLLPTSGTPLIGVYFALCLSLMVGSLLETIFITHLLHVATTQPPPLPRWLHSLLLHCNSPGRCCPTAPQKENKGPGLTPTHLPGVKEPEVSAGQMPGPAEAELTGGSEWTRAQREHEAQKQHSVELWLQFSHAMDAMLFRLYLLFMASSIITVICLWNT

SEQ ID NO: 35772 - protein, 441 aa, Homo sapiens
MEGSWFHRKRFSFYLLLGFLLQGRGVTFTINCSGFGQHGADPTALNSVFNRKPFRPVTNISVPTQVNISFAMSAILDVVWDNPFISWNPEECEGITKMSMAAKNLWLPDIFIIELMDVDKTPKGLTAYVSNEGRIRYKKPMKVDSICNLDIFYFPFDQQNCTLTFSSFLYTVDSMLLDMEKEVWEITDASRNILQTHGEWELLGLSKATAKLSRGGNLYDQIVFYVAIRRRPSLYVINLLVPSGFLVAIDALSFYLPVKSGNRVPFKITLLLGYNVFLLMMSDLLPTSGTPLIGVYFALCLSLMVGSLLETIFITHLLHVATTQPPPLPRWLHSLLLHCNSPGRCCPTAPQKENKGPGLTPTHLPGVKEPEVSAGQMPGPAEAELTGGSEWTRAQREHEAQKQHSVELWLQFSHAMDAMLFRLYLLFMASSIITVICLWNT

SEQ ID NO: 35773 - protein, 456 aa, Homo sapiens
MLAFILSRATPRPALGPLSYREHRVALLHLTHSMSTTGRGVTFTINCSGFGQHGADPTALNSVFNRKPFRPVTNISVPTQVNISFAMSAILDVVWDNPFISWNPEECEGITKMSMAAKNLWLPDIFIIELMDVDKTPKGLTAYVSNEGRIRYKKPMKVDSICNLDIFYFPFDQQNCTLTFSSFLYTVDSMLLDMEKEVWEITDASRNILQTHGEWELLGLSKATAKLSRGGNLYDQIVFYVAIRRRPSLYVINLLVPSGFLVAIDALSFYLPVKSGNRVPFKITLLLGYNVFLLMMSDLLPTSGTPLIGVYFALCLSLMVGSLLETIFITHLLHVATTQPPPLPRWLHSLLLHCNSPGRCCPTAPQKENKGPGLTPTHLPGVKEPEVSAGQMPGPAEAELTGGSEWTRAQREHEAQKQHSVELWLQFSHAMDAMLFRLYLLFMASSIITVICLWNT

SEQ ID NO: 35774 - protein, 441 aa, Homo sapiens
MLSSVMAPLWACILVAAGILATDTHHPQDSALYHLSKQLLQKYHKEVRPVYNWTKATTVYLDLFVHAILDVDAENQILKTSVWYQEVWNDEFLSWNSSMFDEIREISLPLSAIWAPDIIINEFVDIERYPDLPYVYVNSSGTIENYKPIQVVSACSLETYAFPFDVQNCSLTFKSILHTVEDVDLAFLRSPEDIQHDKKAFLNDSEWELLSVSSTYSILQSSAGGFAQIQFNVVMRRHPLVYVVSLLIPSIFLMLVDLGSFYLPPNCRARIVFKTSVLVGYTVFRVNMSNQVPRSVGSTPLIGHFFTICMAFLVLSLAKSIVLVKFLHDEQRGGQEQPFLCLRGDTDADRPRVEPRAQRAVVTESSLYGEHLAQPGTLKEVWSQLQSISNYLQTQDQTDQQEAEWLVLLSRFDRLLFQSYLFMLGIYTITLCSLWALWGGV

SEQ ID NO: 35775 - protein, 430 aa, Homo sapiens
MIVYFPGILATDTHHPQDSALYHLSKQLLQKYHKEVRPVYNWTKATTVYLDLFVHAILDVDAENQILKTSVWYQEVWNDEFLSWNSSMFDEIREISLPLSAIWAPDIIINEFVDIERYPDLPYVYVNSSGTIENYKPIQVVSACSLETYAFPFDVQNCSLTFKSILHTVEDVDLAFLRSPEDIQHDKKAFLNDSEWELLSVSSTYSILQSSAGGFAQIQFNVVMRRHPLVYVVSLLIPSIFLMLVDLGSFYLPPNCRARIVFKTSVLVGYTVFRVNMSNQVPRSVGSTPLIGHFFTICMAFLVLSLAKSIVLVKFLHDEQRGGQEQPFLCLRGDTDADRPRVEPRAQRAVVTESSLYGEHLAQPGTLKEVWSQLQSISNYLQTQDQTDQQEAEWLVLLSRFDRLLFQSYLFMLGIYTITLCSLWALWGGV

SEQ ID NO: 35776 - protein, 175 aa, Homo sapiens
  VARIANT 1: note = MOD_RES - Any amino acid
XAENQILKTSVWYQEVWNDEFLSWNSSMFDEIREISLPLSAIWAPDIIINEFVDIERYPDLPYVYVNSSGTIENYKPIQVVSACSLETYAFPFDVQNCSLTFKSILHTVEDVDLAFLRSPEDIQHDKKAFLNDSEWELLSVSSTYSILQSSAGGFAQIQFNGTSSPSAWPSWFSA

SEQ ID NO: 35777 - protein, 482 aa, Homo sapiens
MLAFILSRATPRPALGPLSYREHRVALLHLTHSMSTTGRGVTFTINCSGFGQHGADPTALNSVFNRKPFRPVTNISVPTQVNISFAMSAILDVVWDNPFISWNPEECEGITKMSMAAKNLWLPDIFIIELCVSRAGQREVPSPGSHRDHSLPLGPLMDVDKTPKGLTAYVSNEGRIRYKKPMKVDSICNLDIFYFPFDQQNCTLTFSSFLYTVDSMLLDMEKEVWEITDASRNILQTHGEWELLGLSKATAKLSRGGNLYDQIVFYVAIRRRPSLYVINLLVPSGFLVAIDALSFYLPVKSGNRVPFKITLLLGYNVFLLMMSDLLPTSGTPLIGVYFALCLSLMVGSLLETIFITHLLHVATTQPPPLPRWLHSLLLHCNSPGRCCPTAPQKENKGPGLTPTHLPGVKEPEVSAGQMPGPAEAELTGGSEWTRAQREHEAQKQHSVELWLQFSHAMDAMLFRLYLLFMASSIITVICLWNT

SEQ ID NO: 35778 - protein, 378 aa, Homo sapiens
MDKLDANVSSEEGFGSVEKVVLLTFLSTVILMAILGNLLVMVAVCWDRQLRKIKTNYFIVSLAFADLLVSVLVMPFGAIELVQDIWIYGEVFCLVRTSLDVLLTTASIFHLCCISLDRYYAICCQPLVYRNKMTPLRIALMLGGCWVIPTFISFLPIMQGWNNIGIIDLIEKRKFNQNSNSTYCVFMVNKPYAITCSVVAFYIPFLLMVLAYYRIYVTAKEHAHQIQMLQRAGASSESRPQSADQHSTHRMRTETKAAKTLCIIMGCFCLCWAPFFVTNIVDPFIDYTVPGQVWTAFLWLGYINSGLNPFLYAFLNKSFRRAFLIILCCDDERYRRPSILGQTVPCSTTTINGSTHVLSGCSPVSSFLLLFCNRPVPV

SEQ ID NO: 35779 - protein, 387 aa, Homo sapiens
MDKLDANVSSEEGFGSVEKVVLLTFLSTVILMAILGNLLVMVAVCWDRQLRKIKTNYFIVSLAFADLLVSVLVMPFGAIELVQDIWIYGEVFCLVRTSLDVLLTTASIFHLCCISLDRYYAICCQPLVYRNKMTPLRIALMLGGCWVIPTFISFLPIMQGWNNIGIIDLIEKRKFNQNSNSTYCVFMVNKPYAITCSVVAFYIPFLLMVLAYYRIYVTAKEHAHQIQMLQRAGASSESRPQSADQHSTHRMRTETKAAKTLCIIMGCFCLCWAPFFVTNIVDPFIDYTVPGQVWTAFLWLGYINSGLNPFLYAFLNKSFRRAFLIILCCDDERYRRPSILGQTVPCSTTTINGSTHVLRYTVLHRGHHQELEKLPIHNDPESLESCF

SEQ ID NO: 35780 - protein, 428 aa, Homo sapiens
MDKLDANVSSEEGFGSVEKVVLLTFLSTVILMAILGNLLVMVAVCWDRQLRKIKTNYFIVSLAFADLLVSVLVMPFGAIELVQDIWIYGEVFCLVRTSLDVLLTTASIFHLCCISLDRYYAICCQPLVYRNKMTPLRIALMLGGCWVIPTFISFLPIMQGWNNIGIIDLIEKRKFNQNSNSTYCVFMVNKPYAITCSVVAFYIPFLLMVLAYYRIYVTAKEHAHQIQMLQRAGASSESRPQSADQHSTHRMRTETKAAKTLCIIMGCFCLCWAPFFVTNIVDPFIDYTVPGQVWTAFLWLGYINSGLNPFLYAFLNKSFRRAFLIILCCDDERYRRPSILGQTVPCSTTTINGSTHVLRTDFLFDRDILARYWTKPARAGPFSGTLSIRCLTARKPVLGDAVECGGQWESQCHPPATSPLVAAQPSDT

SEQ ID NO: 35781 - protein, 402 aa, Homo sapiens
MDKLDANVSSEEGFGSVEKVVLLTFLSTVILMAILGNLLVMVAVCWDRQLRKIKTNYFIVSLAFADLLVSVLVMPFGAIELVQDIWIYGEVFCLVRTSLDVLLTTASIFHLCCISLDRYYAICCQPLVYRNKMTPLRIALMLGGCWVIPTFISFLPIMQGWNNIGIIDLERSLNQGLGQDFHAIEKRKFNQNSNSTYCVFMVNKPYAITCSVVAFYIPFLLMVLAYYRIYVTAKEHAHQIQMLQRAGASSESRPQSADQHSTHRMRTETKAAKTLCIIMGCFCLCWAPFFVTNIVDPFIDYTVPGQVWTAFLWLGYINSGLNPFLYAFLNKSFRRAFLIILCCDDERYRRPSILGQTVPCSTTTINGSTHVLRDAVECGGQWESQCHPPATSPLVAAQPSDT

SEQ ID NO: 35782 - protein, 388 aa, Homo sapiens
MDKLDANVSSEEGFGSVEKVVLLTFLSTVILMAILGNLLVMVAVCWDRQLRKIKTNYFIVSLAFADLLVSVLVMPFGAIELVQDIWIYGEVFCLVRTSLDVLLTTASIFHLCCISLDRYYAICCQPLVYRNKMTPLRIALMLGGCWVIPTFISFLPIMQGWNNIGIIDLIEKRKFNQNSNSTYCVFMVNKPYAITCSVVAFYIPFLLMVLAYYRIYVTAKEHAHQIQMLQRAGASSESRPQSADQHSTHRMRTETKAAKTLCIIMGCFCLCWAPFFVTNIVDPFIDYTVPGQVWTAFLWLGYINSGLNPFLYAFLNKSFRRAFLIILCCDDERYRRPSILGQTVPCSTTTINGSTHVLRDAVECGGQWESQCHPPATSPLVAAQPSDT

SEQ ID NO: 35783 - protein, 360 aa, Homo sapiens
MDKLDANVSSEEGFGSVEKVVLLTFLSTVILMAILGNLLVMVAVCWDRQLRKIKTNYFIVSLAFADLLVSVLVMPFGAIELVQDIWIYGEVFCLVRTSLDVLLTTASIFHLCCISLDRYYAICCQPLVYRNKMTPLRIALMLGGCWVIPTFISFLPIMQGWNNIGIIDLIEKRKFNQNSNSTYCVFMVNKPYAITCSVVAFYIPFLLMVLAYYRIYVTAKEHAHQIQMLQRAGASSESRPQSADQHSTHRMRTETKAAKTLCIIMGCFCLCWAPFFVTNIVDPFIDYTVPGQVWTAFLWLGYINSGLNPFLYAFLNKSFRRAFLIILCCDDERYRRPSILGQTVPCSTTTINGSTHVLRF

SEQ ID NO: 35784 - protein, 411 aa, Homo sapiens
MDKLDANVSSEEGFGSVEKVVLLTFLSTVILMAILGNLLVMVAVCWDRQLRKIKTNYFIVSLAFADLLVSVLVMPFGAIELVQDIWIYGEVFCLVRTSLDVLLTTASIFHLCCISLDRYYAICCQPLVYRNKMTPLRIALMLGGCWVIPTFISFLPIMQGWNNIGIIDLIEKRKFNQNSNSTYCVFMVNKPYAITCSVVAFYIPFLLMVLAYYRIYVTAKEHAHQIQMLQRAGASSESRPQSADQHSTHRMRTETKAAKTLCIIMGCFCLCWAPFFVTNIVDPFIDYTVPGQVWTAFLWLGYINSGLNPFLYAFLNKSFRRAFLIILCCDDERYRRPSILGQTVPCSTTTINGSTHVLSSGTETDRKKLWNKEEKIDQTIQMPKRKRKKKASLSYEDLILLGRKSCFREGK

SEQ ID NO: 35785 - protein, 387 aa, Homo sapiens; identical to SEQ ID NO: 35779

SEQ ID NO: 35786 - protein, 378 aa, Homo sapiens; identical to SEQ ID NO: 35778

SEQ ID NO: 35787 - protein, 378 aa, Homo sapiens; identical to SEQ ID NO: 35778

SEQ ID NO: 35788 - protein, 357 aa, Homo sapiens
MDLPVNLTSFSLSTPSPLETNHSLGKDDLRPSSPLLSVFGVLILTLLGFLVAATFAWNLLVLATILRVRTFHRVPHNLVASMAVSDVLVAALVMPLSLVHELSGRRWQLGRRLCQLWIACDVLCCTASIWNVTAIALDRYWSITRHMEYTLRTRKCVSNVMIALTWALSAVISLAPLLFGWGETYSEGSEECQVSREPSYAVFSTVGAFYLPLCVVLFVYWKIYKAAKFRVGSRKTNSVSPISEAVEVKDSAKQPQMVFTVRHATVTFQPEGDTWREQKEQRAALMVGILIGVFVLCWIPFFLTELISPLCSCDIPAIWKSIFLWLGYSNSFFNPLIYTAFNKNYNSAFKNFFSRQH

SEQ ID NO: 35789 - protein, 440 aa, Homo sapiens
MVPEPGPTANSTPAWGAGPPSAPGGSGWVAAALCVVIALTAAANSLLIALICTQPALRNTSNFFLVSLFTSDLMVGLVVMPPAMLNALYGRWVLARGLCLLWTAFDVMCCSASILNLCLISLDRYLLILSPLRYKLRMTPLRALALVLGAWSLAALASFLPLLLGWHELGHARPPVPGQCRLLASLPFVLVASGLTFFLPSGAICFTYCRILLAARKQAVQVASLTTGMASQASETLQVPRTPRPGVESADSRRLATKHSRKALKASLTLGILLGMFFVTWLPFFVANIVQAVCDCISPGLFDVLTWLGYCNSTMNPIIYPLFMRDFKRALGRFLPCPRCPRERQASLASPSLRTSHSGPRPGLSLQQVLPLPLPPDSDSDSDAGSGGSSGLRLTAQLLLPGEATQDPPLPTRAAAAVNFFNIDPAEPELRPHPLGIPTN

SEQ ID NO: 35790 - protein, 445 aa, Homo sapiens
MMDVNSSGRPDLYGHLRSFLLPEVGRGLPDLSPDGGADPVAGSWAPHLLSEVTASPAPTWDAPPDNASGCGEQINYGRVEKVVIGSILTLITLLTIAGNCLVVISVCFVKKLRQPSNYLIVSLALADLSVAVAVMPFVSVTDLIGGKWIFGHFFCNVFIAMDVMCCTASIMTLCVISIDRYLGITRPLTYPVRQNGKCMAKMILSVWLLSASITLPPLFGWAQNVNDDKVCLISQDFGYTIYSTAVAFYIPMSVMLFMYYQIYKAARKSAAKHKFPGFPRVEPDSVIALNGIVKLQKEVEECANLSRLLKHERKNISIFKREQKAATTLGIIVGAFTVCWLPFFLLSTARPFICGTSCSCIPLWVERTFLWLGYANSLINPFIYAFFNRDLRTTYRSLLQCQYRNINRKLSAAGMHEALKLAERPERPEFVLQNADYCRKKGHDS

SEQ ID NO: 35791 - protein, 479 aa, Homo sapiens
MMDVNSSGRPDLYGHLRSFLLPEVGRGLPDLSPDGGADPVAGSWAPHLLSEVTASPAPTWDAPPDNASGCGEQINYGRVEKVVIGSILTLITLLTIAGNCLVVISVCFVKKLRQPSNYLIVSLALADLSVAVAVMPFVSVTDLIGGKWIFGHFFCNVFIAMDVMCCTASIMTLCVISIDRYLGITRPLTYPVRQNGKCMAKMILSVWLLSASITLPPLFGWAQNVNDDKVCLISQDFGYTIYSTAVAFYIPMSVMLFMYYQIYKAARKSAAKHKFPGFPRVEPDSVIALNGIVKLQKEVEECANLSRLLKHERKNISIFKREQKAATTLGIIVGAFTVCWLPFFLLSTARPFICGTSCSCIPLWVERTFLWLGYANSLINPFIYAFFNRDLRTTYRSLLQCQYRNINRKLSAAGMHEALKLAERPERPEFVLRACTRRVLLRPEKRPPVSVWVLQSPDHHNWLADKMLTTVEKKVMIHD

SEQ ID NO: 35792 - protein, 432 aa, Homo sapiens
MMDVNSSGRPDLYGHLRSFLLPEVGRGLPDLSPDGGADPVAGSWAPHLLSEVTASPAPTWDAPPDNASGCGEQINYGRVEKVVIGSILTLITLLTIAGNCLVVISVCFVKKLRQPSNYLIVSLALADLSVAVAVMPFVSVTDLIGGKWIFGHFFCNVFIAMDVMCCTASIMTLCVISIDRYLGITRPLTYPVRQNGKCMAKMILSVWLLSASITLPPLFGWAQNVNDDKVCLISQDFGYTIYSTAVAFYIPMSVMLFMYYQIYKAARKSAAKHKFPGFPRVEPDSVIALNGIVKLQKEVEECANLSRLLKHERKNISIFKREQKAATTLGIIVGAFTVCWLPFFLLSTARPFICGTSCSCIPLWVERTFLWLGYANSLINPFIYAFFNRDLRTTYRSLLQCQYRNINRKLSAAGMHEALKLAERPERPEFVL

SEQ ID NO: 35793 - protein, 479 aa, Homo sapiens
MMDVNSSGRPDLYGHLRSFLLPEVGRGLPDLSPDGGADPVAGSWAPHLLSEVTASPAPTWDAPPDNASGCGEQINYGRVEKVVIGSILTLITLLTIAGNCLVVISVCFVKKLRQPSNYLIVSLALADLSVAVAVMPFVSVTDLIGGKWIFGHFFCNVFIAMDVMCCTASIMTLCVISIDRYLGITRPLTYPVRQNGKCMAKMILSVWLLSASITLPPLFGWAQNVNDDKVCLISQDFGYTIYSTAVAFYIPMSVMLFMYYQIYKAARKSAAKHKFPGFPRVEPDSVIALNGIVKLQKEVEECANLSRLLKHERKNISIFKREQKAATTLGIIVGAFTVCWLPFFLLSTARPFICGTSCSCIPLWVERTFLWLGYANSLINPFIYAFFNRDLRTTYRSLLQCQYRNINRKLSAAGMHEALKLAERPERPEFVLITRTSGVHQALENFPWGNEVNRWRKSCEYFCTDKMLTTVEKKVMIHD

SEQ ID NO: 35794 - protein, 819 aa, Homo sapiens
GMLDGPSAMTRFCNLIASEPDIAKVPLCIDSSNFAVIEAGLKCCQGKCIVNSISLKEGEATETDTKIRVCTRAYHLLVKKLGFNPNDIIFDPNILTIGTGMEEHNLYAINFIHATKVIKETLPGARISGGLSNLSFSFRGMEAIREAMHGVFLYHAIKSGMDMGIVNAGNLPVYDDIHKELLQLCEDLIWNKDPEATEKLLRYAQTQGTGGKKVIQTDEWRNGPVEERLEYALVKGIEKHIIEDTEEARLNQKKYPRPLNIIEGPLMNGMKIVGDLFGAGKMFLPQVIKSARVMKKAVGHLIPFMEKEREETRVLNGTVEEEDPYQGTIVLATVKGDVHDIGKNIVGVVLGCNNFRVIDLGVMTPCDKILKAALDHKADIIGLSGLITPSLDEMIFVAKEMERLAIRIPLLIGGATTSKTHTAVKIAPRYSAPVIHVLDASKSVVVCSQLLDENLKDEYFEEIMEEYEDIRQDHYESLKERRYLPLSQARKSGFQMDWLSEPHPVKPTFIGTQVFEDYDLQKLVDYIDWKPFFDVWQLRGKYPNRGFPKIFNDKTVGGEARKVYDDAHNMLNTLISQKKLRARGVVGFWPAQSIQDDIHLYAEAAVPQAAEPIATFYGLRQQAEKDSASTEPYYCLSDFIAPLHSGIRDYLGLFAVACFGVEELSKAYEDDGDDYSSIMVKALGDRLAEAFAEELHERVRRELWAYCGSEQLDVADLRRLRYKGIRPAPGYPSQPDHTEKLTMWRLADIEQSTGIRLTESLAMAPASAVSGLYFSNLKSKYFAVGKISKDQVEDYALRKNISVAEVEKWLGPILGYDTD

SEQ ID NO: 35795 - protein, 1265 aa, Homo sapiens
MSPALQDLSQPEGLKKTLRDEINAILQKRIMVLDGGMGTMIQREKLNEEHFRGQEFKDHARPLKGNNDILSITQPDVIYQIHKEYLLAGADIIETNTFSSTSIAQADYGLEHLAYRMNMCSAGVARKAAEEVTLQTGIKRFVAGALGPTNKTLSVSPSVERPDYRNITFDELVEAYQEQAKGLLDGGVDILLIETIFDTANAKAALFALQNLFEEKYAPRPIFISGTIVDKSGRTLSGQTGEGFVISVSHGEPLCIGLNCALGAAEMRPFIEIIGKCTTAYVLCYPNAGLPNTFGDYDETPSMMAKHLKDFAMDGLVNIVGGCCGSTPDHIREIAEAVKNCKPRVPPATAFEGHMLLSGLEPFRIGPYTNFVNIGERCNVAGSRKFAKLIMAGNYEEALCVAKVQVEMGAQVLDVNMDDGMLDGPSAMTRFCNLIASEPDIAKVPLCIDSSNFAVIEAGLKCCQGKCIVNSISLKEGEDDFLEKARKIKKYGAAMVVMAFDEEGQATETDTKIRVCTRAYHLLVKKLGFNPNDIIFDPNILTIGTGMEEHNLYAINFIHATKVIKETLPGARISGGLSNLSFSFRGMEAIREAMHGVFLYHAIKSGMDMGIVNAGNLPVYDDIHKELLQLCEDLIWNKDPEATEKLLRYAQTQGTGGKKVIQTDEWRNGPVEERLEYALVKGIEKHIIEDTEEARLNQKKYPRPLNIIEGPLMNGMKIVGDLFGAGKMFLPQVIKSARVMKKAVGHLIPFMEKEREETRVLNGTVEEEDPYQGTIVLATVKGDVHDIGKNIVGVVLGCNNFRVIDLGVMTPCDKILKAALDHKADIIGLSGLITPSLDEMIFVAKEMERLAIRIPLLIGGATTSKTHTAVKIAPRYSAPVIHVLDASKSVVVCSQLLDENLKDEYFEEIMEEYEDIRQDHYESLKERRYLPLSQARKSGFQMDWLSEPHPVKPTFIGTQVFEDYDLQKLVDYIDWKPFFDVWQLRGKYPNRGFPKIFNDKTVGGEARKVYDDAHNMLNTLISQKKLRARGVVGFWPAQSIQDDIHLYAEAAVPQAAEPIATFYGLRQQAEKDSASTEPYYCLSDFIAPLHSGIRDYLGLFAVACFGVEELSKAYEDDGDDYSSIMVKALGDRLAEAFAEELHERVRRELWAYCGSEQLDVADLRRLRYKGIRPAPGYPSQPDHTEKLTMWRLADIEQSTGIRLTESLAMAPASAVSGLYFSNLKSKYFAVGKISKDQVEDYALRKNISVAEVEKWLGPILGYDTD

SEQ ID NO: 35796 - protein, 1118 aa, Homo sapiens
MSPALQDLSQPEGLKKTLRDEINAILQKRIMVLDGGMGTMIQREKLNEEHFRGQEFKDHARPLKGNNDILSITQPDVIYQIHKEYLLAGADIIETNTFSSTSIAQADYGLEHLAYRMNMCSAGVARKAAEEVTLQTGIKRFVAGALGPTNKTLSVSPSVERPDYRNITFDELVEAYQEQAKGLLDGGVDILLIETIFDTANAKAALFALQNLFEEKYAPRPIFISGTIVDKSGRTLSGQTGEGFVISVSHGEPLCIGLNCALGAAEMRPFIEIIGKCTTAYVLCYPNAGLPNTFGDYDETPSMMAKHLKDFAMDGLVNIVGGCCGSTPDHIREIAEAVKNCKPRVPPATAFEGHMLLSGLEPFRIGPYTNFVNIGERCNVAGSRKFAKLIMAGNYEEALCVAKVQVEMGAQVLDVNMDDGMLDGPSAMTRFCNLIASEPDIAKVPLCIDSSNFAVIEAGLKCCQGKCIVNSISLKEGEDDFLEKARKIKKYGAAMVVMAFDEEGQTQGTGGKKVIQTDEWRNGPVEERLEYALVKGIEKHIIEDTEEARLNQKKYPRPLNIIEGPLMNGMKIVGDLFGAGKMFLPQVIKSARVMKKAVGHLIPFMEKEREETRVLNGTVEEEDPYQGTIVLATVKGDVHDIGKNIVGVVLGCNNFRVIDLGVMTPCDKILKAALDHKADIIGLSGLITPSLDEMIFVAKEMERLAIRIPLLIGGATTSKTHTAVKIAPRYSAPVIHVLDASKSVVVCSQLLDENLKDEYFEEIMEEYEDIRQDHYESLKERRYLPLSQARKSGFQMDWLSEPHPVKPTFIGTQVFEDYDLQKLVDYIDWKPFFDVWQLRGKYPNRGFPKIFNDKTVGGEARKVYDDAHNMLNTLISQKKLRARGVVGFWPAQSIQDDIHLYAEAAVPQAAEPIATFYGLRQQAEKDSASTEPYYCLSDFIAPLHSGIRDYLGLFAVACFGVEELSKAYEDDGDDYSSIMVKALGDRLAEAFAEELHERVRRELWAYCGSEQLDVADLRRLRYKGIRPAPGYPSQPDHTEKLTMWRLADIEQSTGIRLTESLAMAPASAVSGLYFSNLKSKYFAVGKISKDQVEDYALRKNISVAEVEKCMSVYRKIGE

SEQ ID NO: 35797 - protein, 229 aa, Homo sapiens
MSAGLRAGCHVVLLCRFSLGSFSVPSRDSASGRACLAARPTPRTGRVPGKKARAPAVAAPSPERGPRALRAFGVRSPPATRANGRRQKTRALCGRLAWRWLAWPLAVVTCGEHVFSAAPSAQGGDSTTCHPRSKTCRNPEYLLAGADIIETNTFSSTSIAQADYGLEHLAYRMNMCSAGVARKAAEEVTLQTGIKRFVAGALGPTNKTLSVSPSVERPDYRNINLPVGS

SEQ ID NO: 35798 - protein, 1214 aa, Homo sapiens
MSPALQDLSQPEGLKKTLRDEINAILQKRIMVLDGGMGTMIQREKLNEEHFRGQEFKDHARPLKGNNDILSITQPDVIYQIHKEYLLAGADIIETNTFSSTSIAQADYGLEHLAYRMNMCSAGVARKAAEEVTLQTGIKRFVAGALGPTNKTLSVSPSVERPDYRNITFDELVEAYQEQAKGLLDGGVDILLIETIFDTANAKAALFALQNLFEEKYAPRPIFISGTIVDKSGRTLSGQTGEGFVISVSHGEPLCIGLNCALGAAEMRPFIEIIGKCTTAYVLCYPNAGLPNTFGDYDETPSMMAKHLKDFAMDGLVNIVGGCCGSTPDHIREIAEAVKNCKPRVPPATAFEGHMLLSGLEPFRIGPYTNFVNIGERCNVAGSRKFAKLIMAGNYEEALCVAKVQVEMGAQVLDVNMDDGMLDGPSAMTRFCNLIASEPDIAKVPLCIDSSNFAVIEAGLKCCQGKCIVNSISLKEGEDDFLEKARKIKKYGAAMVVMAFDEEGQATETDTKIRVCTRAYHLLVKKLGFNPNDIIFDPNILTIGTGMEEHNLYAINFIHATKVIKETLPGARISGGLSNLSFSFRGMEAIREAMHGVFLYHAIKSGMDMGIVNAGNLPVYDDIHKELLQLCEDLIWNKDPEATEKLLRYAQTQGTGGKKVIQTDEWRNGPVEERLEYALVKVIKSARVMKKAVGHLIPFMEKEREETRVLNGTVEEEDPYQGTIVLATVKGDVHDIGKNIVGVVLGCNNFRVIDLGVMTPCDKILKAALDHKADIIGLSGLITPSLDEMIFVAKEMERLAIRIPLLIGGATTSKTHTAVKIAPRYSAPVIHVLDASKSVVVCSQLLDENLKDEYFEEIMEEYEDIRQDHYESLKERRYLPLSQARKSGFQMDWLSEPHPVKPTFIGTQVFEDYDLQKLVDYIDWKPFFDVWQLRGKYPNRGFPKIFNDKTVGGEARKVYDDAHNMLNTLISQKKLRARGVVGFWPAQSIQDDIHLYAEAAVPQAAEPIATFYGLRQQAEKDSASTEPYYCLSDFIAPLHSGIRDYLGLFAVACFGVEELSKAYEDDGDDYSSIMVKALGDRLAEAFAEELHERVRRELWAYCGSEQLDVADLRRLRYKGIRPAPGYPSQPDHTEKLTMWRLADIEQSTGIRLTESLAMAPASAVSGLYFSNLKSKYFAVGKISKDQVEDYALRKNISVAEVEKWLGPILGYDTD

SEQ ID NO: 35799 - protein, 725 aa, Homo sapiens
MGAASVRAGARLVEVALCSFTVTCLEVMRRFLLLYATQQGQAKAIAEEICEQAVVHGFSADLHCISESDKYDLKTETAPLVVVVSTTGTGDPPDTARKFVKEIQNQTLPVDFFAHLRYGLLGLGDSEYTYFCNGGKIIDKRLQELGARHFYDTGHADDCVGLELVVEPWIAGLWPALRKHFRSSRGQEEISGALPVASPASSRTDLVKSELLHIESQVELLRFDDSGRKDSEVLKQNAVNSNQSNVVIEDFESSLTRSVPPLSQASLNIPGLPPEYLQVHLQESLGQEESQVSVTSADPVFQVPISKAVQLTTNDAIKTTLLVELDISNTDFSYQPGDAFSVICPNSDSEVQSLLQRLQLEDKREHCVLLKIKADTKKKGATLPQHIPAGCSLQFIFTWCLEIRAIPKKAFLRALVDYTSDSAEKRRLQELCSKQGAADYSRFVRDACACLLDLLLAFPSCQPPLSLLLEHLPKLQPRPYSCASSSLFHPGKLHFVFNIVEFLSTATTEVLRKGVCTGWLALLVASVLQPNIHASHEDSGKALAPKISISPRTTNSFHLPDDPSIPIIMVGPGTGIAPFIGFLQHREKLQEQHPDGNFGAMWLFFGCRHKDRDYLFRKELRHFLKHGILTHLKVSFSRDAPVGEEEAPAKYVQDNIQLHGQQVARILLQENGHIYVCGDAKNMAKDVHDALVQIISKEVGVEKLEAMKTLATLKEEKRYLQDIWS

SEQ ID NO: 35800 - protein, 58 aa, Homo sapiens
MRRFLLLYATQQGQAKAIAEEICEQAVVHGFSADLHCISESDKVSVIQNTPTFAMGGR

SEQ ID NO: 35801 - protein, 698 aa, Homo sapiens
MRRFLLLYATQQGQAKAIAEEICEQAVVHGFSADLHCISESDKYDLKTETAPLVVVVSTTGTGDPPDTARKFVKEIQNQTLPVDFFAHLRYGLLGLGDSEYTYFCNGGKIIDKRLQELGARHFYDTGHADDCVGLELVVEPWIAGLWPALRKHFRSSRGQEEISGALPVASPASSRTDLVKSELLHIESQVELLRFDDSGRKDSEVLKQNAVNSNQSNVVIEDFESSLTRSVPPLSQASLNIPGLPPEYLQVHLQESLGQEESQVSVTSADPVFQVPISKAVQLTTNDAIKTTLLVELDISNTDFSYQPGDAFSVICPNSDSEVQSLLQRLQLEDKREHCVLLKIKADTKKKGATLPQHIPAGCSLQFIFTWCLEIRAIPKKAFLRALVDYTSDSAEKRRLQELCSKQGAADYSRFVRDACACLLDLLLAFPSCQPPLSLLLEHLPKLQPRPYSCASSSLFHPGKLHFVFNIVEFLSTATTEVLRKGVCTGWLALLVASVLQPNIHASHEDSGKALAPKISISPRTTNSFHLPDDPSIPIIMVGPGTGIAPFIGFLQHREKLQEQHPDGNFGAMWLFFGCRHKDRDYLFRKELRHFLKHGILTHLKVSFSRDAPVGEEEAPAKYVQDNIQLHGQQVARILLQENGHIYVCGDAKNMAKDVHDALVQIISKEVGVEKLEAMKTLATLKEEKRYLQDIWS

SEQ ID NO: 35802 - protein, 156 aa, Homo sapiens
MRRFLLLYATQQGQAKAIAEEICEQAVVHGFSADLHCISESDKYDLKTETAPLVVVVSTTGTGDPPDTARKFVKEIQNQTLPVDFFAHLRYGLLGLGDSEYTYFCNGGKIIDKRLQELGARHFYDTGHADDCVGLELVVEPWIAGLWPALRKHFRS

SEQ ID NO: 35803 - protein, 41 aa, Homo sapiens
MRRFLLLYATQQGQAKAIAEEICEQAVVHGFSADLHCISES

SEQ ID NO: 35804 - protein, 112 aa, Homo sapiens
MRRFLLLYATQQGQAKAIAEEICEQAVVHGFSADLHCISESDKYDLKTETAPLVVVVSTTGTGDPPDTARKFVKEIQNQTLPVDFFAHLRYGLLGLGDSEYTYFCNGGKIID

SEQ ID NO: 35805 - protein, 82 aa, Homo sapiens
MLWDPALPRLAVYASCLFFSCLDAHEGPVHGPRGRGEGGRGSERQRVRPGGGGGAGSVHIHLEEEDGAEDQDHRDEDWITKK

SEQ ID NO: 35806 - protein, 548 aa, Homo sapiens
MTMAAAAVVARGAGARAATAAALRGGCGTAARGRPCAGPARPLCTAPGTAPDMKRYLWERYREAKRSTEELVPSIMSNLLNPDAIFSNNEMSLSDIEIYGFDYDYTLVFYSKHLHTLIFNAARDLLINEHRYPAEIRKYEYDPNFAIRGLHYDVQRAVLMKIDAFHYIQLGTVYRGLSVVPDEEVIEMYEGSHVPLEQMSDFYGKSSHGNTMKQFMDIFSLPEMTLLSCVNEYFLKNNIDYEPVHLYKDVKDSIRDVHIKGIMYRAIEADIEKYICYAEQTRAVLAKLADHGKKMFLITNSPSSFVDKGMSYIVGKDWRDLFDVVIVQAEKPNFFNDKRRPFRKMNEKGVLLWDKIHKLQKGQIYKQGNLYEFLKLTGWRGSRVLYFGDHIYSDLADLTLKHGWRTGAIIPELRSELKIMNTEQYIQTMTWLQTLTGLLEQMQVHRDAESQLVLQEWKKERKEMREMTKSFFNAQFGSLFRTDQNPTYFLRRLSRFADIYMASLSCLLNYDVSHTFYPRRTPLQHELPAWSERPPTFGTPLLQEAQAK

SEQ ID NO: 35807 - protein, 561 aa, Homo sapiens
MSTSWSDRLQNAADMPANMDKHALKKYRREAYHRVFVNRSLAMEKIKCFGFDMDYTLAVYKSPEYESLGFELTVERLVSIGYPQELLSFAYDSTFPTRGLVFDTLYGNLLKVDAYGNLLVCAHGFNFIRGPETREQYPNKFIQRDDTERFYILNTLFNLPETYLLACLVDFFTNCPRYTSCETGFKDGDLFMSYRSMFQDVRDAVDWVHYKGSLKEKTVENLEKYVVKDGKLPLLLSRMKEVGKVFLATNSDYKYTDKIMTYLFDFPHGPKPGSSHRPWQSYFDLILVDARKPLFFGEGTVLRQVDTKTGKLKIGTYTGPLQHGIVYSGGSSDTICDLLGAKGKDILYIGDHIFGDILKSKKRQGWRTFLVIPELAQELHVWTDKSSLFEELQSLDIFLAELYKHLDSSSNERPDISSIQRRIKKVTHDMDMCYGMMGSLFRSGSRQTLFASQVMRYADLYAASFINLLYYPFSYLFRAAHVLMPHESTVEHTHVDINEMESPLATRNRTSVDFKDTDYKRHQLTRSISEIKPPNLFPLAPQEITHCHDEDDDEEEEEEEE

SEQ ID NO: 35808 - protein, 199 aa, Homo sapiens
MDYTLAVYKSPEYESLGFELTVERLVSIGYPQELLSFAYDSTFPTRGLVFDTLYGNLLKVDAYGNLLVCAHGFNFIRGSQVAVQKRPETREQYPNKFIQRDDTERFYILNTLFNLPETYLLACLVDFFTNCPRYTSCETGFKDGDLFMSYRSMFQDVRDAVDWVHYKGSLKEKTVENLEKYVVKDSKSSRIQYFLKVLW

SEQ ID NO: 35809 - protein, 561 aa, Homo sapiens; identical to SEQ ID NO: 35807

SEQ ID NO: 35810 - protein, 147 aa, Homo sapiens [sequence omitted]

SEQ ID NO: 35811 - protein, 532 aa, Homo sapiens
MSKEGVFVNRSLAMEKIKCFGFDMDYTLAVYKSPEYESLGFELTVERLVSIGYPQELLSFAYDSTFPTRGLVFDTLYGNLLKVDAYGNLLVCAHGFNFIRGPETREQYPNKFIQRDDTERFYILNTLFNLPETYLLACLVDFFTNCPRYTSCETGFKDGDLFMSYRSMFQDVRDAVDWVHYKGSLKEKTVENLEKYVVKDGKLPLLLSRMKEVGKVFLATNSDYKYTDKIMTYLFDFPHGPKPGSSHRPWQSYFDLILVDARKPLFFGEGTVLRQVDTKTGKLKIGTYTGPLQHGIVYSGGSSDTICDLLGAKGKDILYIGDHIFGDILKSKKRQGWRTFLVIPELAQELHVWTDKSSLFEELQSLDIFLAELYKHLDSSSNERPDISSIQRRIKKVTHDMDMCYGMMGSLFRSGSRQTLFASQVMRYADLYAASFINLLYYPFSYLFRAAHVLMPHESTVEHTHVDINEMESPLATRNRTSVDFKDTDYKRHQLTRSISEIKPPNLFPLAPQEITHCHDEDDDEEEEEEEE

SEQ ID NO: 35812 - protein, 265 aa, Homo sapiens
MSTSWSDRLQNAADMPANMDKHALKKYRREAYHRVFVNRSLAMEKIKCFGFDMDYTLAVYKSPEYESLGFELTVERLVSIGYPQELLSFAYDSTFPTRGLVFDTLYGNLLKVDAYGNLLVCAHGFNFIRGSQVAVQKRPETREQYPNKFIQRDDTERFYILNTLFNLPETYLLACLVDFFTNCPRYTSCETGFKDGDLFMSYRSMFQDVRDAVDWVHYKGSLKEKTVENLEKYVVKDGKLPLLLSRMKEVGKVFLATNSDYKYTD

SEQ ID NO: 35813 - protein, 174 aa, Homo sapiens
VSIGYPQELLSFAYDSTFPTRGLVFDTLYGNLLKVDAYGNLLVCAHGFNFIRGSQVAVQKRPETREQYPNKFIQRDDTERFYILNTLFNLPETYLLACLVDFFTNCPRYTSCETGFKDGDLFMSYRSMFQDVRDAVDWVHYKGSLKEKTVENLEKYVVKDSKSSRIQYFLKVLW

SEQ ID NO: 35814 - protein, 336 aa, Homo sapiens
MRAPSMDRAAVARVGAVASASVCALVAGVVLAQYIFTLKRKTGRKTKIIEMMPEFQKSSVRIKNPTRVEEIICGLIKGGAAKLQIITDFDMTLSRFSYKGKRCPTCHNIIDNCKLVTDECRKKLLQLKEKYYAIEVDPVLTVEEKYPYMVEWYTKSHGLLVQQALPKAKLKEIVAESDVMLKEGYENFFDKLQQHSIPVFIFSAGIGDVLEEVIRQAGVYHPNVKVVSNFMDFDETGVLKGFKGELIHVFNKHDGALRNTEYFNQLKDNSNIILLGDSQGDLRMADGVANVEHILKIGYLNDRVDELLEKYMDSYDIVLVQDESLEVANSILQKIL

SEQ ID NO: 35815 - protein, 285 aa, Homo sapiens
MPEFQKSSVRIKNPTRVEEIICGLIKGGAAKLQIITDFDMTLSRFSYKGKRCPTCHNIIDNCKLVTDECRKKLLQLKEKYYAIEVDPVLTVEEKYPYMVEWYTKSHGLLVQQALPKAKLKEIVAESDVMLKEGYENFFDKLQQHSIPVFIFSAGIGDVLEEVIRQAGVYHPNVKVVSNFMDFDETGVLKGFKGELIHVFNKHDGALRNTEYFNQLKDNSNIILLGDSQGDLRMADGVANVEHILKIGYLNDRVDELLEKYMDSYDIVLVQDESLEVANSILQKIL

SEQ ID NO: 35816 - protein, 297 aa, Homo sapiens
MTNQESAVHVKMMPEFQKSSVRIKNPTRVEEIICGLIKGGAAKLQIITDFDMTLSRFSYKGKRCPTCHNIIDNCKLVTDECRKKLLQLKEKYYAIEVDPVLTVEEKYPYMVEWYTKSHGLLVQQALPKAKLKEIVAESDVMLKEGYENFFDKLQQHSIPVFIFSAGIGDVLEEVIRQAGVYHPNVKVVSNFMDFDETGVLKGFKGELIHVFNKHDGALRNTEYFNQLKDNSNIILLGDSQGDLRMADGVANVEHILKIGYLNDRVDELLEKYMDSYDIVLVQDESLEVANSILQKIL

SEQ ID NO: 35817 - protein, 297 aa, Homo sapiens; identical to SEQ ID NO: 35816

SEQ ID NO: 35818 - protein, 285 aa, Homo sapiens; identical to SEQ ID NO: 35815

SEQ ID NO: 35819 - protein, 42 aa, Homo sapiens
MPEFQKSSVRIKNPTRVEEIICGLIKGGAAKLQIITDFDMTL

SEQ ID NO: 35820 - protein, 574 aa, Homo sapiens
MCPRAARAPATLLLALGAVLWPAAGAWELTILHTNDVHSRLEQTSEDSSKCVNASRCMGGVARLFTKVQQIRRAEPNVLLLDAGDQYQGTIWFTVYKGAEVAHFMNALRYDAMALGNHEFDNGVEGLIEPLLKEAKFPILSANIKAKGPLASQISGLYLPYKVLPVGDEVVGIVGYTSKETPFLSNPGTNLVFEDEITALQPEVDKLKTLNVNKIIALGHSGFEMDKLIAQKVRGVDVVVGGHSNTFLYTGNPPSKEVPAGKYPFIVTSDDGRKVPVVQAYAFGKYLGYLKIEFDERGNVISSHGNPILLNSSIPEDPSIKADINKWRIKLDNYSTQELGKTIVYLDGSSQSCRFRECNMGNLICDAMINNNLRHTDEMFWNHVSMCILNGGGIRSPIDERNNGTITWENLAAVLPFGGTFDLVQLKGSTLKKAFEHSVHRYGQSTGEFLQVGGIHVVYDLSRKPGDRVVKLDVLCTKCRVPSYDPLKMDEVYKVILPNFLANGGDGFQMIKDELLRHDSGDQDINVVSTYISKMKVIYPAVEGRIKFSTGSHCHGSFSLIFLSLWAVIFVLYQ

SEQ ID NO: 35821 - protein, 264 aa, Homo sapiens
MCPRAARAPATLLLALGAVLWPAAGAWELTILHTNDVHSRLEQTSEDSSKCVNASRCMGGVARLFTKVQQIRRAEPNVLLLDAGDQYQGTIWFTVYKGAEVAHFMNALRYDAMALGNHEFDNGVEGLIEPLLKEAKFPILSANIKAKGPLASQISGLYLPYKVLPVGDEVVGIVGYTSKETPFLSNPGTNLVFEDEITALQPEVDKLKTLNVNKIIALGHSGFEMDKLIAQKVRGVDVVVGGHSNTFLYTGNCFKRIAWARMSR

SEQ ID NO: 35822 - protein, 259 aa, Homo sapiens
MDKLIAQKVRGVDVVVGGHSNTFLYTGNPPSKEVPAGKYPFIVTSDDGRKVPVVQAYAFGKYLGYLKIEFDERGNVISSHGNPILLNSSIPEDPSIKADINKWRIKLDNYSTQELGKTIVYLDGSSQSCRFRECNMGNLICDAMINNNLRHTDEMFWNHVSMCILNGGGIRSPIDERNNGTITWENLAAVLPFGGTFDLVQLKGSTLKKAFEHSVHRYGQSTGEFLQVGDLKECCPICINQDDSWKEQPTAQTYLNTWF

SEQ ID NO: 35823 - protein, 524 aa, Homo sapiens
MCPRAARAPATLLLALGAVLWPAAGAWELTILHTNDVHSRLEQTSEDSSKCVNASRCMGGVARLFTKVQQIRRAEPNVLLLDAGDQYQGTIWFTVYKGAEVAHFMNALRYDAMALGNHEFDNGVEGLIEPLLKEAKFPILSANIKAKGPLASQISGLYLPYKVLPVGDEVVGIVGYTSKETPFLSNPGTNLVFEDEITALQPEVDKLKTLNVNKIIALGHSGFEMDKLIAQKVRGVDVVVGGHSNTFLYTGNPPSKEVPAGKYPFIVTSDDGRKVPVVQAYAFGKYLGYLKIEFDERGNVISSHGNPILLNSSIPEDPSIKADINKWRIKLDNYSTQELGKTIVYLDGSSQSCRFRECNMGNLICDAMINNNLRHTDEMFWNHVSMCILNGGGIRSPIDERNNGIHVVYDLSRKPGDRVVKLDVLCTKCRVPSYDPLKMDEVYKVILPNFLANGGDGFQMIKDELLRHDSGDQDINVVSTYISKMKVIYPAVEGRIKFSTGSHCHGSFSLIFLSLWAVIFVLYQ

SEQ ID NO: 35824 - protein, 230 aa, Homo sapiens
  VARIANT 1: note = MOD_RES - Any amino acid
XDVVVGGHSNTFLYTGNPPSKEVPAGKYPFIVTSDDGRKVPVVQAYAFGKYLGYLKIEFDERGNVISSHGNPILLNSSIPEDPSIKADINKWRIKLDNYSTQELGKTIVYLDGSSQSCRFRECNMGNLICDAMINNNLRHTDEMFWNHVSMCILNGGGIRSPIDERNNGIHVVYDLSRKPGDRVVKLDVLCTKCRVPSYDPLKMDEVYKVILPNFLANGGDGFQMIKDEL

SEQ ID NO: 35825 - protein, 179 aa, Homo sapiens
  VARIANT 1: note = MOD_RES - Any amino acid
XNPILLNSSIPEDPSIKADINKWRIKLDNYSTQELGKTIVYLDGSSQSCRFRECNMGNLICDAMINNNLRHTDEMFWNHVSMCILNGGGIRSPIDERNNGTITWENLAAVLPFGGTFDLVQLKGSTLKKAFEHSVHRYGQSTGEFLQVGDLKECCPICINQDDSWKEQPTAQTYLNTWF

SEQ ID NO: 35826 - protein, 228 aa, Homo sapiens
MVRYSLDPENPTKSCKSRGSNLRVHFKNTRETAQAIKGMHIRKATKYLKDVTLQKQCVPFRRYNGGVGRCAQAKQWGWTQGRWPKKSAEFLLHMLKNAESNAELKGLDVDSLVIEHIQVNKAPKMRRRTYRAHGRINPYMSSPCHIEMILTEKEQIVPKPEEEVAQKKKLRSSSLGKWCAFLVSSFQFCSGSTKNSWSHIYTLWFPPSLVVYGLRKQYKNPMIQTKAK

SEQ ID NO: 35827 - protein, 271 aa, Homo sapiens
MSPEMGELTQTRLQKIWIPHSSGSSRLQRRRGSSIPQFTNSPTMVIMVGLPARGKTYISTKLTRYLNWIGTPTKDNMEALQIRKQCALAALKDVHNYLSHEEGHVAVFDATNTTRERRSLILQFAKEHGYKGVCEEMTYEEIQEHYPEEFALRDQDKYRYRYPKGESYEDLVQRLEPVIMELERQENVLVICHQAVMRCLLAYFLDKSSDELPYLKCPLHTVLKLTPVAYGCKVESIYLNVEAVNTHREKPENVDITREPEEALDTVPAHY

SEQ ID NO: 35828 - protein, 471 aa, Homo sapiens
MSPEMGELTQTRLQKIWIPHSSGSSRLQRRRGSSIPQFTNSPTMVIMVGLPARGKTYISTKLTRYLNWIGTPTKVFNLGQYRREAVSYKNYEFFLPDNMEALQIRKQCALAALKDVHNYLSHEEGHVAVFDATNTTRERRSLILQFAKEHGYKVFFIESICNDPGIIAENIRQVKLGSPDYIDCDREKVLEDFLKRIECYEVNYQPLDEELDSHLSYIKIFDVGTRYMVNRVQDHIQSRTVYYLMNIHVTPRSIYLCRHGESELNIRGRIGGDSGLSVRGKQYAYALANFIQSQGISSLKVWTSHMKRTIQTAEALGVPYEQWKALNEIDAGVCEEMTYEEIQEHYPEEFALRDQDKYRYRYPKGESYEDLVQRLEPVIMELERQENVLVICHQAVMRCLLAYFLDKSSDELPYLKCPLHTVLKLTPVAYGCKVESIYLNVEAVNTHREKPENVDITREPEEALDTVPAHY

SEQ ID NO: 35829 - protein, 406 aa, Homo sapiens
MEEKTSRIKVFNLGQYRREAVSYKNYEFFLPDNMEALQIRKQCALAALKDVHNYLSHEEGHVAVFDATNTTRERRSLILQFAKEHGYKVFFIESICNDPGIIAENIRQVKLGSPDYIDCDREKVLEDFLKRIECYEVNYQPLDEELDSHLSYIKIFDVGTRYMVNRVQDHIQSRTVYYLMNIHVTPRSIYLCRHGESELNIRGRIGGDSGLSVRGKQYAYALANFIQSQGISSLKVWTSHMKRTIQTAEALGVPYEQWKALNEIDAGVCEEMTYEEIQEHYPEEFALRDQDKYRYRYPKGESYEDLVQRLEPVIMELERQENVLVICHQAVMRCLLAYFLDKSSDELPYLKCPLHTVLKLTPVAYGCKVESIYLNVEAVNTHREKPENVDITREPEEALDTVPAHY

SEQ ID NO: 35830 - protein, 471 aa, Homo sapiens
MSGASSSEQNNNSYETKTPNLRMSEKKCSWASYMTNSPTLIVMIGLPARGKTYVSKKLTRYLNWIGVPTKVFNLGVYRREAVKSYKSYDFFRHDNEEAMKIRKQCALVALEDVKAYLTEENGQIAVFDATNTTRERRDMILNFAEQNSFKVFFVESVCDDPDVIAANILEVKVSSPDYPERNRENVMEDFLKRIECYKVTYRPLDPDNYDKDLSFIKVINVGQRFLVNRVQDYIQSKIVYYLMNIHVQPRTIYLCRHGESEFNLLGKIGGDSGLSVRGKQFAQALRKFLEEQEITDLKVWTSQLKRTIQTAESLGVPYEQWKILNEIDAGVCEEMTYAEIEKRYPEEFALRDQEKYLYRYPGGESYQDLVQRLEPVIMELERQGNVLVISHQAVMRCLLAYFLDKGADELPYLRCPLHTIFKLTPVAYGCKVETIKLNVEAVNTHRDKPTAAETTLAVRRRPSAASLMLPC

SEQ ID NO: 35831 - protein, 505 aa, Homo sapiens
MSGASSSEQNNNSYETKTPNLRMSEKKCSWASYMTNSPTLIVMIGLPARGKTYVSKKLTRYLNWIGVPTKVFNLGVYRREAVKSYKSYDFFRHDNEEAMKIRKQCALVALEDVKAYLTEENGQIAVFDATNTTRERRDMILNFAEQNSFKVFFVESVCDDPDVIAANILEVKVSSPDYPERNRENVMEDFLKRIECYKVTYRPLDPDNYDKDLSFIKVINVGQRFLVNRVQDYIQSKIVYYLMNIHVQPRTIYLCRHGESEFNLLGKIGGDSGLSVRGKQFAQALRKFLEEQEITDLKVWTSQLKRTIQTAESLGVPYEQWKILNEIDAGVCEEMTYAEIEKRYPEEFALRDQEKYLYRYPGGESYQDLVQRLEPVIMELERQGNVLVISHQAVMRCLLAYFLDKGADELPYLRCPLHTIFKLTPVAYGCKVETIKLNVEAVNTHRDKPTNNFPKNQTPVRMRRNSFTPLSSSNTIRRPRNYSVGSRPLKPLSPLRAQDMQEGAD

SEQ ID NO: 35832 - protein, 373 aa, Homo sapiens
MKIRKQCALVALEDVKAYLTEENGQIAVFDATNTTRERRDMILNFAEQNSFKVFFVESVCDDPDVIAANILEVKVSSPDYPERNRENVMEDFLKRIECYKVTYRPLDPDNYDKDLSFIKVINVGQRFLVNRVQDYIQSKIVYYLMNIHVQPRTIYLCRHGESEFNLLGKIGGDSGLSVRGKQFAQALRKFLEEQEITDLKVWTSQLKRTIQTAESLGVPYEQWKILNEIDAGVCEEMTYAEIEKRYPEEFALRDQEKYLYRYPGGESYQDLVQRLEPVIMELERQGNVLVISHQAVMRCLLAYFLDKGADELPYLRCPLHTIFKLTPVAYGCKVETIKLNVEAVNTHRDKPTAAETTLAVRRRPSAASLMLPC

SEQ ID NO: 35833 - protein, 264 aa, Homo sapiens
MEDFLKRIECYKVTYRPLDPDNYDKDLSFIKVINVGQRFLVNRVQDYIQSKIVYYLMNIHVQPRTIYLCRHGESEFNLLGKIGGDSGLSVRGKQFAQALRKFLEEQEITDLKVWTSQLKRTIQTAESLGVPYEQWKILNEIDAGVCEEMTYAEIEKRYPEEFALRDQEKYLYRYPGGESYQDLVQRLEPVIMELERQGNVLVISHQAVMRCLLAYFLDKGAGCKVETIKLNVEAVNTHRDKPTAAETTLAVRRRPSAASLMLPC

SEQ ID NO: 35834 - protein, 472 aa, Homo sapiens
MTNSPTLIVMIGLPARGKTYVSKKLTRYLNWIGVPTKVFNLGVYRREAVKSYKSYDFFRHDNEEAMKIRKQCALVALEDVKAYLTEENGQIAVFDATNTTRERRDMILNFAEQNSFKVFFVESVCDDPDVIAANILEVKVSSPDYPERNRENVMEDFLKRIECYKVTYRPLDPDNYDKDLSFIKVINVGQRFLVNRVQDYIQSKIVYYLMNIHVQPRTIYLCRHGESEFNLLGKIGGDSGLSVRGKQFAQALRKFLEEQEITDLKVWTSQLKRTIQTAESLGVPYEQWKILNEIDAGVCEEMTYAEIEKRYPEEFALRDQEKYLYRYPGGESYQDLVQRLEPVIMELERQGNVLVISHQAVMRCLLAYFLDKGADELPYLRCPLHTIFKLTPVAYGCKVETIKLNVEAVNTHRDKPTNNFPKNQTPVRMRRNSFTPLSSSNTIRRPRNYSVGSRPLKPLSPLRAQDMQEGAD

SEQ ID NO: 35835 - protein, 513 aa, Homo sapiens
MPLELTQSRVQKIWVPVDHRPSLPRSCGPKLTNSPTVIVMVGLPARGKTYISKKLTRYLNWIGVPTKVFNVGEYRREAVKQYSSYNFFRPDNEEAMKVRKQCALAALRDVKSYLAKEGGQIAVFDATNTTRERRHMILHFAKENDFKAFFIESVCDDPTVVASNIMEVKISSPDYKDCNSAEAMDDFMKRISCYEASYQPLDPDKCDRDLSLIKVIDVGRRFLVNRVQDHIQSRIVYYLMNIHVQPRTIYLCRHGENEHNLQGRIGGDSGLSSRGKKFASALSKFVEEQNLKDLRVWTSQLKSTIQTAEALRLPYEQWKALNEIDAGVCEELTYEEIRDTYPEEYALREQDKYYYRYPTGESYQDLVQRLEPVIMELERQENVLVICHQAVLRCLLAYFLDKSAEEMPYLKCPLHTVLKLTPVAYGCRVESIYLNVESVCTHRERSEDAKKGPNPLMRRNSVTPLASPEPTKKPRINSFEEHVASTSAALPSCLPPEVPTQLPGQPLLGQACL

SEQ ID NO: 35836 - protein, 514 aa, Homo sapiens
MPLELTQSRVQKIWVPVDHRPSLPRSCGPKLTNSPTVIVMVGLPARGKTYISKKLTRYLNWIGVPTKVFNVGEYRREAVKQYSSYNFFRPDNEEAMKVRKQCALAALRDVKSYLAKEGGQIAVFDATNTTRERRHMILHFAKENDFKAFFIESVCDDPTVVASNIMEVKISSPDYKDCNSAEAMDDFMKRISCYEASYQPLDPDKCDRDLSLIKVIDVGRRFLVNRVQDHIQSRIVYYLMNIHVQPRTIYLCRHGENEHNLQGRIGGDSGLSSRGKKFASALSKFVEEQNLKDLRVWTSQLKSTIQTAEALRLPYEQWKALNEIDAGVCEELTYEEIRDTYPEEYALREQDKYYYRYPTGESYQDLVQRLEPVIMELERQENVLVICHQAVLRCLLAYFLDKSAEEMPYLKCPLHTVLKLTPVAYGCRVESIYLNVESVCTHRERSEDAKKGPNPLMRRNSVTPLASPEPTKKPRINSFEEHVASTSAALPSCLPPEVPTQLPGQPLLGQACLT

SEQ ID NO: 35837 - protein, 514 aa, Homo sapiens; identical to SEQ ID NO: 35836

SEQ ID NO: 35838 - protein, 520 aa, Homo sapiens
MPLELTQSRVQKIWVPVDHRPSLPRSCGPKLTNSPTVIVMVGLPARGKTYISKKLTRYLNWIGVPTKVFNVGEYRREAVKQYSSYNFFRPDNEEAMKVRKQCALAALRDVKSYLAKEGGQIAVFDATNTTRERRHMILHFAKENDFKAFFIESVCDDPTVVASNIMEVKISSPDYKDCNSAEAMDDFMKRISCYEASYQPLDPDKCDRDLSLIKVIDVGRRFLVNRVQDHIQSRIVYYLMNIHVQPRTIYLCRHGENEHNLQGRIGGDSGLSSRGKKFASALSKFVEEQNLKDLRVWTSQLKSTIQTAEALRLPYEQWKALNEIDAGVCEELTYEEIRDTYPEEYALREQDKYYYRYPTGESYQDLVQRLEPVIMELERQENVLVICHQAVLRCLLAYFLDKSAEEMPYLKCPLHTVLKLTPVAYGCRVESIYLNVESVCTHRERSEDAKKGPNPLMRRNSVTPLASPEPTKKPRINSFEEHVASTSAALPSCLPPEVPTQLPGQNMKGSRSSADSSRKH

SEQ ID NO: 35839 - protein, 117 aa, Homo sapiens
MPYLKCPLHTVLKLTPVAYGCRVESIYLNVESVCTHRERSEDAKKGPNPLMRRNSVTPLASPEPTKKPRINSFEEHVASTSAALPSCLPPEVPTQLPGQPLLGQACLNWKGVMRNAA

SEQ ID NO: 35840 - protein, 526 aa, Homo sapiens
MPLELTQSRVQKIWVPVDHRPSLPRSCGPKLTNSPTVIVMVGLPARGKTYISKKLTRYLNWIGVPTKVFNVGEYRREAVKQYSSYNFFRPDNEEAMKVRKQCALAALRDVKSYLAKEGGQIAVFDATNTTRERRHMILHFAKENDFKAFFIESVCDDPTVVASNIMEVKISSPDYKDCNSAEAMDDFMKRISCYEASYQPLDPDKCDRDLSLIKVIDVGRRFLVNRVQDHIQSRIVYYLMNIHVQPRTIYLCRHGENEHNLQGRIGGDSGLSSRGKKFASALSKFVEEQNLKDLRVWTSQLKSTIQTAEALRLPYEQWKALNEIDAGVCEELTYEEIRDTYPEEYALREQDKYYYRYPTGESYQDLVQRLEPVIMELERQENVLVICHQAVLRCLLAYFLDKSAEEMPYLKCPLHTVLKLTPVAYGCRVESIYLNVESVCTHRERSEDAKKGPNPLMRRNSVTPLASPEPTKKPRINSFEEHVASTSAALPSCLPPEVPTQLPGQPLLGQACLRTVCHIFSKFSPY

SEQ ID NO: 35841 - protein, 188 aa, Homo sapiens
MNIHVQPRTIYLCRHGENEHNLQGRIGGDSGLSSRGKKFASALSKFVEEQNLKDLRVWTSQLKSTIQTAEALRLPYEQWKALNEIDASYQDLVQRLEPVIMELERQENVLVICHQAVLRCLLAYFLDKSAEEMPYLKCPLHTVLKLTPVAYGCRVESIYLNVESVCTHRERSENMKGSRSSADSSRKH

SEQ ID NO: 35842 - protein, 526 aa, Homo sapiens; identical to SEQ ID NO: 35840

SEQ ID NO: 35843 - protein, 500 aa, Homo sapiens
MPFRKACGPKLTNSPTVIVMVGLPARGKTYISKKLTRYLNWIGVPTKVFNVGEYRREAVKQYSSYNFFRPDNEEAMKVRKQCALAALRDVKSYLAKEGGQIAVFDATNTTRERRHMILHFAKENDFKAFFIESVCDDPTVVASNIMEVKISSPDYKDCNSAEAMDDFMKRISCYEASYQPLDPDKCDRDLSLIKVIDVGRRFLVNRVQDHIQSRIVYYLMNIHVQPRTIYLCRHGENEHNLQGRIGGDSGLSSRGKKFASALSKFVEEQNLKDLRVWTSQLKSTIQTAEALRLPYEQWKALNEIDAGVCEELTYEEIRDTYPEEYALREQDKYYYRYPTGESYQDLVQRLEPVIMELERQENVLVICHQAVLRCLLAYFLDKSAEEMPYLKCPLHTVLKLTPVAYGCRVESIYLNVESVCTHRERSEDAKKGPNPLMRRNSVTPLASPEPTKKPRINSFEEHVASTSAALPSCLPPEVPTQLPGQNMKGSRSSADSSRKH

SEQ ID NO: 35844 - protein, 92 aa, Homo sapiens
IYLNVESVCTHRERSEDAKKGPNPLMRRNSVTPLASPEPTKKPRINSFEEHVASTSAALPSCLPPEVPTQLPGQPLLGQACLNWKGVMRNAA

SEQ ID NO: 35845 - protein, 31 aa, Homo sapiens
IYLNVESVCTHRERSENMKGSRSSADSSRKH

SEQ ID NO: 35846 - protein, 86 aa, Homo sapiens
MPYLKCPLHTVLKLTPVAYGCRVESIYLNVESVCTHRERSEGLSLFPRLECGGAVTAHCSLNLLGSSDPPASASRVAETTGCKEGT

SEQ ID NO: 35847 - protein, 143 aa, Homo sapiens
  VARIANT 1: note = MOD_RES - Any amino acid
XVEEQNLKDLRVWTSQLKSTIQTAEALRLPYEQWKALNEIDASYQDLVQRLEPVIMELERQENVLVICHQAVLRCLLAYFLDKSAEEMPYLKCPLHTVLKLTPVAYGCRVESIYLNVESVCTHRERSENMKGSRSSADSSRKH

SEQ ID NO: 35848 - protein, 184 aa, Homo sapiens
MPFRKACGPKLTNSPTVIVMVGLPARGKTYISKKLTRYLNWIGVPTKVFNVGEYRREAVKQYSSYNFFRPDNEEAMKVRKQCALAALRDVKSYLAKEGGQIAVFDATNTTRERRHMILHFAKENDFKAFFIESVCDDPTVVASNIMQKAFQRDLSATPLWCCRKLKSPARITKTATRQKPWTTS

SEQ ID NO: 35849 - protein, 534 aa, Homo sapiens
MGEGGQKEGDSQQAGALPLLCQLDTFSPKATVFGVSINPACGPKLTNSPTVIVMVGLPARGKTYISKKLTRYLNWIGVPTKVFNVGEYRREAVKQYSSYNFFRPDNEEAMKVRKQCALAALRDVKSYLAKEGGQIAVFDATNTTRERRHMILHFAKENDFKAFFIESVCDDPTVVASNIMEVKISSPDYKDCNSAEAMDDFMKRISCYEASYQPLDPDKCDRDLSLIKVIDVGRRFLVNRVQDHIQSRIVYYLMNIHVQPRTIYLCRHGENEHNLQGRIGGDSGLSSRGKKFASALSKFVEEQNLKDLRVWTSQLKSTIQTAEALRLPYEQWKALNEIDAGVCEELTYEEIRDTYPEEYALREQDKYYYRYPTGESYQDLVQRLEPVIMELERQENVLVICHQAVLRCLLAYFLDKSAEEMPYLKCPLHTVLKLTPVAYGCRVESIYLNVESVCTHRERSEDAKKGPNPLMRRNSVTPLASPEPTKKPRINSFEEHVASTSAALPSCLPPEVPTQLPGQNMKGSRSSADSSRKH

SEQ ID NO: 35850 - protein, 469 aa, Homo sapiens
MASPRELTQNPLKKIWMPYSNGRPALHACQRGVCMTNCPTLIVMVGLPARGKTYISKKLTRYLNWIGVPTREFNVGQYRRDVVKTYKSFEFFLPDNEEGLKIRKQCALAALRDVRRFLSEEGGHVAVFDATNTTRERRATIFNFGEQNGYKTFFVESICVDPEVIAANIVQVKLGSPDYVNRDSDEATEDFMRRIECYENSYESLDEDLDRDLSYIKIMDVGQSYVVNRVADHIQSRIVYYLMNIHVTPRSIYLCRHGESELNLKGRIGGDPGLSPRGREFAKSLAQFISDQNIKDLKVWTSQMKRTIQTAEALGVPYEQWKVLNEIDAGVCEEMTYEEIQDNYPLEFALRDQDKYRYRYPKGESYEDLVQRLEPVIMELERQENVLVICHQAVMRCLLAYFLDKAAEQLPYLKCPLHTVLKLTPVAYGCKVESIFLNVAAVNTHRDRPQNVDISRPPEEALVTVPAHQ

SEQ ID NO: 35851 - protein, 175 aa, Homo sapiens
MTNCPTLIVMVGLPARGKTYISKKLTRYLNWIGVPTREFNVGQYRRDVVKTYKSFEFFLPDNEEGLKIRKQCALAALRDVRRFLSEEGGHVAVFDATNTTRERRATIFNFGEQNGYKTFFVESICVDPEVIAANIVQVKLGSPDYVNRDSDEATEDFMRRIECYENSYESLDEDL

SEQ ID NO: 35852 - protein, 458 aa, Homo sapiens
MDRGSLGGSSLTDLGPGSSRRVCMTNCPTLIVMVGLPARGKTYISKKLTRYLNWIGVPTREFNVGQYRRDVVKTYKSFEFFLPDNEEGLKIRKQCALAALRDVRRFLSEEGGHVAVFDATNTTRERRATIFNFGEQNGYKTFFVESICVDPEVIAANIVQVKLGSPDYVNRDSDEATEDFMRRIECYENSYESLDEDLDRDLSYIKIMDVGQSYVVNRVADHIQSRIVYYLMNIHVTPRSIYLCRHGESELNLKGRIGGDPGLSPRGREFAKSLAQFISDQNIKDLKVWTSQMKRTIQTAEALGVPYEQWKVLNEIDAGVCEEMTYEEIQDNYPLEFALRDQDKYRYRYPKGESYEDLVQRLEPVIMELERQENVLVICHQAVMRCLLAYFLDKAAEQLPYLKCPLHTVLKLTPVAYGCKVESIFLNVAAVNTHRDRPQNVDISRPPEEALVTVPAHQ

SEQ ID NO: 35853 - protein, 435 aa, Homo sapiens
MTNCPTLIVMVGLPARGKTYISKKLTRYLNWIGVPTREFNVGQYRRDVVKTYKSFEFFLPDNEEGLKIRKQCALAALRDVRRFLSEEGGHVAVFDATNTTRERRATIFNFGEQNGYKTFFVESICVDPEVIAANIVQVKLGSPDYVNRDSDEATEDFMRRIECYENSYESLDEDLDRDLSYIKIMDVGQSYVVNRVADHIQSRIVYYLMNIHVTPRSIYLCRHGESELNLKGRIGGDPGLSPRGREFAKSLAQFISDQNIKDLKVWTSQMKRTIQTAEALGVPYEQWKVLNEIDAGVCEEMTYEEIQDNYPLEFALRDQDKYRYRYPKGESYEDLVQRLEPVIMELERQENVLVICHQAVMRCLLAYFLDKAAEQLPYLKCPLHTVLKLTPVAYGCKVESIFLNVAAVNTHRDRPQNVDISRPPEEALVTVPAHQ

SEQ ID NO: 35854 - protein, 142 aa, Homo sapiens
MASPRELTQNPLKKIWMPYSNGRPALHACQRGVCMTNCPTLIVMVGLPARGKTYISKKLTRYLNWIGVPTREFNVGQYRRDVVKTYKSFEFFLPDNEEGLKIRKFLMPQTPPENGERPSLILENRMATRPFLSSPSVWILRS

SEQ ID NO: 35855 - protein, 258 aa, Homo sapiens
MAAPAPGLISVFSSSQELGAALAQLVAQRAACCLAGARARFALGLSGGSLVSMLARELPAAVAPAGPASLARWTLGFCDERLVPFDHAESTYGLYRTHLLSRLPIPESQVITINPELPVEEAAEDYAKKLRQAFQGDSIPVFDLLILGVGPDGHTCSLFPDHPLLQEREKIVAPISDSPKPPPQRVTLTLPVLNAARTVIFVATGEGKAAVLKRILEDQEENPLPAALVQPHTGKLCWFLDEAAARLLTVPFEKHSTL

SEQ ID NO: 35856 - protein, 475 aa, Homo sapiens
MAAKSQPNIPKAKSLDGVTNDRTASQGQWGRAWEVDWFSLASVIFLLLFAPFIVYYFIMACDQYSCALTGPVVDIVTGHARLSDIWAKTPPITRKAAQLYTLWVTFQVLLYTSLPDFCHKFLPGYVGGIQEGAVTPAGVVNKYQINGLQAWLLTHLLWFANAHLLSWFSPTIIFDNWIPLLWCANILGYAVSTFAMVKGYFFPTSARDCKFTGNFFYNYMMGIEFNPRIGKWFDFKLFFNGRPGIVAWTLINLSFAAKQRELHSHVTNAMVLVNVLQAIYVIDFFWNETWYLKTIDICHDHFGWYLGWGDCVWLPYLYTLQGLYLVYHPVQLSTPHAVGVLLLGLVGYYIFRVANHQKDLFRRTDGRCLIWGRKPKVIECSYTSADGQRHHSKLLVSGFWGVARHFNYVGDLMGSLAYCLACGGGHLLPYFYIIYMAILLTHRCLRDEHRCASKYGRDWERYTAAVPYRLLPGIF

SEQ ID NO: 35857 - protein, 475 aa, Homo sapiens; identical to SEQ ID NO: 35856

SEQ ID NO: 35858 - protein, 108 aa, Homo sapiens
MAAKSQPNIPKAKSLDGVTNDRTASQGQWGRAWEVDWFSLASVIFLLLFAPFIVYYFIMACDQYSCALTGPVVDIVTGHARLSDIWAKTPPITRKAAQLYTLWVTFQV

SEQ ID NO: 35859 - protein, 164 aa, Homo sapiens
MAAKSQPNIPKAKSLDGVTNDRTASQGQWGRAWEVDWFSLASVIFLLLFAPFIVYYFIMACDQYSCALTGPVVDIVTGHARLSDIWAKTPPITRKAAQLYTLWVTFQVLLYTSLPDFCHKFLPGYVGGIQEGAVTPAGVVNKYQINGLQAWLLTHLLWFANAHL

SEQ ID NO: 35860 - protein, 91 aa, Homo sapiens
MAAKSQPNIPKAKSLDGVTNDRTASQGQWGRAWEVDWFSLASVIFLLLFAPFIVYYFIMACDQYSCALTGPVVDIVTGHARLSDIWAKTPP

SEQ ID NO: 35861 - protein, 105 aa, Homo sapiens
MAAKSQPNIPKAKSLDGVTNDRTASQGQWGRAWEVDWFSLASVIFLLLFAPFIVYYFIMACDQYSCALTGPVVDIVTGHARLSDIWAKTPPITRKAAQLYTLWVT

SEQ ID NO: 35862 - protein, 281 aa, Homo sapiens
MDSYSTYLATVKVSGSWLEEQDEDIYEVESRVPLPHPFPLCEHLDENNSVIVNTSIFHFIHKRNGHILKLISKISLPTPPYSLEHAKVTQTELMRESFRQKQEATESLKCQEELRERLHEESRAREQLAVELSKAEGVIDGYADEKTLFERQIQEKTDIIDRLEQELLCASNRLQELEAEQQQIQEERELLSRQKEAMKAEAGPVEQQLLQETEKLMKEKLEVQCQAEKVRDDLQKQVKALEIDVEEQVSRFIELEQEKNTELMDLRQQNQALEKQLEKMR

SEQ ID NO: 35863 - protein, 3907 aa, Homo sapiens
MEDEERQKKLEAGKAKLAQFRQRKAQSDGQSPSKKQKKKRKTSSSKHDVSAHHDLNIDQSQCNEMYINSSQRVESTVIPESTIMRTLHSGEITSHEQGFSVELESEISTTADDCSSEVNGCSFVMRTGKPTNLLREEEFGVDDSYSEQGAQDSPTHLEMMESELAGKQHEIEELNRELEEMRVTYGTEGLQQLQEFEAAIKQRDGIITQLTANLQQARREKDETMREFLELTEQSQKLQIQFQQLQASETLRNSTHSSTAADLLQAKQQILTHQQQLEEQDHLLEDYQKKKEDFTMQISFLQEKIKVYEMEQDKKVENSNKEEIQEKETIIEELNTKIIEEEKKTLELKDKLTTADKLLGELQEQIVQKNQEIKNMKLELTNSKQKERQSSEEIKQLMGTVEELQKRNHKDSQFETDIVQRMEQETQRKLEQLRAELDEMYGQQIVQMKQELIRQHMAQMEEMKTRHKGEMENALRSYSNITVNEDQIKLMNVAINELNIKLQDTNSQKEKLKEELGLILEEKCALQRQLEDLVEELSFSREQIQRARQTIAEQESKLNEAHKSLSTVEDLKAEIVSASESRKELELKHEAEVTNYKIKLEMLEKEKNAVLDRMAESQEAELERLRTQLLFSHEEELSKLKEDLEIEHRINIEKLKDNLGIHYKQQIDGLQNEMSQKIETMQFEKDNLITKQNQLILEISKLKDLQQSLVNSKSEEMTLQINELQKEIEILRQEEKEKGTLEQEVQELQLKTELLEKQMKEKENDLQEKFAQLEAENSILKDEKKTLEDMLKIHTPVSQEERLIFLDSIKSKSKDSVWEKEIEILIEENEDLKQQCIQLNEEIEKQRNTFSFAEKNFEVNYQELQEEYACLLKVKDDLEDSKNKQELEYKSKLKALNEELHLQRINPTTVKMKSSVFDEDKTFVAETLEMGEVVEKDTTELMEKLEVTKREKLELSQRLSDLSEQLKQKHGEISFLNEEVKSLKQEKEQVSLRCRELEIIINHNRAENVQSCDTQVSSLLDGVVTMTSRGAEGSVSKVNKSFGEESKIMVEDKVSFENMTVGEESKQEQLILDHLPSVTKESSLRATQPSENDKLQKELNVLKSEQNDLRLQMEAQRICLSLVYSTHVDQVREYMENEKDKALCSLKEELIFAQEEKIKELQKIHQLELQTMKTQETGDEGKPLHLLIGKLQKAVSEECSYFLQTLCSVLGEYYTPALKCEVNAEDKENSGDYISENEDPELQDYRYEVQDFQENMHTLLNKVTEEYNKLLVLQTRLSKIWGQQTDGMKLEFGEENLPKEETEFLSIHSQMTNLEDIDVNHKSKLSSLQDLEKTKLEEQVQELESLISSLQQQLKETEQNYEAEIHCLQKRLQAVSESTVPPSLPVDSVVITESDAQRTMYPGSCVKKNIDGTIEFSGEFGVKEETNIVKLLEKQYQEQLEEEVAKVIVSMSIAFAQQTELSRISGGKENTASSKQAHAVCQQEQHYFNEMKLSQDQIGFQTFETVDVKFKEEFKPLSKELGEHGKEILLSNSDPHDIPESKDCVLTISEEMFSKDKTFIVRQSIHDEISVSSMDASRQLMLNEEQLEDMRQELVRQYQEHQQATELLRQAHMRQMERQREDQEQLQEEIKRLNRQLAQRSSIDNENLVSERERVLLEELEALKQLSLAGREKLCCELRNSSTQTQNGNENQGEVEEQTFKEKELDRKPEDVPPEILSNERYALQKANNRLLKILLEVVKTTAAVEETIGRHVLGILDRSSKSQSSASLIWRSEAEASVKSCVHEEHTRVTDESIPSYSGSDMPRNDINMWSKVTEEGTELSQRLVRSGFAGTEIDPENEELMLNISSRLQAAVEKLLEAISETSSQLEHAKVTQTELMRESFRQKQEATESLKCQEELRERLHEESRAREQLAVELSKAEGVIDGYADEKTLFERQIQEKTDIIDRLEQELLCASNRLQELEAEQQQIQEERELLSRQKEAMKAEAGPVEQQLLQETEKLMKEKLEVQCQAEKVRDDLQKQVKALEIDVEEQVSRFIELEQEKNTELMDLRQQNQALEKQLEKMRKFLDEQAIDREHERDVFQQEIQKLEQQLKVVPRFQPISEHQTREVEQLANHLKEKTDKCSELLLSKEQLQRDIQERNEEIEKLEFRVRELEQALLVSADTFQKVEDRKHFGAVEAKPELSLEVQLQAERDAIDRKEKEITNLEEQLEQFREELENKNEEVQQLHMQLEIQKKESTTRLQELEQENKLFKDDMEKLGLAIKESDAMSTQDQHVLFGKFAQIIQEKEVEIDQLNEQVTKLQQQLKITTDNKVIEEKNELIRDLETQIECLMSDQECVKRNREEEIEQLNEVIEKLQQELANIGQKTSMNAHSLSEEADSLKHQLDVVIAEKLALEQQVETANEEMTFMKNVLKETNFKMNQLTQELFSLKRERESVEKIQSIPENSVNVAIDHLSKDKPELEVVLTEDALKSLENQTYFKSFEENGKGSIINLETRLLQLESTVSAKDLELTQCYKQIKDMQEQGQFETEMLQKKIVNLQKIVEEKVAAALVSQIQLEAVQEYAKFCQDNQTISSEPERTNIQNLNQLREDELGSDISALTLRISELESQVVEMHTSLILEKEQVEIAEKNVLEKEKKLLELQKLLEGNEKKQREKEKKRSPQDVEVLKTTTELFHSNEESGFFNELEALRAESVATKAELASYKEKAEKLQEELLVKETNMTSLQKDLSQVRDHLAEAKEKLSILEKEDETEVQESKKACMFEPLPIKLSKSIASQTDGTLKISSSNQTPQILVKNAGIQINLQSECSSEEVTEIISQFTEKIEKMQELHAAEILDMESRHISETETLKREHYVAVQLLKEECGTLKAVIQCLRSKEGSSIPELAHSDAYQTREICSSDSGSDWGQGIYLTHSQGFDIASEGRGEESESATDSFPKKIKGLLRAVHNEGMQVLSLTESPYSDGEDHSIQQVSEPWLEERKAYINTISSLKDLITKMQLQREAEVYDSSQSHESFSDWRGELLLALQQVFLEERSVLLAAFRTELTALGTTDAVGLLNCLEQRIQEQGVEYQAAMECLQKADRRSLLSEIQALHAQMNGRKITLKREQESEKPSQELLEYNIQQKQSQMLEMQVELSSMKDRATELQEQLSSEKMVVAELKSELAQTKLELETTLKAQHKHLKELEAFRLEVKDKTDEVHLLNDTLASEQKKSRELQWALEKEKAKLGRSEERDKEELEDLKFSLESQKQRNLQLNLLLEQQKQLLNESQQKIESQRMLYDAQLSEEQGRNLELQVLLESEKVRIREMSSTLDRERELHAQLQSSDGTGQSRPPLPSEDLLKELQKQLEEKHSRIVELLNETEKYKLDSLQTRQQMEKDRQVHRKTLQTEQEANTEGQKKMHELQSKVEDLQRQLEEKRQQVYKLDLEGQRLQGIMQEFQKQELEREEKRESRRILYQNLNEPTTWSLTSDRTRNWVLQQKIEGETKESNYAKLIEMNGGGTGCNHELEMIRQKLQCVASKLQVLPQKASERLQFETADDEDFIWVQENIDEIILQLQKLTGQQGEEPSLVSPSTSCGSLTERLLRQNAELTGHISQLTEEKNDLRNMVMKLEEQIRWYRQTGAGRDNSSRFSLNGGANIEAIIASEKEVWNREKLTLQKSLKRAEAEVYKLKAELRNDSLLQTLSPDSEHVTLKRIYGKYLRAESFRKALIYQKKYLLLLLGGFQECEDATLALLARMGGQPAFTDLEVITNRPKGFTRFRSAVRVSIAISRMKFLVRRWHRVTGSVSININRDGFGLNQGAEKTDSFYHSSGGLELYGEPRHTTYRSRSDLDYIRSPLPFQNRYPGTPADFNPGSLACSQLQNYDPDRALTDYITRLEALQRRLGTIQSGSTTQFHAGMRR

SEQ ID NO: 35864 - protein, 3857 aa, Homo sapiens
MEDEERQKKLEAGKAKIEELSLAFLVRQLAQFRQRKAQSDGQSPSKKQKKKRKTSSSKHDVSAHHDLNIDQSQCNEMYINSSQRVESTVIPESTIMRTLHSGEITSHEQGFSVELESEISTTADDCSSEVNGCSFVMRTGKPTNLLREEEFGVDDSYSEQGAQDSPTHLEMMESELAGKQHEIEELNRELEEMRVTYGTEGLQQLQEFEAAIKQRDGIITQLTANLQQARREKDETMREFLELTEQSQKLQIQFQQLQASETLRNSTHSSTAADLLQAKQQILTHQQQLEEQDHLLEDYQKKKEDFTMQISFLQEKIKVYEMEQDKKVENSNKEEIQEKETIIEELNTKIIEEEKKTLELKDKLTTADKLLGELQEQIVQKNQEIKNMKLELTNSKQKERQSSEEIKQLMGTVEELQKRNHKDSQFETDIVQRMEQETQRKLEQLRAELDEMYGQQIVQMKQELIRQHMAQMEEMKTRHKGEMENALRSYSNITVNEDQIKLMNVAINELNIKLQDTNSQKEKLKEELGLILEEKCALQRQLEDLVEELSFSREQIQRARQTIAEQESKLNEAHKSLSTVEDLKAEIVSASESRKELELKHEAEVTNYKIKLEMLEKEKNAVLDRMAESQEAELERLRTQLLFSHEEELSKLKEDLEIEHRINIEKLKDNLGIHYKQQIDGLQNEMSQKIETMQFEKDNLITKQNQLILEISKLKDLQQSLVNSKSEEMTLQINELQKEIEILRQEEKEKGTLEQEVQELQLKTELLEKQMKEKENDLQEKFAQLEAENSILKDEKKTLEDMLKIHTPVSQEERLIFLDSIKSKSKDSVWEKEIEILIEENEDLKQQCIQLNEEIEKQRNTFSFAEKNFEVNYQELQEEYACLLKVKDDLEDSKNKQELEYKSKLKALNEELHLQRINPTTVKMKSSVFDEDKTFVAETLEMGEVVEKDTTELMEKLEVTKREKLELSQRLSDLSEQLKQKHGEISFLNEEVKSLKQEKEQVSLRCRELEIIINHNRAENVQSCDTQVSSLLDGVVTMTSRGAEGSVSKVNKSFGEESKIMVEDKVSFENMTVGEESKQEQLILDHLPSVTKESSLRATQPSENDKLQKELNVLKSEQNDLRLQMEAQRICLSLVYSTHVDQVREYMENEKDKALCSLKEELIFAQEEKIKELQKIHQLELQTMKTQETGDEGKPLHLLIGKLQKAVSEECSYFLQTLCSVLGEYYTPALKCEVNAEDKENSGDYISENEDPELQDYRYEVQDFQENMHTLLNKVTEEYNKLLVLQTRLSKIWGQQTDGMKLEFGEENLPKEETEFLSIHSQMTNLEDIDVNHKSKLSSLQDLEKTKLEEQVQELESLISSLQQQLKETEQNYEAEIHCLQKRLQAVSESTVPPSLPVDSVVITESDAQRTMYPGSCVKKNIDGTIEFSGEFGVKEETNIVKLLEKQYQEQLEEEVAKVIVSMSIAFAQQTELSRISGGKENTASSKQAHAVCQQEQHYFNEMKLSQDQIGFQTFETVDVKFKEEFKPLSKELGEHGKEILLSNSDPHDIPESKDCVLTISEEMFSKDKTFIVRQSIHDEISVSSMDASRQLMLNEEQLEDMRQELVRQYQEHQQATELLRQAHMRQMERQREDQEQLQEEIKRLNRQLAQRSSIDNENLVSERERVLLEELEALKQLSLAGREKLCCELRNSSTQTQNGNENQGEVEEQTFKEKELDRKPEDVPPEILSNERYALQKANNRLLKILLEVVKTTAAVEETIGRHVLGILDRSSKSQSSASLIWRSEAEASVKSCVHEEHTRVTDESIPSYSGSDMPRNDINMWSKVTEEGTELSQRLVRSGFAGTEIDPENEELMLNISSRLQAAVEKLLEAISETSSQLEHAKVTQTELMRESFRQKQEATESLKCQEELRERLHEESRAREQLAVELSKAEGVIDGYADEKTLFERQIQEKTDIIDRLEQELLCASNRLQELEAEQQQIQEERELLSRQKEAMKAEAGPVEQQLLQETEKLMKEKLEVQCQAEKVRDDLQKQVKALEIDVEEQVSRFIELEQEKNTELMDLRQQNQALEKQLEKMRKFLDEQAIDREHERDVFQQEIQKLEQQLKVVPRFQPISEHQTREVEQLANHLKEKTDKCSELLLSKEQLQRDIQERNEEIEKLEFRVRELEQALLVSADTFQKVEDRKHFGAVEAKPELSLEVQLQAERDAIDRKEKEITNLEEQLEQFREELENKNEEVQQLHMQLEIQKKESTTRLQELEQENKLFKDDMEKLGLAIKESDAMSTQDQHVLFGKFAQIIQEKEVEIDQLNEQVTKLQQQLKITTDNKVIEEKNELIRDLETQIECLMSDQECVKRNREEEIEQLNEVIEKLQQELANIGQKTSMNAHSLSEEADSLKHQLDVVIAEKLALEQQVETANEEMTFMKNVLKETNFKMNQLTQELFSLKRERESVEKIQSIPENSVNVAIDHLSKDKPELEVVLTEDALKSLENQTYFKSFEENGKGSIINLETRLLQLESTVSAKDLELTQCYKQIKDMQEQGQFETEMLQKKIVNLQKIVEEKVAAALVSQIQLEAVQEYAKFCQDNQTISSEPERTNIQNLNQLREDELGSDISALTLRISELESQVVEMHTSLILEKEQVEIAEKNVLEKEKKLLELQKLLEGNEKKQREKEKKRSPQDVEVLKTTTELFHSNEESGFFNELEALRAESVATKAELASYKEKAEKLQEELLVKETNMTSLQKDLSQVRDHLAEAKEKLSILEKEDETEVQESKKACMFEPLPIKLSKSIASQTDGTLKISSSNQTPQILVKNAGIQINLQSECSSEEVTEIISQFTEKIEKMQELHAAEILDMESRHISETETLKREHYVAVQLLKEECGTLKAVIQCLRSKEGLLRAVHNEGMQVLSLTESPYSDGEDHSIQQVSEPWLEERKAYINTISSLKDLITKMQLQREAEVYDSSQSHESFSDWRGELLLALQQVFLEERSVLLAAFRTELTALGTTDAVGLLNCLEQRIQEQGVEYQAAMECLQKADRRSLLSEIQALHAQMNGRKITLKREQESEKPSQELLEYNIQQKQSQMLEMQVELSSMKDRATELQEQLSSEKMVVAELKSELAQTKLELETTLKAQHKHLKELEAFRLEVKDKTDEVHLLNDTLASEQKKSRELQWALEKEKAKLGRSEERDKEELEDLKFSLESQKQRNLQLNLLLEQQKQLLNESQQKIESQRMLYDAQLSEEQGRNLELQVLLESEKVRIREMSSTLDRERELHAQLQSSDGTGQSRPPLPSEDLLKELQKQLEEKHSRIVELLNETEKYKLDSLQTRQQMEKDRQVHRKTLQTEQEANTEGQKKMHELQSKVEDLQRQLEEKRQQVYKLDLEGQRLQGIMQEFQKQELEREEKRESRRILYQNLNEPTTWSLTSDRTRNWVLQQKIEGETKESNYAKLIEMNGGGTGCNHELEMIRQKLQCVASKLQVLPQKASERLQFETADDEDFIWVQENIDEIILQLQKLTGQQGEEPSLVSPSTSCGSLTERLLRQNAELTGHISQLTEEKNDLRNMVMKLEEQIRWYRQTGAGRDNSSRFSLNGGANIEAIIASEKEVWNREKLTLQKSLKRAEAEVYKLKAELRNDSLLQTLSPDSEHVTLKRIYGKYLRAESFRKALIYQKKYLLLLLGGFQECEDATLALLARMGGQPAFTDLEVITNRPKGFTRFRSAVRVSIAISRMKFLVRRWHRVTGSVSININRDGFGLNQGAEKTDSFYHSSGGLELYGEPRHTTYRSRSDLDYIRSPLPFQNRYPGTPADFNPGSLACSQLQNYDPDRALTDYITRLEALQRRLGTIQSGSTTQFHAGMRR

SEQ ID NO: 35865 - protein, 3911 aa, Homo sapiens
MEDEERQKKLEAGKAKIEELSLAFLVRQLAQFRQRKAQSDGQSPSKKQKKKRKTSSSKHDVSAHHDLNIDQSQCNEMYINSSQRVESTVIPESTIMRTLHSGEITSHEQGFSVELESEISTTADDCSSEVNGCSFVMRTGKPTNLLREEEFGVDDSYSEQGAQDSPTHLEMMESELAGKQHEIEELNRELEEMRVTYGTEGLQQLQEFEAAIKQRDGIITQLTANLQQARREKDETMREFLELTEQSQKLQIQFQQLQASETLRNSTHSSTAADLLQAKQQILTHQQQLEEQDHLLEDYQKKKEDFTMQISFLQEKIKVYEMEQDKKVENSNKEEIQEKETIIEELNTKIIEEEKKTLELKDKLTTADKLLGELQEQIVQKNQEIKNMKLELTNSKQKERQSSEEIKQLMGTVEELQKRNHKDSQFETDIVQRMEQETQRKLEQLRAELDEMYGQQIVQMKQELIRQHMAQMEEMKTRHKGEMENALRSYSNITVNEDQIKLMNVAINELNIKLQDTNSQKEKLKEELGLILEEKCALQRQLEDLVEELSFSREQIQRARQTIAEQESKLNEAHKSLSTVEDLKAEIVSASESRKELELKHEAEVTNYKIKLEMLEKEKNAVLDRMAESQEAELERLRTQLLFSHEEELSKLKEDLEIEHRINIEKLKDNLGIHYKQQIDGLQNEMSQKIETMQFEKDNLITKQNQLILEISKLKDLQQSLVNSKSEEMTLQINELQKEIEILRQEEKEKGTLEQEVQELQLKTELLEKQMKEKENDLQEKFAQLEAENSILKDEKKTLEDMLKIHTPVSQEERLIFLDSIKSKSKDSVWEKEIEILIEENEDLKQQCIQLNEEIEKQRNTFSFAEKNFEVNYQELQEEYACLLKVKDDLEDSKNKQELEYKSKLKALNEELHLQRINPTTVKMKSSVFDEDKTFVAETLEMGEVVEKDTTELMEKLEVTKREKLELSQRLSDLSEQLKQKHGEISFLNEEVKSLKQEKEQVSLRCRELEIIINHNRAENVQSCDTQVSSLLDGVVTMTSRGAEGSVSKVNKSFGEESKIMVEDKVSFENMTVGEESKQEQLILDHLPSVTKESSLRATQPSENDKLQKELNVLKSEQNDLRLQMEAQRICLSLVYSTHVDQVREYMENEKDKALCSLKEELIFAQEEKIKELQKIHQLELQTMKTQETGDEGKPLHLLIGKLQKAVSEECSYFLQTLCSVLGEYYTPALKCEVNAEDKENSGDYISENEDPELQDYRYEVQDFQENMHTLLNKVTEEYNKLLVLQTRLSKIWGQQTDGMKLEFGEENLPKEETEFLSIHSQMTNLEDIDVNHKSKLSSLQDLEKTKLEEQVQELESLISSLQQQLKETEQNYEAEIHCLQKRLQAVSESTVPPSLPVDSVVITESDAQRTMYPGSCVKKNIDGTIEFSGEFGVKEETNIVKLLEKQYQEQLEEEVAKVIVSMSIAFAQQTELSRISGGKENTASSKQAHAVCQQEQHYFNEMKLSQDQIGFQTFETVDVKFKEEFKPLSKELGEHGKEILLSNSDPHDIPESKDCVLTISEEMFSKDKTFIVRQSIHDEISVSSMDASRQLMLNEEQLEDMRQELVRQYQEHQQATELLRQAHMRQMERQREDQEQLQEEIKRLNRQLAQRSSIDNENLVSERERVLLEELEALKQLSLAGREKLCCELRNSSTQTQNGNENQGEVEEQTFKEKELDRKPEDVPPEILSNERYALQKANNRLLKILLEVVKTTAAVEETIGRHVLGILDRSSKSQSSASLIWRSEAEASVKSCVHEEHTRVTDESIPSYSGSDMPRNDINMWSKVTEEGTELSQRLVRSGFAGTEIDPENEELMLNISSRLQAAVEKLLEAISETSSQLEHAKVTQTELMRESFRQKQEATESLKCQEELRERLHEESRAREQLAVELSKAEGVIDGYADEKTLFERQIQEKTDIIDRLEQELLCASNRLQELEAEQQQIQEERELLSRQKEAMKAEAGPVEQQLLQETEKLMKEKLEVQCQAEKVRDDLQKQVKALEIDVEEQVSRFIELEQEKNTELMDLRQQNQALEKQLEKMRKFLDEQAIDREHERDVFQQEIQKLEQQLKVVPRFQPISEHQTREVEQLANHLKEKTDKCSELLLSKEQLQRDIQERNEEIEKLEFRVRELEQALLVSADTFQKVEDRKHFGAVEAKPELSLEVQLQAERDAIDRKEKEITNLEEQLEQFREELENKNEEVQQLHMQLEIQKKESTTRLQELEQENKLFKDDMEKLGLAIKESDAMSTQDQHVLFGKFAQIIQEKEVEIDQLNEQVTKLQQQLKITTDNKVIEEKNELIRDLETQIECLMSDQECVKRNREEEIEQLNEVIEKLQQELANIGQKTSMNAHSLSEEADSLKHQLDVVIAEKLALEQQVETANEEMTFMKNVLKETNFKMNQLTQELFSLKRERESVEKIQSIPENSVNVAIDHLSKDKPELEVVLTEDALKSLENQTYFKSFEENGKGSIINLETRLLQLESTVSAKDLELTQCYKQIKDMQEQGQFETEMLQKKIVNLQKIVEEKVAAALVSQIQLEAVQEYAKFCQDNQTISSEPERTNIQNLNQLREDELGSDISALTLRISELESQVVEMHTSLILEKEQVEIAEKNVLEKEKKLLELQKLLEGNEKKQREKEKKRSPQDVEVLKTTTELFHSNEESGFFNELEALRAESVATKAELASYKEKAEKLQEELLVKETNMTSLQKDLSQVRDHLAEAKEKLSILEKEDETEVQESKKACMFEPLPIKLSKSIASQTDGTLKISSSNQTPQILVKNAGIQINLQSECSSEEVTEIISQFTEKIEKMQELHAAEILDMESRHISETETLKREHYVAVQLLKEECGTLKAVIQCLRSKEVFGFYNMCFSTLCDSGSDWGQGIYLTHSQGFDIASEGRGEESESATDSFPKKIKGLLRAVHNEGMQVLSLTESPYSDGEDHSIQQVSEPWLEERKAYINTISSLKDLITKMQLQREAEVYDSSQSHESFSDWRGELLLALQQVFLEERSVLLAAFRTELTALGTTDAVGLLNCLEQRIQEQGVEYQAAMECLQKADRRSLLSEIQALHAQMNGRKITLKREQESEKPSQELLEYNIQQKQSQMLEMQVELSSMKDRATELQEQLSSEKMVVAELKSELAQTKLELETTLKAQHKHLKELEAFRLEVKDKTDEVHLLNDTLASEQKKSRELQWALEKEKAKLGRSEERDKEELEDLKFSLESQKQRNLQLNLLLEQQKQLLNESQQKIESQRMLYDAQLSEEQGRNLELQVLLESEKVRIREMSSTLDRERELHAQLQSSDGTGQSRPPLPSEDLLKELQKQLEEKHSRIVELLNETEKYKLDSLQTRQQMEKDRQVHRKTLQTEQEANTEGQKKMHELQSKVEDLQRQLEEKRQQVYKLDLEGQRLQGIMQEFQKQELEREEKRESRRILYQNLNEPTTWSLTSDRTRNWVLQQKIEGETKESNYAKLIEMNGGGTGCNHELEMIRQKLQCVASKLQVLPQKASERLQFETADDEDFIWVQENIDEIILQLQKLTGQQGEEPSLVSPSTSCGSLTERLLRQNAELTGHISQLTEEKNDLRNMVMKLEEQIRWYRQTGAGRDNSSRFSLNGGANIEAIIASEKEVWNREKLTLQKSLKRAEAEVYKLKAELRNDSLLQTLSPDSEHVTLKRIYGKYLRAESFRKALIYQKKYLLLLLGGFQECEDATLALLARMGGQPAFTDLEVITNRPKGFTRFRSAVRVSIAISRMKFLVRRWHRVTGSVSININRDGFGLNQGAEKTDSFYHSSGGLELYGEPRHTTYRSRSDLDYIRSPLPFQNRYPGTPADFNPGSLACSQLQNYDPDRALTDYITRLEALQRRLGTIQSGSTTQFHAGMRR

SEQ ID NO: 35866 - protein, 1643 aa, Homo sapiens
MEDEERQKKLEAGKAKIEELSLAFLVRQLAQFRQRKAQSDGQSPSKKQKKKRKTSSSKHDVSAHHDLNIDQSQCNEMYINSSQRVESTVIPESTIMRTLHSGEITSHEQGFSVELESEISTTADDCSSEVNGCSFVMRTGKPTNLLREEEFGVDDSYSEQGAQDSPTHLEMMESELAGKQHEIEELNRELEEMRVTYGTEGLQQLQEFEAAIKQRDGIITQLTANLQQARREKDETMREFLELTEQSQKLQIQFQQLQASETLRNSTHSSTAADLLQAKQQILTHQQQLEEQDHLLEDYQKKKEDFTMQISFLQEKIKVYEMEQDKKVENSNKEEIQEKETIIEELNTKIIEEEKKTLELKDKLTTADKLLGELQEQIVQKNQEIKNMKLELTNSKQKERQSSEEIKQLMGTVEELQKRNHKDSQFETDIVQRMEQETQRKLEQLRAELDEMYGQQIVQMKQELIRQHMAQMEEMKTRHKGEMENALRSYSNITVNEDQIKLMNVAINELNIKLQDTNSQKEKLKEELGLILEEKCALQRQLEDLVEELSFSREQIQRARQTIAEQESKLNEAHKSLSTVEDLKAEIVSASESRKELELKHEAEVTNYKIKLEMLEKEKNAVLDRMAESQEAELERLRTQLLFSHEEELSKLKEDLEIEHRINIEKLKDNLGIHYKQQIDGLQNEMSQKIETMQFEKDNLITKQNQLILEISKLKDLQQSLVNSKSEEMTLQINELQKEIEILRQEEKEKGTLEQEVQELQLKTELLEKQMKEKENDLQEKFAQLEAENSILKDEKKTLEDMLKIHTPVSQEERLIFLDSIKSKSKDSVWEKEIEILIEENEDLKQQCIQLNEEIEKQRNTFSFAEKNFEVNYQELQEEYACLLKVKDDLEDSKNKQELEYKSKLKALNEELHLQRINPTTVKMKSSVFDEDKTFVAETLEMGEVVEKDTTELMEKLEVTKREKLELSQRLSDLSEQLKQKHGEISFLNEEVKSLKQEKEQVSLRCRELEIIINHNRAENVQSCDTQVSSLLDGVVTMTSRGAEGSVSKVNKSFGEESKIMVEDKVSFENMTVGEESKQEQLILDHLPSVTKESSLRATQPSENDKLQKELNVLKSEQNDLRLQMEAQRICLSLVYSTHVDQVREYMENEKDKALCSLKEELIFAQEEKIKELQKIHQLELQTMKTQETGDEGKPLHLLIGKLQKAVSEECSYFLQTLCSVLGEYYTPALKCEVNAEDKENSGDYISENEDPELQDYRYEVQDFQENMHTLLNKVTEEYNKLLVLQTRLSKIWGQQTDGMKLEFGEENLPKEETEFLSIHSQMTNLEDIDVNHKSKLSSLQDLEKTKLEEQVQELESLISSLQQQLKETEQNYEAEIHCLQKRLQAVSESTVPPSLPVDSVVITESDAQRTMYPGSCVKKNIDGTIEFSGEFGVKEETNIVKLLEKQYQEQLEEEVAKVIVSMSIAFAQQTELSRISGGKENTASSKQAHAVCQQEQHYFNEMKLSQDQIGFQTFETVDVKFKEEFKPLSKELGEHGKEILLSNSDPHDIPESKDCVLTISEEMFSKDKTFIVRQSIHDEISVSSMDASRQLMLNEEQLEDMRQELVRQYQEHQQATELLRQAHMRQMERQREDQEQLQVRVL

SEQ ID NO: 35867 - protein, 3876 aa, Homo sapiens
MEDEERQKKLEAGKAKIEELSLAFLVRQLAQFRQRKAQSDGQSPSKKQKKKRKTSSSKHDVSAHHDLNIDQSQCNEMYINSSQRVESTVIPESTIMRTLHSGEITSHEQGFSVELESEISTTADDCSSEVNGCSFVMRTGKPTNLLREEEFGVDDSYSEQGAQDSPTHLEMMESELAGKQHEIEELNRELEEMRVTYGTEGLQQLQEFEAAIKQRDGIITQLTANLQQARREKDETMREFLELTEQSQKLQIQFQQLQASETLRNSTHSSTAADLLQAKQQILTHQQQLEEQDHLLEDYQKKKEDFTMQISFLQEKIKVYEMEQDKKVENSNKEEIQEKETIIEELNTKIIEEEKKTLELKDKLTTADKLLGELQEQIVQKNQEIKNMKLELTNSKQKERQSSEEIKQLMGTVEELQKRNHKDSQFETDIVQRMEQETQRKLEQLRAELDEMYGQQIVQMKQELIRQHMAQMEEMKTRHKGEMENALRSYSNITVNEDQIKLMNVAINELNIKLQDTNSQKEKLKEELGLILEEKCALQRQLEDLVEELSFSREQIQRARQTIAEQESKLNEAHKSLSTVEDLKAEIVSASESRKELELKHEAEVTNYKIKLEMLEKEKNAVLDRMAESQEAELERLRTQLLFSHEEELSKLKEDLEIEHRINIEKLKDNLGIHYKQQIDGLQNEMSQKIETMQFEKDNLITKQNQLILEISKLKDLQQSLVNSKSEEMTLQINELQKEIEILRQEEKEKGTLEQEVQELQLKTELLEKQMKEKENDLQEKFAQLEAENSILKDEKKTLEDMLKIHTPVSQEERLIFLDSIKSKSKDSVWEKEIEILIEENEDLKQQCIQLNEEIEKQRNTFSFAEKNFEVNYQELQEEYACLLKVKDDLEDSKNKQELEYKSKLKALNEELHLQRINPTTVKMKSSVFDEDKTFVAETLEMGEVVEKDTTELMEKLEVTKREKLELSQRLSDLSEQLKQKHGEISFLNEEVKSLKQEKEQVSLRCRELEIIINHNRAENVQSCDTQVSSLLDGVVTMTSRGAEGSVSKVNKSFGEESKIMVEDKVSFENMTVGEESKQEQLILDHLPSVTKESSLRATQPSENDKLQKELNVLKSEQNDLRLQMEAQRICLSLVYSTHVDQVREYMENEKDKALCSLKEELIFAQEEKIKELQKIHQLELQTMKTQETGDEGKPLHLLIGKLQKAVSEECSYFLQTLCSVLGEYYTPALKCEVNAEDKENSGDYISENEDPELQDYRYEVQDFQENMHTLLNKVTEEYNKLLVLQTRLSKIWGQQTDGMKLEFGEENLPKEETEFLSIHSQMTNLEDIDVNHKSKLSSLQDLEKTKLEEQVQELESLISSLQQQLKETEQNYEAEIHCLQKRLQAVSESTVPPSLPVDSVVITESDAQRTMYPGSCVKKNIDGTIEFSGEFGVKEETNIVKLLEKQYQEQLEEEVAKVIVSMSIAFAQQTELSRISGGKENTASSKQAHAVCQQEQHYFNEMKLSQDQIGFQTFETVDVKFKEEFKPLSKELGEHGKEILLSNSDPHDIPESKDCVLTISEEMFSKDKTFIVRQSIHDEISVSSMDASRQLMLNEEQLEDMRQELVRQYQEHQQATELLRQAHMRQMERQREDQEQLQEEIKRLNRQLAQRSSIDNENLVSERERVLLEELEALKQLSLAGREKLCCELRNSSTQTQNGNENQGEVEEQTFKEKELDRKPEDVPPEILSNERYALQKANNRLLKILLEVVKTTAAVEETIGRHVLGILDRSSKSQSSASLIWRSEAEASVKSCVHEEHTRVTDESIPSYSGSDMPRNDINMWSKVTEEGTELSQRLVRSGFAGTEIDPENEELMLNISSRLQAAVEKLLEAISETSSQLEHAKVTQTELMRESFRQKQEATESLKCQEELRERLHEESRAREQLAVELSKAEGVIDGYADEKTLFERQIQEKTDIIDRLEQELLCASNRLQELEAEQQQIQEERELLSRQKEAMKAEAGPVEQQLLQETEKLMKEKLEVQCQAEKVRDDLQKQVKALEIDVEEQVSRFIELEQEKNTELMDLRQQNQALEKQLEKMRKFLDEQAIDREHERDVFQQEIQKLEQQLKVVPRFQPISEHQTREVEQLANHLKEKTDKCSELLLSKEQLQRDIQERNEEIEKLEFRVRELEQALLVEDRKHFGAVEAKPELSLEVQLQAERDAIDRKEKEITNLEEQLEQFREELENKNEEVQQLHMQLEIQKKESTTRLQELEQENKLFKDDMEKLGLAIKESDAMSTQDQHVLFGKFAQIIQEKEVEIDQLNEQVTKLQQQLKITTDNKVIEEKNELIRDLETQIECLMSDQECVKRNREEEIEQLNEVIEKLQQELANIGQKTSMNAHSLSEEADSLKHQLDVVIAEKLALEQQVETANEEMTFMKNVLKETNFKMNQLTQELFSLKRERESVEKIQSIPENSVNVAIDHLSKDKPELEVVLTEDALKSLENQTYFKSFEENGKGSIINLETRLLQLESTVSAKDLELTQCYKQIKDMQEQGQFETEMLQKKIVNLQKIVEEKVAAALVSQIQLEAVQEYAKFCQDNQTISSEPERTNIQNLNQLREDELGSDISALTLRISELESQVVEMHTSLILEKEQVEIAEKNVLEKEKKLLELQKLLEGNEKKQREKEKKRSPQDVEVLKTTTELFHSNEESGFFNELEALRAESVATKAELASYKEKAEKLQEELLVKETNMTSLQKDLSQVRDHLAEAKEKLSILEKEDETEVQESKKACMFEPLPIKLSKSIASQTDGTLKISSSNQTPQILVKNAGIQINLQSECSSEEVTEIISQFTEKIEKMQELHAAEILDMESRHISETETLKREHYVAVQLLKEECGTLKAVIQCLRSKEGSSIPELAHSDAYQTREICSSDSGSDWGQGIYLTHSQGFDIASEGRGEESESATDSFPKKIKGLLRAVHNEGMQVLSLTESPYSDGEDHSIQQVSEPWLEERKAYINTISSLKDLITKMQLQREAEVYDSSQSHESFSDWRGELLLALQQVFLEERSVLLAAFRTELTALGTTDAVGLLNCLEQRIQEQGVEYQAAMECLQKADRRSLLSEIQALHAQMNGRKITLKREQESEKPSQELLEYNIQQKQSQMLEMQVELSSMKDRATELQEQLSSEKMVVAELKSELAQTKLELETTLKAQHKHLKELEAFRLEVKDKTDEVHLLNDTLASEQKKSRELQWALEKEKAKLGRSEERDKEELEDLKFSLESQKQRNLQLNLLLEQQKQLLNESQQKIESQRMLYDAQLSEEQGRNLELQVLLESEKVRIREMSSTLDRERELHAQLQSSDGTGQSRPPLPSEDLLKELQKQLEEKHSRIVELLNETEKYKLDSLQTRQQMEKDRQVHRKTLQTEQEANTEGQKKMHELQSKVEDLQRQLEEKRQQVYKLDLEGQRLQGIMQEFQKQELEREEKRESRRILYQNLNEPTTWSLTSDRTRNWVLQQKIEGETKESNYAKLIEMNGGGTGCNHELEMIRQKLQCVASKLQVLPQKASERLQFETADDEDFIWVQENIDEIILQLQKLTGQQGEEPSLVSPSTSCGSLTERLLRQNAELTGHISQLTEEKNDLRNMVMKLEEQIRWYRQTGAGRDNSSRFSLNGGANIEAIIASEKEVWNREKLTLQKSLKRAEAEVYKLKAELRNDSLLQTLSPDSEHVTLKRIYGKYLRAESFRKALIYQKKYLLLLLGGFQECEDATLALLARMGGQPAFTDLEVITNRPKGFTRFRSAVRVSIAISRMKFLVRRWHRVTGSVSININRDGFGLNQGAEKTDSFYHSSGGLELYGEPRHTTYRSRSDLDYIRSPLPFQNRYPGTPADFNPGSLACSQLQNYDP

SEQ ID NO: 35868 - protein, 593 aa, Homo sapiens
MAIQFRSLFPLALPGMLALLGWWWFFSRKKGHVSSHDEQQVEAGAVQLRADPAIKEPLPVEDVCPKVVSTPPSVTEPPEKELSTVSKLPAEPPALLQTHPPCRRSESSGILPNTTDMRLRPGTRRDDSTKLELALTGGEAKSIPLECPLSSPKGVLFSSKSAEVCKQDSPFSRVPRKVQPGYPVVPAEKRSSGERARETGGAEGTGDAVLGEKVLEEALLSREHVLELENSKGPSLASLEGEEDKGKSSSSQVVGPVQEEEYVAEKLPSRFIESAHTELAKDDAAPAPPVADAKAQDRGVEGELGNEESLDRNEEGLDRNEEGLDRNEESLDRNEEGLDRNEEIKRAAFQIISQVISEATEQVLATTVGKVAGRVCQASQLQGQKEESCVPVHQKTVLGPDTAEPATAEAAVAPPDAGLPLPGLPAEGSPPPKTYVSCLKSLLSSPTKDSKPNISAHHISLASCLALTTPSEELPDRAGILVEDATCVTCMSDSSQSVPLVASPGHCSDSFSTSGLEDSCTETSSSPRDKAITPPLPESTVPFSNGVLKGELSDLGAEDGWTMDAEADHSGVAAPPPGKRGTLITRCPGFFEC

SEQ ID NO: 35869 - protein, 903 aa, Homo sapiens
MAIQFRSLFPLALPGMLALLGWWWFFSRKKGHVSSHDEQQVEAGAVQLRADPAIKEPLPVEDVCPKVVSTPPSVTEPPEKELSTVSKLPAEPPALLQTHPPCRRSESSGILPNTTDMRLRPGTRRDDSTKLELALTGGEAKSIPLECPLSSPKGVLFSSKSAEVCKQDSPFSRVPRKVQPGYPVVPAEKRSSGERARETGGAEGTGDAVLGEKVLEEALLSREHVLELENSKGPSLASLEGEEDKGKSSSSQVVGPVQEEEYVAEKLPSRFIESAHTELAKDDAAPAPPVADAKAQDRGVEGELGNEESLDRNEEGLDRNEEGLDRNEESLDRNEEGLDRNEEIKRAAFQIISQVISEATEQVLATTVGKVAGRVCQASQLQGQKEESCVPVHQKTVLGPDTAEPATAEAAVAPPDAGLPLPGLPAEGSPPPKTYVSCLKSLLSSPTKDSKPNISAHHISLASCLALTTPSEELPDRAGILVEDATCVTCMSDSSQSVPLVASPGHCSDSFSTSGLEDSCTETSSSPRDKAITPPLPESTVPFSNGVLKGELSDLGAEDGWTMDAEADHSGGSDRNSMDSVDSCCSLKKTESFQNAQAGSNPKKVDLIIWEIEVPKHLVGRLIGKQGRYVSFLKQTSGAKIYISTLPYTQSVQICHIEGSQHHVDKALNLIGKKFKELNLTNIYAPPLPSLALPSLPMTSWLMLPDGITVEVIVVNQVNAGHLFVQQHTHPTFHALRSLDQQMYLCYSQPGIPTLPTPVEITVICAAPGADGAWWRAQVVASYEETNEVEIRYVDYGGYKRVKVDVLRQIRSDFVTLPFQGAEVLLDSVMPLSDDDQFSPEADAAMSEMTGNTALLAQVTSYSPTGLPLIQLWSVVGDEVVLINRSLVERGLAQWVDSYYTSL

SEQ ID NO: 35870 - protein, 945 aa, Homo sapiens
MGALGVSGSSSPGGCPGWRRLPAAVNTNPVDFAPGVITQASRMAIQFRSLFPLALPGMLALLGWWWFFSRKKGHVSSHDEQQVEAGAVQLRADPAIKEPLPVEDVCPKVVSTPPSVTEPPEKELSTVSKLPAEPPALLQTHPPCRRSESSGILPNTTDMRLRPGTRRDDSTKLELALTGGEAKSIPLECPLSSPKGVLFSSKSAEVCKQDSPFSRVPRKVQPGYPVVPAEKRSSGERARETGGAEGTGDAVLGEKVLEEALLSREHVLELENSKGPSLASLEGEEDKGKSSSSQVVGPVQEEEYVAEKLPSRFIESAHTELAKDDAAPAPPVADAKAQDRGVEGELGNEESLDRNEEGLDRNEEGLDRNEESLDRNEEGLDRNEEIKRAAFQIISQVISEATEQVLATTVGKVAGRVCQASQLQGQKEESCVPVHQKTVLGPDTAEPATAEAAVAPPDAGLPLPGLPAEGSPPPKTYVSCLKSLLSSPTKDSKPNISAHHISLASCLALTTPSEELPDRAGILVEDATCVTCMSDSSQSVPLVASPGHCSDSFSTSGLEDSCTETSSSPRDKAITPPLPESTVPFSNGVLKGELSDLGAEDGWTMDAEADHSGGSDRNSMDSVDSCCSLKKTESFQNAQAGSNPKKVDLIIWEIEVPKHLVGRLIGKQGRYVSFLKQTSGAKIYISTLPYTQSVQICHIEGSQHHVDKALNLIGKKFKELNLTNIYAPPLPSLALPSLPMTSWLMLPDGITVEVIVVNQVNAGHLFVQQHTHPTFHALRSLDQQMYLCYSQPGIPTLPTPVEITVICAAPGADGAWWRAQVVASYEETNEVEIRYVDYGGYKRVKVDVLRQIRSDFVTLPFQGAEVLLDSVMPLSDDDQFSPEADAAMSEMTGNTALLAQVTSYSPTGLPLIQLWSVVGDEVVLINRSLVERGLAQWVDSYYTSL

SEQ ID NO: 35871 - protein, 903 aa, Homo sapiens; identical to SEQ ID NO: 35869

SEQ ID NO: 35872 - protein, 662 aa, Homo sapiens
MRGAGPSPRQSPRTLRPDPGPAMSFFRRKVKGKEQEKTSDVKSIKASISVHSPQKSTKNHALLEAAGPSHVAINAISANMDSFSSSRTATLKKQPSHMEAAHFGDLGRSCLDYQTQETKSSLSKTLEQVLHDTIVLPYFIQFMELRRMEHLVKFWLEAESFHSTTWSRIRAHSLNTVKQSSLAEPVSPSKKHETTASFLTDSLDKRLEDSGSAQLFMTHSEGIDLNNRTNSTQNHLLLSQECDSAHSLRLEMARAGTHQVSMETQESSSTLTVASRNSPASPLKELSGKLMKSIEQDAVNTFTKYISPDAAKPIPITEAMRNDIIARICGEDGQVDPNCFVLAQSIVFSAMEQEHFSEFLRSHHFCKYQIEVLTSGTVYLADILFCESALFYFSEYMEKEDAVNILQFWLAADNFQSQLAAKKGQYDGQEAQNDAMILYDKYFSLQATHPLGFDDVVRLEIESNICREGGPLPNCFTTPLRQAWTTMEKVFLPGFLSSNLYYKYLNDLIHSVRGDEFLGGNVSLTAPGSVGPPDESHPGSSDSSASQSSVKKASIKILKNFDEAIIVDAASLDPESLYQRTYAGKMTFGRVSDLGQFIRESEPEPDVRKSKGSMFSQAMKKWVQGNTDEAQEELAWKIAKMIVSDIMQQAQYDQPLEKSTKL

SEQ ID NO: 35873 - protein, 604 aa, Homo sapiens
MRGAGPSPRQSPRTLRPDPGPAMSFFRRKVKGKEQEKTSDVKSIKASISVHSPQKSTKNHALLEAAGPSHVAINAISANMDSFSSSRTATLKKQPSHMEAAHFGDLGRSCLDYQTQETKSSLSKTLEQVLHDTIVLPYFIQFMELRRMEHLVKFWLEAESFHSTTWSRIRAHSLNTVKQSSLAEPVSPSKKHETTASFLTDSLDKRLEDSGSAQLFMTHSEGIDLNNRTNSTQNHLLLSQECDSAHSLRLEMARAGTHQVSMETQESSSTLTVASRNSPASPLKELSGKLMKSIEQDAVNTFTKYISPDAAKPIPITEAMRNDIIARICGEDGQVDPNCFVLAQSIVFSAMEQEHFSEFLRSHHFCKYQIEVLTSGTVYLADILFCESALFYFSEYMEKEDAVNILQFWLAADNFQSQLAAKKGQYDGQEAQNDAMILYDKYFSLQATHPLGFDDVVRLEIESNICREGGPLPNCFTTPLRQAWTTMEKSSVKKASIKILKNFDEAIIVDAASLDPESLYQRTYAGKMTFGRVSDLGQFIRESEPEPDVRKSKGSMFSQAMKKWVQGNTDEAQEELAWKIAKMIVSDIMQQAQYDQPLEKSTKV

SEQ ID NO: 35874 - protein, 2817 aa, Homo sapiens
MKLNPQQAPLYGDCVVTVLLAEEDKAEDDVVFYLVFLGSTLRHCTSTRKVSSDTLETIAPGHDCCETVKVQLCASKEGLPVFVVAEEDFHFVQDEAYDAAQFLATSAGNQQALNFTRFLDQSGPPSGDVNSLDKKLVLAFRHLKLPTEWNVLGTDQSLHDAGPRETLMHFAVRLGLLRLTWFLLQKPGGRGALSIHNQEGATPVSLALERGYHKLHQLLTEENAGEPDSWSSLSYEIPYGDCSVRHHRELDIYTLTSESDSHHEHPFPGDGCTGPIFKLMNIQQQLMKTNLKQMDSLMPLMMTAQDPSSAPETDGQFLPCAPEPTDPQRLSSSEETESTQCCPGSPVAQTESPCDLSSIVEEENTDRSCRKKNKGVERKGEEVEPAPIVDSGTVSDQDSCLQSLPDCGVKGTEGLSSCGNRNEETGTKSSGMPTDQESLSSGDAVLQRDLVMEPGTAQYSSGGELGGISTTNVSTPDTAGEMEHGLMNPDATVWKNVLQGGESTKERFENSNIGTAGASDVHVTSKPVDKISVPNCAPAASSLDGNKPAESSLAFSNEETSTEKTAETETSRSREESADAPVDQNSVVIPAAAKDKISDGLEPYTLLAAGIGEAMSPSDLALLGLEEDVMPHQNSETNSSHAQSQKGKSSPICSTTGDDKLCADSACQQNTVTSSGDLVAKLCDNIVSESESTTARQPSSQDPPDASHCEDPQAHTVTSDPVRDTQERADFCPFKVVDNKGQRKDVKLDKPLTNMLEVVSHPHPVVPKMEKELVPDQAVISDSTFSLANSPGSESVTKDDALSFVPSQKEKGTATPELHTATDYRDGPDGNSNEPDTRPLEDRAVGLSTSSTAAELQHGMGNTSLTGLGGEHEGPAPPAIPEALNIKGNTDSSLQSVGKATLALDSVLTEEGKLLVVSESSAAQEQDKDKAVTCSSIKENALSSGTLQEEQRTPPPGQDTQQFHEKSISADCAKDKALQLSNSPGASSAFLKAETEHNKEVAPQVSLLTQGGAAQSLVPPGASLATESRQEALGAEHNSSALLPCLLPDGSDGSDALNCSQPSPLDVGVKNTQSQGKTSACEVSGDVTVDVTGVNALQGMAEPRRENISHNTQDILIPNVLLSQEKNAVLGLPVALQDKAVTDPQGVGTPEMIPLDWEKGKLEGADHSCTMGDAEEAQIDDEAHPVLLQPVAKELPTDMELSAHDDGAPAGVREVMRAPPSGRERSTPSLPCMVSAQDAPLPKGADLIEEAASRIVDAVIEQVKAAGALLTEGEACHMSLSSPELGPLTKGLESAFTEKVSTFPPGESLPMGSTPEEATGSLAGCFAGREEPEKIILPVQGPEPAAEMPDVKAEDEVDFRASSISEEVAVGSIAATLKMKQGPMTQAINRENWCTIEPCPDAASLLASKQSPECENFLDVGLGRECTSKQGVLKRESGSDSDLFHSPSDDMDSIIFPKPEEEHLACDITGSSSSTDDTASLDRHSSHGSDVSLSQILKPNRSRDRQSLDGFYSHGMGAEGRESESEPADPGDVEEEEMDSITEVPANCSVLRSSMRSLSPFRRHSWGPGKNAASDAEMNHRSMSWCPSGVQYSAGLSADFNYRSFSLEGLTGGAGVGNKPSSSLEVSSANAEELRHPFSGEERVDSLVSLSEEDLESDQREHRMFDQQICHRSKQQGFNYCTSAISSPLTKSISLMTISHPGLDNSRPFHSTFHNTSANLTESITEENYNFLPHSPSKKDSEWKSGTKVSRTFSYIKNKMSSSKKSKEKEKEKDKIKEKEKDSKDKEKDKKTVNGHTFSSIPVVGPISCSQCMKPFTNKDAYTCANCSAFVHKGCRESLASCAKVKMKQPKGSLQAHDTSSLPTVIMRNKPSQPKERPRSAVLLVDETATTPIFANRRSQQSVSLSKSVSIQNITGVGNDENMSNTWKFLSHSTDSLNKISKVNESTESLTDEGVGTDMNEGQLLGDFEIESKQLEAESWSRIIDSKFLKQQKKDVVKRQEVIYELMQTEFHHVRTLKIMSGVYSQGMMADLLFEQQMVEKLFPCLDELISIHSQFFQRILERKKESLVDKSEKNFLIKRIGDVLVNQFSGENAERLKKTYGKFCGQHNQSVNYFKDLYAKDKRFQAFVKKKMSSSVVRRLGIPECILLVTQRITKYPVLFQRILQCTKDNEVEQEDLAQSLSLVKDVIGAVDSKVASYEKKVRLNEIYTKTDSKSIMRMKSGQMFAKEDLKRKKLVRDGSVFLKNAAGRLKEVQAVLLTDILVFLQEKDQKYIFASLDQKSTVISLKKLIVREVAHEEKGLFLISMGMTDPEMVEVHASSKEERNSWIQIIQDTINTLNRDEDEGIPSENEEEKKMLDTRARELKEQLHQKDQKILLLLEEKEMIFRDMAECSTPLPEDCSPTHSPRVLFRSNTEEALKGGPLMKSAINEVEILQGLVSGNLGGTLGPTVSSPIEQDVVGPVSLPRRAETFGGFDSHQMNASKGGEKEEGDDGQDLRRTESDSGLKKGGNANLVFMLKRNSEQVVQSVVHLYELLSALQGVVLQQDSYIEDQKLVLSERALTRSLSRPSSLIEQEKQRSLEKQRQDLANLQKQQAQYLEEKRRREREWEARERELREREALLAQREEEVQQGQQDLEKEREELQQKKGTYQYDLERLRAAQKQLEREQEQLRREAERLSQRQTERDLCQVSHPHTKLMRIPSFFPSPEEPPSPSAPSIAKSGSLDSELSVSPKRNSISRTHKDKGPFHILSSTSQTNKGPEGQSQAPASTSASTRLFGLTKPKEKKEKKKKNKTSRSQPGDGPASEVSAEGEEIFC

SEQ ID NO: 35875 - protein, 1058 aa, Homo sapiens
MSSSKKSKEKEKEKDKIKEKEKDSKDKEKDKKTVNGHTFSSIPVVGPISCSQCMKPFTNKDAYTCANCSAFVHKGCRESLASCAKVKMKQPKGSLQAHDTSSLPTVIMRNKPSQPKERPRSAVLLVDETATTPIFANRRSQQSVSLSKSVSIQNITGVGNDENMSNTWKFLSHSTDSLNKISKVNESTESLTDEGVGTDMNEGQLLGDFEIESKQLEAESWSRIIDSKFLKQQKKDVVKRQEVIYELMQTEFHHVRTLKIMSGVYSQGMMADLLFEQQMVEKLFPCLDELISIHSQFFQRILERKKESLVDKSEKNFLIKRIGDVLVNQFSGENAERLKKTYGKFCGQHNQSVNYFKDLYAKDKRFQAFVKKKMSSSVVRRLGIPECILLVTQRITKYPVLFQRILQCTKDNEVEQEDLAQSLSLVKDVIGAVDSKVASYEKKVRLNEIYTKTDSKSIMRMKSGQMFAKEDLKRKKLVRDGSVFLKNAAGRLKEVQAVLLTDILVFLQEKDQKYIFASLDQKSTVISLKKLIVREVAHEEKGLFLISMGMTDPEMVEVHASSKEERNSWIQIIQDTINTLNRDEDEGIPSENEEEKKMLDTRARELKEQLHQKDQKILLLLEEKEMIFRDMAECSTPLPEDCSPTHSPRVLFRSNTEEALKGGPLMKSAINEVEILQGLVSGNLGGTLGPTVSSPIEQDVVGPVSLPRRAETFGGFDSHQMNASKGGEKEEGDDGQDLRRTESDSGLKKGGNANLVFMLKRNSEQVVQSVVHLYELLSALQGVVLQQDSYIEDQKLVLSERALTRSLSRPSSLIEQEKQRSLEKQRQDLANLQKQQAQYLEEKRRREREWEARERELREREALLAQREEEVQQGQQDLEKEREELQQKKGTYQYDLERLRAAQKQLEREQEQLRREAERLSQRQTERDLCQVSHPHTKLMRIPSFFPSPEEPPSPSAPSIAKSGSLDSELSVSPKRNSISRTHKDKGPFHILSSTSQTNKGPEGQSQAPASTSASTRLFGLTKPKEKKEKKKKNKTSRSQPGDGPASEVSAEGEEIFC

SEQ ID NO: 35876 - protein, 2816 aa, Homo sapiens
KLLEKQPPIEGDCVVTVLLAEEDKAEDDVVFYLVFLGSTLRHCTSTRKVSSDTLETIAPGHDCCETVKVQLCASKEGLPVFVVAEEDFHFVQDEAYDAAQFLATSAGNQQALNFTRFLDQSGPPSGDVNSLDKKLVLAFRHLKLPTEWNVLGTDQSLHDAGPRETLMHFAVRLGLLRLTWFLLQKPGGRGALSIHNQEGATPVSLALERGYHKLHQLLTEENAGEPDSWSSLSYEIPYGDCSVRHHRELDIYTLTSESDSHHEHPFPGDGCTGPIFKLMNIQQQLMKTNLKQMDSLMPLMMTAQDPSSAPETDGQFLPCAPEPTDPQRLSSSEETESTQCCPGSPVAQTESPCDLSSIVEEENTDRSCRKKNKGVERKGEEVEPAPIVDSGTVSDQDSCLQSLPDCGVKGTEGLSSCGNRNEETGTKSSGMPTDQESLSSGDAVLQRDLVMEPGTAQYSSGGELGGISTTNVSTPDTAGEMEHGLMNPDATVWKNVLQGGESTKERFENSNIGTAGASDVHVTSKPVDKISVPNCAPAASSLDGNKPAESSLAFSNEETSTEKTAETETSRSREESADAPVDQNSVVIPAAAKDKISDGLEPYTLLAAGIGEAMSPSDLALLGLEEDVMPHQNSETNSSHAQSQKGKSSPICSTTGDDKLCADSACQQNTVTSSGDLVAKLCDNIVSESESTTARQPSSQDPPDASHCEDPQAHTVTSDPVRDTQERADFCPFKVVDNKGQRKDVKLDKPLTNMLEVVSHPHPVVPKMEKELVPDQAVISDSTFSLANSPGSESVTKDDALSFVPSQKEKGTATPELHTATDYRDGPDGNSNEPDTRPLEDRAVGLSTSSTAAELQHGMGNTSLTGLGGEHEGPAPPAIPEALNIKGNTDSSLQSVGKATLALDSVLTEEGKLLVVSESSAAQEQDKDKAVTCSSIKENALSSGTLQEEQRTPPPGQDTQQFHEKSISADCAKDKALQLSNSPGASSAFLKAETEHNKEVAPQVSLLTQGGAAQSLVPPGASLATESRQEALGAEHNSSALLPCLLPDGSDGSDALNCSQPSPLDVGVKNTQSQGKTSACEVSGDVTVDVTGVNALQGMAEPRRENISHNTQDILIPNVLLSQEKNAVLGLPVALQDKAVTDPQGVGTPEMIPLDWEKGKLEGADHSCTMGDAEEAQIDDEAHPVLLQPVAKELPTDMELSAHDDGAPAGVREVMRAPPSGRERSTPSLPCMVSAQDAPLPKGADLIEEAASRIVDAVIEQVKAAGALLTEGEACHMSLSSPELGPLTKGLESAFTEKVSTFPPGESLPMGSTPEEATGSLAGCFAGREEPEKIILPVQGPEPAAEMPDVKAEDEVDFRASSISEEVAVGSIAATLKMKQGPMTQAINRENWCTIEPCPDAASLLASKQSPECENFLDVGLGRECTSKQGVLKRESGSDSDLFHSPSDDMDSIIFPKPEEEHLACDITGSSSSTDDTASLDRHSSHGSDVSLSQILKPNRSRDRQSLDGFYSHGMGAEGRESESEPADPGDVEEEEMDSITEVPANCSVLRSSMRSLSPFRRHSWGPGKNAASDAEMNHRSMSWCPSGVQYSAGLSADFNYRSFSLEGLTGGAGVGNKPSSSLEVSSANAEELRHPFSGEERVDSLVSLSEEDLESDQREHRMFDQQICHRSKQQGFNYCTSAISSPLTKSISLMTISHPGLDNSRPFHSTFHNTSANLTESITEENYNFLPHSPSKKDSEWKSGTKVSRTFSYIKNKMSSSKKSKEKEKEKDKIKEKEKDSKDKEKDKKTVNGHTFSSIPVVGPISCSQCMKPFTNKDAYTCANCSAFVHKGCRESLASCAKVKMKQPKGSLQAHDTSSLPTVIMRNKPSQPKERPRSAVLLVDETATTPIFANRRSQQSVSLSKSVSIQNITGVGNDENMSNTWKFLSHSTDSLNKISKVNESTESLTDEGVGTDMNEGQLLGDFEIESKQLEAESWSRIIDSKFLKQQKKDVVKRQEVIYELMQTEFHHVRTLKIMSGVYSQGMMADLLFEQQMVEKLFPCLDELISIHSQFFQRILERKKESLVDKSEKNFLIKRIGDVLVNQFSGENAERLKKTYGKFCGQHNQSVNYFKDLYAKDKRFQAFVKKKMSSSVVRRLGIPECILLVTQRITKYPVLFQRILQCTKDNEVEQEDLAQSLSLVKDVIGAVDSKVASYEKKVRLNEIYTKTDSKSIMRMKSGQMFAKEDLKRKKLVRDGSVFLKNAAGRLKEVQAVLLTDILVFLQEKDQKYIFASLDQKSTVISLKKLIVREVAHEEKGLFLISMGMTDPEMVEVHASSKEERNSWIQIIQDTINTLNRDEDEGIPSENEEEKKMLDTRARELKEQLHQKDQKILLLLEEKEMIFRDMAECSTPLPEDCSPTHSPRVLFRSNTEEALKGGPLMKSAINEVEILQGLVSGNLGGTLGPTVSSPIEQDVVGPVSLPRRAETFGGFDSHQMNASKGGEKEEGDDGQDLRRTESDSGLKKGGNANLVFMLKRNSEQVVQSVVHLYELLSALQGVVLQQDSYIEDQKLVLSERALTRSLSRPSSLIEQEKQRSLEKQRQDLANLQKQQAQYLEEKRRREREWEARERELREREALLAQREEEVQQGQQDLEKEREELQQKKGTYQYDLERLRAAQKQLEREQEQLRREAERLSQRQTERDLCQVSHPHTKLMRIPSFFPSPEEPPSPSAPSIAKSGSLDSELSVSPKRNSISRTHKDKGPFHILSSTSQTNKGPEGQSQAPASTSASTRLFGLTKPKEKKEKKKKNKTSRSQPGDGPASEVSAEGEEIFC

SEQ ID NO: 35877 - protein, 2813 aa, Homo sapiens
MKLNPQQAPLYGDCVVTVLLAEEDKAEDDVVFYLVFLGSTLRHCTSTRKVSSDTLETIAPGHDCCETVKVQLCASKEGLPVFVVAEEDFHFVQDEAYDAAQFLATSAGNQQALNFTRFLDQSGPPSGDVNSLDKKLVLAFRHLKLPTEWNVLGTDQSLHDAGPRETLMHFAVRLGLLRLTWFLLQKPGGRGALSIHNQEGATPVSLALERGYHKLHQLLTEENAGEPDSWSSLSYEIPYGDCSVRHHRELDIYTLTSESDSHHEHPFPGDGCTGPIFKLMNIQQQLMKTNLKQMDSLMPLMMTAQDPSSAPETDGQFLPCAPEPTDPQRLSSSEETESTQCCPGSPVAQTESPCDLSSIVEEENTDRSCRKKNKGVERKGEEVEPAPIVDSGTVSDQDSCLQSLPDCGVKGTEGLSSCGNRNEETGTKSSGMPTDQESLSSGDAVLQRDLVMEPGTAQYSSGGELGGISTTNVSTPDTAGEMEHGLMNPDATVWKNVLQGGESTKERFENSNIGTAGASDVHVTSKPVDKISVPNCAPAASSLDGNKPAESSLAFSNEETSTEKTAETETSRSREESADAPVDQNSVVIPAAAKDKISDGLEPYTLLAAGIGEAMSPSDLALLGLEEDVMPHQNSETNSSHAQSQKGKSSPICSTTGDDKLCADSACQQNTVTSSGDLVAKLCDNIVSESESTTARQPSSQDPPDASHCEDPQAHTVTSDPVRDTQERADFCPFKVVDNKGQRKDVKLDKPLTNMLEVVSHPHPVVPKMEKELVPDQAVISDSTFSLANSPGSESVTKDDALSFVPSQKEKGTATPELHTATDYRDGPDGNSNEPDTRPLEDRAVGLSTSSTAAELQHGMGNTSLTGLGGEHEGPAPPAIPEALNIKGNTDSSLQSVGKATLALDSVLTEEGKLLVVSESSAAQEQDKDKAVTCSSIKENALSSGTLQEEQRTPPPGQDTQQFHEKSISADCAKDKALQLSNSPGASSAFLKAETEHNKEVAPQVSLLTQGGAAQSLVPPGASLATESRQEALGAEHNSSALLPCLLPDGSDGSDALNCSQPSPLDVGVKNTQSQGKTSACEVSGDVTVDVTGVNALQGMAEPRRENISHNTQDILIPNVLLSQEKNAVLGLPVALQDKAVTDPQGVGTPEMIPLDWEKGKLEGADHSCTMGDAEEAQIDDEAHPVLLQPVAKELPTDMELSAHDDGAPAGVREVMRAPPSGRERSTPSLPCMVSAQDAPLPKGADLIEEAASRIVDAVIEQVKAAGALLTEGEACHMSLSSPELGPLTKGLESAFTEKVSTFPPGESLPMGSTPEEATGSLAGCFAGREEPEKIILPVQGPEPAAEMPDVKAEDEVDFRASSISEEVAVGSIAATLKMKQGPMTQAINRENWCTIEPCPDAASLLASKQSPECENFLDVGLGRECTSKQGVLKRESGSDSDLFHSPSDDMDSIIFPKPEEEHLACDITGSSSSTDDTASLDRHSSHGSDVSLSQILKPNRSRDRQSLDGFYSHGMGAEGRESESEPADPGDVEEEEMDSITEVPANCSVLRSSMRSLSPFRRHSWGPGKNAASDAEMNHRSSMRVLGDVVRRPPIHRRSFSLEGLTGGAGVGNKPSSSLEVSSANAEELRHPFSGEERVDSLVSLSEEDLESDQREHRMFDQQICHRSKQQGFNYCTSAISSPLTKSISLMTISHPGLDNSRPFHSTFHNTSANLTESITEENYNFLPHSPSKKDSEWKSGTKVSRTFSYIKNKMSSSKKSKEKEKEKDKIKEKEKDSKDKEKDKKTVNGHTFSSIPVVGPISCSQCMKPFTNKDAYTCANCSAFVHKGCRESLASCAKVKMKQPKGSLQAHDTSSLPTVIMRNKPSQPKERPRSAVLLVDETATTPIFANRRSQQSVSLSKSVSIQNITGVGNDENMSNTWKFLSHSTDSLNKISKVNESTESLTDEGVGTDMNEGQLLGDFEIESKQLEAESWSRIIDSKFLKQQKKDVVKRQEVIYELMQTEFHHVRTLKIMSGVYSQGMMADLLFEQQMVEKLFPCLDELISIHSQFFQRILERKKESLVDKSEKNFLIKRIGDVLVNQFSGENAERLKKTYGKFCGQHNQSVNYFKDLYAKDKRFQAFVKKKMSSSVVRRLGIPECILLVTQRITKYPVLFQRILQCTKDNEVEQEDLAQSLSLVKDVIGAVDSKVASYEKKVRLNEIYTKTDSKSIMRMKSGQMFAKEDLKRKKLVRDGSVFLKNAAGRLKEVQAVLLTDILVFLQEKDQKYIFASLDQKSTVISLKKLIVREVAHEEKGLFLISMGMTDPEMVEVHASSKEERNSWIQIIQDTINTLNRDEDEGIPSENEEEKKMLDTRARELKEQLHQKDQKILLLLEEKEMIFRDMAECSTPLPEDCSPTHSPRVLFRSNTEEALKGGPLMKSAINEVEILQGLVSGNLGGTLGPTVSSPIEQDVVGPVSLPRRAETFGGFDSHQMNASKGGEKEEGDDGQDLRRTESDSGLKKGGNANLVFMLKRNSEQVVQSVVHLYELLSALQGVVLQQDSYIEDQKLVLSERALTRSLSRPSSLIEQEKQRSLEKQRQDLANLQKQQAQYLEEKRRREREWEARERELREREALLAQREEEVQQGQQDLEKEREELQQKKGTYQYDLERLRAAQKQLEREQEQLRREAERLSQRQTERDLCQVSHPHTKLMRIPSFFPSPEEPPSPSAPSIAKSGSLDSELSVSPKRNSISRTHKDKGPFHILSSTSQTNKGPEGQSQAPASTSASTRLFGLTKPKEKKEKKKKNKTSRSQPGDGPASEVSAEGEEIFC

SEQ ID NO: 35878 - protein, 414 aa, Homo sapiens
MSNTWKFLSHSTDSLNKISKVNESTESLTDEGTDMNEGQLLGDFEIESKQLEAESWSRIIDSKFLKQQKKDVVKRQEVIYELMQTEFHHVRTLKIMSGVYSQGMMADLLFEQQMVEKLFPCLDELISIHSQFFQRILERKKESLVDKSEKNFLIKRIGDVLVNQFSGENAERLKKTYGKFCGQHNQSVNYFKDLYAKDKRFQAFVKKKMSSSVVRRLGIPECILLVTQRITKYPVLFQRILQCTKDNEVEQEDLAQSLSLVKDVIGAVDSKVASYEKKVRLNEIYTKTDSKSIMRMKSGQMFAKEDLKRKKLVRDGSVFLKNAAGRLKEVQAVLLTDILVFLQEKDQKYIFASLDQKSTVISLKKLIVREVAHEEKGLFLISMGMTDPEMVEVHASSKEERNSWIQIIQDTINT

SEQ ID NO: 35879 - protein, 385 aa, Homo sapiens
MYERHKRRYSLCDISKVDRTVDVVLLKINRENWCTIEPCPDAASLLASKQSPECENFLDVGLGRECTSKQGVLKRESGSDSDLFHSPSDDMDSIIFPKPEEEHLACDITGSSSSTDDTASLDRHSSHGSDVSLSQILKPNRSRDRQSLDGFYSHGMGAEGRESESEPADPGDVEEEEMDSITEVPANCSVLRSSMRSLSPFRRHSWGPGKNAASDAEMNHRSFSLEGLTGGAGVGNKPSSSLEVSSANAEELRHPFSGEERVDSLVSLSEEDLESDQREHRMFDQQICHRSKQQGFNYCTSAISSPLTKSISLMTISHPGLDNSRPFHSTFHNTSANLTESITEENYNFLPHSPSKKDSEWKSGTKVSRTFSYIKNKMSSSKKSK

SEQ ID NO: 35880 - protein, 2792 aa, Homo sapiens
KLLEKQPPIEGDCVVTVLLAEEDKAEDDVVFYLVFLGSTLRHCTSTRKVSSDTLETIAPGHDCCETVKVQLCASKEGLPVFVVAEEDFHFVQDEAYDAAQFLATSAGNQQALNFTRFLDQSGPPSGDVNSLDKKLVLAFRHLKLPTEWNVLGTDQSLHDAGPRETLMHFAVRLGLLRLTWFLLQKPGGRGALSIHNQEGATPVSLALERGYHKLHQLLTEENAGEPDSWSSLSYEIPYGDCSVRHHRELDIYTLTSESDSHHEHPFPGDGCTGPIFKLMNIQQQLMKTNLKQMDSLMPLMMTAQDPSSAPETDGQFLPCAPEPTDPQRLSSSEETESTQCCPGSPVAQTESPCDLSSIVEEENTDRSCRKKNKGVERKGEEVEPAPIVDSGTVSDQDSCLQSLPDCGVKGTEGLSSCGNRNEETGTKSSGMPTDQESLSSGDAVLQRDLVMEPGTAQYSSGGELGGISTTNVSTPDTAGEMEHGLMNPDATVWKNVLQGGESTKERFENSNIGTAGASDVHVTSKPVDKISVPNCAPAASSLDGNKPAESSLAFSNEETSTEKTAETETSRSREESADAPVDQNSVVIPAAAKDKISDGLEPYTLLAAGIGEAMSPSDLALLGLEEDVMPHQNSETNSSHAQSQKGKSSPICSTTGDDKLCADSACQQNTVTSSGDLVAKLCDNIVSESESTTARQPSSQDPPDASHCEDPQAHTVTSDPVRDTQERADFCPFKVVDNKGQRKDVKLDKPLTNMLEVVSHPHPVVPKMEKELVPDQAVISDSTFSLANSPGSESVTKDDALSFVPSQKEKGTATPELHTATDYRDGPDGNSNEPDTRPLEDRAVGLSTSSTAAELQHGMGNTSLTGLGGEHEGPAPPAIPEALNIKGNTDSSLQSVGKATLALDSVLTEEGKLLVVSESSAAQEQDKDKAVTCSSIKENALSSGTLQEEQRTPPPGQDTQQFHEKSISADCAKDKALQLSNSPGASSAFLKAETEHNKEVAPQVSLLTQGGAAQSLVPPGASLATESRQEALGAEHNSSALLPCLLPDGSDGSDALNCSQPSPLDVGVKNTQSQGKTSACEVSGDVTVDVTGVNALQGMAEPRRENISHNTQDILIPNVLLSQEKNAVLGLPVALQDKAVTDPQGVGTPEMIPLDWEKGKLEGADHSCTMGDAEEAQIDDEAHPVLLQPVAKELPTDMELSAHDDGAPAGVREVMRAPPSGRERSTPSLPCMVSAQDAPLPKGADLIEEAASRIVDAVIEQVKAAGALLTEGEACHMSLSSPELGPLTKGLESAFTEKVSTFPPGESLPMGSTPEEATGSLAGCFAGREEPEKIILPVQGPEPAAEMPDVKAEDEVDFRASSISEEVAVGSIAATLKMKQGPMTQAINRENWCTIEPCPDAASLLASKQSPECENFLDVGLGRECTSKQGVLKRESGSDSDLFHSPSDDMDSIIFPKPEEEHLACDITGSSSSTDDTASLDRHSSHGSDVSLSQILKPNRSRDRQSLDGFYSHGMGAEGRESESEPADPGDVEEEEMDSITEVPANCSVLRSSMRSLSPFRRHSWGPGKNAASDAEMNHRSFSLEGLTGGAGVGNKPSSSLEVSSANAEELRHPFSGEERVDSLVSLSEEDLESDQREHRMFDQQICHRSKQQGFNYCTSAISSPLTKSISLMTISHPGLDNSRPFHSTFHNTSANLTESITEENYNFLPHSPSKKDSEWKSGTKVSRTFSYIKNKMSSSKKSKEKEKEKDKIKEKEKDSKDKEKDKKTVNGHTFSSIPVVGPISCSQCMKPFTNKDAYTCANCSAFVHKGCRESLASCAKVKMKQPKGSLQAHDTSSLPTVIMRNKPSQPKERPRSAVLLVDETATTPIFANRRSQQSVSLSKSVSIQNITGVGNDENMSNTWKFLSHSTDSLNKISKVNESTESLTDEGTDMNEGQLLGDFEIESKQLEAESWSRIIDSKFLKQQKKDVVKRQEVIYELMQTEFHHVRTLKIMSGVYSQGMMADLLFEQQMVEKLFPCLDELISIHSQFFQRILERKKESLVDKSEKNFLIKRIGDVLVNQFSGENAERLKKTYGKFCGQHNQSVNYFKDLYAKDKRFQAFVKKKMSSSVVRRLGIPECILLVTQRITKYPVLFQRILQCTKDNEVEQEDLAQSLSLVKDVIGAVDSKVASYEKKVRLNEIYTKTDSKSIMRMKSGQMFAKEDLKRKKLVRDGSVFLKNAAGRLKEVQAVLLTDILVFLQEKDQKYIFASLDQKSTVISLKKLIVREVAHEEKGLFLISMGMTDPEMVEVHASSKEERNSWIQIIQDTINTLNRDEDEGIPSENEEEKKMLDTRARELKEQLHQKDQKILLLLEEKEMIFRDMAECSTPLPEDCSPTHSPRVLFRSNTEEALKGGPLMKSAINEVEILQGLVSGNLGGTLGPTVSSPIEQDVVGPVSLPRRAETFGGFDSHQMNASKGGEKEEGDDGQDLRRTESDSGLKKGGNANLVFMLKRNSEQVVQSVVHLYELLSALQGVVLQQDSYIEDQKLVLSERALTRSLSRPSSLIEQEKQRSLEKQRQDLANLQKQQAQYLEEKRRREREWEARERELREREALLAQREEEVQQGQQDLEKEREELQQKKGTYQYDLERLRAAQKQLEREQEQLRREAERLSQRQTERDLCQVSHPHTKLMRIPSFFPSPEEPPSPSAPSIAKSGSLDSELSVSPKRNSISRTHKDKGPFHILSSTSQTNKGPEGQSQAPASTSASTRLFGLTKPKEKKEKKKKNKTSRSQPGDGPASEVSAEGEEIFC

SEQ ID NO: 35881 - protein, 1745 aa, Homo sapiens
MKLNPQQAPLYGDCVVTVLLAEEDKAEDDVVFYLVFLGSTLRHCTSTRKVSSDTLETIAPGHDCCETVKVQLCASKEGLPVFVVAEEDFHFVQDEAYDAAQFLATSAGNQQALNFTRFLDQSGPPSGDVNSLDKKLVLAFRHLKLPTEWNVLGTDQSLHDAGPRETLMHFAVRLGLLRLTWFLLQKPGGRGALSIHNQEGATPVSLALERGYHKLHQLLTEENAGEPDSWSSLSYEIPYGDCSVRHHRELDIYTLTSESDSHHEHPFPGDGCTGPIFKLMNIQQQLMKTNLKQMDSLMPLMMTAQDPSSAPETDGQFLPCAPEPTDPQRLSSSEETESTQCCPGSPVAQTESPCDLSSIVEEENTDRSCRKKNKGVERKGEEVEPAPIVDSGTVSDQDSCLQSLPDCGVKGTEGLSSCGNRNEETGTKSSGMPTDQESLSSGDAVLQRDLVMEPGTAQYSSGGELGGISTTNVSTPDTAGEMEHGLMNPDATVWKNVLQGGESTKERFENSNIGTAGASDVHVTSKPVDKISVPNCAPAASSLDGNKPAESSLAFSNEETSTEKTAETETSRSREESADAPVDQNSVVIPAAAKDKISDGLEPYTLLAAGIGEAMSPSDLALLGLEEDVMPHQNSETNSSHAQSQKGKSSPICSTTGDDKLCADSACQQNTVTSSGDLVAKLCDNIVSESESTTARQPSSQDPPDASHCEDPQAHTVTSDPVRDTQERADFCPFKVVDNKGQRKDVKLDKPLTNMLEVVSHPHPVVPKMEKELVPDQAVISDSTFSLANSPGSESVTKDDALSFVPSQKEKGTATPELHTATDYRDGPDGNSNEPDTRPLEDRAVGLSTSSTAAELQHGMGNTSLTGLGGEHEGPAPPAIPEALNIKGNTDSSLQSVGKATLALDSVLTEEGKLLVVSESSAAQEQDKDKAVTCSSIKENALSSGTLQEEQRTPPPGQDTQQFHEKSISADCAKDKALQLSNSPGASSAFLKAETEHNKEVAPQVSLLTQGGAAQSLVPPGASLATESRQEALGAEHNSSALLPCLLPDGSDGSDALNCSQPSPLDVGVKNTQSQGKTSACEVSGDVTVDVTGVNALQGMAEPRRENISHNTQDILIPNVLLSQEKNAVLGLPVALQDKAVTDPQGVGTPEMIPLDWEKGKLEGADHSCTMGDAEEAQIDDEAHPVLLQPVAKELPTDMELSAHDDGAPAGVREVMRAPPSGRERSTPSLPCMVSAQDAPLPKGADLIEEAASRIVDAVIEQVKAAGALLTEGEACHMSLSSPELGPLTKGLESAFTEKVSTFPPGESLPMGSTPEEATGSLAGCFAGREEPEKIILPVQGPEPAAEMPDVKAEDEVDFRASSISEEVAVGSIAATLKMKQGPMTQAINRENWCTIEPCPDAASLLASKQSPECENFLDVGLGRECTSKQGVLKRESGSDSDLFHSPSDDMDSIIFPKPEEEHLACDITGSSSSTDDTASLDRHSSHGSDVSLSQILKPNRSRDRQSLDGFYSHGMGAEGRESESEPADPGDVEEEEMDSITEVPANCSVLRSSMRSLSPFRRHSWGPGKNAASDAEMNHRSFSLEGLTGGAGVGNKPSSSLEVSSANAEELRHPFSGEERVDSLVSLSEEDLESDQREHRMFDQQICHRSKQQGFNYCTSAISSPLTKSISLMTISHPGLDNSRPFHSTFHNTSANLTESITEENYNFLPHSPSKKDSEWKSGTKVSRTFSYIKNKMSSSKKSK

SEQ ID NO: 35882 - protein, 275 aa, Homo sapiens
PSDDMDSIIFPKPEEEHLACDITGSSSSTDDTASLDRHSSHGSDVSLSQILKPNRSRDRQSLDGFYSHGMGAEGRESESEPADPGDVEEEEMDSITEVPANCSVLRSSMRSLSPFRRHSWGPGKNAASDAEMNHRSSMRVLGDVVRRPPIHRRSMSWCPSGVQYSAGLSADFNYRSFSLEGLTGGAGVGNKPSSSLEVSSANAEELRHPFSGEERVDSLVSLSEEDLESDQREHRMFDQQICHRSKQQGFNYCTSAISSPLTKSISLMTISHPGL

SEQ ID NO: 35883 - protein, 38 aa, Homo sapiens
MKLNPQQAPLYGDCVVTVLLAEEDKAEDDVVFYLVFLG

SEQ ID NO: 35884 - protein, 179 aa, Homo sapiens
MKLNPQQAPLYGDCVVTVLLAEEDKAEDDVVFYLVFLGSTLRHCTSTRKVSSDTLETIAPGHDCCETVKVQLCASKEGLPVFVVAEEDFHFVQDEAYDAAQFLATSAGNQQALNFTRFLDQSGPPSGDVNSLDKKLVLAFRHLKLPTEWNVLGTDQSLHGENLYDLQTHFKFVIFLLFF

SEQ ID NO: 35885 - protein, 137 aa, Homo sapiens
MSETQNSTSQKAMDEDNKAASQTMPNTQDKNYEDELTQVALALVEDVINYAVKIVEEERNPLKNIKWMTHGEFTVEKGLKQIDEYFSDAPIVVSYVGDHQALVHRPGMVRFRENWQKNLTDAKYSFMESFPFLFNRV

SEQ ID NO: 35886 - protein, 89 aa, Homo sapiens
MSETQNSTSQKAMDEDNKAASQTMPNTQDKNYEDELTQVALALVEDVINYAVKIVEEERNPLKNIKWMTHGEFTVEKGLKQIDEYFSVS

SEQ ID NO: 35887 - protein, 138 aa, Homo sapiens
MSETQNSTSQKAMDEDNKAASQTMPNTQDKNYEDELTQVALALVEDVINYAVKIVEEERNPLKNIKWMTHGEFTVEKGLKQIDEYFSPDAPIVVSYVGDHQALVHRPGMVRFRENWQKNLTDAKYSFMESFPFLFNRV

SEQ ID NO: 35888 - protein, 137 aa, Homo sapiens; identical to SEQ ID NO: 35885

SEQ ID NO: 35889 - protein, 197 aa, Homo sapiens
MSETQNSTSQKAMDEDNKAASQTMPNTQDKNYEDELTQVALALVEDVINYAVKIVEEERNPLKNIKWMTHGEFTVEKGLKQIDEYFSKCVSKKCWAHGVEFVERKDLIHSFLYIYYVHWSISTADLPVARISAGTYFTMKVSKTKPPDAPIVVSYVGDHQALVHRPGMVRFRENWQKNLTDAKYSFMESFPFLFNRV

SEQ ID NO: 35890 - protein, 89 aa, Homo sapiens; identical to SEQ ID NO: 35886

SEQ ID NO: 35891 - protein, 695 aa, Homo sapiens
MAAATIVHDTSEAVELCPAYGLYLKPITKMTISVALPQLKQPGKSISNWEVMERLKGMVQNHQFSTLRISKSTMDFIRFEGEVENKSLVKSFLACLDGKTIKLSGFSDILKVRAAEFKIDFPTRHDWDSFFRDAKDMNETLPGERPDTIHLEGLPCKWFALKESGSEKPSEDVLVKVFEKFGEIRNVDIPMLDPYREEMTGRNFHTFSFGGHLNFEAYVQYREYMGFIQAMSALRGMKLMYKGEDGKAVACNIKVSFDSTKHLSDASIKKRQLERQKLQELEQQREEQKRREKEAEERQRAEERKQKELEELERERKREEKLRKREQKQRDRELRRNQKKLEKLQAEEQKQLQEKIKLEERKLLLAQRNLQSIRLIAELLSRAKAVKLREQEQKEEKLRLQQQEERRRLQEAELRRVEEEKERALGLQRKERELRERLLSILLSKKPDDSHTHDELGVAHADLLQPVLDILQTVSSGCVSATTLHPLGGQPPAGAPKESPAHPEADGAPKSVNGSVAEEAPCKEVQSSCRVVPEDGSPEKRCPGGVLSCIPDNNQQPKGIPACEQNVSRKDTRSEQDKCNREPSKGRGRATGDGLADRHKRERSRARRASSREDGRPRKERRPHKKHAYKDDSPRRRSTSPDHTRSRRSHSKDRHRRERSRERRGSASRKHSRHRRRSERSRSRSPSRHRSTWNR

SEQ ID NO: 35892 - protein, 446 aa, Homo sapiens
MAAATIVHDTSEAVELCPAYGLYLKPITKMTISVALPQLKQPGKSISNWEVMERLKGMVQNHQFSTLRISKSTMDFIRFEGEVENKSLVKSFLACLDGKTIKLSGFSDILKVRAAEFKIDFPTRHDWDSFFRDAKDMNETLPGERPDTIHLEGLPCKWFALKESGSEKPSEDVLVKVFEKFGEIRNVDIPMLDPYREEMTGRNFHTFSFGGHLNFEAYVQYREYMGFIQAMSALRGMKLMYKGEDGKAVACNIKVSFDSTKHLSDASIKKRQLERQKLQELEQQREEQKRREKEAEERQRAEERKQKELEELERERKREEKLRKREQKQRDRELRRNQKKLEKLQAEEQKQLQEKIKLEERKLLLAQRNLQSIRLIAELLSRAKVPGGSLCSRQPRPGCPQCPPLKCGRRHGAVSPPAAAVATKPALMPRMTAPSREGVALVCRSR

SEQ ID NO: 35893 - protein, 859 aa, Homo sapiens
MEIEVSVAECKSVPGITSTPHPMDHPSAFYSPPHNGLLTDHHESLDNDVAREIRYLDEVLEANCCDSAVDGTYNGTSSPEPGAVVLVGGLSPPVHEATQPEPTERTASRQAPPHIELSNSSPDPMAEAERTNGHSPSQPRDALGDSLQVPVSPSSTTSSRCSSRDGEFTLTTLKKEAKFELRAFHEDKKPSKLFEDDEHEKEQYCIRKVRPSEEMLELEKERRELIRSQAVKKNPGIAAKWWNPPQEKTIEEQLDEEHLESHKKYKERKERRAQQEQLLLQKQLQQQQQQPPSQLCTAPASSHERASMIDKAKEDIVTEQIDFSAARKQFQLMENSRQAVAKGQSTPRLFSIKPFYRPLGSVNSDKPLTNPRPPSVGGPPEDSGASAAKGQKSPGALETPSAAGSQGNTASQGKEGPYSEPSKRGPLSKLWAEDGEFTSARAVLTVVKDDDHGILDQFSRSVNVSLTQEELDSGLDELSVRSQDTTVLETLSNDFSMDNISDSGASNETTNALQENSLADFSLPQTPQTDNPSEGRGEGVSKSFSDHGFYSPSSTLGDSPLVDDPLEYQAGLLVQNAIQQAIAEQVDKAVSKTSRDGAEQQGPEATVEEAEAAAFGSEKPQSMFEPPQVSSPVQEKRDVLPKILPAEDRALRERGPPQPLPAVQPSGPINMEETRPEGSYFSKYSEAAELRSTASLLATQESDVMVGPFKLRSRKQRTLSMIEEEIRAAQEREEELKRQRQVLQSTQSPRTKNAPSLPSRTCYKTAPGKIEKVKPPPSPTTEGPSLQPDLAPEEAAGTQRPKNLMQTLMEDYETHKSKRRERMDDSSVLEATRVNRRKSALALRWEAGIYANQEEEDNE

SEQ ID NO: 35894 - protein, 948 aa, Homo sapiens
MRWPQPGAAARLPPESPGPPESPGPPEREAAAARRWTGAEPQDCAPGSGRPEKPPQLSEDDIWLKSEGDNYSATLLEPAASSLSPDHKNMEIEVSVAECKSVPGITSTPHPMDHPSAFYSPPHNGLLTDHHESLDNDVAREIRYLDEVLEANCCDSAVDGTYNGTSSPEPGAVVLVGGLSPPVHEATQPEPTERTASRQAPPHIELSNSSPDPMAEAERTNGHSPSQPRDALGDSLQVPVSPSSTTSSRCSSRDGEFTLTTLKKEAKFELRAFHEDKKPSKLFEDDEHEKEQYCIRKVRPSEEMLELEKERRELIRSQAVKKNPGIAAKWWNPPQEKTIEEQLDEEHLESHKKYKERKERRAQQEQLLLQKQLQQQQQQPPSQLCTAPASSHERASMIDKAKEDIVTEQIDFSAARKQFQLMENSRQAVAKGQSTPRLFSIKPFYRPLGSVNSDKPLTNPRPPSVGGPPEDSGASAAKGQKSPGALETPSAAGSQGNTASQGKEGPYSEPSKRGPLSKLWAEDGEFTSARAVLTVVKDDDHGILDQFSRSVNVSLTQEELDSGLDELSVRSQDTTVLETLSNDFSMDNISDSGASNETTNALQENSLADFSLPQTPQTDNPSEGRGEGVSKSFSDHGFYSPSSTLGDSPLVDDPLEYQAGLLVQNAIQQAIAEQVDKAVSKTSRDGAEQQGPEATVEEAEAAAFGSEKPQSMFEPPQVSSPVQEKRDVLPKILPAEDRALRERGPPQPLPAVQPSGPINMEETRPEGSYFSKYSEAAELRSTASLLATQESDVMVGPFKLRSRKQRTLSMIEEEIRAAQEREEELKRQRQVLQSTQSPRTKNAPSLPSRTCYKTAPGKIEKVKPPPSPTTEGPSLQPDLAPEEAAGTQRPKNLMQTLMEDYETHKSKRRERMDDSSVLEATRVNRRKSALALRWEAGIYANQEEEDNE

SEQ ID NO: 35895 - protein, 1090 aa, Homo sapiens
MAEAELHKERLQAIAEKRKRQTEIEGKRQQLDEQILLLQHSKSKVLREKWLLQGIPAGTAEEEEARRRQSEEDEFRVKQLEDNIQRLEQEIQTLESEESQISAKEQIILEKLKETEKSFKDFQKGFSSTDGDAVNYISSQLPDLPILCSRTAEPSPGQDGTSRAAGVGWENVLLKEGESASNATETSGPDMTIKKPPQLSEDDIWLKSEGDNYSATLLEPAASSLSPDHKNMEIEVSVAECKSVPGITSTPHPMDHPSAFYSPPHNGLLTDHHESLDNDVAREIRYLDEVLEANCCDSAVDGTYNGTSSPEPGAVVLVGGLSPPVHEATQPEPTERTASRQAPPHIELSNSSPDPMAEAERTNGHSPSQPRDALGDSLQVPVSPSSTTSSRCSSRDGEFTLTTLKKEAKFELRAFHEDKKPSKLFEDDEHEKEQYCIRKVRPSEEMLELEKERRELIRSQAVKKNPGIAAKWWNPPQEKTIEEQLDEEHLESHKKYKERKERRAQQEQLLLQKQLQQQQQQPPSQLCTAPASSHERASMIDKAKEDIVTEQIDFSAARKQFQLMENSRQAVAKGQSTPRLFSIKPFYRPLGSVNSDKPLTNPRPPSVGGPPEDSGASAAKGQKSPGALETPSAAGSQGNTASQGKEGPYSEPSKRGPLSKLWAEDGEFTSARAVLTVVKDDDHGILDQFSRSVNVSLTQEELDSGLDELSVRSQDTTVLETLSNDFSMDNISDSGASNETTNALQENSLADFSLPQTPQTDNPSEGRGEGVSKSFSDHGFYSPSSTLGDSPLVDDPLEYQAGLLVQNAIQQAIAEQVDKAVSKTSRDGAEQQGPEATVEEAEAAAFGSEKPQSMFEPPQVSSPVQEKRDVLPKILPAEDRALRERGPPQPLPAVQPSGPINMEETRPEGSYFSKYSEAAELRSTASLLATQESDVMVGPFKLRSRKQRTLSMIEEEIRAAQEREEELKRQRQVLQSTQSPRTKNAPSLPSRTCYKTAPGKIEKVKPPPSPTTEGPSLQPDLAPEEAAGTQRPKNLMQTLMEDYETHKSKRRERMDDSSVLEATRVNRRKSALALRWEAGIYANQEEEDNE

SEQ ID NO: 35896 - protein, 1103 aa, Homo sapiens
MAEAELHKERLQAIAEKRKRQTEIEGKRQQLDEQILLLQHSKSKVLREKWLLQGIPAGTAEEEEARRRQSEEDEFRVKQLEDNIQRLEQEIQTLESEESQISAKEQIILEKLKETEKSFKDFQKGFSSTDGDAVNYISSQLPDLPILCSRTAEPSPGQDGTSRAAGVGWENVLLKEGESASNATETSGPDMTIKKPPQLSEDDIWLKSEGDNYSATLLEPAASSLSPDHKNMEIEVSVAECKSVPGITSTPHPMDHPSAFYSPPHNGLLTDHHESLDNDVAREIRYLDEVLEANCCDSAVDGTYNGTSSPEPGAVVLVGGLSPPVHEATQPEPTERTASRQAPPHIELSNSSPDPMAEAERTNGHSPSQPRDALGDSLQVPVSPSSTTSSRCSSRDGEFTLTTLKKEAKFELRAFHEDKKPSKLFEDDEHEKEQYCIRKVRPSEEMLELEKERRELIRSQAVKKNPGIAAKWWNPPQEKTIEEQLDEEHLESHKKYKERKERRAQQEQLLLQKQLQQQQQQPPSQLCTAPASSHERASMIDKAKEDIVTEQIDFSAARKQFQLMENSRQAVAKGQSTPRLFSIKPFYRPLGSVNSDKPLTNPRPPSVGGPPEDSGASAAKGQKSPGALETPSAAGSQGNTASQGKEGPYSEPSKRGPLSKLWAEDGEFTSARAVLTVVKDDDHGILDQFSRSVNVSLTQEELDSGLDELSVRSQDTTVLETLSNDFSMDNISDSGASNETTNALQENSLADFSLPQTPQTDNPSEGRGEGVSKSFSDHGFYSPSSTLGDSPLVDDPLEYQAGLLVQNAIQQAIAEQVDKAVSKTSRDGAEQQGPEATVEEAEAAAFGSEKPQSMFEPPQVSSPVQEKRDVLPKILPAEDRALRERGPPQPLPAVQPSGPINMEETRPEGSYFSKYSEAAELRSTASLLATQESDVMVGPFKLRSRKQRTLSMIEEEIRAAQEREEELKRQRQVLQSTQSPRTKNAPSLPSRTCYKTAPGKIEKVKPPPSPTTEGPSLQPDLAPEEAAGTQRPKNLMQTLMEDYETHKSKRRERMDDSSYTSKLLSCKVTSEVLEATRVNRRKSALALRWEAGIYANQEEEDNE

SEQ ID NO: 35897 - protein, 961 aa, Homo sapiens
MRWPQPGAAARLPPESPGPPESPGPPEREAAAARRWTGAEPQDCAPGSGRPEKPPQLSEDDIWLKSEGDNYSATLLEPAASSLSPDHKNMEIEVSVAECKSVPGITSTPHPMDHPSAFYSPPHNGLLTDHHESLDNDVAREIRYLDEVLEANCCDSAVDGTYNGTSSPEPGAVVLVGGLSPPVHEATQPEPTERTASRQAPPHIELSNSSPDPMAEAERTNGHSPSQPRDALGDSLQVPVSPSSTTSSRCSSRDGEFTLTTLKKEAKFELRAFHEDKKPSKLFEDDEHEKEQYCIRKVRPSEEMLELEKERRELIRSQAVKKNPGIAAKWWNPPQEKTIEEQLDEEHLESHKKYKERKERRAQQEQLLLQKQLQQQQQQPPSQLCTAPASSHERASMIDKAKEDIVTEQIDFSAARKQFQLMENSRQAVAKGQSTPRLFSIKPFYRPLGSVNSDKPLTNPRPPSVGGPPEDSGASAAKGQKSPGALETPSAAGSQGNTASQGKEGPYSEPSKRGPLSKLWAEDGEFTSARAVLTVVKDDDHGILDQFSRSVNVSLTQEELDSGLDELSVRSQDTTVLETLSNDFSMDNISDSGASNETTNALQENSLADFSLPQTPQTDNPSEGRGEGVSKSFSDHGFYSPSSTLGDSPLVDDPLEYQAGLLVQNAIQQAIAEQVDKAVSKTSRDGAEQQGPEATVEEAEAAAFGSEKPQSMFEPPQVSSPVQEKRDVLPKILPAEDRALRERGPPQPLPAVQPSGPINMEETRPEGSYFSKYSEAAELRSTASLLATQESDVMVGPFKLRSRKQRTLSMIEEEIRAAQEREEELKRQRQVLQSTQSPRTKNAPSLPSRTCYKTAPGKIEKVKPPPSPTTEGPSLQPDLAPEEAAGTQRPKNLMQTLMEDYETHKSKRRERMDDSSYTSKLLSCKVTSEVLEATRVNRRKSALALRWEAGIYANQEEEDNE

SEQ ID NO: 35898 - protein, 854 aa, Homo sapiens
MMAYSDTTMMSDDIDWLRSHRGVCKVDLYNPEGQQDQDRKVICFVDVSTLNVEDKDYKDAASSSSEGNLNLGSLEEKEIIVIKDTEKKDQSKTEGSVCLFKQAPSDPVSVLNWLLSDLQKYALGFQHALSPSTSTCKHKVGDTEGEYHRASSENCYSVYADQVNIDYLMNRPQNLRLEMTAAKNTNNNQSPSAPPAKPPSTQRAVISPDGECSIDDLSFYVNRLSSLVIQMAHKEIKEKLEGKSKCLHHSICPSPGNKERISPRTPASKIASEMAYEAVELTAAEMRGTGEESREGGQKSFLYSELSNKSKSGDKQMSQRESKEFADSISKGLMVYANQVASDMMVSLMKTLKVHSSGKPIPASVVLKRVLLRHTKEIVSDLIDSCMKNLHNITGVLMTDSDFVSAVKRNLFNQWKQNATDIMEAMLKRLVSALIGEEKETKSQSLSYASLKAGSHDPKCRNQSLEFSTMKAEMKERDKGKMKSDPCKSLTSAEKVGEHILKEGLTIWNQKQGNSCKVATKACSNKDEKGEKINASTDSLAKDLIVSALKLIQYHLTQQTKGKDTCEEDCPGSTMGYMAQSTQYEKCGGGQSAKALSVKQLESHRAPGPSTCQKENQHLDSQKMDMSNIVLMLIQKLLNENPFKCEDPCEGENKCSEPRASKAASMSNRSDKAEEQCQEHQELDCTSGMKQANGQFIDKLVESVMKLCLIMAKYSNDGAALAELEEQAASANKPNFRGTRCIHSGAMPQNYQDSLGHEVIVNNQCSTNSLQKQLQAVLQWIAASQFNVPMLYFMGDKDGQLEKLPQVSAKAAEKGYSVGGLLQEVMKFAKERQPDEAVGKVARKQLLDWLLANL

SEQ ID NO: 35899 - protein, 845 aa, Homo sapiens
MSDDIDWLRSHRGVCKVDLYNPEGQQDQDRKVICFVDVSTLNVEDKDYKDAASSSSEGNLNLGSLEEKEIIVIKDTEKKDQSKTEGSVCLFKQAPSDPVSVLNWLLSDLQKYALGFQHALSPSTSTCKHKVGDTEGEYHRASSENCYSVYADQVNIDYLMNRPQNLRLEMTAAKNTNNNQSPSAPPAKPPSTQRAVISPDGECSIDDLSFYVNRLSSLVIQMAHKEIKEKLEGKSKCLHHSICPSPGNKERISPRTPASKIASEMAYEAVELTAAEMRGTGEESREGGQKSFLYSELSNKSKSGDKQMSQRESKEFADSISKGLMVYANQVASDMMVSLMKTLKVHSSGKPIPASVVLKRVLLRHTKEIVSDLIDSCMKNLHNITGVLMTDSDFVSAVKRNLFNQWKQNATDIMEAMLKRLVSALIGEEKETKSQSLSYASLKAGSHDPKCRNQSLEFSTMKAEMKERDKGKMKSDPCKSLTSAEKVGEHILKEGLTIWNQKQGNSCKVATKACSNKDEKGEKINASTDSLAKDLIVSALKLIQYHLTQQTKGKDTCEEDCPGSTMGYMAQSTQYEKCGGGQSAKALSVKQLESHRAPGPSTCQKENQHLDSQKMDMSNIVLMLIQKLLNENPFKCEDPCEGENKCSEPRASKAASMSNRSDKAEEQCQEHQELDCTSGMKQANGQFIDKLVESVMKLCLIMAKYSNDGAALAELEEQAASANKPNFRGTRCIHSGAMPQNYQDSLGHEVIVNNQCSTNSLQKQLQAVLQWIAASQFNVPMLYFMGDKDGQLEKLPQVSAKAAEKGYSVGGLLQEVMKFAKERQPDEAVGKVARKQLLDWLLANL

SEQ ID NO: 35900 - protein, 471 aa, Homo sapiens
MSDDIDWLRSHRGVCKVDLYNPEGQQDQDRKVICFVDVSTLNVEDKDYKDAASSSSEGNLNLGSLEEKEIIVIKDTEKKDQSKTEGSVCLFKQAPSDPVSVLNWLLSDLQKYALGFQHALSPSTSTCKHKVGDTEGEYHRASSENCYSVYADQVNIDYLMNRPQNLRLEMTAAKNTNNNQNTCEEDCPGSTMGYMAQSTQYEKCGGGQSAKALSVKQLESHRAPGPSTCQKENQHLDSQKMDMSNIVLMLIQKLLNENPFKCEDPCEGENKCSEPRASKAASMSNRSDKAEEQCQEHQELDCTSGMKQANGQFIDKLVESVMKLCLIMAKYSNDGAALAELEEQAASANKPNFRGTRCIHSGAMPQNYQDSLGHEVIVNNQCSTNSLQKQLQAVLQWIAASQFNVPMLYFMGDKDGQLEKLPQVSAKAAEKGYSVGGLLQEVMKFAKERQPDEAVGKVARKQLLDWLLANL

SEQ ID NO: 35901 - protein, 845 aa, Homo sapiens; identical to SEQ ID NO: 35899

SEQ ID NO: 35902 - protein, 254 aa, Homo sapiens
MSDDIDWLRSHRGVCKVDLYNPEGQQDQDRKVICFVDVSTLNVEDKDYKDAASSSSEGNLNLGSLEEKEIIVIKDTEKKDQSKTEGSVCLFKQAPSDPVSVLNWLLSDLQKYALGFQHALSPSTSTCKHKVGDTEGEYHRASSENCYSVYADQVNIDYLMNRPQNLRLEMTAAKNTNNNQSPSAPPAKPPSTQRAVISPDGECSIDDLSFYVNRLSSLVIQMAHKEIKEKLEGKSKCLHHSICPSPGNKERISP

SEQ ID NO: 35903 - protein, 213 aa, Homo sapiens
MSDDIDWLRSHRGVCKVDLYNPEGQQDQDRKVICFVDVSTLNVEDKDYKDAASSSSEGNLNLGSLEEKEIIVIKDTEKKDQSKTEGSVCLFKQAPSDPVSVLNWLLSDLQKYALGFQHALSPSTSTCKHKVGDTEGEYHRASSENCYSVYADQVNIDYLMNRPQNLRLEMTAAKNTNNNQNTCEEDCPGSTMGYMAQSTQYEKCGGGQSAKAL

SEQ ID NO: 35904 - protein, 183 aa, Homo sapiens
MDNCLAAAALNGVDRRSLQRSARLALEVLERAKRRAVDWHALERPKGCMGVLAREAPHLEKQPAAGPQRVLPGEKYYSSVPEEGGATHVYRYHRGESKLHMCLDIGNGQRKDRKKTSLGPGGSYQISEHAPEASQPAENISKDLYIEVYPGTYSVTVGSNDLTKKTHVVAVDSGQSVDLVFPV

SEQ ID NO: 35905 - protein, 183 aa, Homo sapiens
MDNCLAAAALNGVDRRSLQRSARLALEVLERAKRRAVDWHALERPKGCMGVLAREAPHLEKQPAAGPQRVLPGEREERPPTLSASFRTMAEFMDYTSSQCGKYYSSVPEEGGATHVYRYHRGESKLHMCLDIGNGQAENISKDLYIEVYPGTYSVTVGSNDLTKKTHVVAVDSGQSVDLVFPV

SEQ ID NO: 35906 - protein, 210 aa, Homo sapiens
MDNCLAAAALNGVDRRSLQRSARLALEVLERAKRRAVDWHALERPKGCMGVLAREAPHLEKQPAAGPQRVLPGEREERPPTLSASFRTMAEFMDYTSSQCGKYYSSVPEEGGATHVYRYHRGESKLHMCLDIGNGQRKDRKKTSLGPGGSYQISEHAPEASQPAENISKDLYIEVYPGTYSVTVGSNDLTKKTHVVAVDSGQSVDLVFPV

SEQ ID NO: 35907 - protein, 183 aa, Homo sapiens; identical to SEQ ID NO: 35904

SEQ ID NO: 35908 - protein, 210 aa, Homo sapiens; identical to SEQ ID NO: 35906

SEQ ID NO: 35909 - protein, 492 aa, Homo sapiens
MGFQRRFFHQDQSPVGGLTAEDIEKARQAKARPENKQHKQTLSEHARERKVPVTRIGRLANFGGLAVGLGFGALAEVAKKSLRSEDPSGKKAVLGSSPFLSEANAERIVRTLCKVRGAALKLGQMLSIQDDAFINPHLAKIFERVRQSADFMPLKQMMKTLNNDLGPNWRDKLEYFEERPFAAASIGQVHLARMKGGREVAMKIQYPGVAQSINSDVNNLMAVLNMSNMLPEGLFPEHLIDVLRRELALECDYQREAACARKFRDLLKGHPFFYVPEIVDELCSPHVLTTELVSGFPLDQAEGLSQEIRNEICYNILVLCLRELFEFHFMQTDPNWSNFFYDPQQHKVALLDFGATREYDRSFTDLYIQIIRAAADRDRETVRAKSIEMKFLTGYEVKVMEDAHLDAILILGEAFASDEPFDFGTQSTTEKIHNLIPVMLRHRLVPPPEETYSLHRKMGGSFLICSKLKARFPCKAMFEEAYSNYCKRQAQQ

SEQ ID NO: 35910 - protein, 572 aa, Homo sapiens
MAAILGDTIMVAKGLVKLTQAAVETHLQHLGIGGELIMGPAPAYVASGPFREAGFPGQASSPLGRANGRLFANPRDSFSAMGFQRRFFHQDQSPVGGLTAEDIEKARQAKARPENKQHKQTLSEHARERKVPVTRIGRLANFGGLAVGLGFGALAEVAKKSLRSEDPSGKKAVLGSSPFLSEANAERIVRTLCKVRGAALKLGQMLSIQDDAFINPHLAKIFERVRQSADFMPLKQMMKTLNNDLGPNWRDKLEYFEERPFAAASIGQVHLARMKGGREVAMKIQYPGVAQSINSDVNNLMAVLNMSNMLPEGLFPEHLIDVLRRELALECDYQREAACARKFRDLLKGHPFFYVPEIVDELCSPHVLTTELVSGFPLDQAEGLSQEIRNEICYNILVLCLRELFEFHFMQTDPNWSNFFYDPQQHKVALLDFGATREYDRSFTDLYIQIIRAAADRDRETVRAKSIEMKFLTGYEVKVMEDAHLDAILILGEAFASDEPFDFGTQSTTEKIHNLIPVMLRHRLVPPPEETYSLHRKMGGSFLICSKLKARFPCKAMFEEAYSNYCKRQAQQ

SEQ ID NO: 35911 - protein, 647 aa, Homo sapiens
MAAILGDTIMVAKGLVKLTQAAVETHLQHLGIGGELIMAARALQSTAVEQIGMFLGKVQGQDKHEEYFAENFGGPEGEFHFSVPHAAGASTDFSSASAPDQSAPPSLGHAHSEGPAPAYVASGPFREAGFPGQASSPLGRANGRLFANPRDSFSAMGFQRRFFHQDQSPVGGLTAEDIEKARQAKARPENKQHKQTLSEHARERKVPVTRIGRLANFGGLAVGLGFGALAEVAKKSLRSEDPSGKKAVLGSSPFLSEANAERIVRTLCKVRGAALKLGQMLSIQDDAFINPHLAKIFERVRQSADFMPLKQMMKTLNNDLGPNWRDKLEYFEERPFAAASIGQVHLARMKGGREVAMKIQYPGVAQSINSDVNNLMAVLNMSNMLPEGLFPEHLIDVLRRELALECDYQREAACARKFRDLLKGHPFFYVPEIVDELCSPHVLTTELVSGFPLDQAEGLSQEIRNEICYNILVLCLRELFEFHFMQTDPNWSNFFYDPQQHKVALLDFGATREYDRSFTDLYIQIIRAAADRDRETVRAKSIEMKFLTGYEVKVMEDAHLDAILILGEAFASDEPFDFGTQSTTEKIHNLIPVMLRHRLVPPPEETYSLHRKMGGSFLICSKLKARFPCKAMFEEAYSNYCKRQAQQ

SEQ ID NO: 35912 - protein, 595 aa, Homo sapiens
MFLGKVQGQDKHEEYFAENFGGPEGEFHFSVPHAAGASTDFSSASAPDQSAPPSLGHAHSEGPAPAYVASGPFREAGFPGQASSPLGRANGRLFANPRDSFSAMGFQRRFFHQDQSPVGGLTAEDIEKARQAKARPENKQHKQTLSEHARERKVPVTRIGRLANFGGLAVGLGFGALAEVAKKSLRSEDPSGKKAVLGSSPFLSEANAERIVRTLCKVRGAALKLGQMLSIQDDAFINPHLAKIFERVRQSADFMPLKQMMKTLNNDLGPNWRDKLEYFEERPFAAASIGQVHLARMKGGREVAMKIQYPGVAQSINSDVNNLMAVLNMSNMLPEGLFPEHLIDVLRRELALECDYQREAACARKFRDLLKGHPFFYVPEIVDELCSPHVLTTELVSGFPLDQAEGLSQEIRNEICYNILVLCLRELFEFHFMQTDPNWSNFFYDPQQHKVALLDFGATREYDRSFTDLYIQIIRAAADRDRETVRAKSIEMKFLTGYEVKVMEDAHLDAILILGEAFASDEPFDFGTQSTTEKIHNLIPVMLRHRLVPPPEETYSLHRKMGGSFLICSKLKARFPCKAMFEEAYSNYCKRQAQQ

SEQ ID NO: 35913 - protein, 647 aa, Homo sapiens; identical to SEQ ID NO: 35911

SEQ ID NO: 35914 - protein, 598 aa, Homo sapiens
MAARALQSTAVEQIGMFLGKVQGQDKHEEYFAENFGGPEGEFHFSSASAPDQSAPPSLGHAHSEGPAPAYVASGPFREAGFPGQASSPLGRANGRLFANPRDSFSAMGFQRRFFHQDQSPVGGLTAEDIEKARQAKARPENKQHKQTLSEHARERKVPVTRIGRLANFGGLAVGLGFGALAEVAKKSLRSEDPSGKKAVLGSSPFLSEANAERIVRTLCKVRGAALKLGQMLSIQDDAFINPHLAKIFERVRQSADFMPLKQMMKTLNNDLGPNWRDKLEYFEERPFAAASIGQVHLARMKGGREVAMKIQYPGVAQSINSDVNNLMAVLNMSNMLPEGLFPEHLIDVLRRELALECDYQREAACARKFRDLLKGHPFFYVPEIVDELCSPHVLTTELVSGFPLDQAEGLSQEIRNEICYNILVLCLRELFEFHFMQTDPNWSNFFYDPQQHKVALLDFGATREYDRSFTDLYIQIIRAAADRDRETVRAKSIEMKFLTGYEVKVMEDAHLDAILILGEAFASDEPFDFGTQSTTEKIHNLIPVMLRHRLVPPPEETYSLHRKMGGSFLICSKLKARFPCKAMFEEAYSNYCKRQAQQ

SEQ ID NO: 35915 - protein, 321 aa, Homo sapiens
MLSIQDDAFINPHLAKIFERVRQSADFMPLKQMMYPGVAQSINSDVNNLMAVLNMSNMLPEGLFPEHLIDVLRRELALECDYQREAACARKFRDLLKGHPFFYVPEIVDELCSPHVLTTELVSGFPLDQAEGLSQEIRNEICYNILVLCLRELFEFHFMQTDPNWSNFFYDPQQHKVALLDFGATREYDRSFTDLYIQIIRAAADRDRETVRAKSIEMKFLTGYEVKVMEDAHLDAILILGEAFASDEPFDFGTQSTTEKIHNLIPVMLRHRLVPPPEETYSLHRKMGGSFLICSKLKARFPCKAMFEEAYSNYCKRQAQQ

SEQ ID NO: 35916 - protein, 368 aa, Homo sapiens
MLSIQDDAFINPHLAKIFERVRQSADFMPLKQMMKTLNNDLGPNWRDKLEYFEERPFAAASIGQVHLARMKGGREVAMKIQYPGVAQSINSDVNNLMAVLNMSNMLPEGLFPEHLIDVLRRELALECDYQREAACARKFRDLLKGHPFFYVPEIVDELCSPHVLTTELVSGFPLDQAEGLSQEIRNEICYNILVLCLRELFEFHFMQTDPNWSNFFYDPQQHKVALLDFGATREYDRSFTDLYIQIIRAAADRDRETVRAKSIEMKFLTGYEVKVMEDAHLDAILILGEAFASDEPFDFGTQSTTEKIHNLIPVMLRHRLVPPPEETYSLHRKMGGSFLICSKLKARFPCKAMFEEAYSNYCKRQAQQ

SEQ ID NO: 35917 - protein, 1196 aa, Homo sapiens
MPTAESEAKVKTKVRFEELLKTHSDLMREKKKLKKKLVRSEENISPDTIRSNLHYMKETTSDDPDTIRSNLPHIKETTSDDVSAANTNNLKKSTRVTKNKLRNTQLATENPNGDASVEEDKQGKPNKKVIKTVPQLTTQDLKPETPENKVDSTHQKTHTKPQPGVDHQKSEKANEGREETDLEEDEELMQAYQCHVTEEMAKEIKRKIRKKLKEQLTYFPSDTLFHDDKLSSEKRKKKKEVPVFSKAETSTLTISGDTVEGEQKKESSVRSVSSDSHQDDEISSMEQSTEDSMQDDTKPKPKKTKKKTKAVADNNEDVDGDGVHEITSRDSPVYPKCLLDDDLVLGVYIHRTDRLKSDFMISHPMVKIHVVDEHTGQYVKKDDSGRPVSSYYEKENVDYILPIMTQPYDFKQLKSRLPEWEEQIVFNENFPYLLRGSDESPKVILFFEILDFLSVDEIKNNSEVQNQECGFRKIAWAFLKLLGANGNANINSKLRLQLYYPPTKPRSPLSVVEAFEWWSKCPRNHYPSTLYVTVRGLKVPDCIKPSYRSMMALQEEKGKPVHCERHHESSSVDTEPGLEESKEVIKWKRLPGQACRIPNKHLFSLNAGERGCFCLDFSHNGRILAAACASRDGYPIILYEIPSGRFMRELCGHLNIIYDLSWSKDDHYILTSSSDGTARIWKNEINNTNTFRVLPHPSFVYTAKFHPAVRELVVTGCYDSMIRIWKVEMREDSAILVRQFDVHKSFINSLCFDTEGHHMYSGDCTGVIVVWNTYVKINDLEHSVHHWTINKEIKETEFKGIPISYLEIHPNGKRLLIHTKDSTLRIMDLRILVARKFVGAANYREKIHSTLTPCGTFLFAGSEDGIVYVWNPETGEQVAMYSDLPFKSPIRDISYHPFENMVAFCAFGQNEPILLYIYDFHVAQQEAEMFKRYNGTFPLPGIHQSQDALCTCPKLPHQGSFQIDEFVHTESSSTKMQLVKQRLETVTEVIRSCAAKVNKNLSFTSPPAVSSQQSKLKQSNMLTAQEILHQFGFTQTGIISIERKPCNHQVDTAPTVVALYDYTANRSDELTIHRGDIIRVFFKDNEDWWYGSIGKGQEGYFPANHVASETLYQELPPEIKERSPPLSPEEKTKIEKSPAPQKQSINKNKSQDFRLGSESMTHSEMRKEQSHEDQGHIMDTRMRKNKQAGRKVTLIE

SEQ ID NO: 35918 - protein, 1053 aa, Homo sapiens
MPTAESEAKVKTKVRFEELLKTHSDLMREKKKLKKKLVRSEENISPDTIRSNLHYMKETTSDDPDTIRSNLPHIKETTSDDVSAANTNNLKKSTRVTKNKLRNTQLATENPNGDASVEEDKQGKPNKKVIKTVPQLTTQDLKPETPENKVDSTHQKTHTKPQPGVDHQKSEKANEGREETDLEEDEELMQAYQCHVTEEMAKEIKRKIRKKLKEQLTYFPSDTLFHDDKLSSEKRKKKKEVPVFSKAETSTLTISGDTVEGEQKKESSVRSVSSDSHQDDEISSMEQSTEDSMQDDTKPKPKKTKKKTKAVADNNEDVDGDGVHEITSRDSPVYPKCLLDDDLVLGVYIHRTDRLKSDFMISHPMVKIHVVDEHTGQYVKKDDSGRPVSSYYEKENVDYILPIMTQPYDFKQLKSRLPEWEEQIVFNENFPYLLRGSDESPKVILFFEILDFLSVDEIKNNSEVQNQECGFRKIAWAFLKLLGANGNANINSKLRLQLYYPPTKPRSPLSVVEAFEWWSKCPRNHYPSTLYVTVRGLKVPDCIKPSYRSMMALQEEKGKPVHCERHHESSSVDTEPGLEESKEVIKWKRLPGQACRIPNKHLFSLNAGERGCFCLDFSHNGRILAAACASRDGYPIILYEIPSGRFMRELCGHLNIIYDLSWSKDDHYILTSSSDGTARIWKNEINNTNTFRVLPHPSFVYTAKFHPAVRELVVTGCYDSMIRIWKVEMREDSAILVRQFDVHKSFINSLCFDTEGHHMYSGDCTGVIVVWNTYVKINDLEHSVHHWTINKEIKETEFKGIPISYLEIHPNGKRLLIHTKDSTLRIMDLRILVARKFVGAANYREKIHSTLTPCGTFLFAGSEDGIVYVWNPETGEQVAMYSDLPFKSPIRDISYHPFENMVAFCAFGQNEPILLYIYDFHVAQQEAEMFKRYNGTFPLPGIHQSQDALCTCPKLPHQGSFQIDEFVHTESSSTKMQLVKQRLETVTEVIRSCAAKVNKNLSFTSPPAVSSQQSKLKQSNMLTAQEILHQFGFTQTDSHFAEFNTCILWWKKH

SEQ ID NO: 35919 - protein, 54 aa, Homo sapiens
MPTAESEAKVKTKVRFEELLKTHSDLMREKKKLKKKLVRSEENISNQEKSMAVW

SEQ ID NO: 35920 - protein, 1196 aa, Homo sapiens; identical to SEQ ID NO: 35917

SEQ ID NO: 35921 - protein, 1053 aa, Homo sapiens
MPTTESEAKVKTKVRFEELLKTHSDLMREKKKLKKKLVRSEENISPDTIRSNLHYMKETTSDDPDTIRSNLPHIKETTSDDVSAANTNNLKKSTRVTKNKLRNTQLATENPNGDASVEEDKQGKPNKKVIKTVPQLTTQDLKPETPENKVDSTHQKTHTKPQPGVDHQKSEKANEGREETDLEEDEELMQAYQCHVTEEMAKEIKRKIRKKLKEQLTYFPSDTLFHDDKLSSEKRKKKKEVPVFSKAETSTLTISGDTVEGEQKKESSVRSVSSDSHQDDEISSMEQSTEDSMQDDTKPKPKKTKKKTKAVADNNEDVDGDGVHEITSRDSPVYPKCLLDDDLVLGVYIHRTDRLKSDFMISHPMVKIHVVDEHTGQYVKKDDSGRPVSSYYEKENVDYILPIMTQPYDFKQLKSRLPEWEEQIVFNENFPYLLRGSDESPKVILFFEILDFLSVDEIKNNSEVQNQECGFRKIAWAFLKLLGANGNANINSKLRLQLYYPPTKPRSPLSVVEAFEWWSKCPRNHYPSTLYVTVRGLKVPDCIKPSYRSMMALQEEKGKPVHCERHHESSSVDTEPGLEESKEVIKWKRLPGQACRIPNKHLFSLNAGERGCFCLDFSHNGRILAAACASRDGYPIILYEIPSGRFMRELCGHLNIIYDLSWSKDDHYILTSSSDGTARIWKNEINNTNTFRVLPHPSFVYTAKFHPAVRELVVTGCYDSMIRIWKVEMREDSAILVRQFDVHKSFINSLCFDTEGHHMYSGDCTGVIVVWNTYVKINDLEHSVHHWTINKEIKETEFKGIPISYLEIHPNGKRLLIHTKDSTLRIMDLRILVARKFVGAANYREKIHSTLTPCGTFLFAGSEDGIVYVWNPETGEQVAMYSDLPFKSPIRDISYHPFENMVAFCAFGQNEPILLYIYDFHVAQQEAEMFKRYNGTFPLPGIHQSQDALCTCPKLPHQGSFQIDEFVHTESSSTKMQLVKQRLETVTEVIRSCAAKVNKNLSFTSPPAVSSQQSKLKQSNMLTAQEILHQFGFTQTDSHFAEFNTCILWWKKH

SEQ ID NO: 35922 - protein, 498 aa, Homo sapiens
MRELCGHLNIIYDLSWSKDDHYILTSSSDGTARIWKNEINNTNTFRVLPHPSFVYTAKFHPAVRELVVTGCYDSMIRIWKVEMREDSAILVRQFDVHKSFINSLCFDTEGHHMYSGDCTGVIVVWNTYVKINDLEHSVHHWTINKEIKETEFKGIPISYLEIHPNGKRLLIHTKDSTLRIMDLRILVARKFVGAANYREKIHSTLTPCGTFLFAGSEDGIVYVWNPETGEQVAMYSDLPFKSPIRDISYHPFENMVAFCAFGQNEPILLYIYDFHVAQQEAEMFKRYNGTFPLPGIHQSQDALCTCPKLPHQGSFQIDEFVHTESSSTKMQLVKQRLETVTEVIRSCAAKVNKNLSFTSPPAVSSQQSKLKQSNMLTAQEILHQFGFTQTGIISIERKPCNHQVDTAPTVVALYDYTANRSDELTIHRGDIIRVFFKDNEDWWYGSIGKGQEGYFPANHVASETLYQELPPEIKERSPPLSPEEKTKIEKSPAPQKVK

SEQ ID NO: 35923 - protein, 1196 aa, Homo sapiens; identical to SEQ ID NO: 35917

SEQ ID NO: 35924 - protein, 405 aa, Homo sapiens
MLSSFLSPQNGTWADTFSLLLALAVALYLGYYWACVLQRPRLVAGPQFLAFLEPHCSITTETFYPTLWCFEGRLQSIFQVLLQSQPLVLYQSDILQTPDGGQLLLDWAKQPDSSQDPDPTTQPIVLLLPGITGSSQDTYVLHLVNQALRDGYQAVVFNNRGCRGEELRTHRAFCASNTEDLETVVNHIKHRYPQAPLLAVGISFGGILVLNHLAQARQAAGLVAALTLSACWDSFETTRSLETPLNSLLFNQPLTAGLCQLVERNRKVIEKVVDIDFVLQARTIRQFDERYTSVAFGYQDCVTYYKAASPRTKIDAIRIPVLYLSAADDPFSPVCALPIQAAQHSPYVALLITARGGHIGFLEGLLPWQHWYMSRLLHQYAKAIFQDPEGLPDLRALLPSEDRNS

SEQ ID NO: 35925 - protein, 398 aa, Homo sapiens
MRKRTEPVALEHERCAAAGSSSSGSAAAALDADCRLKQNLRLTGPAAAEPRCAADAGMKRALGRRKGVWLRLRKILFCVLGLYIAIPFLIKLCPGIQAKLIFLNFVRVPYFIDLKKPQDQGLNHTCNYYLQPEEDVTIGVWHTVPAVWWKNAQGKDQMWYEDALASSHPIILYLHGNAGTRGGDHRVELYKVLSSLGYHVVTFDYRGWGDSVGTPSERGMTYDALHVFDWIKARSGDNPVYIWGHSLGTGVATNLVRRLCERETPPDALILESPFTNIREEAKSHPFSVIYRYFPGFDWFFLDPITSSGIKFANDENVKHISCPLLILHAEDDPVVPFQLGRKLYSIAAPARSFRDFKVQFVPFHSDLGYRHKYIYKSPELPRILREFLGKSEPEHQH

SEQ ID NO: 35926 - protein, 404 aa, Homo sapiens
MRKRTEPVALEHERCAAAGSSSSGSAAAALDADCRLKQNLRLTGPAAAEPRCAADAGMKRALGRRKGVWLRLRKILFCVLGLYIAIPFLIKLCPGIQAKLIFLNFVRVPYFIDLKKPQDQGLNHTCNYYLQPEEDVTIGVWHTVPAVWWKNAQGKDQMWYEDALASSHPIILYLHGNAGTRGGDHRVELYKVLSSLGYHVVTFDYRGWGDSVGTPSERGMTYDALHVFDWIKARSGDNPVYIWGHSLGTGVATNLVRRLCERETPPDALILESPFTNIREEAKSHPFSVIYRYFPGFDWFFLDPITSSGIKFANDENVKHISCPLLILHAEDDPVVPFQLGRKLYSIAAPARSFRDFKVQFVPFHSDLGYRHKYIYKSPELPRILRPQQGPGSSPDPSMWSELV

SEQ ID NO: 35927 - protein, 187 aa, Homo sapiens
MSGGGHGGVCFLCCILLQGRKGVWLRLRKILFCVLGLYIAIPFLIKLCPGIQAKLIFLNFVRVPYFIDLKKPQDQGLNHTCNYYLQPEEDVTIGVWHTVPAVWWKNAQGKDQMWYEDALASSHPIILYLHGNAGTRGGDHRVELYKVLSSLGYHVVTFDYRGWGDSVGTPSERGMTYDALHVFDWIK

SEQ ID NO: 35928 - protein, 360 aa, Homo sapiens
MRKRTEPVALEPRCAADAGMKRALGRRKGVWLRLRKILFCVLGLYIAIPFLIKLCPGIQAKLIFLNFVRVPYFIDLKKPQDQGLNHTCNYYLQPEEDVTIGVWHTVPAVWWKNAQGKDQMWYEDALASSHPIILYLHGNAGTRGGDHRVELYKVLSSLGYHVVTFDYRGWGDSVGTPSERGMTYDALHVFDWIKARSGDNPVYIWGHSLGTGVATNLVRRLCERETPPDALILESPFTNIREEAKSHPFSVIYRYFPGFDWFFLDPITSSGIKFANDENVKHISCPLLILHAEDDPVVPFQLGRKLYSIAAPARSFRDFKVQFVPFHSDLGYRHKYIYKSPELPRILREFLGKSEPEHQH

SEQ ID NO: 35929 - protein, 339 aa, Homo sapiens
MLYPGSVYLLQKALMPVLLQGQARLVEECNGRRAKLLACDGNEIDTMFVDRRGTAEPQGQKLVICCEGNAGFYEVGCVSTPLEAGYSVLGWNHPGFAGSTGVPFPQNEANAMDVVVQFAIHRLGFQPQDIIIYAWSIGGFTATWAAMSYPDVSAMILDASFDDLVPLALKVMPDSWRGLVTRTVRQHLNLNNAEQLCRYQGPVLLIRRTKDEIITTTVPEDIMSNRGNDLLLKLLQHRYPRVMAEEGLRVVRQWLEASSQLEEASIYSRWEVEEDWCLSVLRSYQAEHGPDFPWSVGEDMSADGRRQLALFLARKHLHNFEATHCTPLPAQNFQMPWHL

SEQ ID NO: 35930 - protein, 558 aa, Homo sapiens
MAKLLSCVLGPRLYKIYRERDSERAPASVPETPTAVTAPHSSSWDTYYQPRALEKHADSILALASVFWSISYYSSPFAFFYLYRKGYLSLSKVVPFSHYAGTLLLLLAGVACLRGIGRWTNPQYRQFITILEATHRNQSSENKRQLANYNFDFRSWPVDFHWEEPSSRKESRGGPSRRGVALLRPEPLHRGTADTLLNRVKKLPCQITSYLVAHTLGRRMLYPGSVYLLQKALMPVLLQGQARLVEECNGRRAKLLACDGNEIDTMFVDRRGTAEPQGQKLVICCEGNAGFYEVGCVSTPLEAGYSVLGWNHPGFAGSTGVPFPQNEANAMDVVVQFAIHRLGFQPQDIIIYAWSIGGFTATWAAMSYPDVSAMILDASFDDLVPLALKVMPDSWRGLVTRTVRQHLNLNNAEQLCRYQGPVLLIRRTKDEIITTTVPEDIMSNRGNDLLLKLLQHRYPRVMAEEGLRVVRQWLEASSQLEEASIYSRWEVEEDWCLSVLRSYQAEHGPDFPWSVGEDMSADGRRQLALFLARKHLHNFEATHCTPLPAQNFQMPWHL

SEQ ID NO: 35931 - protein, 601 aa, Homo sapiens
MSQLARRRSRYGLTSRAHNTSEAGRAGPAGGPAAGRAAARAGAMAKLLSCVLGPRLYKIYRERDSERAPASVPETPTAVTAPHSSSWDTYYQPRALEKHADSILALASVFWSISYYSSPFAFFYLYRKGYLSLSKVVPFSHYAGTLLLLLAGVACLRGIGRWTNPQYRQFITILEATHRNQSSENKRQLANYNFDFRSWPVDFHWEEPSSRKESRGGPSRRGVALLRPEPLHRGTADTLLNRVKKLPCQITSYLVAHTLGRRMLYPGSVYLLQKALMPVLLQGQARLVEECNGRRAKLLACDGNEIDTMFVDRRGTAEPQGQKLVICCEGNAGFYEVGCVSTPLEAGYSVLGWNHPGFAGSTGVPFPQNEANAMDVVVQFAIHRLGFQPQDIIIYAWSIGGFTATWAAMSYPDVSAMILDASFDDLVPLALKVMPDSWRGLVTRTVRQHLNLNNAEQLCRYQGPVLLIRRTKDEIITTTVPEDIMSNRGNDLLLKLLQHRYPRVMAEEGLRVVRQWLEASSQLEEASIYSRWEVEEDWCLSVLRSYQAEHGPDFPWSVGEDMSADGRRQLALFLARKHLHNFEATHCTPLPAQNFQMPWHL

SEQ ID NO: 35932 - protein, 264 aa, Homo sapiens
MPPPALFLSSLYPRLEFQNDFYRSCIRRSSPQPPPNLAWRPESLYSGELAGGGYLSLSKVVPFSHYAGTLLLLLAGVACLRGIGRWTNPQYRQFITILEATHRNQSSENKRQLANYNFDFRSWPVDFHWEEPSSRKESRGGPSRRGVALLRPEPLHRGTADTLLNRVKKLPCQITSYLVAHTLGRRMLYPGSVYLLQKALMPVLLQGQARLVEECNGRRAKLLACDGNEIDTMFVDRRGTAEPQGQKLVICCEGNAGFYEVGCV

SEQ ID NO: 35933 - protein, 264 aa, Homo sapiens; identical to SEQ ID NO: 35932

SEQ ID NO: 35934 - protein, 264 aa, Homo sapiens; identical to SEQ ID NO: 35932

SEQ ID NO: 35935 - protein, 601 aa, Homo sapiens; identical to SEQ ID NO: 35931

SEQ ID NO: 35936 - protein, 264 aa, Homo sapiens; identical to SEQ ID NO: 35932

SEQ ID NO: 35937 - protein, 601 aa, Homo sapiens; identical to SEQ ID NO: 35931

SEQ ID NO: 35938 - protein, 264 aa, Homo sapiens; identical to SEQ ID NO: 35932

SEQ ID NO: 35939 - protein, 601 aa, Homo sapiens; identical to SEQ ID NO: 35931

SEQ ID NO: 35940 - protein, 264 aa, Homo sapiens; identical to SEQ ID NO: 35932

SEQ ID NO: 35941 - protein, 558 aa, Homo sapiens; identical to SEQ ID NO: 35930

SEQ ID NO: 35942 - protein, 601 aa, Homo sapiens; identical to SEQ ID NO: 35931

SEQ ID NO: 35943 - protein, 145 aa, Homo sapiens
MLGHCCYFWQVWPASEALAAGPTPSTGSSSPSWKQHIGTSLQKTRGSLPTTTLTSGAGQSTSTGKNPAAGRSLEGALPAGVWPCFAQSPCTGGQQTPSSTGLRSCLVRSPGGKQQRGEAHWGGGAISGVLWEWALHCKIAVTHWA

SEQ ID NO: 35944 - protein, 558 aa, Homo sapiens; identical to SEQ ID NO: 35930

SEQ ID NO: 35945 - protein, 558 aa, Homo sapiens; identical to SEQ ID NO: 35930

SEQ ID NO: 35946 - protein, 558 aa, Homo sapiens; identical to SEQ ID NO: 35930

SEQ ID NO: 35947 - protein, 145 aa, Homo sapiens; identical to SEQ ID NO: 35943

SEQ ID NO: 35948 - protein, 145 aa, Homo sapiens; identical to SEQ ID NO: 35943

SEQ ID NO: 35949 - protein, 145 aa, Homo sapiens; identical to SEQ ID NO: 35943

SEQ ID NO: 35950 - protein, 525 aa, Homo sapiens
MPPPALFLSSLYPRLEFQNDFYRSCIRRSSPQPPPNLAWRPESLYSGELAGGGYLSLSKVVPFSHYAGTLLLLLAGVACLRGIGRWTNPQYRQFITILEATHRNQSSENKRQLANYNFDFRSWPVDFHWEEPSSRKESRGGPSRRGVALLRPEPLHRGTADTLLNRVKKLPCQITSYLVAHTLGRRMLYPGSVYLLQKALMPVLLQGQARLVEECNGRRAKLLACDGNEIDTMFVDRRGTAEPQGQKLVICCEGNAGFYEVGCVSTPLEAGYSVLGWNHPGFAGSTGVPFPQNEANAMDVVVQFAIHRLGFQPQDIIIYAWSIGGFTATWAAMSYPDVSAMILDASFDDLVPLALKVMPDSWRGLVTRTVRQHLNLNNAEQLCRYQGPVLLIRRTKDEIITTTVPEDIMSNRGNDLLLKLLQHRYPRVMAEEGLRVVRQWLEASSQLEEASIYSRWEVEEDWCLSVLRSYQAEHGPDFPWSVGEDMSADGRRQLALFLARKHLHNFEATHCTPLPAQNFQMPWHL

SEQ ID NO: 35951 - protein, 558 aa, Homo sapiens; identical to SEQ ID NO: 35930

SEQ ID NO: 35952 - protein, 525 aa, Homo sapiens; identical to SEQ ID NO: 35950

SEQ ID NO: 35953 - protein, 525 aa, Homo sapiens; identical to SEQ ID NO: 35950

SEQ ID NO: 35954 - protein, 145 aa, Homo sapiens; identical to SEQ ID NO: 35943

SEQ ID NO: 35955 - protein, 525 aa, Homo sapiens; identical to SEQ ID NO: 35950

SEQ ID NO: 35956 - protein, 558 aa, Homo sapiens; identical to SEQ ID NO: 35930

SEQ ID NO: 35957 - protein, 525 aa, Homo sapiens; identical to SEQ ID NO: 35950

SEQ ID NO: 35958 - protein, 145 aa, Homo sapiens; identical to SEQ ID NO: 35943

SEQ ID NO: 35959 - protein, 525 aa, Homo sapiens; identical to SEQ ID NO: 35950

SEQ ID NO: 35960 - protein, 145 aa, Homo sapiens; identical to SEQ ID NO: 35943

SEQ ID NO: 35961 - protein, 525 aa, Homo sapiens; identical to SEQ ID NO: 35950

SEQ ID NO: 35962 - protein, 425 aa, Homo sapiens
MNAMLETPELPAVFDGVKLAAVAAVLYVIVRCLNLKSPTAPPDLYFQDSGLSRFLLKSCPLLTKEYIPPLIWGKSGHIQTALYGKMGRVRSPHPYGHRKFITMSDGATSTFDLFEPLAEHCVGDDITMVICPGIANHSEKQYIRTFVDYAQKNGYRCAVLNHLGALPNIELTSPRMFTYGCTWEFGAMVNYIKKTYPLTQLVVVGFSLGGNIVCKYLGETQANQEKVLCCVSVCQGYSALRAQETFMQWDQCRRFYNFLMADNMKKIILSHRQALFGDHVKKPQSLEDTDLSRLYTATSLMQIDDNVMRKFHGYNSLKEYYEEESCMRYLHRIYVPLMLVNAADDPLVHESLLTIPKSLSEKRENVMFVLPLHGGHLGFFEGSVLFPEPLTWMDKLVVEYANAICQWERNKLQCSDTEQVEADLE

SEQ ID NO: 35963 - protein, 425 aa, Homo sapiens; identical to SEQ ID NO: 35962

SEQ ID NO: 35964 - protein, 409 aa, Homo sapiens
MQRLAMDLRMLSRELSLYLEHQVRVGFFGSGVGLSLILGFSVAYAFYYLSSIAKKPQLVTGGESFSRFLQDHCPVVTETYYPTVWCWEGRGQTLLRPFITSKPPVQYRNELIKTADGGQISLDWFDNDNSTCYMDASTRPTILLLPGLTGTSKESYILHMIHLSEELGYRCVVFNNRGVAGENLLTPRTYCCANTEDLETVIHHVHSLYPSAPFLAAGVSMGGMLLLNYLGKIGSKTPLMAAATFSVGWNTFACSESLEKPLNWLLFNYYLTTCLQSSVNKHRHMFVKQVDMDHVMKAKSIREFDKRFTSVMFGYQTIDDYYTDASPSPRLKSVGIPVLCLNSVDDVFSPSHAIPIETAKQNPNVALVLTSYGGHIGFLEGIWPRQSTYMDRVFKQFVQAMVEHGHELS

SEQ ID NO: 35965 - protein, 349 aa, Homo sapiens
MAAEEEEVDSADTGERSGWLTGWLPTWCPTSISHLKEAEEKMLKCVPCTYKKEPVRISNGNKIWTLKFSHNISNKTPLVLLHGFGGGLGLWALNFGDLCTNRPVYAFDLLGFGRSSRPRFDSDAEEVENQFVESIEEWRCALGLDKMILLGHNLGGFLAAAYSLKYPSRVNHLILVEPWGFPERPDLADQDRPIPVWIRALGAALTPFNPLAGLRIAGPFGLSLVQRLRPDFKRKYSSMFEDDTVTEYIYHCNVQTPSGETAFKNMTIPYGWAKRPMLQRIGKMHPDIPVSVIFGARSCIDGNSGTSIQSLRPHSYVKTIAILGAGHYVYADQPEEFNQKVKEICDTVD

SEQ ID NO: 35966 - protein, 496 aa, Homo sapiens
MAELQMLLEEEIPSGKRALIESYQNLTRVADYCENNYIQRHGFAVLLCLLSNSWPQATDKRKALEETKAYTTQSLASVAYQINALANNVLQLLDIQASQLRRMESSINHISQTVDIHKEKVARREIGILTTNKNTSRTHKIIAPANMERPVRYIRKPIDYTVLDDVGHGVKWLKAKHGNNQPARTGTLSRTNPPTQKPPSPPMSGRGTLGRNTPYKTLEPVKPPTVPNDYMTSPARLGSQHSPGRTASLNQRPRTHSGSSGGSGSRENSGSSSIGIPIAVPTPSPPTIGPENISVPPPSGAPPAPPLAPLLPVSTVIAAPGSAPGSQYGTMTRQISRHNSTTSSTSSGGYRRTPSVTAQFSAQPHVNGGPLYSQNSIADSPTPPPPPPPDDIPMFDDSPPPPPPPPVDYEDEEAAVVQYNDPYADGDPAWAPKNYIEKVVAIYDYTKDKDDELSFMEGAIIYVIKKNDDGWYEGVCNRVTGLFPGNYVESIMHYTD

SEQ ID NO: 35967 - protein, 509 aa, Homo sapiens
MAELQMLLEEEIPSGKRALIESYQNLTRVADYCENNYIQATDKRKALEETKAYTTQSLASVAYQINALANNVLQLLDIQASQLRRMESSINHISQTVDIHKEKVARREIGILTTNKNTSRTHKIIAPANMERPVRYIRKPIDYTVLDDVGHGVKKWHKIIHGNNQPARTGTLSRTNPPTQKPPSPPMSGRGTLGRNTPYKTLEPVKPPTVPNDYMTSPARLGSQHSPGRTASLNQRPRTHSGSSGGSGSRENSGSSSIGIPIAVPTPSPPTIGPENISVPPPSGAPPAPPLAPLLPVSTVIAAPGSAPGSQYGTMTRQISRHNSTTSSTSSGGYRRTPSVTAQFSAQPHVNGGPLYSQNSISIAPPPPPMPQLTPQIPLTGFVARVQENIADSPTPPPPPPPDDIPMFDDSPPPPPPPPVDYEDEEAAVVQYNDPYADGDPAWAPKNYIEKVVAIYDYTKDKDDELSFMEGAIIYVIKKNDDGWYEGVCNRVTGLFPGNYVESIMHYTD

SEQ ID NO: 35968 - protein, 480 aa, Homo sapiens
MAELQMLLEEEIPSGKRALIESYQNLTRVADYCENNYIQATDKRKALEETKAYTTQSLASVAYQINALANNVLQLLDIQASQLRRMESSINHISQTVDIHKEKVARREIGILTTNKNTSRTHKIIAPANMERPVRYIRKPIDYTVLDDVGHGVKWLKAKHGNNQPARTGTLSRTNPPTQKPPSPPMSGRGTLGRNTPYKTLEPVKPPTVPNDYMTSPARLGSQHSPGRTASLNQRPRTHSGSSGGSGSRENSGSSSIGIPIAVPTPSPPTIGPAPGSAPGSQYGTMTRQISRHNSTTSSTSSGGYRRTPSVTAQFSAQPHVNGGPLYSQNSISIAPPPPPMPQLTPQIPLTGFVARVQENIADSPTPPPPPPPDDIPMFDDSPPPPPPPPVDYEDEEAAVVQYNDPYADGDPAWAPKNYIEKVVAIYDYTKDKDDELSFMEGAIIYVIKKNDDGWYEGVCNRVTGLFPGNYVESIMHYTD

SEQ ID NO: 35969 - protein, 482 aa, Homo sapiens
MAELQMLLEEEIPSGKRALIESYQNLTRVADYCENNYIQATDKRKALEETKAYTTQSLASVAYQINALANNVLQLLDIQASQLRRMESSINHISQTVDIHKEKVARREIGILTTNKNTSRTHKIIAPANMERPVRYIRKPIDYTVLDDVGHGVKKWHKIIHGNNQPARTGTLSRTNPPTQKPPSPPMSGRGTLGRNTPYKTLEPVKPPTVPNDYMTSPARLGSQHSPGRTASLNQRPRTHSGSSGGSGSRENSGSSSIGIPIAVPTPSPPTIGPAAPGSAPGSQYGTMTRQISRHNSTTSSTSSGGYRRTPSVTAQFSAQPHVNGGPLYSQNSISIAPPPPPMPQLTPQIPLTGFVARVQENIADSPTPPPPPPPDDIPMFDDSPPPPPPPPVDYEDEEAAVVQYNDPYADGDPAWAPKNYIEKVVAIYDYTKDKDDELSFMEGAIIYVIKKNDDGWYEGVCNRVTGLFPGNYVESIMHYTD

SEQ ID NO: 35970 - protein, 423 aa, Homo sapiens
MAELQMLLEEEIPSGKRALIESYQNLTRVADYCENNYIQATDKRKALEETKAYTTQSLASVAYQINALANNVLQLLDIQASQLRRMESSINHISQTVDIHKEKVARREIGILTTNKNTSRTHKIIAPANMERPVRYIRKPIDYTVLDDVGHGVKKWHKIIHGNNQPARTGTLSRTNPPTQKPPSPPMSGRGTLGRNTPYKTLEPVKPPTVPNDYMTSPARLGSQHSPGRTASLNQRPRTHSGSSGGSGSRENSGSSSIGIPIAVPTPSPPTIGPVSIAPPPPPMPQLTPQIPLTGFVARVQENIADSPTPPPPPPPDDIPMFDDSPPPPPPPPVDYEDEEAAVVQYNDPYADGDPAWAPKNYIEKVVAIYDYTKDKDDELSFMEGAIIYVIKKNDDGWYEGVCNRVTGLFPGNYVESIMHYTD

SEQ ID NO: 35971 - protein, 452 aa, Homo sapiens
MAELQMLLEEEIPSGKRALIESYQNLTRVADYCENNYIQATDKRKALEETKAYTTQSLASVAYQINALANNVLQLLDIQASQLRRMESSINHISQTVDIHKEKVARREIGILTTNKNTSRTHKIIAPANMERPVRYIRKPIDYTVLDDVGHGVKWLKAKHGNNQPARTGTLSRTNPPTQKPPSPPMSGRGTLGRNTPYKTLEPVKPPTVPNDYMTSPARLGSQHSPGRTASLNQRPRTHSGSSGGSGSRENSGSSSIGIPIAVPTPSPPTIGPAAPGSAPGSQYGTMTRQISRHNSTTSSTSSGGYRRTPSVTAQFSAQPHVNGGPLYSQNSIADSPTPPPPPPPDDIPMFDDSPPPPPPPPVDYEDEEAAVVQYNDPYADGDPAWAPKNYIEKVVAIYDYTKDKDDELSFMEGAIIYVIKKNDDGWYEGVCNRVTGLFPGNYVESIMHYTD

SEQ ID NO: 35972 - protein, 476 aa, Homo sapiens
MAELQMLLEEEIPSGKRALIESYQNLTRVADYCENNYIQATDKRKALEETKAYTTQSLASVAYQINALANNVLQLLDIQASQLRRMESSINHISQTVDIHKEKVARREIGILTTNKNTSRTHKIIAPANMERPVRYIRKPIDYTVLDDVGHGVKHGNNQPARTGTLSRTNPPTQKPPSPPMSGRGTLGRNTPYKTLEPVKPPTVPNDYMTSPARLGSQHSPGRTASLNQRPRTHSGSSGGSGSRENSGSSSIGIPIAVPTPSPPTIGPAAPGSAPGSQYGTMTRQISRHNSTTSSTSSGGYRRTPSVTAQFSAQPHVNGGPLYSQNSISIAPPPPPMPQLTPQIPLTGFVARVQENIADSPTPPPPPPPDDIPMFDDSPPPPPPPPVDYEDEEAAVVQYNDPYADGDPAWAPKNYIEKVVAIYDYTKDKDDELSFMEGAIIYVIKKNDDGWYEGVCNRVTGLFPGNYVESIMHYTD

SEQ ID NO: 35973 - protein, 481 aa, Homo sapiens
MAELQMLLEEEIPSGKRALIESYQNLTRVADYCENNYIQATDKRKALEETKAYTTQSLASVAYQINALANNVLQLLDIQASQLRRMESSINHISQTVDIHKEKVARREIGILTTNKNTSRTHKIIAPANMERPVRYIRKPIDYTVLDDVGHGVKWLKAKHGNNQPARTGTLSRTNPPTQKPPSPPMSGRGTLGRNTPYKTLEPVKPPTVPNDYMTSPARLGSQHSPGRTASLNQRPRTHSGSSGGSGSRENSGSSSIGIPIAVPTPSPPTIGPAAPGSAPGSQYGTMTRQISRHNSTTSSTSSGGYRRTPSVTAQFSAQPHVNGGPLYSQNSISIAPPPPPMPQLTPQIPLTGFVARVQENIADSPTPPPPPPPDDIPMFDDSPPPPPPPPVDYEDEEAAVVQYNDPYADGDPAWAPKNYIEKVVAIYDYTKDKDDELSFMEGAIIYVIKKNDDGWYEGVCNRVTGLFPGNYVESIMHYTD

SEQ ID NO: 35974 - protein, 508 aa, Homo sapiens
MAELQMLLEEEIPSGKRALIESYQNLTRVADYCENNYIQATDKRKALEETKAYTTQSLASVAYQINALANNVLQLLDIQASQLRRMESSINHISQTVDIHKEKVARREIGILTTNKNTSRTHKIIAPANMERPVRYIRKPIDYTVLDDVGHGVKWLKAKHGNNQPARTGTLSRTNPPTQKPPSPPMSGRGTLGRNTPYKTLEPVKPPTVPNDYMTSPARLGSQHSPGRTASLNQRPRTHSGSSGGSGSRENSGSSSIGIPIAVPTPSPPTIGPENISVPPPSGAPPAPPLAPLLPVSTVIAAPGSAPGSQYGTMTRQISRHNSTTSSTSSGGYRRTPSVTAQFSAQPHVNGGPLYSQNSISIAPPPPPMPQLTPQIPLTGFVARVQENIADSPTPPPPPPPDDIPMFDDSPPPPPPPPVDYEDEEAAVVQYNDPYADGDPAWAPKNYIEKVVAIYDYTKDKDDELSFMEGAIIYVIKKNDDGWYEGVCNRVTGLFPGNYVESIMHYTD

SEQ ID NO: 35975 - protein, 475 aa, Homo sapiens
MAELQMLLEEEIPSGKRALIESYQNLTRVADYCENNYIQATDKRKALEETKAYTTQSLASVAYQINALANNVLQLLDIQASQLRRMESSINHISQTVDIHKEKVARREIGILTTNKNTSRTHKIIAPANMERPVRYIRKPIDYTVLDDVGHGVKHGNNQPARTGTLSRTNPPTQKPPSPPMSGRGTLGRNTPYKTLEPVKPPTVPNDYMTSPARLGSQHSPGRTASLNQRPRTHSGSSGGSGSRENSGSSSIGIPIAVPTPSPPTIGPAPGSAPGSQYGTMTRQISRHNSTTSSTSSGGYRRTPSVTAQFSAQPHVNGGPLYSQNSISIAPPPPPMPQLTPQIPLTGFVARVQENIADSPTPPPPPPPDDIPMFDDSPPPPPPPPVDYEDEEAAVVQYNDPYADGDPAWAPKNYIEKVVAIYDYTKDKDDELSFMEGAIIYVIKKNDDGWYEGVCNRVTGLFPGNYVESIMHYTD

SEQ ID NO: 35976 - protein, 446 aa, Homo sapiens
MAELQMLLEEEIPSGKRALIESYQNLTRVADYCENNYIQATDKRKALEETKAYTTQSLASVAYQINALANNVLQLLDIQASQLRRMESSINHISQTVDIHKEKVARREIGILTTNKNTSRTHKIIAPANMERPVRYIRKPIDYTVLDDVGHGVKHGNNQPARTGTLSRTNPPTQKPPSPPMSGRGTLGRNTPYKTLEPVKPPTVPNDYMTSPARLGSQHSPGRTASLNQRPRTHSGSSGGSGSRENSGSSSIGIPIAVPTPSPPTIGPAPGSAPGSQYGTMTRQISRHNSTTSSTSSGGYRRTPSVTAQFSAQPHVNGGPLYSQNSIADSPTPPPPPPPDDIPMFDDSPPPPPPPPVDYEDEEAAVVQYNDPYADGDPAWAPKNYIEKVVAIYDYTKDKDDELSFMEGAIIYVIKKNDDGWYEGVCNRVTGLFPGNYVESIMHYTD

SEQ ID NO: 35977 - protein, 451 aa, Homo sapiens
MAELQMLLEEEIPSGKRALIESYQNLTRVADYCENNYIQATDKRKALEETKAYTTQSLASVAYQINALANNVLQLLDIQASQLRRMESSINHISQTVDIHKEKVARREIGILTTNKNTSRTHKIIAPANMERPVRYIRKPIDYTVLDDVGHGVKWLKAKHGNNQPARTGTLSRTNPPTQKPPSPPMSGRGTLGRNTPYKTLEPVKPPTVPNDYMTSPARLGSQHSPGRTASLNQRPRTHSGSSGGSGSRENSGSSSIGIPIAVPTPSPPTIGPAPGSAPGSQYGTMTRQISRHNSTTSSTSSGGYRRTPSVTAQFSAQPHVNGGPLYSQNSIADSPTPPPPPPPDDIPMFDDSPPPPPPPPVDYEDEEAAVVQYNDPYADGDPAWAPKNYIEKVVAIYDYTKDKDDELSFMEGAIIYVIKKNDDGWYEGVCNRVTGLFPGNYVESIMHYTD

SEQ ID NO: 35978 - protein, 329 aa, Homo sapiens
MAELQMLLEEEIPSGKRALIESYQNLTRVADYCENNYIQATDKRKALEETKAYTTQSLASVAYQINALANNVLQLLDIQASQLRRMESSINHISQHGNNQPARTGTLSRTNPPTQKPPSPPMSGRGTLGRNTPYKTLEPVKPPTVPNDYMTSPARLGSQHSPGRTASLNQRPRTHSGSSGGSGSRENSGSSSIGIPIAVPTPSPPTIGPVADSPTPPPPPPPDDIPMFDDSPPPPPPPPVDYEDEEAAVVQYNDPYADGDPAWAPKNYIEKVVAIYDYTKDKDDELSFMEGAIIYVIKKNDDGWYEGVCNRVTGLFPGNYVESIMHYTD

SEQ ID NO: 35979 - protein, 394 aa, Homo sapiens
MAELQMLLEEEIPSGKRALIESYQNLTRVADYCENNYIQATDKRKALEETKAYTTQSLASVAYQINALANNVLQLLDIQASQLRRMESSINHISQTVDIHKEKVARREIGILTTNKNTSRTHKIIAPANMERPVRYIRKPIDYTVLDDVGHGVKKWHKIIHGNNQPARTGTLSRTNPPTQKPPSPPMSGRGTLGRNTPYKTLEPVKPPTVPNDYMTSPARLGSQHSPGRTASLNQRPRTHSGSSGGSGSRENSGSSSIGIPIAVPTPSPPTIGPVADSPTPPPPPPPDDIPMFDDSPPPPPPPPVDYEDEEAAVVQYNDPYADGDPAWAPKNYIEKVVAIYDYTKDKDDELSFMEGAIIYVIKKNDDGWYEGVCNRVTGLFPGNYVESIMHYTD

SEQ ID NO: 35980 - protein, 1330 aa, Homo sapiens
MPLSPPAQGDPGEPSPCRPPKKHTTFHLWRSKKKQQPAPPDCGVFVPHPLPAPAGEARALDVVDGKYVVRDSQEFPLHCGESQFFHTTSEALGSLLLESGIFKKSRAQPPEDNRRKPVLGKLGTLFTAGRRRNSRNGLESPTRSNAKPLSPKDVVASPKLPERESERSRSQSSQLKQTDTSEEGSPRENPREAEGELPESGGPAAPPDAELSPRWSSSAAAVAVQQCHENDSPQLEPLEAEGEPFPDATTTAKQLHSSPGNSSRQENAETPARSPGEDASPGAGHEQEAFLGVRGAPGSPTQERPAGGLGEAPNGAPSVCAEEGSLGPRNARSQPPKGASDLPGEPPAEGAAHTASSAQADCTARPKGHAHPAKVLTLDIYLSKTEGAQVDEPVVITPRAEDCGDWDDMEKRSSGRRSGRRRGSQKSTDSPGADAELPESAARDDAVFDDEVAPNAASDNASAEKKVKSPRAALDGGVASAASPESKPSPGTKGQLRGESDRSKQPPPASSPTKRKGRSRALEAVPAPPASGPRAPAKESPPKRVPDPSPVTKGTAAESGEEAARAIPRELPVKSSSLLPEIKPEHKRGPLPNHFNGRAEGGRSRELGRAAGAPGASDADGLKPRNHFGVGRSTVTTKVTLPAKPKHVELNLKTPKNLDSLGNEHNPFSQPVHKGNTATKISLFENKRTNSSPRHTDIRGQRNTPASSKTFVGRAKLNLAKKAKEMEQPEKKVMPNSPQNGVLVKETAIETKVTVSEEEILPATRGMNGDSSENQALGPQPNQDDKADVQTDAGCLSEPVASALIPVKDHKLLEKEDSEAADSKSLVLENVTDTAQDIPTTVDTKDLPPTAMPKPQHTFSDSQSPAESSPGPSLSLSAPAPGDVPKDTCVQSPISSFPCTDLKVSENHKGCVLPVSRQNNEKMPLLELGGETTPPLSTERSPEAVGSECPSRVLVQVRSFVLPVESTQDVSSQVIPESSEVREVQLPTCHSNEPEVVSVASCAPPQEEVLGNEHSHCTAELAAKSGPQVIPPASEKTLPIQAQSQGSRTPLMAESSPTNSPSSGNHLATPQRPDQTVTNGQDSPASLLNISAGSDDSVFDSSSDMEKFTEIIKQMDSAVCMPMKRKKARMPNSPAPHFAMPPIHEDHLEKVFDPKVFTFGLGKKKESQPEMSPALHLMQNLDTKSKLRPKRASAEQSVLFKSLHTNTNGNSEPLVMPEINDKENRDVTNGGIKRSRLEKSALFSSLLSSLPQDKIFSPSVTSVNTMTTAFSTSQNGSLSQSSVSQPTTEGAPPCGLNKEQSNLLPDNSLKVFNFNSSSTSHSSLKSPSHM

SEQ ID NO: 35981 - protein, 1723 aa, Homo sapiens
MEKRSSGRRSGRRRGSQKSTDSPGADAELPESAARDDAVFDDEVAPNAASDNASAEKKVKSPRAALDGGVASAASPESKPSPGTKGQLRGESDRSKQPPPASSPTKRKGRSRALEAVPAPPASGPRAPAKESPPKRVPDPSPVTKGTAAESGEEAARAIPRELPVKSSSLLPEIKPEHKRGPLPNHFNGRAEGGRSRELGRAAGAPGASDADGLKPRNHFGVGRSTVTTKVTLPAKPKHVELNLKTPKNLDSLGNEHNPFSQPVHKGNTATKISLFENKRTNSSPRHTDIRGQRNTPASSKTFVGRAKLNLAKKAKEMEQPEKKVMPNSPQNGVLVKETAIETKVTVSEEEILPATRGMNGDSSENQALGPQPNQDDKADVQTDAGCLSEPVASALIPVKDHKLLEKEDSEAADSKSLVLENVTDTAQDIPTTVDTKDLPPTAMPKPQHTFSDSQSPAESSPGPSLSLSAPAPGDVPKDTCVQSPISSFPCTDLKVSENHKGCVLPVSRQNNEKMPLLELGGETTPPLSTERSPEAVGSECPSRVLVQVRSFVLPVESTQDVSSQVIPESSEVREVQLPTCHSNEPEVVSVASCAPPQEEVLGNEHSHCTAELAAKSGPQVIPPASEKTLPIQAQSQGSRTPLMAESSPTNSPSSGNHLATPQRPDQTVTNGQDSPASLLNISAGSDDSVFDSSSDMEKFTEIIKQMDSAVCMPMKRKKARMPNSPAPHFAMPPIHEDHLEKVFDPKVFTFGLGKKKESQPEMSPALHLMQNLDTKSKLRPKRASAEQSVLFKSLHTNTNGNSEPLVMPEINDKENRDVTNGGIKRSRLEKSALFSSLLSSLPQDKIFSPSVTSVNTMTTAFSTSQNGSLSQSSVSQPTTEGAPPCGLNKEQSNLLPDNSLKVFNFNSSSTSHSSLKSPSHMEKYPQKEKTKEDLDSRSNLHLPETKFSELSKLKNDDMEKANHIESVIKSNLPNCANSDTDFMGLFKSSRYDPSISFSGMSLSDTMTLRGSVQNKLNPRPGKVVIYSEPDVSEKCIEVFSDIQDCSSWSLSPVILIKVVRGCWILYEQPNFEGHSIPLEEGELELSGLWGIEDILERHEEAESDKPVVIGSIRHVVQDYRVSHIDLFTEPEGLGILSSYFDDTEEMQGFGVMQKTCSMKVHWGTWLIYEEPGFQGVPFILEPGEYPDLSFWDTEEAYIGSMRPLKMGGRKVEFPTDPKVVVYEKPFFEGKCVELETGMCSFVMEGGETEEATGDDHLPFTSVGSMKVLRGIWVAYEKPGFTGHQYLLEEGEYRDWKAWGGYNGELQSLRPILGDFSNAHMIMYSEKNFGSKGSSIDVLGIVANLKETGYGVKTQSINVLSGVWVAYENPDFTGEQYILDKGFYTSFEDWGGKNCKISSVQPICLDSFTGPRRRNQIHLFSEPQFQGHSQSFEETTSQIDDSFSTKSCRVSGGSWVVYDGENFTGNQYVLEEGHYPCLSAMGCPPGATFKSLRFIDVEFSEPTIILFEREDFKGKKIELNAETVNLRSLGFNTQIRSVQVIGGIWVTYEYGSYRGRQFLLSPAEVPNWYEFSGCRQIGSLRPFVQKRIYFRLRNKATGLFMSTNGNLEDLKLLRIQVMEDVGADDQIWIYQEGCIKCRIAEDCCLTIVGSLVTSGSKLGLALDQNADSQFWSLKSDGRIYSKLKPNLVLDIKGGTQYDQNHIILNTVSKEKFTQVWEAMVLYT

SEQ ID NO: 35982 - protein, 316 aa, Homo sapiens
MQKPKTVAWENLGPEMSALGTAFSREGGRKVEFPTDPKVVVYEKPFFEGKCVELETGMCSFVMEGGETEEATGDDHLPFTSVGSMKVLRGIWVAYEKPGFTGHQYLLEEGEYRDWKAWGGYNGELQSLRPILGDFSNAHMIMYSEKNFGSKGSSIDVLGIVANLKETGYGVKTQSINVLSGVWVAYENPDFTGEQYILDKGFYTSFEDWGGKNCKISSVQPICLDSFTGPRRRNQIHLFSEPQFQGHSQSFEETTSQIDDSFSTKSCRVSGGSWVVYDGENFTGNQYVLEEGHYPCLSAMGCPPGATFKSLRFIDV

SEQ ID NO: 35983 - protein, 542 aa, Homo sapiens
MQKPKTVAWENLGPEMSALGTAFSREGGRKVEFPTDPKVVVYEKPFFEGKCVELETGMCSFVMEGGETEEATGDDHLPFTSVGSMKVLRGIWVAYEKPGFTGHQYLLEEGEYRDWKAWGGYNGELQSLRPILGDFSNAHMIMYSEKNFGSKGSSIDVLGIVANLKETGYGVKTQSINVLSGVWVAYENPDFTGEQYILDKGFYTSFEDWGGKNCKISSVQPICLDSFTGPRRRNQIHLFSEPQFQGHSQSFEETTSQIDDSFSTKSCRVSGGSWVVYDGENFTGNQYVLEEGHYPCLSAMGCPPGATFKSLRFIDVEFSEPTIILFEREDFKGKKIELNAETVNLRSLGFNTQIRSVQVIGGIWVTYEYGSYRGRQFLLSPAEVPNWYEFSGCRQIGSLRPFVQKRIYFRLRNKATGLFMSTNGNLEDLKLLRIQVMEDVGADDQIWIYQEGCIKCRIAEDCCLTIVGSLVTSGSKLGLALDQNADSQFWSLKSDGRIYSKLKPNLVLDIKGGTQYDQNHIILNTVSKEKFTQVWEAMVLYT

SEQ ID NO: 35984 - protein, 167 aa, Homo sapiens
MVAQQESIREGFQKRCLPVMVLKAKKPFTFETQEGKQEMFHATVATEKEFFFVKVFNTLLKDKFIPKRIIIIARYYRHSGFLEVNSASRVLDAESDQKVNVPLNIIRKAGETPKINTLQTQPLGTIVNGLFVVQKVTEKKKNILFDLSDNTGKMEVLGVRNEDTMKC

SEQ ID NO: 35985 - protein, 343 aa, Homo sapiens
MESKYKEILLLTGLDNITDEELDRFKFFLSDEFNIATGKLHTANRIQVATLMIQNAGAVSAVMKTIRIFQKLNYMLLAKRLQEEKEKVDKQYKSVTKPKPLSQAEMSPAASAAIRNDVAKQRAAPKVSPHVKPEQKQMVAQQESIREGFQKRCLPVMVLKAKKPFTFETQEGKQEMFHATVATEKEFFFVKVFNTLLKDKFIPKRIIIIARYYRHSGFLEVNSASRVLDAESDQKVNVPLNIIRKAGETPKINTLQTQPLGTIVNGLFVVQKVTEKKKNILFDLSDNTGKMEVLGVRNEDTMKCKEGDKVRLTFFTLSKNGEKLQLTSGVHSTIKVIKAKKKT

SEQ ID NO: 35986 - protein, 136 aa, Homo sapiens
MESKYKEILLLTGLDNITDEELDRFKFFLSDEFNIATGKLHTANRIQVATLMIQNAGAVSAVMKTIRIFQKLNYMLLAKRLQEEKEKVDKQYKSVTKPKPLSQAEMSPAASAAIRNDVAKQRAAPKVSPHVKPEQK

SEQ ID NO: 35987 - protein, 599 aa, Homo sapiens
MSKEERPGREEILECQVMWEPDSKKNTQMDRFRAAVGAACGLALESYDDLYHWSVESYSDFWAEFWKFSGIVFSRVYDEVVDTSKGIADVPEWFKGSRLNYAENLLRHKENDRVALYIAREGKEEIVKVTFEELRQEVALFAAAMRKMGVKKGDRVVGYLPNSEHAVEAMLAAASIGAIWSSTSPDFGVNGVLDRFSQIQPKLIFSVEAVVYNGKEHNHMEKLQQVVKGLPDLKKVVVIPYVSSRENIDLSKIPNSVFLDDFLATGTSEQAPQLEFEQLPFSHPLFIMFSSGTTGAPKCMVHSAGGTLIQHLKEHLLHGNMTSSDILLCYTTVGWMMWNWMVSLLATGAAMVLYDGSPLVPTPNVLWDLVDRIGITVLVTGAKWLSVLEEKAMKPVETHSLQMLHTILSTGSPLKAQSYEYVYRCIKSSILLGSISGGTDIISCFMGHNFSLPVYKGEIQARNLGMAVEAWNEEGKAVWGESGELVCTKPIPCQPTHFWNDENGNKYRKAYFSKFPGIWAHGDYCRINPKTGGIVMLGRSDGTLNPNGVRFGSSEIYNIVYAQRQESGSCRQTDHRWKSRGARRCFLEPRDPGSVPGHP

SEQ ID NO: 35988 - protein, 672 aa, Homo sapiens
MSKEERPGREEILECQVMWEPDSKKNTQMDRFRAAVGAACGLALESYDDLYHWSVESYSDFWAEFWKFSGIVFSRVYDEVVDTSKGIADVPEWFKGSRLNYAENLLRHKENDRVALYIAREGKEEIVKVTFEELRQEVALFAAAMRKMGVKKGDRVVGYLPNSEHAVEAMLAAASIGAIWSSTSPDFGVNGVLDRFSQIQPKLIFSVEAVVYNGKEHNHMEKLQQVVKGLPDLKKVVVIPYVSSRENIDLSKIPNSVFLDDFLATGTSEQAPQLEFEQLPFSHPLFIMFSSGTTGAPKCMVHSAGGTLIQHLKEHLLHGNMTSSDILLCYTTVGWMMWNWMVSLLATGAAMVLYDGSPLVPTPNVLWDLVDRIGITVLVTGAKWLSVLEEKAMKPVETHSLQMLHTILSTGSPLKAQSYEYVYRCIKSSILLGSISGGTDIISCFMGHNFSLPVYKGEIQARNLGMAVEAWNEEGKAVWGESGELVCTKPIPCQPTHFWNDENGNKYRKAYFSKFPGIWAHGDYCRINPKTGGIVMLGRSDGTLNPNGVRFGSSEIYNIVESFEEVEDSLCVPQYNKYREERVILFLKMASGHAFQPDLVKRIRDAIRMGLSARHVPSLILETKGIPYTLNGKKVEVAVKQIIAGKAVEQGGAFSNPETLDLYRDIPELQGF

SEQ ID NO: 35989 - protein, 253 aa, Homo sapiens
MRKMGVKKGDRVVGYLPNSEHAVEAMLAAASIGAIWSSTSPDFGVNGVLDRFSQIQPKLIFSVEAVVYNGKEHNHMEKLQQVVKGLPDLKKVVVIPYVSSRENIDLSKIPNSVFLDDFLATGTSEQAPQLEFEQLPFSHPLFIMFSSGTTGAPKCMVHSAGGTLIQHLKEHLLHGNMTSSDILLCYTTVGWMMWNWMVSLLATGAAMVLYDGSPLVPTPNVLWDLVDRIGYLGSWRLLQNQPQDRGHRHAWPE

SEQ ID NO: 35990 - protein, 614 aa, Homo sapiens
MRPPQCLLHTPSLASPLLLLLLWLLGGGVGAEGREDAELLVTVRGGRLRGIRLKTPGGPVSAFLGIPFAEPPMGPRRFLPPEPKQPWSGVVDATTFQSVCYQYVDTLYPGFEGTEMWNPNRELSEDCLYLNVWTPYPRPTSPTPVLVWIYGGGFYSGASSLDVYDGRFLVQAERTVLVSMNYRVGAFGFLALPGSREAPGNVGLLDQRLALQWVQENVAAFGGDPTSVTLFGESAGAASVGMHLLSPPSRGLFHRAVLQSGAPNGPWATVGMGEARRRATQLAHLVGCPPGGTGGNDTELVACLRTRPAQVLVNHEWHVLPQESVFRFSFVPVVDGDFLSDTPEALINAGDFHGLQVLVGVVKDEGSYFLVYGAPGFSKDNESLISRAEFLAGVRVGVPQVSDLAAEAVVLHYTDWLHPEDPARLREALSDVVGDHNVVCPVAQLAGRLAAQGARVYAYVFEHRASTLSWPLWMGVPHGYEIEFIFGIPLDPSRNYTAEEKIFAQRLMRYWANFARTGDPNEPRDPKAPQWPPYTAGAQQYVSLDLRPLEVRRGLRAQACAFWNRFLPKLLSATDTLDEAERQWKAEFHRWSSYMVHWKNQFDHYSKQDRCSDL

SEQ ID NO: 35991 - protein, 617 aa, Homo sapiens
MRPPQCLLHTPSLASPLLLLLLWLLGGGVGAEGREDAELLVTVRGGRLRGIRLKTPGGPVSAFLGIPFAEPPMGPRRFLPPEPKQPWSGVVDATTFQSVCYQYVDTLYPGFEGTEMWNPNRELSEDCLYLNVWTPYPRPTSPTPVLVWIYGGGFYSGASSLDVYDGRFLVQAERTVLVSMNYRVGAFGFLALPGSREAPGNVGLLDQRLALQWVQENVAAFGGDPTSVTLFGESAGAASVGMHLLSPPSRGLFHRAVLQSGAPNGPWATVGMGEARRRATQLAHLVGCPPGGTGGNDTELVACLRTRPAQVLVNHEWHVLPQESVFRFSFVPVVDGDFLSDTPEALINAGDFHGLQVLVGVVKDEGSYFLVYGAPGFSKDNESLISRAEFLAGVRVGVPQVSDLAAEAVVLHYTDWLHPEDPARLREALSDVVGDHNVVCPVAQLAGRLAAQGARVYAYVFEHRASTLSWPLWMGVPHGYEIEFIFGIPLDPSRNYTAEEKIFAQRLMRYWANFARTGDPNEPRDPKAPQWPPYTAGAQQYVSLDLRPLEVRRGLRAQACAFWNRFLPKLLSATASEAPSTCPGFTHGEAAPRPGLPLPLLLLHQLLLLFLSHLRRL

SEQ ID NO: 35992 - protein, 617 aa, Homo sapiens; identical to SEQ ID NO: 35991

SEQ ID NO: 35993 - protein, 614 aa, Homo sapiens; identical to SEQ ID NO: 35990

SEQ ID NO: 35994 - protein, 526 aa, Homo sapiens
MRPPQCLLHTPSLASPLLLLLLWLLGGGVGAEGREDAELLVTVRGGRLRGIRLKTPGGPVSAFLGIPFAEPPMGPRRFLPPEPKQPWSGVVDATTFQSVCYQYVDTLYPGFEGTEMWNPNRELSEDCLYLNVWTPYPRPTSPTPVLVWIYGGGFYSGASSLDVYDGRFLVQAERTVLVSMNYRVGAFGFLALPGSREAPGNVGLLDQRLALQWVQENVAAFGGDPTSVTLFGESAGAASVGMHLLSPPSRGLFHRAVLQSGAPNGPWATVGMGEARRRATQLAHLVGCPPGGTGGNDTELVACLRTRPAQVLVNHEWHVLPQESVFRFSFVPVVDGDFLSDTPEALINAGDFHGLQLAGRLAAQGARVYAYVFEHRASTLSWPLWMGVPHGYEIEFIFGIPLDPSRNYTAEEKIFAQRLMRYWANFARTGDPNEPRDPKAPQWPPYTAGAQQYVSLDLRPLEVRRGLRAQACAFWNRFLPKLLSATDTLDEAERQWKAEFHRWSSYMVHWKNQFDHYSKQDRCSDL

SEQ ID NO: 35995 - protein, 601 aa, Homo sapiens
MRPPQCLLHTPSLASPLLLLLLWLLGGGVGAEGREDAELLVTVRGGRLRGIRLKTPGGPVSAFLGIPFAEPPMGPRRFLPPEPKQPWSGVVDATTFQSVCYQYVDTLYPGFEGTEMWNPNRELSEDCLYLNVWTPYPRPTSPTPVLVWIYGGGFYSGASSLDVYDGRFLVQAERTVLVSMNYRVGAFGFLALPGSREAPGNVGLLDQRLALQWVQENVAAFGGDPTSVTLFGESAGAASVGMHLLSPPSRGLFHRAVLQSGAPNGPWATVGMGEARRRATQLAHLVGCPPGGTGGNDTELVACLRTRPAQVLVNHEWHVLPQESVFRFSFVPVVDGDFLSDTPEALINAGDFHGLQVLVGVVKDEGSYFLVYGAPGFSKDNESLISRAEFLAGVRVGVPQVSDLAAEAVVLHYTDWLHPEDPARLREALSDVVGDHNVVCPVAQLAGRLAAQGARVYAYVFEHRASTLSWPLWMGVPHGYEIEFIFGIPLDPSRNYTAEEKIFAQRLMRYWANFARTGDPNEPRDPKAPQWPPYTAGAQQYVSLDLRPLEVRRGLRAQACAFWNRFLPKLLSATGMQGPAGSGRRGVGARCNPSLLPLASE

SEQ ID NO: 35996 - protein, 614 aa, Homo sapiens; identical to SEQ ID NO: 35990

SEQ ID NO: 35997 - protein, 159 aa, Homo sapiens
MRPPQCLLHTPSLASPLLLLLLWLLGGGVGAEGREDAELLVTVRGGRLRGIRLKTPGGPVSAFLGIPFAEPPMGPRRFLPPEPKQPWSGVVDATTFQSVCYQYVDTLYPGFEGTEMWNPNRELSEDCLYLNVWTPYPRPTSPTPVLVWIYGGGFYSGAS

SEQ ID NO: 35998 - protein, 28 aa, Homo sapiens
MRPPQCLLHTPSLASPLLLLLLWLLGGG

SEQ ID NO: 35999 - protein, 93 aa, Homo sapiens
MLGLVMSCPDRTLVTKVRSHPSGNQHRPTRGGSRSFHCRRGVPRPAALRVLPRCPAFSDAACPAAMRPPQCLLHTPSLASPLLLLLLWLLGGG

SEQ ID NO: 36000 - protein, 427 aa, Homo sapiens
MAVLAALLRSGARSRSPLLRRLVQEIRYVERSYVSKPTLKEVVIVSATRTPIGSFLGSLSLLPATKLGSIAIQGAIEKAGIPKEEVKEAYMGNVLQGGEGQAPTRQAVLGAGLPISTPCTTINKVCASGMKAIMMASQSLMCGHQDVMVAGGMESMSNVPYVMNRGSTPYGGVKLEDLIVKDGLTDVYNKIHMGSCAENTAKKLNIARNEQDAYAINSYTRSKAAWEAGKFGNEVIPVTVTVKGQPDVVVKEDEEYKRVDFSKVPKLKTVFQKENGTVTAANASTLNDGAAALVLMTADAAKRLNVTPLARIVAFADAAVEPIDFPIAPVYAASMVLKDVGLKKEDIAMWEVNEAFSLVVLANIKMLEIDPQKVNINGGAVSLGHPIGMSGARIVGHLTHALKQGEYGLASICNGGGGASAMLIQKL

SEQ ID NO: 36001 - protein, 397 aa, Homo sapiens
MNAGSDPVVIVSAARTIIGSFNGALAAVPVQDLGSTVIKEVLKRATVAPEDVSEVIFGHVLAAGCGQNPVRQASVGAGIPYSVPAWSCQMICGSGLKAVCLAVQSIGIGDSSIVVAGGMENMSKAPHLAYLRTGVKIGEMPLTDSILCDGLTDAFHNCHMGITAENVAKKWQVSREDQDKVAVLSQNRTENAQKAGHFDKEIVPVLVSTRKGLIEVKTDEFPRHGSNIEAMSKLKPYFLTDGTGTVTPANASGINDGAAAVVLMKKSEADKRGLTPLARIVSWSQVGVEPSIMGIGPIPAIKQAVTKAGWSLEDVDIFEINEAFAAVSAAIVKELGLNPEKVNIEGGAIALGHPLGASGCRILVTLLHTLERMGRSRGVAALCIGGGMGIAMCVQRE

SEQ ID NO: 36002 - protein, 426 aa, Homo sapiens
MGSHPVLRIWGNRRATAASLGRSGGRLSSPRLLRVVAPTLTFAQTSRCSFNGALAAVPVQDLGSTVIKEVLKRATVAPEDVSEVIFGHVLAAGCGQNPVRQASVGAGIPYSVPAWSCQMICGSGLKAVCLAVQSIGIGDSSIVVAGGMENMSKAPHLAYLRTGVKIGEMPLTDSILCDGLTDAFHNCHMGITAENVAKKWQVSREDQDKVAVLSQNRTENAQKAGHFDKEIVPVLVSTRKGLIEVKTDEFPRHGSNIEAMSKLKPYFLTDGTGTVTPANASGINDGAAAVVLMKKSEADKRGLTPLARIVSWSQVGVEPSIMGIGPIPAIKQAVTKAGWSLEDVDIFEINEAFAAVSAAIVKELGLNPEKVNIEGGAIALGHPLGASGCRILVTLLHTLERMGRSRGVAALCIGGGMGIAMCVQRE

SEQ ID NO: 36003 - protein, 424 aa, Homo sapiens
MQRLQVVLGHLRGPADSGWMPQAAPCLSGAPQASAADVVVVHGRRTAICRAGRGGFKDTTPDELLSAVMTAVLKDVNLRPEQLGDICVGNVLQPGAGAIMARIAQFLSDIPETVPLSTVNRQCSSGLQAVASIAGGIRNGSYDIGMACGVESMSLADRGNPGNITSRLMEKEKARDCLIPMGITSENVAERFGISREKQDTFALASQQKAARAQSKGCFQAEIVPVTTTVHDDKGTKRSITVTQDEGIRPSTTMEGLAKLKPAFKKDGSTTAGNSSQVSDGAAAILLARRSKAEELGLPILGVLRSYAVVGVPPDIMGIGPAYAIPVALQKAGLTVSDVDIFEINEAFASQAAYCVEKLRLPPEKVNPLGGAVALGHPLGCTGARQVITLLNELKRRGKRAYGVVSMCIGTGMGAAAVFEYPGN

SEQ ID NO: 36004 - protein, 356 aa, Homo sapiens [sequence omitted]

SEQ ID NO: 36005 - protein, 153 aa, Homo sapiens
MQRLQVVLGHLRGPADSGWMPQAAPCLSGAPQASAADVVVVHGRRTAICRAGRGGFKDTTPDELLSAVMTAVLKDVNLRPEQLGDICVGNVLQPGAGAIMARIAQFLSDIPETVPLSTVNRQCSSGLQAVASIAGWSPCPWLTEGTLEILLRA

SEQ ID NO: 36006 - protein, 126 aa, Homo sapiens
MSLADRGNPGNITSRLMEKEKARDCLIPMGITSENVAERFGISREKQDTFALASQQKAARAQSKGCFQAEIVPVTTTVHDDKGTKRSITVTQDEGIRPSTTMEGLAKLKPAFKKDGSTTAGETGPG

SEQ ID NO: 36007 - protein, 331 aa, Homo sapiens
MQRLQVVLGHLRGPADSGWMPQAAPCLSGAPQASAADVVVVHGRRTAICRAGRGGFKDTTPDELLSAVMTAVLKDVNLRPEQLGDICVGNVLQPGAGAIMARIAQFLSDIPETVPLSTVNRQCSSGLQAVASIAGGIRNGSYDIGMACGITSENVAERFGISREKQDTFALASQQKAARAQSKGCFQAEIVPVTTTVHDDKGTKRSITVTQDEGIRPSTTMEGLAKLKPAFKKDGSTTAGLTVSDVDIFEINEAFASQAAYCVEKLRLPPEKVNPLGGAVALGHPLGCTGARQVITLLNELKRRGKRAYGVVSMCIGTGMGAAAVFEYPGN

SEQ ID NO: 36008 - protein, 2458 aa, Homo sapiens
MVLLLCLSCLIFSCLTFSWLKIWGKMTDSKPITKSKSEANLIPSQEPFPASDNSGETPQRNGEGHTLPKTPSQAEPASHKGPKDAGRRRNSLPPSHQKPPRNPLSSSDAAPSPELQANGTGTQGLEATDTNGLSSSARPQGQQAGSPSKEDKKQANIKRQLMTNFILGSFDDYSSDEDSVAGSSRESTRKGSRASLGALSLEAYLTTGEAETRVPTMRPSMSGLHLVKRGREHKKLDLHRDFTVASPAEFVTRFGGDRVIEKVLIANNGIAAVKCMRSIRRWAYEMFRNERAIRFVVMVTPEDLKANAEYIKMADHYVPVPGGPNNNNYANVELIVDIAKRIPVQAVWAGWGHASENPKLPELLCKNGVAFLGPPSEAMWALGDKIASTVVAQTLQVPTLPWSGSGLTVEWTEDDLQQGKRISVPEDVYDKGCVKDVDEGLEAAERIGFPLMIKASEGGGGKGIRKAESAEDFPILFRQVQSEIPGSPIFLMKLAQHARHLEVQILADQYGNAVSLFGRDCSIQRRHQKIVEEAPATIAPLAIFEFMEQCAIRLAKTVGYVSAGTVEYLYSQDGSFHFLELNPRLQVEHPCTEMIADVNLPAAQLQIAMGVPLHRLKDIRLLYGESPWGVTPISFETPSNPPLARGHVIAARITSENPDEGFKPSSGTVQELNFRSSKNVWGYFSVAATGGLHEFADSQFGHCFSWGENREEAISNMVVALKELSIRGDFRTTVEYLINLLETESFQNNDIDTGWLDYLIAEKVQAEKPDIMLGVVCGALNVADAMFRTCMTDFLHSLERGQVLPADSLLNLVDVELIYGGVKYILKVARQSLTMFVLIMNGCHIEIDAHRLNDGGLLLSYNGNSYTTYMKEEVDSYRITIGNKTCVFEKENDPTVLRSPSAGKLTQYTVEDGGHVEAGSSYAEMEVMKMIMTLNVQERGRVKYIKRPGAVLEAGCVVARLELDDPSKVHPAEPFTGELPAQQTLPILGEKLHQVFHSVLENLTNVMSGFCLPEPVFSIKLKEWVQKLMMTLRHPSLPLLELQEIMTSVAGRIPAPVEKSVRRVMAQYASNITSVLCQFPSQQIATILDCHAATLQRKADREVFFINTQSIVQLVQRYRSGIRGYMKTVVLDLLRRYLRVEHHFQQAHYDKCVINLREQFKPDMSQVLDCIFSHAQVAKKNQLVIMLIDELCGPDPSLSDELISILNELTQLSKSEHCKVALRARQILIASHLPSYELRHNQVESIFLSAIDMYGHQFCPENLKKLILSETTIFDVLPTFFYHANKVVCMASLEVYVRRGYIAYELNSLQHRQLPDGTCVVEFQFMLPSSHPNRMTVPISITNPDLLRHSTELFMDSGFSPLCQRMGAMVAFRRFEDFTRNFDEVISCFANVPKDTPLFSEARTSLYSEDDCKSLREEPIHILNVSIQCADHLEDEALVPILRTFVQSKKNILVDYGLRRITFLIAQEKEFPKFFTFRARDEFAEDRIYRHLEPALAFQLELNRMRNFDLTAVPCANHKMHLYLGAAKVKEGVEVTDHRFFIRAIIRHSDLITKEASFEYLQNEGERLLLEAMDELEVAFNNTSVRTDCNHIFLNFVPTVIMDPFKIEESVRYMVMRYGSRLWKLRVLQAEVKINIRQTTTGSAVPIRLFITNESGYYLDISLYKEVTDSRSGNIMFHSFGNKQGPQHGMLINTPYVTKDLLQAKRFQAQTLGTTYIYDFPEMFRQALFKLWGSPDKYPKDILTYTELVLDSQGQLVEMNRLPGGNEVGMVAFKMRFKTQEYPEGRDVIVIGNDITFRIGSFGPGEDLLYLRASEMARAEGIPKIYVAANSGARIGMAEEIKHMFHVAWVDPEDPHKGFKYLYLTPQDYTRISSLNSVHCKHIEEGGESRYMITDIIGKDDGLGVENLRGSGMIAGESSLAYEEIVTISLVTCRAIGIGAYLVRLGQRVIQVENSHIILTGASALNKVLGREVYTSNNQLGGVQIMHYNGVSHITVPDDFEGVYTILEWLSYMPKDNHSPVPIITPTDPIDREIEFLPSRAPYDPRWMLAGRPHPTLKGTWQSGFFDHGSFKEIMAPWAQTVVTGRARLGGIPVGVIAVETRTVEVAVPADPANLDSEAKIIQQAGQVWFPDSAYKTAQAVKDFNREKLPLMIFANWRGFSGGMKDMYDQVLKFGAYIVDGLRQYKQPILIYIPPYAELRGGSWVVIDATINPLCIEMYADKESRGGVLEPEGTVEIKFRKKDLIKSMRRIDPAYKKLMEQLGEPDLSDKDRKDLEGRLKAREDLLLPIYHQVAVQFADFHDTPGRMLEKGVISDILEWKTARTFLYWRLRRLLLEDQVKQEILQASGELSHVHIQSMLRRWFVETEGAVKAYLWDNNQVVVQWLEQHWQAGDGPRSTIRENITYLKHDSVLKTIRGLVEENPEVAVDCVIYLSQHISPAERAQVVHLLSTMDSPAST

SEQ ID NO: 36009 - protein, 2458 aa, Homo sapiens; identical to SEQ ID NO: 36008

SEQ ID NO: 36010 - protein, 2388 aa, Homo sapiens
MVLLLCLSCLIFSCLTFSWLKIWGKMTDSKPITKSKSEANLIPSQEPFPASDNSGETPQRNGEGHTLPKTPSQAEPASHKGPKDAGRRRNSLPPSHQKPPRNPLSSSDAAPSPELQANGTGTQGLEATDTNGLSSSARPQGQQAGSPSKEDKKQANIKRQLMTNFILGSFDDYSSDEDSVAGSSRESTRKGSRASLGALSLEAYLTTGEAETRVPTMRPSMSGLHLVKRGREHKKLDLHRDFTVASPAEFVTRFGGDRVIEKVLIANNGIAAVKCMRSIRRWAYEMFRNERAIRFVVMVTPEDLKANAEYIKMADHYVPVPGGPNNNNYANVELIVDIAKRIPVQAVWAGWGHASENPKLPELLCKNGVAFLGPPSEAMWALGDKIASTVVAQTLQVPTLPWSGSGLTVEWTEDDLQQGKRISVPEDVYDKGCVKDVDEGLEAAERIGFPLMIKASEGGGGKGIRKAESAEDFPILFRQVQSEIPGSPIFLMKLAQHARHLEVQILADQYGNAVSLFGRDCSIQRRHQKIVEEAPATIAPLAIFEFMEQCAIRLAKTVGYVSAGTVEYLYSQDGSFHFLELNPRLQVEHPCTEMIADVNLPAAQLQIAMGVPLHRLKDIRLLYGESPWGVTPISFETPSNPPLARGHVIAARITSENPDEGFKPSSGTVQELNFRSSKNVWGYFSVAATGGLHEFADSQFGHCFSWGENREEAISNMVVALKELSIRGDFRTTVEYLINLLETESFQNNDIDTGWLDYLIAEKVQAEKPDIMLGVVCGALNVADAMFRTCMTDFLHSLERGQVLPADSLLNLVDVELIYGGVKYILKVARQSLTMFVLIMNGCHIEIDAHRLNDGGLLLSYNGNSYTTYMKEEVDSYRITIGNKTCVFEKENDPTVLRSPSAGKLTQYTVEDGGHVEAGSSYAEMEVMKMIMTLNVQERGRVKYIKRPGAVLEAGCVVARLELDDPSKVHPAEPFTGELPAQQTLPILGEKLHQVFHSVLENLTNVMSGFCLPEPVFSIKLKEWVQKLMMTLRHPSLPLLELQEIMTSVAGRIPAPVEKSVRRVMAQYASNITSVLCQFPSQQIATILDCHAATLQRKADREVFFINTQSIVQLVQSKDELCGPDPSLSDELISILNELTQLSKSEHCKVALRARQILIASHLPSYELRHNQVESIFLSAIDMYGHQFCPENLKKLILSETTIFDVLPTFFYHANKVVCMASLEVYVRRGYIAYELNSLQHRQLPDGTCVVEFQFMLPSSHPNRMTVPISITNPDLLRHSTELFMDSGFSPLCQRMGAMVAFRRFEDFTRNFDEVISCFANVPKDTPLFSEARTSLYSEDDCKSLREEPIHILNVSIQCADHLEDEALVPILRTFVQSKKNILVDYGLRRITFLIAQEKEFPKFFTFRARDEFAEDRIYRHLEPALAFQLELNRMRNFDLTAVPCANHKMHLYLGAAKVKEGVEVTDHRFFIRAIIRHSDLITKEASFEYLQNEGERLLLEAMDELEVAFNNTSVRTDCNHIFLNFVPTVIMDPFKIEESVRYMVMRYGSRLWKLRVLQAEVKINIRQTTTGSAVPIRLFITNESGYYLDISLYKEVTDSRSGNIMFHSFGNKQGPQHGMLINTPYVTKDLLQAKRFQAQTLGTTYIYDFPEMFRQALFKLWGSPDKYPKDILTYTELVLDSQGQLVEMNRLPGGNEVGMVAFKMRFKTQEYPEGRDVIVIGNDITFRIGSFGPGEDLLYLRASEMARAEGIPKIYVAANSGARIGMAEEIKHMFHVAWVDPEDPHKGFKYLYLTPQDYTRISSLNSVHCKHIEEGGESRYMITDIIGKDDGLGVENLRGSGMIAGESSLAYEEIVTISLVTCRAIGIGAYLVRLGQRVIQVENSHIILTGASALNKVLGREVYTSNNQLGGVQIMHYNGVSHITVPDDFEGVYTILEWLSYMPKDNHSPVPIITPTDPIDREIEFLPSRAPYDPRWMLAGRPHPTLKGTWQSGFFDHGSFKEIMAPWAQTVVTGRARLGGIPVGVIAVETRTVEVAVPADPANLDSEAKIIQQAGQVWFPDSAYKTAQAVKDFNREKLPLMIFANWRGFSGGMKDMYDQVLKFGAYIVDGLRQYKQPILIYIPPYAELRGGSWVVIDATINPLCIEMYADKESRGGVLEPEGTVEIKFRKKDLIKSMRRIDPAYKKLMEQLGEPDLSDKDRKDLEGRLKAREDLLLPIYHQVAVQFADFHDTPGRMLEKGVISDILEWKTARTFLYWRLRRLLLEDQVKQEILQASGELSHVHIQSMLRRWFVETEGAVKAYLWDNNQVVVQWLEQHWQAGDGPRSTIRENITYLKHDSVLKTIRGLVEENPEVAVDCVIYLSQHISPAERAQVVHLLSTMDSPAST

SEQ ID NO: 36011 - protein, 1689 aa, Homo sapiens
LPFLLKPPQTLPSPDAMFRTCMTDFLHSLERGQVLPADSLLNLVDVELIYGGVKYILKVARQSLTMFVLIMNGCHIEIDAHRLNDGGLLLSYNGNSYTTYMKEEVDSYRITIGNKTCVFEKENDPTVLRSPSAGKLTQYTVEDGGHVEAGSSYAEMEVMKMIMTLNVQERGRVKYIKRPGAVLEAGCVVARLELDDPSKVHPAEPFTGELPAQQTLPILGEKLHQVFHSVLENLTNVMSGFCLPEPVFSIKLKEWVQKLMMTLRHPSLPLLELQEIMTSVAGRIPAPVEKSVRRVMAQYASNITSVLCQFPSQQIATILDCHAATLQRKADREVFFINTQSIVQLVQRYRSGIRGYMKTVVLDLLRRYLRVEHHFQQAHYDKCVINLREQFKPDMSQVLDCIFSHAQVAKKNQLVIMLIDELCGPDPSLSDELISILNELTQLSKSEHCKVALRARQILIASHLPSYELRHNQVESIFLSAIDMYGHQFCPENLKKLILSETTIFDVLPTFFYHANKVVCMASLEVYVRRGYIAYELNSLQHRQLPDGTCVVEFQFMLPSSHPNRMTVPISITNPDLLRHSTELFMDSGFSPLCQRMGAMVAFRRFEDFTRNFDEVISCFANVPKDTPLFSEARTSLYSEDDCKSLREEPIHILNVSIQCADHLEDEALVPILRTFVQSKKNILVDYGLRRITFLIAQEKEFPKFFTFRARDEFAEDRIYRHLEPALAFQLELNRMRNFDLTAVPCANHKMHLYLGAAKVKEGVEVTDHRFFIRAIIRHSDLITKEASFEYLQNEGERLLLEAMDELEVAFNNTSVRTDCNHIFLNFVPTVIMDPFKIEESVRYMVMRYGSRLWKLRVLQAEVKINIRQTTTGSAVPIRLFITNESGYYLDISLYKEVTDSRSGNIMFHSFGNKQGPQHGMLINTPYVTKDLLQAKRFQAQTLGTTYIYDFPEMFRQALFKLWGSPDKYPKDILTYTELVLDSQGQLVEMNRLPGGNEVGMVAFKMRFKTQEYPEGRDVIVIGNDITFRIGSFGPGEDLLYLRASEMARAEGIPKIYVAANSGARIGMAEEIKHMFHVAWVDPEDPHKGFKYLYLTPQDYTRISSLNSVHCKHIEEGGESRYMITDIIGKDDGLGVENLRGSGMIAGESSLAYEEIVTISLVTCRAIGIGAYLVRLGQRVIQVENSHIILTGASALNKVLGREVYTSNNQLGGVQIMHYNGVSHITVPDDFEGVYTILEWLSYMPKDNHSPVPIITPTDPIDREIEFLPSRAPYDPRWMLAGRPHPTLKGTWQSGFFDHGSFKEIMAPWAQTVVTGRARLGGIPVGVIAVETRTVEVAVPADPANLDSEAKIIQQAGQVWFPDSAYKTAQAVKDFNREKLPLMIFANWRGFSGGMKDMYDQVLKFGAYIVDGLRQYKQPILIYIPPYAELRGGSWVVIDATINPLCIEMYADKESRGGVLEPEGTVEIKFRKKDLIKSMRRIDPAYKKLMEQLGEPDLSDKDRKDLEGRLKAREDLLLPIYHQVAVQFADFHDTPGRMLEKGVISDILEWKTARTFLYWRLRRLLLEDQVKQEILQASGELSHVHIQSMLRRWFVETEGAVKAYLWDNNQVVVQWLEQHWQAGDGPRSTIRENITYLKHDSVLKTIRGLVEENPEVAVDCVIYLSQHISPAERAQVVHLLSTMDSPAST

SEQ ID NO: 36012 - protein, 143 aa, Homo sapiens
MTDSKPITKSKSEANLIPSQEPFPASDNSGETPQRNGEGHTLPKTPSQAEPASHKGPKDAGRRRNSLPPSHQKPPRNPLSSSDAAPSPELQANGTGTQGLEATDTNGLSSSARPQGQQAGSPSKEDKKQANIKRQLMTNFILG

SEQ ID NO: 36013 - protein, 858 aa, Homo sapiens
MTVPISITNPDLLRHSTELFMDSGFSPLCQRMGAMVAFRRFEDFTRNFDEVISCFANVPKDTPLFSEARTSLYSEDDCKSLREEPIHILNVSIQCADHLEDEALVPILRTFVQSKKNILVDYGLRRITFLIAQEKEFPKFFTFRARDEFAEDRIYRHLEPALAFQLELNRMRNFDLTAVPCANHKMHLYLGAAKVKEGVEVTDHRFFIRAIIRHSDLITKEASFEYLQNEGERLLLEAMDELEVAFNNTSVRTDCNHIFLNFVPTVIMDPFKIEESVRYMVMRYGSRLWKLRVLQAEVKINIRQTTTGSAVPIRLFITNESGYYLDISLYKEVTDSRSGNIMFHSFGNKQGPQHGMLINTPYVTKDLLQAKRFQAQTLGTTYIYDFPEMFRQALFKLWGSPDKYPKDILTYTELVLDSQGQLVEMNRLPGGNEVGMVAFKMRFKTQEYPEGRDVIVIGNDITFRIGSFGPGEDLLYLRASEMARAEGIPKIYVAANSGARIGMAEEIKHMFHVAWVDPEDPHKGFKYLYLTPQDYTRISSLNSVHCKHIEEGGESRYMITDIIGKDDGLGVENLRGSGMIAGESSLAYEEIVTISLVTCRAIGIGAYLVRLGQRVIQVENSHIILTGASALNKVLGREVYTSNNQLGGVQIMHYNGVSHITVPDDFEGVYTILEWLSYMPKDNHSPVPIITPTDPIDREIEFLPSRAPYDPRWMLAGRPHPTLKGTWQSGFFDHGSFKEIMAPWAQTVVTGRARLGGIPVGVIAVETRTVEVAVPADPANLDSEAKIIQQAGQVWFPDSAYKTAQAVKDFNREKLPLMIFANWRGFSGGMKGCLGTWRDVSWWKIRAMLPMHIGEGSV

SEQ ID NO: 36014 - protein, 345 aa, Homo sapiens
MGSSEDQAYRLLNDYANGFMVSQVLFAACELGVFDLLAEAPGPLDVAAVAAGVRASAHGTELLLDICVSLKLLKVETRGGKAFYRNTELSSDYLTTVSPTSQCSMLKYMGRTSYRCWGHLADAVREGRNQYLETFGVPAEELFTAIYRSEGERLQFMQALQEVWSVNGRSVLTAFDLSVFPLMCDLGGGAGALAKECMSLYPGCKITVFDIPEVVWTAKQHFSFQEEEQIDFQEGDFFKDPLPEADLYILARVLHDWADGKCSHLLERIYHTCKPGGGILVIESLLDEDRRGPLLTQLYSLNMLVQTEGQERTPTHYHMLLSSAGFRDFQFKKTGAIYDAILARK

SEQ ID NO: 36015 - protein, 298 aa, Homo sapiens
MGSSEDQAYRLLNDYANGFMVSQVLFAACELGVFDLLAEAPGPLDVAAVAAGVRASAHGTELLLDICVSLKLLKVETRGGKAFYRNTELSSDYLTTVSPTSQCSMLKYMGRTSYRCWGHLADAVREGRNQYLETFGVPAEELFTAIYRSEGERLQFMQALQEVWSVNGRSVLTAFDLSVFPLMCDLGGDFFKDPLPEADLYILARVLHDWADGKCSHLLERIYHTCKPGGGILVIESLLDEDRRGPLLTQLYSLNMLVQTEGQERTPTHYHMLLSSAGFRDFQFKKTGAIYDAILARK

SEQ ID NO: 36016 - protein, 373 aa, Homo sapiens
MGSSEDQAYRLLNDYANGFMVSQVLFAACELGVFDLLAEAPGPLDVAAVAAGVRASAHGTELLLDICVSLKLLKVETRGGKAFYRNTELSSDYLTTVSPTSQCSMLKYMGRTSYRCWGHLADAVREGRNQYLETFGVPAEELFTAIYRSEGERLQFMQALQEVWSVNGRSVLTAFDLSVFPLMCDLGGTWIKLETIILSKLSQGQKTKHRVFSLIGGAGALAKECMSLYPGCKITVFDIPEVVWTAKQHFSFQEEEQIDFQEGDFFKDPLPEADLYILARVLHDWADGKCSHLLERIYHTCKPGGGILVIESLLDEDRRGPLLTQLYSLNMLVQTEGQERTPTHYHMLLSSAGFRDFQFKKTGAIYDAILARK

SEQ ID NO: 36017 - protein, 124 aa, Homo sapiens
DCRLTSVCLPCVPGDFFKDPLPEADLYILARVLHDWADGKCSHLLERIYHTCKPGGGILVIESLLDEDRRGPLLTQLYSLNMLVQTEGQERTPTHYHMLLSSAGFRDFQFKKTGAIYDAILARK

SEQ ID NO: 36018 - protein, 236 aa, Homo sapiens
MESSAKMESGGAGQQPQPQPQQPFLPPAACFFATAAAAAAAAAAAAAQSAQQQQQQQQQQQQAPQLRPAADGQPSGGGHKSAPKQVKRQRSSSPELMRCKRRLNFSGFGYSLPQQQPAAVARRNERERNRVKLVNLGFATLREHVPNGAANKKMSKVETLRSAVEYIRALQQLLDEHDAVSAAFQAGVLSPTISPNYSNDLNSMAGSPVSSYSSDEGSYDPLSPEEQELLDFTNWF

SEQ ID NO: 36019 - protein, 193 aa, Homo sapiens
MDGGTLPRSAPPAPPVPVGCAARRRPASPELLRCSRRRRPATAETGGGAAAVARRNERERNRVKLVNLGFQALRQHVPHGGASKKLSKVETLRSAVEYIRALQRLLAEHDAVRNALAGGLRPQAVRPSAPRGPPGTTPVAASPSRASSSPGRGGSSEPGSPRSAYSSDDSGCEGALSPAERELLDFSSWLGGY

SEQ ID NO: 36020 - protein, 513 aa, Homo sapiens
MCSLGLFPPPPPRGQVTLYEHNNELVTGSSYESPPPDFRGQWINLPVLQLTKDPLKTPGRLDHGTRTAFIHHREQVWKRCINIWRDVGLFGVLNEIANSEEEVFEWVKTASGWALALCRWASSLHGSLFPHLSLRSEDLIAEFAQVTNCTIVPSLKHRLQRNVASLAWKPLSASVLAVACQSCILIWTLDPTSLSTRPSSGCAQVLSHPGHTPVTSLAWAPSGGRLLSASPVDAAIRVWDVSTETCVPLPWFRGGGVTNLLWSPDGSKILATTPSAVFRVWEAQMWTCERWPTLSGRCQTGCWSPDGSRLLFTVLGEPLIYSLSFPERCGEGKGCVGGAKSATIVADLSETTIQTPDGEERLGGEAHSMVWDPSGERLAVLMKGKPRVQDGKPVILLFRTRNSPVFELLPCGIIQGEPGAQPQLITFHPSFNKGALLSVGWSTGRIAHIPLYFVNAQFPRFSPVLGRAQEPPAGGGGSIHDLPLFTETSPTSAPWDPLPGPPPVLPHSPHSHL

SEQ ID NO: 36021 - protein, 546 aa, Homo sapiens [sequence omitted]

SEQ ID NO: 36022 - protein, 112 aa, Homo sapiens
MAEQATKSVLFVCLGNICRSPIAEAVFRKLVTDQNISENWRVDSAATSGYEIGNPPDYRGQSCMKRHGIPMSHVARQVPSLDLKLCVLCFSGSLTAVLFLTGTWAGPQTQEL

SEQ ID NO: 36023 - protein, 158 aa, Homo sapiens
MAEQATKSVLFVCLGNICRSPIAEAVFRKLVTDQNISENWRVDSAATSGYEIGNPPDYRGQSCMKRHGIPMSHVARQITKEDFATFDYILCMDESNLRDLNRKSNQVKTCKAKIELLGSYDPQKQLIIEDPYYGNDSDFETVYQQCVRCCRAFLEKAH

SEQ ID NO: 36024 - protein, 158 aa, Homo sapiens
MAEQATKSVLFVCLGNICRSPIAEAVFRKLVTDQNISENWVIDSGAVSDWNVGRSPDPRAVSCLRNHGIHTAHKARQITKEDFATFDYILCMDESNLRDLNRKSNQVKTCKAKIELLGSYDPQKQLIIEDPYYGNDSDFETVYQQCVRCCRAFLEKAH

SEQ ID NO: 36025 - protein, 72 aa, Homo sapiens
MAEQATKSVLFVCLGNICRSPIAEAVFRKLVTDQNISENWRVDSAATSGGSLTAVLFLTGTWAGPQTKSCAA

SEQ ID NO: 36026 - protein, 160 aa, Homo sapiens
MAGKRSGWSRAALLQLLLGVNLVVMPPTRARSLRFVTLLYRHGDRSPVKTYPKDPYQEEEWPQGFGQLTKEGMLQHWELGQALRQRYHGFLNTSYHRQEVYVRSTDFDRTLMSAEANLAGLFPPNGMQRFNPNISWQPIPVHTVPITEDRVRVASPSLGW

SEQ ID NO: 36027 - protein, 423 aa, Homo sapiens
MAGKRSGWSRAALLQLLLGVNLVVMPPTRARSLRFVTLLYRHGDRSPVKTYPKDPYQEEEWPQGFGQLTKEGMLQHWELGQALRQRYHGFLNTSYHRQEVYVRSTDFDRTLMSAEANLAGLFPPNGMQRFNPNISWQPIPVHTVPITEDRLLKFPLGPCPRYEQLQNETRQTPEYQNESSRNAQFLDMVANETGLTDLTLETVWNVYDTLFCEQTHGLRLPPWASPQTMQRLSRLKDFSFRFLFGIYQQAEKARLQGGVLLAQIRKNLTLMATTSQLPKLLVYSAHDTTLVALQMALDVYNGEQAPYASCHIFELYQEDSGNFSVEMYFRNESDKAPWPLSLPGCPHRCPLQDFLRLTEPVVPKDWQQECQLASGPADTEVIVALAVCGSILFLLIVLLLTVLFRMQAQPPGYRHVADGEDHA

SEQ ID NO: 36028 - protein, 391 aa, Homo sapiens
MAGKRSGWSRAALLQLLLGVNLVVMPPTRARSLRFVTLEGMLQHWELGQALRQRYHGFLNTSYHRQEVYVRSTDFDRTLMSAEANLAGLFPPNGMQRFNPNISWQPIPVHTVPITEDRLLKFPLGPCPRYEQLQNETRQTPEYQNESSRNAQFLDMVANETGLTDLTLETVWNVYDTLFCEQTHGLRLPPWASPQTMQRLSRLKDFSFRFLFGIYQQAEKARLQGGVLLAQIRKNLTLMATTSQLPKLLVYSAHDTTLVALQMALDVYNGEQAPYASCHIFELYQEDSGNFSVEMYFRNESDKAPWPLSLPGCPHRCPLQDFLRLTEPVVPKDWQQECQLASGPADTEVIVALAVCGSILFLLIVLLLTVLFRMQAQPPGYRHVADGEDHA

SEQ ID NO: 36029 - protein, 236 aa, Homo sapiens
MVANETGLTDLTLETVWNVYDTLFCEQTHGLRLPPWASPQTMQRLSRLKDFSFRFLFGIYQQAEKARLQGGVLLAQIRKNLTLMATTSQLPKLLVYSAHDTTLVALQMALDVYNGEQAPYASCHIFELYQEDSGNFSVEMYFRNESDKAPWPLSLPGCPHRCPLQDFLRLTEPVVPKDWQQECQLASGPADTEVIVALAVCGSILFLLIVLLLTVLFRMQAQPPGYRHVADGEDHA

SEQ ID NO: 36030 - protein, 413 aa, Homo sapiens
MAGKRSGWSRAALLQLLLGVNLVVMPPTRARSLRFVTLLYRHGDRSPVKTYPKDPYQEEEWPQGFGQLTKEGMLQRYHGFLNTSYHRQEVYVRSTDFDRTLMSAEANLAGLFPPNGMQRFNPNISWQPIPVHTVPITEDRLLKFPLGPCPRYEQLQNETRQTPEYQNESSRNAQFLDMVANETGLTDLTLETVWNVYDTLFCEQTHGLRLPPWASPQTMQRLSRLKDFSFRFLFGIYQQAEKARLQGGVLLAQIRKNLTLMATTSQLPKLLVYSAHDTTLVALQMALDVYNGEQAPYASCHIFELYQEDSGNFSVEMYFRNESDKAPWPLSLPGCPHRCPLQDFLRLTEPVVPKDWQQECQLASGPADTEVIVALAVCGSILFLLIVLLLTVLFRMQAQPPGYRHVADGEDHA

SEQ ID NO: 36031 - protein, 325 aa, Homo sapiens
MDMWTALLILQALLLPSLADGATPALRFVAVGDWGGVPNAPFHTAREMANAKEIARTVQILGADFILSLGDNFYFTGVQDINDKRFQETFEDVFSDRSLRKVPWYVLAGNHDHLGNVSAQIAYSKISKRWNFPSPFYRLHFKIPQTNVSVAIFMLDTVTLCGNSDDFLSQQPERPRDVKLARTQLSWLKKQLAAAREDYVLVAGHYPVWSIAEHGPTHCLVKQLRPLLATYGVTAYLCGHDHNLQYLQDENGVGYVLSGAGNFMDPSKRHQRKVPNGYLRFHYGTEDSLGGFAYVEISSKEMTVTYIEASGKSLFKTRLPRRARP

SEQ ID NO: 36032 - protein, 325 aa, Homo sapiens; identical to SEQ ID NO: 36031

SEQ ID NO: 36033 - protein, 325 aa, Homo sapiens; identical to SEQ ID NO: 36031

SEQ ID NO: 36034 - protein, 325 aa, Homo sapiens; identical to SEQ ID NO: 36031

SEQ ID NO: 36035 - protein, 386 aa, Homo sapiens
MRAAPLLLARAASLSLGFLFLLFFWLDRSVLAKELKFVTLVFRHGDRSPIDTFPTDPIKESSWPQGFGQLTQLGMEQHYELGEYIRKRYRKFLNESYKHEQVYIRSTDVDRTLMSAMTNLAALFPPEGVSIWNPILLWQPIPVHTVPLSEDQLLYLPFRNCPRFQELESETLKSEEFQKRLHPYKDFIATLGKLSGLHGQDLFGIWSKVYDPLYCESVHNFTLPSWATEDTMTKLRELSELSLLSLYGIHKQKEKSRLQGGVLVNEILNHMKRATQIPSYKKLIMYSAHDTTVSGLQMALDVYNGLLPPYASCHLTELYFEKGEYFVEMYYRNETQHEPYPLMLPGCSPSCPLERFAELVGPVIPQDWSTECMTTNSHQGTEDSTD

SEQ ID NO: 36036 - protein, 418 aa, Homo sapiens
MRAAPLLLARAASLSLGFLFLLFFWLDRSVLAKELKFVTLVFRHGDRSPIDTFPTDPIKESSWPQGFGQLTQLGMEQHYELGEYIRKRYRKFLNESYKHEQVYIRSTDVDRTLMSAMTNLAALFPPEGVSIWNPILLWQPIPVHTVPLSEDQLLYLPFRNCPRFQELESETLKSEEFQKRLHPYKDFIATLGKLSGLHGQDLFGIWSKVYDPLYCESVHNFTLPSWATEDTMTKLRELSELSLLSLYGIHKQKEKSRLQGGVLVNEILNHMKRATQIPSYKKLIMYSAHDTTVSGLQMALDVYNGLLPPYASCHLTELYFEKGEYFVEMYYRNETQHEPYPLMLPGCSPSCPLERFAELVGPVIPQDWSTECMTTNSHQVLKVIFAVAFCLISAVLMVLLFIHIRRGLCWQRESYGNI

SEQ ID NO: 36037 - protein, 426 aa, Homo sapiens
MAGLGFWGHPAGPLLLLLLLVLPPRALPEGPLVFVALVFRHGDRAPLASYPMDPHKEVASTLWPRGLGQLTTEGVRQQLELGRFLRSRYEAFLSPEYRREEVYIRSTDFDRTLESAQANLAGLFPEAAPGSPEARWRPIPVHTVPVAEDKLLRFPMRSCPRYHELLREATEAAEYQEALEGWTGFLSRLENFTGLSLVGEPLRRAWKVLDTLMCQQAHGLPLPAWASPDVLRTLAQISALDIGAHVGPPRAAEKAQLTGGILLNAILANFSRVQRLGLPLKMVMYSAHDSTLLALQGALGLYDGHTPPYAACLGFEFRKHLGNPAKDGGNVTVSLFYRNDSAHLPLPLSLPGCPAPCPLGRFYQLTAPARPPAHGVSCHGPYEAAIPPAPVVPLLAGAVAVLVALSLGLGLLAWRPGCLRALGGPV

SEQ ID NO: 36038 - protein, 333 aa, Homo sapiens
MAGLGFWGHPAGPLLLLLLLVLPPRALPEGPLVFVALVFRHGDRAPLASYPMDPHKEVASTLWPRGLGQLTTEGVRQQLELGRFLRSRYEGFLSRLENFTGLSLVGEPLRRAWKVLDTLMCQQAHGLPLPAWASPDVLRTLAQISALDIGAHVGPPRAAEKAQLTGGILLNAILANFSRVQRLGLPLKMVMYSAHDSTLLALQGALGLYDGHTPPYAACLGFEFRKHLGNPAKDGGNVTVSLFYRNDSAHLPLPLSLPGCPAPCPLGRFYQLTAPARPPAHGVSCHGPYEAAIPPAPVVPLLAGAVAVLVALSLGLGLLAWRPGCLRALGGPV

SEQ ID NO: 36039 - protein, 210 aa, Homo sapiens
MEMGRRIHLELRNRTPSDVKELVLDNSRSNEGKLEGLTDEFEELEFLSTINVGLTSIANLPKLNKLKKLELSDNRVSGGLEVLAEKCPNLTHLNLSGNKIKDLSTIEPLKKLENLKSLDLFNCEVTNLNDYRENVFKLLPQLTYLDGYDRDDKEAPDSDAEGYVEGLDDEEEDEDEEEYDDEEGYNDGEVDDEEDKKKKKKKKKKKKKKK

SEQ ID NO: 36040 - protein, 249 aa, Homo sapiens
MEMGRRIHLELRNRTPSDVKELVLDNSRSNEGKLEGLTDEFEELEFLSTINVGLTSIANLPKLNKLKKLELSDNRVSGGLEVLAEKCPNLTHLNLSGNKIKDLSTIEPLKKLENLKSLDLFNCEVTNLNDYRENVFKLLPQLTYLDGYDRDDKEAPDSDAEGYVEGLDDEEEDEDEEEYDEDAQVVEDEEDEDEEEEGEEEDVSGEEEEDEEGYNDGEVDDEEDEEELGEEERGQKRKREPEDEGEDDD

SEQ ID NO: 36041 - protein, 131 aa, Homo sapiens
MEMGKWIHLELRNRTPSDVKELFLDNSQSNEGKLEGLTDEFEELELLNTINIGLTSIANLPKLNKLKKLELSSNRASVGLEVLAEKCPNLIHLNLSGNKIKDLSTIEPLKKLENLESLDLFTCEVTNLNNY

SEQ ID NO: 36042 - protein, 268 aa, Homo sapiens
MEMKKKINLELRNRSPEEVTELVLDNCLCVNGEIEGLNDTFKELEFLSMANVELSSLARLPSLNKLRKLELSDNIISGGLEVLAEKCPNLTYLNLSGNKIKDLSTVEALQNLKNLKSLDLFNCEITNLEDYRESIFELLQQITYLDGFDQEDNEAPDSEEEDDEDGDEDDEEEEENEAGPPEGYEEEEEEEEEEDEDEDEDEDEAGSELGEGEEEVGLSYLMKEEIQDEEDDDDYVEEGEEEEEEEEGGLRGEKRKRDAEDDGEEEDD

SEQ ID NO: 36043 - protein, 136 aa, Homo sapiens
MEMKKKINLELRNRSPEEEDNEAPDSEEEDDEDGDEDDEEEEENEAGPPEGYEEEEEEEEEEDEDEDEDEDEAGSELGEGEEEVGLSYLMKEEIQDEEDDDDYVEEGEEEEEEEEGGLRGEKRKRDAEDDGEEEDD

SEQ ID NO: 36044 - protein, 220 aa, Homo sapiens
MANVELSSLARLPSLNKLRKLELSDNIISGGLEVLAEKCPNLTYLNLSGNKIKDLSTVEALQNLKNLKSLDLFNCEITNLEDYRESIFELLQQITYLDGFDQEDNEAPDSEEEDDEDGDEDDEEEEENEAGPPEGYEEEEEEEEEEDEDEDEDEDEAGSELGEGEEEVGLSYLMKEEIQDEEDDDDYVEEGEEEEEEEEGGLRGEKRKRDAEDDGEEEDD

SEQ ID NO: 36045 - protein, 227 aa, Homo sapiens
MEMKKKINLELRNRSPEEVTELVLDNCLCVNGEIEGLNDTFKELEFLSMANVELSSLARLPSLNKLRKQNLKNLKSLDLFNCEITNLEDYRESIFELLQQITYLDGFDQEDNEAPDSEEEDDEDGDEDDEEEEENEAGPPEGYEEEEEEEEEEDEDEDEDEDEAGSELGEGEEEVGLSYLMKEEIQDEEDDDDYVEEGEEEEEEEEGGLRGEKRKRDAEDDGEEEDD

SEQ ID NO: 36046 - protein, 691 aa, Homo sapiens
MDGCKKELPRLQEPEEDEDCYILNVQSSSDDTSGSSVARRAPKRQASCILNVQSRSGDTSGSSVARRAPKRQASSVVVIDSDSDEECHTHEEKKAKLLEINSDDESPECCHVKPAIQEPPIVISDDDNDDDNGNDLEVPDDNSDDSEAPDDNSDDSEAPDDNSDDSEAPDDNSDDSEAPDDNSDDSDVPDDNSDDSSDDNSDDSSDDNSDDSDVPDDKSDDSDVPDDSSDDSDVPDDSSDDSEAPDDSSDDSEAPDDSSDDSEAPDDSSDDSEAPDDSSDDSEASDDSSDDSEASDDSSDDSEAPDDKSDDSDVPEDKSDDSDVPDDNSDDLEVPVPAEDLCNEGQIASDEEELVEAAAAVSQHDSSDDAGEQDLGENLSKPPSDPEANPEVSERKLPTEEEPAPVVEQSGKRKSKTKTIVEPPRKRQTKTKNIVEPPRKRQTKTKNIVEPLRKRKAKTKNVSVTPGHKKRGPSKKKPGAAKVEKRKTRTPKCKVPGCFLQDLEKSKKYSGKNLKRNKDELVQRIYDLFNRSVCDKKLPEKLRIGWNNKMVKTAGLCSTGEMWYPKWRRFAKIQIGLKVCDSADRIRDTLIHEMCHAASWLIDGIHDSHGDAWKYYARKSNRIHPELPRVTRCHNYKINYKVHYECTGCKTRIGCYTKSLDTSRFICAKCKGSLVMVPLTQKDGTRIVPHV

SEQ ID NO: 36047 - protein, 691 aa, Homo sapiens; identical to SEQ ID NO: 36046

SEQ ID NO: 36048 - protein, 179 aa, Homo sapiens
MVQAWYMDDAPGDPRQPHRPDPGRPVGLEQLRRLGVLYWKLDADKYENDPELEKIRRERNYSWMDIITICKDKLPNYEEKIKMFYEEHLHLDDEIRYILDGSGYFDVRDKEDQWIRIFMEKGDMVTLPAGIYHRFTVDEKNYTKAMRLFVGEPVWTAYNRPADHFEARGQYVKFLAQTA

SEQ ID NO: 36049 - protein, 889 aa, Homo sapiens
MSNPFAHLAEPLDPVQPGKKFFNLNKLEDSRYGRLPFSIRVLLEAAIRNCDEFLVKKQDIENILHWNVTQHKNIEVPFKPARVILQDFTGVPAVVDFAAMRDAVKKLGGDPEKINPVCPADLVIDHSIQVDFNRRADSLQKNQDLEFERNRERFEFLKWGSQAFHNMRIIPPGSGIIHQVNLEYLARVVFDQDGYYYPDSLVGTDSHTTMIDGLGILGWGVGGIEAEAVMLGQPISMVLPQVIGYRLMGKPHPLVTSTDIVLTITKHLRQVGVVGKFVEFFGPGVAQLSIADRATIANMCPEYGATAAFFPVDEVSITYLVQTGRDEEKLKYIKKYLQAVGMFRDFNDPSQDPDFTQVVELDLKTVVPCCSGPKRPQDKVAVSDMKKDFESCLGAKQGFKGFQVAPEHHNDHKTFIYDNTEFTLAHGSVVIAAITSCTNTSNPSVMLGAGLLAKKAVDAGLNVMPYIKTSLSPGSGVVTYYLQESGVMPYLSQLGFDVVGYGCMTCIGNSGPLPEPVVEAITQGDLVAVGVLSGNRNFEGRVHPNTRANYLASPPLVIAYAIAGTIRIDFEKEPLGVNAKGQQVFLKDIWPTRDEIQAVERQYVIPGMFKEVYQKIETVNESWNALATPSDKLFFWNSKSTYIKSPPFFENLTLDLQPPKSIVDAYVLLNLGDSVTTDHISPAGNIARNSPAARYLTNRGLTPREFNSYGSRRGNDAVMARGTFANIRLLNRFLNKQAPQTIHLPSGEILDVFDAAERYQQAGLPLIVLAGKEYGAGSSRDWAAKGPFLLGIKAVLAESYERIHRSNLVGMGVIPLEYLPGENADALGLTGQERYTIIIPENLKPQMKVQVKLDTGKTFQAVMRFDTDVELTYFLNGGILNYMIRKMAK

SEQ ID NO: 36050 - protein, 434 aa, Homo sapiens
MSNPFAHLAEPLDPVQPGKKFFNLNKLEDSRYGRLPFSIRVLLEAAIRNCDEFLVKKQDIENILHWNVTQHKNIEVPFKPARVILQDFTGVPAVVDFAAMRDAVKKLGGDPEKINPVCPADLVIDHSIQVDFNRRADSLQKNQDLEFERNRERFEFLKWGSQAFHNMRIIPPGSGIIHQVNLEYLARVVFDQDGYYYPDSLVGTDSHTTMIDGLGILGWGVGGIEAEAVMLGQPISMVLPQVIGYRLMGKPHPLVTSTDIVLTITKHLRQVGVVGKFVEFFGPGVAQLSIADRATIANMCPEYGATAAFFPVDEVSITYLVQTGRDEEKLKYIKKYLQAVGMFRDFNDPSQDPDFTQVVELDLKTVVPCCSGPKRPQDKVAVSDMKKDFESCLGAKQGFKGFQVAPEHHNDHKTFIYDNTEFTLAHGSVVIAAL

SEQ ID NO: 36051 - protein, 889 aa, Homo sapiens; identical to SEQ ID NO: 36049

SEQ ID NO: 36052 - protein, 781 aa, Homo sapiens
QLEPRSARERVPLLGSGSPVAGAPPCSRRNTWPSVIMSNPFAHLAEPLDPVQPGKKFFNLNKLEDSRYGRLPFSIRVLLEAAIRNCDEFLVKKQDIENILHWNVTQHKNIEVPFKPARVILQDFTGVPAVVDFAAMRDAVKKLGGDPEKINPVCPADLVIDHSIQVDFNRRADSLQKNQDLEFERNRERFEFLKWGSQAFHNMRIIPPGSGIIHQVNLEYLARVVFDQDGYYYPDSLVGTDSHTTMIDGLGILGWGVGGIEAEAVMLGQPISMVLPQVIGYRLMGKPHPLVTSTDIVLTITKHLRQVGVVGKFVEFFGPGVAQLSIADRATIANMCPEYGATAAFFPVDEVSITYLVQTGRDEEKLKYIKKYLQAVGMFRDFNDPSQDPDFTQVVELDLKTVVPCCSGPKRPQDKVAVSDMKKDFESCLGAKQGFKGFQVAPEHHNDHKTFIYDNTEFTLAHGSVVIAAITSCTNTSNPSVMLGAGLLAKKAVDAGLNVMPYIKTSLSPGSGVVTYYLQESGVMPYLSQLGFDVVGYGCMTCIGNSGPLPEPVVEAITQGDLVAVGVLSGNRNFEGRVHPNTRANYLASPPLVIAYAIAGTIRIDFEKEPLGVNAKGQQVFLKDIWPTRDEIQAVERQYVIPGMFKEVYQKIETVNESWNALATPSDKLFFWNSKSTYIKSPPFFENLTLDLQPPKSIVDAYVLLNLGDSVTTDHISPAGNIARNSPAARYLTNRGFERQLTQENTDLCLSPPLLTSLSSPLKLWGQLFCHGEQCLGDLEK

SEQ ID NO: 36053 - protein, 790 aa, Homo sapiens
MRDAVKKLGGDPEKINPVCPADLVIDHSIQVDFNRRADSLQKNQDLEFERNRERFEFLKWGSQAFHNMRIIPPGSGIIHQVNLEYLARVVFDQDGYYYPDSLVGTDSHTTMIDGLGILGWGVGGIEAEAVMLGQPISMVLPQVIGYRLMGKPHPLVTSTDIVLTITKHLRQVGVVGKFVEFFGPGVAQLSIADRATIANMCPEYGATAAFFPVDEVSITYLVQTGRDEEKLKYIKKYLQAVGMFRDFNDPSQDPDFTQVVELDLKTVVPCCSGPKRPQDKVAVSDMKKDFESCLGAKQGFKGFQVAPEHHNDHKTFIYDNTEFTLAHGSVVIAAITSCTNTSNPSVMLGAGLLAKKAVDAGLNVMPYIKTSLSPGSGVVTYYLQESGVMPYLSQLGFDVVGYGCMTCIGNSGPLPEPVVEAITQGDLVAVGVLSGNRNFEGRVHPNTRANYLASPPLVIAYAIAGTIRIDFEKEPLGVNAKGQQVFLKDIWPTRDEIQAVERQYVIPGMFKEVYQKIETVNESWNALATPSDKLFFWNSKSTYIKSPPFFENLTLDLQPPKSIVDAYVLLNLGDSVTTDHISPAGNIARNSPAARYLTNRGLTPREFNSYGSRRGNDAVMARGTFANIRLLNRFLNKQAPQTIHLPSGEILDVFDAAERYQQAGLPLIVLAGKEYGAGSSRDWAAKGPFLLGIKAVLAESYERIHRSNLVGMGVIPLEYLPGENADALGLTGQERYTIIIPENLKPQMKVQVKLDTGKTFQAVMRFDTDVELTYFLNGGILNYMIRKMAK

SEQ ID NO: 36054 - protein, 780 aa, Homo sapiens
MAPYSLLVTRLQKALGVRQYHVASVLCQRAKVAMSHFEPNEYIHYDLLEKNINIVRKRLNRPLTLSEKIVYGHLDDPASQEIERGKSYLRLRPDRVAMQDATAQMAMLQFISSGLSKVAVPSTIHCDHLIEAQVGGEKDLRRAKDINQEVYNFLATAGAKYGVGFWKPGSGIIHQIILENYAYPGVLLIGTDSHTPNGGGLGGICIGVGGADAVDVMAGIPWELKCPKVIGVKLTGSLSGWSSPKDVILKVAGILTVKGGTGAIVEYHGPGVDSISCTGMATICNMGAEIGATTSVFPYNHRMKKYLSKTGREDIANLADEFKDHLVPDPGCHYDQLIEINLSELKPHINGPFTPDLAHPVAEVGKVAEKEGWPLDIRVGLIGSCTNSSYEDMGRSAAVAKQALAHGLKCKSQFTITPGSEQIRATIERDGYAQILRDLGGIVLANACGPCIGQWDRKDIKKGEKNTIVTSYNRNFTGRNDANPETHAFVTSPEIVTALAIAGTLKFNPETDYLTGTDGKKFRLEAPDADELPKGEFDPGQDTYQHPPKDSSGQHVDVSPTSQRLQLLEPFDKWDGKDLEDLQILIKVKGKCTTDHISAAGPWLKFRGHLDNISNNLLIGAINIENGKANSVRNAVTQEFGPVPDTARYYKKHGIRWVVIGDENYGEGSSREHAALEPRHLGGRAIITKSFARIHETNLKKQGLLPLTFADPADYNKIHPVDKLTIQGLKDFTPGKPLKCIIKHPNGTQETILLNHTFNETQIEWFRAGSALNRMKELQQ

SEQ ID NO: 36055 - protein, 805 aa, Homo sapiens
MAPYSLLVTRLQKALGVRQYHVASVLCQRAKVAMSHFEPNEYIHYDLLEKNINIVRKRLNRPLTLSEKIVYGHLDDPASQEIERGKSYLRLRPDRVAMQDATAQMAMLQFISSGLSKVAVPSTIHCDHLIEAQVGGEKDLRRAKDINQEVYNFLATAGAKYGVGFWKPGSGIIHQIILENYAYPGVLLIGTDSHTPNGGGLGGICIGVGGADAVDVMAGIPWELKCPKVIGVKLTGSLSGWSSPKDVILKVAGILTVKGGTGAIVEYHGPGVDSISCTGEEGGQATWPLPCAGPDGSPVGSRSGMATICNMGAEIGATTSVFPYNHRMKKYLSKTGREDIANLADEFKDHLVPDPGCHYDQLIEINLSELKPHINGPFTPDLAHPVAEVGKVAEKEGWPLDIRVGLIGSCTNSSYEDMGRSAAVAKQALAHGLKCKSQFTITPGSEQIRATIERDGYAQILRDLGGIVLANACGPCIGQWDRKDIKKGEKNTIVTSYNRNFTGRNDANPETHAFVTSPEIVTALAIAGTLKFNPETDYLTGTDGKKFRLEAPDADELPKGEFDPGQDTYQHPPKDSSGQHVDVSPTSQRLQLLEPFDKWDGKDLEDLQILIKVKGKCTTDHISAAGPWLKFRGHLDNISNNLLIGAINIENGKANSVRNAVTQEFGPVPDTARYYKKHGIRWVVIGDENYGEGSSREHAALEPRHLGGRAIITKSFARIHETNLKKQGLLPLTFADPADYNKIHPVDKLTIQGLKDFTPGKPLKCIIKHPNGTQETILLNHTFNETQIEWFRAGSALNRMKELQQ

SEQ ID NO: 36056 - protein, 501 aa, Homo sapiens
MATICNMGAEIGATTSVFPYNHRMKKYLSKTGREDIANLADEFKDHLVPDPGCHYDQLIEINLSELKPHINGPFTPDLAHPVAEVGKVAEKEGWPLDIRVGLIGSCTNSSYEDMGRSAAVAKQALAHGLKCKSQFTITPGSEQIRATIERDGYAQILRDLGGIVLANACGPCIGQWDRKDIKKGEKNTIVTSYNRNFTGRNDANPETHAFVTSPEIVTALAIAGTLKFNPETDYLTGTDGKKFRLEAPDADELPKGEFDPGQDTYQHPPKDSSGQHVDVSPTSQRLQLLEPFDKWDGKDLEDLQILIKVKGKCTTDHISAAGPWLKFRGHLDNISNNLLIGAINIENGKANSVRNAVTQEFGPVPDTARYYKKHGIRWVVIGDENYGEGSSREHAALEPRHLGGRAIITKSFARIHETNLKKQGLLPLTFADPADYNKIHPVDKLTIQGLKDFTPGKPLKCIIKHPNGTQETILLNHTFNETQIEWFRAGSALNRMKELQQ

SEQ ID NO: 36057 - protein, 761 aa, Homo sapiens
MAPYSLLVTRLQKALGVRQYHVASVLCQRAKVAMSHFEPNEYIHYDLLEKNINIVRKRLNRPLTLSEKIVYGHLDDPASQEIERGKSYLRLRPDRVAMVAVPSTIHCDHLIEAQVGGEKDLRRAKDINQEVYNFLATAGAKYGVGFWKPGSGIIHQIILENYAYPGVLLIGTDSHTPNGGGLGGICIGVGGADAVDVMAGIPWELKCPKVIGVKLTGSLSGWSSPKDVILKVAGILTVKGGTGAIVEYHGPGVDSISCTGMATICNMGAEIGATTSVFPYNHRMKKYLSKTGREDIANLADEFKDHLVPDPGCHYDQLIEINLSELKPHINGPFTPDLAHPVAEVGKVAEKEGWPLDIRVGLIGSCTNSSYEDMGRSAAVAKQALAHGLKCKSQFTITPGSEQIRATIERDGYAQILRDLGGIVLANACGPCIGQWDRKDIKKGEKNTIVTSYNRNFTGRNDANPETHAFVTSPEIVTALAIAGTLKFNPETDYLTGTDGKKFRLEAPDADELPKGEFDPGQDTYQHPPKDSSGQHVDVSPTSQRLQLLEPFDKWDGKDLEDLQILIKVKGKCTTDHISAAGPWLKFRGHLDNISNNLLIGAINIENGKANSVRNAVTQEFGPVPDTARYYKKHGIRWVVIGDENYGEGSSREHAALEPRHLGGRAIITKSFARIHETNLKKQGLLPLTFADPADYNKIHPVDKLTIQGLKDFTPGKPLKCIIKHPNGTQETILLNHTFNETQIEWFRAGSALNRMKELQQ

SEQ ID NO: 36058 - protein, 421 aa, Homo sapiens
MVEMLPTAILLVLAVSVVAKDNATCDGPCGLRFRQNPQGGVRIVGGKAAQHGAWPWMVSLQIFTYNSHRYHTCGGSLLNSRWVLTAAHCFVGKNNVHDWRLVFGAKEITYGNNKPVKAPLQERYVEKIIIHEKYNSATEGNDIALVEITPPISCGRFIGPGCLPHFKAGLPRGSQSCWVAGWGYIEEKAPRPSSILMEARVDLIDLDLCNSTQWYNGRVQPTNVCAGYPVGKIDTCQGDSGGPLMCKDSKESAYVVVGITSWGVGCARAKRPGIYTATWPYLNWIASKIGSNALRMIQSATPPPPTTRPPPIRPPFSHPISAHLPWYFQPPPRPLPPRPPAAQPRPPPSPPPPPPPPASPLPPPPPPPPPTPSSTTKLPQGLSFAKRLQQLIEVLKGKTYSDGKNHYDMETTELPELTSTS

SEQ ID NO: 36059 - protein, 210 aa, Homo sapiens
MNRFLLLMSLYLLGSARGTSSQPNELSGSIDHQTSVQQLPGEPAATEHAEGEHTVGEQPSGEQPSGEHLSGEQPLSELESGEQPSDEQPSGEHGSGEQPSGEQASGEQPSGEHASGEQASGAPISSTSTGTILNCYTCAYMNDQGKCLRGEGTCITQNSQQCMLKKIFEGGKLQFMVQGCENMCPSMNLFSHGTRMQIICCRNQSFCNKI

SEQ ID NO: 36060 - protein, 246 aa, Homo sapiens
MNRFLLLMSLYLLGSARGTSSQPNELSGSIDHQTSVQQLPGEFFSLENPSDAEALYETSSGLNTLSEHGSSEHGSSKHTVAEHTSGEHAESEHASGEPAATEHAEGEHTVGEQPSGEQPSGEHLSGEQPLSELESGEQPSDEQPSGEHGSGEQPSGEQASGEQPSGTILNCYTCAYMNDQGKCLRGEGTCITQNSQQCMLKKIFEGGKLQFMVQGCENMCPSMNLFSHGTRMQIICCRNQSFCNKI

SEQ ID NO: 36061 - protein, 155 aa, Homo sapiens
MNRFLLLMSLYLLGSARGTSSQPNELSGSIDHQTSVQQLPGEQPSGEQPSGEHLSGEQPLSELESGEQPSDEQPSGEHGSGEQPSGEQASGEQPSGEHASGEQASGAPISSTSTGGKLQFMVQGCENMCPSMNLFSHGTRMQIICCRNQSFCNKI

SEQ ID NO: 36062 - protein, 165 aa, Homo sapiens [sequence omitted]

SEQ ID NO: 36063 - protein, 81 aa, Homo sapiens
MNRFLLLMSLYLLGSARGTSSQPNELSGSIDHQTSVQQLPGGKLQFMVQGCENMCPSMNLFSHGTRMQIICCRNQSFCNKI

SEQ ID NO: 36064 - protein, 121 aa, Homo sapiens
MNRFLLLMSLYLLGSARGTSSQPNELSGSIDHQTSVQQLPGTILNCYTCAYMNDQGKCLRGEGTCITQNSQQCMLKKIFEGGKLQFMVQGCENMCPSMNLFSHGTRMQIICCRNQSFCNKI

SEQ ID NO: 36065 - protein, 195 aa, Homo sapiens
MNRFLLLMSLYLLGSARGTSSQPNELSGSIDHQTSVQQLPGEQPSGEQPSGEHLSGEQPLSELESGEQPSDEQPSGEHGSGEQPSGEQASGEQPSGEHASGEQASGAPISSTSTGTILNCYTCAYMNDQGKCLRGEGTCITQNSQQCMLKKIFEGGKLQFMVQGCENMCPSMNLFSHGTRMQIICCRNQSFCNKI

SEQ ID NO: 36066 - protein, 246 aa, Homo sapiens; identical to SEQ ID NO: 36060

SEQ ID NO: 36067 - protein, 170 aa, Homo sapiens
MNRFLLLMSLYLLGSARGTSSQPNELSGSIDHQTSVQQLPGEQPSDEQPSGEHGSGEQPSGEQASGEQPSGEHASGEQASGAPISSTSTGTILNCYTCAYMNDQGKCLRGEGTCITQNSQQCMLKKIFEGGKLQFMVQGCENMCPSMNLFSHGTRMQIICCRNQSFCNKI

SEQ ID NO: 36068 - protein, 176 aa, Homo sapiens
MNRFLLLMSLYLLGSARGTSSQPNELSGSIDHQTSVQQLPGEQPSGEQPSGEHLSGEQPLSELESGEQPSDEQPSGEHGSGEQPSGEQASGEQPSGTILNCYTCAYMNDQGKCLRGEGTCITQNSQQCMLKKIFEGGKLQFMVQGCENMCPSMNLFSHGTRMQIICCRNQSFCNKI

SEQ ID NO: 36069 - protein, 195 aa, Homo sapiens; identical to SEQ ID NO: 36065

SEQ ID NO: 36070 - protein, 210 aa, Homo sapiens; identical to SEQ ID NO: 36059

SEQ ID NO: 36071 - protein, 265 aa, Homo sapiens
MNRFLLLMSLYLLGSARGTSSQPNELSGSIDHQTSVQQLPGEFFSLENPSDAEALYETSSGLNTLSEHGSSEHGSSKHTVAEHTSGEHAESEHASGEPAATEHAEGEHTVGEQPSGEQPSGEHLSGEQPLSELESGEQPSDEQPSGEHGSGEQPSGEQASGEQPSGEHASGEQASGAPISSTSTGTILNCYTCAYMNDQGKCLRGEGTCITQNSQQCMLKKIFEGGKLQFMVQGCENMCPSMNLFSHGTRMQIICCRNQSFCNKI

SEQ ID NO: 36072 - protein, 573 aa, Homo sapiens
MSAVSQPQAAPSPLEKSPSTAILCNTCGNVCKGEVLRVQDKYFHIKCFVCKACGCDLAEGGFFVRQGEYICTLDYQRLYGTRCFSCDQFIEGEVVSALGKTYHPDCFVCAVCRLPFPPGDRVTFNGKECMCQKCSLPVSVGSSAHLSQGLRSCGGCGTEIKNGQALVALDKHWHLGCFKCKSCGKLLNAEYISKDGLPYCEADYHAKFGIRCDSCEKYITGRVLEAGEKHYHPSCALCVRCGQMFAEGEEMYLQGSSIWHPACRQAARTEDRNKETRTSSESIISVPASSTSGSPSRVIYAKLGGEILDYRDLAALPKSKAIYDIDRPDMISYSPYISHSAGDRQSYGEGDQDDRSYKQCRTSSPSSTGSVSLGRYTPTSRSPQHYSRPGSESGRSTPSLSVLSDSKPPPSTYQQAPRHFHVPDTGVKDNIYRKPPIYRQHAARRSDGEDGSLDQDNRKQKSSWLMLKGDADTRTNSPDLDTQSLSHSSGTDRDPLQRMAGDSFHSREKIYPYDSLIVTNRIRVKLPKDVDRTRLERHLSPEEFQEVFGMSIEEFDRLALWKRNDLKKKALLF

SEQ ID NO: 36073 - protein, 346 aa, Homo sapiens
MFAEGEEMYLQGSSIWHPACRQAARTEDRNKETRTSSESIISVPASSTSGSPSRVIYAKLGGEILDYRDLAALPKSKAIYDIDRPDMISYSPYISHSAGDRQSYGESPQLLSPTPTEGDQDDRSYKQCRTSSPSSTGSVSLGRYTPTSRSPQHYSRPDTGVKDNIYRKPPIYRQHAARRSDGEDGSLDQDNRKQKSSWLMLKGDADTRTNSPDLDTQSLSHSSGTDRDPLQRMAGDSFHSRFPYSKSDPLPGHGKNGLDQRNANLAPCGADPDASWGMREYKIYPYDSLIVTNRIRVKLPKDVDRTRLERHLSPEEFQEVFGMSIEEFDRLALWKRNDLKKKALLF

SEQ ID NO: 36074 - protein, 611 aa, Homo sapiens
MSAVSQPQAAPSPLEKSPSTAILCNTCGNVCKGEVLRVQDKYFHIKCFVCKACGCDLAEGGFFVRQGEYICTLDYQRLYGTRCFSCDQFIEGEVVSALGKTYHPDCFVCAVCRLPFPPGDRVTFNGKECMCQKCSLPVSVGSSAHLSQGLRSCGGCGTEIKNGQALVALDKHWHLGCFKCKSCGKLLNAEYISKDGLPYCEADYHAKFGIRCDSCEKYITGRVLEAGEKHYHPSCALCVRCGQMFAEGEEMYLQGSSIWHPACRQAARTEDRNKETRTSSESIISVPASSTSGSPSRVIYAKLGGEILDYRDLAALPKSKAIYDIDRPDMISYSPYISHSAGDRQSYGEGDQDDRSYKQCRTSSPSSTGSVSLGRYTPTSRSPQHYSRPGSESGRSTPSLSVLSDSKPPPSTYQQAPRHFHVPDTGVKDNIYRKPPIYRQHAARRSDGEDGSLDQDNRKKSSWLMLKGDADTRTNSPDLDTQSLSHSSGTDRDPLQRMAGDSFHSRFPYSKSDPLPGHGKNGLDQRNANLAPCGADPDASWGMREYKIYPYDSLIVTNRIRVKLPKDVDRTRLERHLSPEEFQEVFGMSIEEFDRLALWKRNDLKKKALLF

SEQ ID NO: 36075 - protein, 572 aa, Homo sapiens
MSAVSQPQAAPSPLEKSPSTAILCNTCGNVCKGEVLRVQDKYFHIKCFVCKACGCDLAEGGFFVRQGEYICTLDYQRLYGTRCFSCDQFIEGEVVSALGKTYHPDCFVCAVCRLPFPPGDRVTFNGKECMCQKCSLPVSVGSSAHLSQGLRSCGGCGTEIKNGQALVALDKHWHLGCFKCKSCGKLLNAEYISKDGLPYCEADYHAKFGIRCDSCEKYITGRVLEAGEKHYHPSCALCVRCGQMFAEGEEMYLQGSSIWHPACRQAARTEDRNKETRTSSESIISVPASSTSGSPSRVIYAKLGGEILDYRDLAALPKSKAIYDIDRPDMISYSPYISHSAGDRQSYGEGDQDDRSYKQCRTSSPSSTGSVSLGRYTPTSRSPQHYSRPGSESGRSTPSLSVLSDSKPPPSTYQQAPRHFHVPDTGVKDNIYRKPPIYRQHAARRSDGEDGSLDQDNRKKSSWLMLKGDADTRTNSPDLDTQSLSHSSGTDRDPLQRMAGDSFHSQYKIYPYDSLIVTNRIRVKLPKDVDRTRLERHLSPEEFQEVFGMSIEEFDRLALWKRNDLKKKALLF

SEQ ID NO: 36076 - protein, 531 aa, Homo sapiens
MSAVSQPQAAPSPLEKSPSTAILCNTCGNVCKGEVLRVQDKYFHIKCFVCKACGCDLAEGGFFVRQGEYICTLDYQRLYGTRCFSCDQFIEGEVVSALGKTYHPDCFVCAVCRLPFPPGDRVTFNGKECMCQKCSLPVSVGSSAHLSQGLRSCGGCGTEIKNGQALVALDKHWHLGCFKCKSCGKLLNAEYISKDGLPYCEADYHAKFGIRCDSCEKYITGRVLEAGEKHYHPSCALCVRCGQMFAEGEEMYLQGSSIWHPACRQAARTEDRNKETRTSSESIISVPASSTSGSPSRVIYAKLGGEILDYRDLAALPKSKAIYDIDRPDMISYSPYISHSAGDRQSYGESPQLLSPTPTEGDQDDRSYKQCRTSSPSSTGSVSLGRYTPTSRSPQHYSRPAARRSDGEDGSLDQDNRKKSSWLMLKGDADTRTNSPDLDTQSLSHSSGTDRDPLQRMAGDSFHSQYKIYPYDSLIVTNRIRVKLPKDVDRTRLERHLSPEEFQEVFGMSIEEFDRLALWKRNDLKKKALLF

SEQ ID NO: 36077 - protein, 644 aa, Homo sapiens
MSAVSQPQAAPSPLEKSPSTAILCNTCGNVCKGEVLRVQDKYFHIKCFVCKACGCDLAEGGFFVRQGEYICTLDYQRLYGTRCFSCDQFIEGEVVSALGKTYHPDCFVCAVCRLPFPPGDRVTFNGKECMCQKCSLPVSVGSSAHLSQGLRSCGGCGTEIKNGQALVALDKHWHLGCFKCKSCGKLLNAEYISKDGLPYCEADYHAKFGIRCDSCEKYITGRVLEAGEKHYHPSCALCVRCGQMFAEGEEMYLQGSSIWHPACRQAARTEDRNKETRTSSESIISVPASSTSGSPSRVIYAKLGGEILDYRDLAALPKSKAIYDIDRPDMISYSPYISHSAGDRQSYGEGDQDDRSYKQCRTSSPSSTGSVSLGRYTPTSRSPQHYSRPAGTVSVGTSSCLSLSQHPSPTSVFRHHYIPYFRGSESGRSTPSLSVLSDSKPPPPPTSRHLATHVPDTGVKDNIYRKPPIYRQHAARRSDGEDGSLDQDNRKQKSSWLMLKGDADTRTNSPDLDTQSLSHSSGTDRDPLQRMAGDSFHSRFPYSKSDPLPGHGKNGLDQRNANLAPCGADPDASWGMREYKIYPYDSLIVTNRIRVKLPKDVDRTRLERHLSPEEFQEVFGMSIEEFDRLALWKRNDLKKKALLF

SEQ ID NO: 36078 - protein, 521 aa, Homo sapiens
MSAVSQPQAAPSPLEKSPSTAILCNTCGNVCKGEVLRVQDKYFHIKCFVCKACGCDLAEGGFFVRQGEYICTLDYQRLYGTRCFSCDQFIEGEVVSALGKTYHPDCFVCAVCRLPFPPGDRVTFNGKECMCQKCSLPVSVGSSAHLSQGLRSCGGCGTEIKNGQALVALDKHWHLGCFKCKSCGKLLNAEYISKDGLPYCEADYHAKFGIRCDSCEKYITGRVLEAGEKHYHPSCALCVRCGQMFAEGEEMYLQGSSIWHPACRQAARTEDRNKETRTSSESIISVPASSTSGSPSRVIYAKLGGEILDYRDLAALPKSKAIYDIDRPDMISYSPYISHSAGDRQSYGEGDQDDRSYKQCRTSSPSSTGSVSLGRYTPTSRSPQHYSRPAARRSDGEDGSLDQDNRKQKSSWLMLKGDADTRTNSPDLDTQSLSHSSGTDRDPLQRMAGDSFHSQYKIYPYDSLIVTNRIRVKLPKDVDRTRLERHLSPEEFQEVFGMSIEEFDRLALWKRNDLKKKALLF

SEQ ID NO: 36079 - protein, 470 aa, Homo sapiens
MSAVSQPQAAPSPLEKSPSTAILCNTCGNVCKGEVLRVQDKYFHIKCFVCKACGCDLAEGGFFVRQGEYICTLDYQRLYGTRCFSCDQFIEGEVVSALGKTYHPDCFVCAVCRLPFPPGDRVTFNGKECMCQKCSLPVSVGSSAHLSQGLRSCGGCGTEIKNGQALVALDKHWHLGCFKCKSCGKLLNAEYISKDGLPYCEADYHAKFGIRCDSCEKYITGRVLEAGEKHYHPSCALCVRCGQMFAEGEEMYLQGSSIWHPACRQAARTEDRNKETRTSSESIISVPASSTSGSPSRVIYAKLGGEILDYRDLAALPKSKAIYDIDRPDMISYSPYISHSAGDRQSYGESPQLLSPTPTEGDQDDRSYKQCRTSSPSSTGSVSLGRYTPTSRSPQHYSRPAARRSDGEDGSLDQDNRKQKSSWLMLKGDADTRTNSPDLDTQSLSHSSGTDRDPLQRMAGDSFHSREWFF

SEQ ID NO: 36080 - protein, 645 aa, Homo sapiens
MSAVSQPQAAPSPLEKSPSTAILCNTCGNVCKGEVLRVQDKYFHIKCFVCKACGCDLAEGGFFVRQGEYICTLDYQRLYGTRCFSCDQFIEGEVVSALGKTYHPDCFVCAVCRLPFPPGDRVTFNGKECMCQKCSLPVSVGSSAHLSQGLRSCGGCGTEIKNGQALVALDKHWHLGCFKCKSCGKLLNAEYISKDGLPYCEADYHAKFGIRCDSCEKYITGRVLEAGEKHYHPSCALCVRCGQMFAEGEEMYLQGSSIWHPACRQAARTEDRNKETRTSSESIISVPASSTSGSPSRVIYAKLGGEILDYRDLAALPKSKAIYDIDRPDMISYSPYISHSAGDRQSYGEGDQDDRSYKQCRTSSPSSTGSVSLGRYTPTSRSPQHYSRPAGTVSVGTSSCLSLSQHPSPTSVFRHHYIPYFRGSESGRSTPSLSVLSDSKPPPSTYQQAPRHFHVPDTGVKDNIYRKPPIYRQHAARRSDGEDGSLDQDNRKQKSSWLMLKGDADTRTNSPDLDTQSLSHSSGTDRDPLQRMAGDSFHSRFPYSKSDPLPGHGKNGLDQRNANLAPCGADPDASWGMREYKIYPYDSLIVTNRIRVKLPKDVDRTRLERHLSPEEFQEVFGMSIEEFDRLALWKRNDLKKKALLF

SEQ ID NO: 36081 - protein, 559 aa, Homo sapiens
MSAVSQPQAAPSPLEKSPSTAILCNTCGNVCKGEVLRVQDKYFHIKCFVCKACGCDLAEGGFFVRQGEYICTLDYQRLYGTRCFSCDQFIEGEVVSALGKTYHPDCFVCAVCRLPFPPGDRVTFNGKECMCQKCSLPVSVGSSAHLSQGLRSCGGCGTEIKNGQALVALDKHWHLGCFKCKSCGKLLNAEYISKDGLPYCEADYHAKFGIRCDSCEKYITGRVLEAGEKHYHPSCALCVRCGQMFAEGEEMYLQGSSIWHPACRQAARTEDRNKETRTSSESIISVPASSTSGSPSRVIYAKLGGEILDYRDLAALPKSKAIYDIDRPDMISYSPYISHSAGDRQSYGEGDQDDRSYKQCRTSSPSSTGSVSLGRYTPTSRSPQHYSRPAARRSDGEDGSLDQDNRKKSSWLMLKGDADTRTNSPDLDTQSLSHSSGTDRDPLQRMAGDSFHSRFPYSKSDPLPGHGKNGLDQRNANLAPCGADPDASWGMREYKIYPYDSLIVTNRIRVKLPKDVDRTRLERHLSPEEFQEVFGMSIEEFDRLALWKRNDLKKKALLF

SEQ ID NO: 36082 - protein, 346 aa, Homo sapiens; identical to SEQ ID NO: 36073

SEQ ID NO: 36083 - protein, 571 aa, Homo sapiens
MSAVSQPQAAPSPLEKSPSTAILCNTCGNVCKGEVLRVQDKYFHIKCFVCKACGCDLAEGGFFVRQGEYICTLDYQRLYGTRCFSCDQFIEGEVVSALGKTYHPDCFVCAVCRLPFPPGDRVTFNGKECMCQKCSLPVSVGSSAHLSQGLRSCGGCGTEIKNGQALVALDKHWHLGCFKCKSCGKLLNAEYISKDGLPYCEADYHAKFGIRCDSCEKYITGRVLEAGEKHYHPSCALCVRCGQMFAEGEEMYLQGSSIWHPACRQAARTEDRNKETRTSSESIISVPASSTSGSPSRVIYAKLGGEILDYRDLAALPKSKAIYDIDRPDMISYSPYISHSAGDRQSYGEGDQDDRSYKQCRTSSPSSTGSVSLGRYTPTSRSPQHYSRPGSESGRSTPSLSVLSDSKPPPSTYQQAPRHFHVPDTGVKDNIYRKPPIYRQHAARRSDGEDGSLDQDNRKKSSWLMLKGDADTRTNSPDLDTQSLSHSSGTDRDPLQRMAGDSFHSQQIYPYDSLIVTNRIRVKLPKDVDRTRLERHLSPEEFQEVFGMSIEEFDRLALWKRNDLKKKALLF

SEQ ID NO: 36084 - protein, 531 aa, Homo sapiens
MSAVSQPQAAPSPLEKSPSTAILCNTCGNVCKGEVLRVQDKYFHIKCFVCKACGCDLAEGGFFVRQGEYICTLDYQRLYGTRCFSCDQFIEGEVVSALGKTYHPDCFVCAVCRLPFPPGDRVTFNGKECMCQKCSLPVSVGSSAHLSQGLRSCGGCGTEIKNGQALVALDKHWHLGCFKCKSCGKLLNAEYISKDGLPYCEADYHAKFGIRCDSCEKYITGRVLEAGEKHYHPSCALCVRCGQMFAEGEEMYLQGSSIWHPACRQAARTEDRNKETRTSSESIISVPASSTSGSPSRVIYAKLGGEILDYRDLAALPKSKAIYDIDRPDMISYSPYISHSAGDRQSYGESPQLLSPTPTEGDQDDRSYKQCRTSSPSSTGSVSLGRYTPTSRSPQHYSRPAARRSDGEDGSLDQDNRKKSSWLMLKGDADTRTNSPDLDTQSLSHSSGTDRDPLQRMAGDSFHSREQIYPYDSLIVTNRIRVKLPKDVDRTRLERHLSPEEFQEVFGMSIEEFDRLALWKRNDLKKKALLF

SEQ ID NO: 36085 - protein, 730 aa, Homo sapiens
MEELIVELRLFLELLDHEYLTSTVREKKAVITNILLRIQSSKGFDVKDHAQKQETANSLPAPPQMPLPEIPQPWLPPDSGPPPLPTSSLPEGYYEEAVPLSPGKAPEYITSNYDSDAMSSSYESYDEEEEDGKGKKTRHQWPSEEASMDLVKDAKICAFLLRKKRFGQWTKLLCVIKDTKLLCYKSSKDQQPQMELPLQGCNITYIPKDSKKKKHELKITQQGTDPLVLAVQSKEQAEQWLKVIKEAYSGCSGPVDSECPPPPSSPVHKAELEKKLSSERPSSDGEGVVENGITTCNGKEQVKRKKSSKSEAKGTVSKVTGKKITKIISLGKKKPSTDEQTSSAEEDVPTCGYLNVLSNSRWRERWCRVKDNKLIFHKDRTDLKTHIVSIPLRGCEVIPGLDSKHPLTFRLLRNGQEVAVLEASSSEDMGRWIGILLAETGSSTDPEALHYDYIDVEMSASVIQTAKQTFCFMNRRVISANPYLGGTSNGYAHPSGTALHYDDVPCINGSLKGKKPPVASNGVTGKGKTLSSQPKKADPAAVVKRTGSNAAQYKYGKNRVEADAKRLQTKEEELLKRKEALRNRLAQLRKERKDLRAAIEVNAGRKPQAILEEKLKQLEEECRQKEAERVSLELELTEVKESLKKALAGGVTLGLAIEPKSGTSSPQSPVFRHRTLENSPISSCDTSDTEGPVPVNSAAVLKKSQAAPGSSPCRGHVLRKAKEWELKNGT

SEQ ID NO: 36086 - protein, 730 aa, Homo sapiens; identical to SEQ ID NO: 36085

SEQ ID NO: 36087 - protein, 814 aa, Homo sapiens
MEELIVELRLFLELLDHEYLTSTVREKKAVITNILLRIQSSKGFDVKDHAQKQETANSLPAPPQMPLPEIPQPWLPPDSGPPPLPTSSLPEGYYEEAVPLSPGKAPEYITSNYDSDAMSSSYESYDEEEEDGKGKKTRHQWPSEEASMDLVKDAKICAFLLRKKRFGQWTKLLCVIKDTKLLCYKSSKDQQPQMELPLQGCNITYIPKDSKKKKHELKITQQGTDPLVLAVQSKEQAEQWLKVIKEAYSGCSGPVDSECPPPPSSPVHKAELEKKLSSERPSSDGEGVVENGITTCNGKEQVKRKKSSKSEAKGTVSKVTGKKITKIISLGKKKPSTDEQTSSAEEDVPTCGYLNVLSNSRWRERWCRVKDNKLIFHKDRTDLKTHIVSIPLRGCEVIPGLDSKHPLTFRLLRNGQEVAVLEASSSEDMGRWIGILLAETGSSTDPEALHYDYIDVEMSASVIQTAKQTFCFMNRRVISANPYLGGTSNGYAHPSGTALHYDDVPCINGSWEPEDGFPASCSRGLGEEVLYDNAGLYDNLPPPHIFARYSPADRKASRLSADKLSSNHYKYPASAQSVTNTSSVGRASLGLNSQLKGKKPPVASNGVTGKGKTLSSQPKKADPAAVVKRTGSNAAQYKYGKNRVEADAKRLQTKEEELLKRKEALRNRLAQLRKERKDLRAAIEVNAGRKPQAILEEKLKQLEEECRQKEAERVSLELELTEVKESLKKALAGGVTLGLAIEPKSGTSSPQSPVFRHRTLENSPISSCDTSDTEGPVPVNSAAVLKKSQAAPGSSPCRGHVLRKAKEWELKNGT

SEQ ID NO: 36088 - protein, 768 aa, Homo sapiens
MDRGQVLEQLLPELTGLLSLLDHEYLSDTTLEKKMAVASILQSLQPLPAKEVSYLYVNTADLHSGPSFVESLFEEFDCDLSDLRDMPEDDGEPSKGASPELAKSPRLRNAADLPPPLPNKPPPEDYYEEALPLGPGKSPEYISSHNGCSPSHSIVDGYYEDADSSYPATRVNGELKSSYNDSDAMSSSYESYDEEEEEGKSPQPRHQWPSEEASMHLVRECRICAFLLRKKRFGQWAKQLTVIREDQLLCYKSSKDRQPHLRLALDTCSIIYVPKDSRHKRHELRFTQGATEVLVLALQSREQAEEWLKVIREVSKPVGGAEGVEVPRSPVLLCKLDLDKRLSQEKQTSDSDSVGVGDNCSTLGRRETCDHGKGKKSSLAELKGSMSRAAGRKITRIIGFSKKKTLADDLQTSSTEEEVPCCGYLNVLVNQGWKERWCRLKCNTLYFHKDHMDLRTHVNAIALQGCEVAPGFGPRHPFAFRILRNRQEVAILEASCSEDMGRWLGLLLVEMGSRVTPEALHYDYVDVETLTSIVSAGRNSFLYARSCQNQWPEPRVYDDVPYEKMQDEEPERPTGAQVKRHASSCSEKSHRVDPQVKVKRHASSANQYKYGKNRAEEDARRYLVEKEKLEKEKETIRTELIALRQEKRELKEAIRSSPGAKLKALEEAVATLEAQCRAKEERRIDLELKLVAVKERLQQSLAGGPALGLSVSSKPKSGETANKPQNSVPEQPLPVNCVSELRKRSPSIVASNQGRVLQKAKEWEMKKT

SEQ ID NO: 36089 - protein, 725 aa, Homo sapiens
MDRGQVLEQLLPELTGLLSLLDHEYLSDTTLEKKMAVASILQSLQPLPAKEVSYLYVNTADLHSGPSFVESLFEEFDCDLSDLRDMPEDDGEPSKGASPELAKSPRLRNAADLPPPLPNKPPPEDYYEEALPLGPGKSPEYISSHNGCSPSHSIVDGYYEDADSSYPATRVNGELKSSYNDSDAMSSSYESYDEEEEEGKSPQPRHQWPSEEASMHLVRECRICAFLLRKKRFGQWAKQLTVIREDQLLCYKSSKDRQPHLRLALDTCSIIYVPKDSRHKRHELRFTQGATEVLVLALQSREQAEEWLKVIREVSKPVGGAEGVEVPRSPVLLCKLDLDKRLSQEKQTSDSDSVGVGDNCSTLGRRETCDHGKGKKSSLAELKGSMSRAAGRKITRIIGFSKKKTLADDLQTSSTEEEVPCCGYLNVLVNQGWKERWCRLKCNTLYFHKDHMDLRTHVNAIALQGCEVAPGFGPRHPFAFRILRNRQEVAILEASCSEDMGRWLGLLLVEMGSRVTPEALHYDYVDVETLTSIVSAGRNSFLYARSCQNQWPEPRVYDDVPYEKMQDEEPERPTGAQVKRHASSCSEKSHRVDPQVKVKRHASSANQYKYGKNRAEEDARRYLVEKEKLEKEKETIRTELIALRQEKRELKEAIRSSPGAKLKALEEAVATLEAQCRAKEERRIDLELKLVAVKERLQQSLAGGPALGLSVSSKPKSGEWEMKKT

SEQ ID NO: 36090 - protein, 818 aa, Homo sapiens
MERYKALEQLLTELDDFLKILDQENLSSTALVKKSCLAELLRLYTKSSSSDEEYIYMNKVTINKQQNAESQGKAPEEQGLLPNGEPSQHSSAPQKSLPDLPPPKMIPERKQLAIPKTESPEGYYEEAEPYDTSLNEDGEAVSSSYESYDEEDGSKGKSAPYQWPSPEAGIELMRDARICAFLWRKKWLGQWAKQLCVIKDNRLLCYKSSKDHSPQLDVNLLGSSVIHKEKQVRKKEHKLKITPMNADVIVLGLQSKDQAEQWLRVIQEVSGLPSEGASEGNQYTPDAQRFNCQKPDIAEKYLSASEYGSSVDGHPEVPETKDVKKKCSAGLKLSNLMNLGRKKSTSLEPVERSLETSSYLNVLVNSQWKSRWCSVRDNHLHFYQDRNRSKVAQQPLSLVGCEVVPDPSPDHLYSFRILHKGEELAKLEAKSSEEMGHWLGLLLSESGSKTDPEEFTYDYVDADRVSCIVSAAKNSLLLMQRKFSEPNTYIDGLPSQDRQEELYDDVDLSELTAAVEPTEEATPVADDPNERESDRVYLDLTPVKSFLHGPSSAQAQASSPTLSCLDNATEALPADSGPGPTPDEPCIKCPENLGEQQLESLEPEDPSLRITTVKIQTEQQRISFPPSCPDAVVATPPGASPPVKDRLRVTSAEIKLGKNRTEAEVKRYTEEKERLEKKKEEIRGHLAQLRKEKRELKETLLKCTDKEVLASLEQKLKEIDEECRGEESRRVDLELSIMEVKDNLKKAEAGPVTLGTTVDTTHLENVSPRPKAVTPASAPDCTPVNSATTLKNRPLSVVVTGKGTVLQKAKEWEKKGAS

SEQ ID NO: 36091 - protein, 814 aa, Homo sapiens
MERYKALEQLLTELDDFLKILDQENLSSTALVKKSCLAELLRLYTKSSSSDEEYIYMNKVTINKQQNAESQGKAPEEQGLLPNGEPSQHSSAPQKSLPDLPPPKMIPERKQLAIPKTESPEGYYEEAEPYDTSLNEDGEAVSSSYESYDEEDGSKGKSAPYQWPSPEAGIELMRDARICAFLWRKKWLGQWAKQLCVIKDNRLLCYKSSKDHSPQLDVNLLGSSVIHKEKQVRKKEHKLKITPMNADVIVLGLQSKDQAEQWLRVIQEVSGLPSEGASEGNQYTPDAQRFNCQKPDIAEKYLSASEYGSSVDGHPEVPETKDVKKKCSAGLKLSNLMNLGRKKSTSLEPVERSLETSSYLNVLVNSQWKSRWCSVRDNHLHFYQDRNRSKVAQQPLSLVGCEVVPDPSPDHLYSFRILHKGEELAKLEAKSSEEMGHWLGLLLSESGSKTDPEEFTYDYVDADRVSCIVSAAKNSLLLMQRKFSEPNTYIDGLPSQDRQEELYDDVDLSELTAAVEPTEEATPVADDPNERESDRVYLDLTPVKSFLHGPSSAQAQASSPTLSCLDNATEALPADSGPGPTPDEPCIKCPENLGEQQLESLEPEDPSLRITTVKIQTEQQRISFPPSCPDAVVATPPGASPPVKDRLRVTSAEIKLGKNRTEAEVKRYTEEKERLEKKKEEIRGHLAQLRKEKRELKETLLKCTDKEVLASLEQKLKEIDEECRGEESRRVDLELSIMEVKDNLKKAEAGPVTLGTTVDTTHLENPKAVTPASAPDCTPVNSATTLKNRPLSVVVTGKGTVLQKAKEWEKKGAS

SEQ ID NO: 36092 - protein, 841 aa, Homo sapiens
QRVRALEQLLTELDDFLKILDQENLSSTALVKKSCLAELLRLYTKSSSSDEEYIYMNKVTINKQQNAESQGKAPEEQGLLPNGEPSQHSSAPQKSLPDLPPPKMIPERKQLAIPKTESPEGYYEEAEPYDTSLNGHSGGFLPTGVPRWVQVPEGVIYATITLEDGEAVSSSYESYDEEDGSKGKSAPYQWPSPEAGIELMRDARICAFLWRKKWLGQWAKQLCVIKDNRLLCYKSSKDHSPQLDVNLLGSSVIHKEKQVRKKEHKLKITPMNADVIVLGLQSKDQAEQWLRVIQEVSGLPSEGASEGNQYTPDAQRFNCQKPDIAEKYLSASEYGSSVDGHPEVPETKDVKKKCSAGLKLSNLMNLGRKKSTSLEPVERSLETSSYLNVLVNSQWKSRWCSVRDNHLHFYQDRNRSKVAQQPLSLVGCEVVPDPSPDHLYSFRILHKGEELAKLEAKSSEEMGHWLGLLLSESGSKTDPEEFTYDYVDADRVSCIVSAAKNSLLLMQRKFSEPNTYIDGLPSQDRQEELYDDVDLSELTAAVEPTEEATPVADDPNERESDRVYLDLTPVKSFLHGPSSAQAQASSPTLSCLDNATEALPADSGPGPTPDEPCIKCPENLGEQQLESLEPEDPSLRITTVKIQTEQQRISFPPSCPDAVVATPPGASPPVKDRLRVTSAEIKLGKNRTEAEVKRYTEEKERLEKKKEEIRGHLAQLRKEKRELKETLLKCTDKEVLASLEQKLKEIDEECRGEESRRVDLELSIMEVKDNLKKAEAGPVTLGTTVDTTHLENPKAVTPASAPDCTPVNSATTLKNRPLSVVVTGKGTVLQKAKEWEKKGAS

SEQ ID NO: 36093 - protein, 312 aa, Homo sapiens
MERYKAQGCCCLVVQRRIRQVSASLEQLLTELDDFLKILDQENLSSTALVKKSCLAELLRLYTKSSSSDEEYIYMNKVTINKQQNAESQGKAPEEQGLLPNGEPSQHSSAPQKSLPDLPPPKMIPERKQLAIPKTESPEGYYEEAEPYDTSLNEDGEAVSSSYESYDEEDGSKGKSAPYQWPSPEAGIELMRDARICAFLWRKKWLGQWAKQLCVIKDNRLLCYKSSKDHSPQLDVNLLGSSVIHKEKQVRKKEHKLKITPMNADVIVLGLQSKDQAEQWLRVIQEVSGLPSEGASEGNQYTPDAQRFNCQK

SEQ ID NO: 36094 - protein, 312 aa, Homo sapiens; identical to SEQ ID NO: 36093

SEQ ID NO: 36095 - protein, 871 aa, Homo sapiens
MERYKALEQLLTELDDFLKILDQENLSSTALVKKSCLAELLRLYTKSSSSDEEYIYMNKVTINKQQNAESQGKAPEEQGLLPNGEPSQHSSAPQKSLPDLPPPKMRILTLGQISGAQSFSPDGTHLTGTEFLGGWSWRPSQIRLMSPGTHWGDLTATEIPERKQLAIPKTESPEGYYEEAEPYDTSLNEDGEAVSSSYESYDEEDGSKGKSAPYQWPSPEAGIELMRDARICAFLWRKKWLGQWAKQLCVIKDNRLLCYKSSKDHSPQLDVNLLGSSVIHKEKQVRKKEHKLKITPMNADVIVLGLQSKDQAEQWLRVIQEVSGLPSEGASEGNQYTPDAQRFNCQKPDIAEKYLSASEYGSSVDGHPEVPETKDVKKKCSAGLKLSNLMNLGRKKSTSLEPVERSLETSSYLNVLVNSQWKSRWCSVRDNHLHFYQDRNRSKVAQQPLSLVGCEVVPDPSPDHLYSFRILHKGEELAKLEAKSSEEMGHWLGLLLSESGSKTDPEEFTYDYVDADRVSCIVSAAKNSLLLMQRKFSEPNTYIDGLPSQDRQEELYDDVDLSELTAAVEPTEEATPVADDPNERESDRVYLDLTPVKSFLHGPSSAQAQASSPTLSCLDNATEALPADSGPGPTPDEPCIKCPENLGEQQLESLEPEDPSLRITTVKIQTEQQRISFPPSCPDAVVATPPGASPPVKDRLRVTSAEIKLGKNRTEAEVKRYTEEKERLEKKKEEIRGHLAQLRKEKRELKETLLKCTDKEVLASLEQKLKEIDEECRGEESRRVDLELSIMEVKDNLKKAEAGPVTLGTTVDTTHLENVSPRPKAVTPASAPDCTPVNSATTLKNRPLSVVVTGKGTVLQKAKEWEKKGAS

SEQ ID NO: 36096 - protein, 333 aa, Homo sapiens
MCEEETTALVCDNGSGLCKAGFAGDDAPRAVFPSIVGRPRHQIWHHSFYNELRVAPEEHPTLLTEAPLNPKANREKMTQIMFETFNVPAMYVAIQAVLSLYASGRTTGIVLDSGDGVTHNVPIYEGYALPHAIMRLDLAGRDLTDYLMKILTERGYSFVTTAEREIVRDIKEKLCYVALDFENEMATAASSSSLEKSYELPDGQVITIGNERFRCPETLFQPSFIGMESAGIHETTYNSIMKCDIDIRKDLYANNVLSGGTTMYPGIADRMQKEITALAPSTMKIKIIAPPERKYSVWIGGSILASLSTFQQMWISKPEYDEAGPSIVHRKCF

SEQ ID NO: 36097 - protein, 370 aa, Homo sapiens
MSLHQFLLEPITCHAWNRDRTQIALSPNNHEVHIYKKNGSQWVKAHELKEHNGHITGIDWAPKSDRIVTCGADRNAYVWSQKDGVWKPTLVILRINRAATFVKWSPLENKFAVGSGARLISVCYFESENDWWVSKHIKKPIRSTVLSLDWHPNNVLLAAGSCDFKCRVFSAYIKEVDEKPASTPWGSKMPFGQLMSEFGGSGTGGWVHGVSFSASGSRLAWVSHDSTVSVADASKSVQVSTLKTEFLPLLSVSFVSENSVVAAGHDCCPMLFNYDDRGCLTFVSKLDIPKQSIQRNMSAMERFRNMDKRATTEDRNTALETLHQNSITQVSIYEVDKQDCRKFCTTGIDGAMTIWDFKTLESSIQGLRIM

SEQ ID NO: 36098 - protein, 345 aa, Homo sapiens
MHERFIHCFCIDWAPKSDRIVTCGADRNAYVWSQKDGVWKPTLVILRINRAATFVKWSPLENKFAVGSGARLISVCYFESENDWWVSKHIKKPIRSTVLSLDWHPNNVLLAAGSCDFKCRVFSAYIKEVDEKPASTPWGSKMPFGQLMSEFGGSGTGGWVHGVSFSASGSRLAWVSHDSTVSVADASKSVQVSTLKTEFLPLLSVSFVSENSVVAAGHDCCPMLFNYDDRGCLTFVSKLDIPKQSIQRNMSAMERFRNMDKRATTEDRNTALETLHQNSITQVSIYEVDKQDCRKFCTTGIDGAMTIWDFKEPSRHGLPQLPGGAHQLPRLEQGPHPDCHLPQQP

SEQ ID NO: 36099 - protein, 372 aa, Homo sapiens
MAYHSFLVEPISCHAWNKDRTQIAICPNNHEVHIYEKSGAKWTKVHELKEHNGQVTGIDWAPESNRIVTCGTDRNAYVWTLKGRTWKPTLVILRINRAARCVRWAPNENKFAVGSGSRVISICYFEQENDWWVCKHIKKPIRSTVLSLDWHPNNVLLAAGSCDFKCRIFSAYIKEVEERPAPTPWGSKMPFGELMFESSSSCGWVHGVCFSASGSRVAWVSHDSTVCLADADKKMAVATLASETLPLLALTFITDNSLVAAGHDCFPVLFTYDAAAGMLSFGGRLDVPKQSSQRGLTARERFQNLDKKASSEGGTAAGAGLDSLHKNSVSQISVLSGGKAKCSQFCTTGMDGGMSIWDVKSLESALKDLKIK

SEQ ID NO: 36100 - protein, 102 aa, Homo sapiens
MAYHSFLVEPISCHAWNKDRTQIAICPNNHEVHIYEKSGAKWTKVHELKEHNGQVTGIDWAPESNRIVTCGTDRNAYVWTLKGRTWKPTLVILRINRAARCV

SEQ ID NO: 36101 - protein, 130 aa, Homo sapiens
MAYHSFLVEPISCHAWNKDRTQIAICPNNHEVHIYEKSGAKWTKVHELKEHNGQVTGIDWAPESNRIVTCGTDRNAYVWTLKGRTWKPTLVILRINRAARCVRWAPNENKFAVGSGSRVISICYFEQEND

SEQ ID NO: 36102 - protein, 83 aa, Homo sapiens
MAYHSFLVEPISCHAWNKDRTQIAICPNNHEVHIYEKSGAKWTKVHELKEHNGQVTGIDWAPESNRIVTCGTDRNAYVWTLKG

SEQ ID NO: 36103 - protein, 133 aa, Homo sapiens
MAYHSFLVEPISCHAWNKDRTQIAICPNNHEVHIYEKSGAKWTKVHELKEHNGQVTGIDWAPESNRIVTCGTDRNAYVWTLKGRTWKPTLVILRINRAARCVRWAPNENKFAVGSGSRVISICYFEQENDWWV

SEQ ID NO: 36104 - protein, 21 aa, Homo sapiens
MAYHSFLVEPISCHAWNKDRT

SEQ ID NO: 36105 - protein, 133 aa, Homo sapiens; identical to SEQ ID NO: 36103

SEQ ID NO: 36106 - protein, 108 aa, Homo sapiens
MAYHSFLVEPISCHAWNKDRTQIAICPNNHEVHIYEKSGAKWTKVHELKEHNGQVTGIDWAPESNRIVTCGTDRNAYVWTLKGRTWKPTLVILRINRAARCVRWAPNE

SEQ ID NO: 36107 - protein, 372 aa, Homo sapiens; identical to SEQ ID NO: 36099

SEQ ID NO: 36108 - protein, 128 aa, Homo sapiens
MAYHSFLVEPISCHAWNKDRTQIAICPNNHEVHIYEKSGAKWTKVHELKEHNGQVTGIDWAPESNRIVTCGTDRNAYVWTLKGRTWKPTLVILRINRAARCVRWAPNENKFAVGSGSRVISICYFEQE

SEQ ID NO: 36109 - protein, 133 aa, Homo sapiens; identical to SEQ ID NO: 36103

SEQ ID NO: 36110 - protein, 300 aa, Homo sapiens
MILLEVNNRIIEETLALKFENAAAGNKPEAVEVTFADFDGVLYHISNPNGDKTKVMVSISLKFYKELQAHGADELLKRVYGSFLVNPESGYNVSLLYDLENLPASKDSIVHQAGMLKRNCFASVFEKYFQFQEEGKEGENRAVIHYRDDETMYVESKKDRVTVVFSTVFKDDDDVVIGKVFMQEFKEGRRASHTAPQVLFSHREPPLELKDTDAAVGDNIGYITFVLFPRHTNASARDNTINLIHTFRDYLHYHIKCSKAYIHTRMRAKTSDFLKVLNRARPDAEKKEMKTITGKTFSSR

SEQ ID NO: 36111 - protein, 300 aa, Homo sapiens; identical to SEQ ID NO: 36110

SEQ ID NO: 36112 - protein, 90 aa, Homo sapiens
MILLEVNNRIIEETLALKFENAAAGNKPEAVEVTFADFDGVLYHISNPNGDKTKVMVSISLKFYKELQAHGADELLKRVYGSFLVNPESG

SEQ ID NO: 36113 - protein, 287 aa, Homo sapiens
MCDEDETTALVCDNGSGLVKAGFAGDDAPRAVFPSIVGRPRHQGVMVGMGQKDSYVGDEAQSKRGILTLKYPIEHGIITNWDDMEKIWHHTFYNELRVAPEEHPTLLTEAPLNPKANREIVRDIKEKLCYVALDFENEMATAASSSSLEKSYELPDGQVITIGNERFRCPETLFQPSFIGMESAGIHETTYNSIMKCDIDIRKDLYANNVMSGGTTMYPGIADRMQKEITALAPSTMKIKIIAPPERKYSVWIGGSILASLSTFQQMWITKQEYDEAGPSIVHRKCF

SEQ ID NO: 36114 - protein, 254 aa, Homo sapiens
MCDEDETTALVCDNGSGLVKAGFAGDDAPRAVFPSIVGRPRHQGVMVGMGQKDSYVGDEAQSKRGILTLKYPIEHGIITNWDDMEKIWHHTFYNELRVAPEEHPTLLTEAPLNPKANREKMTQIMFETFNVPAMYVAIQAVLSLYASGRTTGIVLDSGDGIMKCDIDIRKDLYANNVMSGGTTMYPGIADRMQKEITALAPSTMKIKIIAPPERKYSVWIGGSILASLSTFQQMWITKQEYDEAGPSIVHRKCF

SEQ ID NO: 36115 - protein, 342 aa, Homo sapiens
MCDEDETTALVCDNGSGLVKAGFAGDDAPRAVFPSIVGRPRHQGVMVGMGQKDSYVGDEAQSKRGILTLKYPIEHGIITKANREKMTQIMFETFNVPAMYVAIQAVLSLYASGRTTGIVLDSGDGVTHNVPIYEGYALPHAIMRLDLAGRDLTDYLMKILTERGYSFVTTAEREIVRDIKEKLCYVALDFENEMATAASSSSLEKSYELPDGQVITIGNERFRCPETLFQPSFIGMESAGIHETTYNSIMKCDIDIRKDLYANNVMSGGTTMYPGIADRMQKEITALAPSTMKIKIIAPPERKYSVWIGGSILASLSTFQQMWITKQEYDEAGPSIVHRKCF

SEQ ID NO: 36116 - protein, 289 aa, Homo sapiens
MCDEDETTALVCDNGSGLVKAGFAGDDAPRAVFPSIVGRPRHQGVMVGMGQKDSYVGDEAQSKRGILTLKYPIEHGIITNWDDMEKIWHHTFYNELRVAPEEHPTLLTEAPLNPKANPEREIVRDIKEKLCYVALDFENEMATAASSSSLEKSYELPDGQVITIGNERFRCPETLFQPSFIGMESAGIHETTYNSIMKCDIDIRKDLYANNVMSGGTTMYPGIADRMQKEITALAPSTMKIKIIAPPERKYSVWIGGSILASLSTFQQMWITKQEYDEAGPSIVHRKCF

SEQ ID NO: 36117 - protein, 377 aa, Homo sapiens
MCDEDETTALVCDNGSGLVKAGFAGDDAPRAVFPSIVGRPRHQGVMVGMGQKDSYVGDEAQSKRGILTLKYPIEHGIITNWDDMEKIWHHTFYNELRVAPEEHPTLLTEAPLNPKANREKMTQIMFETFNVPAMYVAIQAVLSLYASGRTTGIVLDSGDGVTHNVPIYEGYALPHAIMRLDLAGRDLTDYLMKILTERGYSFVTTAEREIVRDIKEKLCYVALDFENEMATAASSSSLEKSYELPDGQVITIGNERFRCPETLFQPSFIGMESAGIHETTYNSIMKCDIDIRKDLYANNVMSGGTTMYPGIADRMQKEITALAPSTMKIKIIAPPERKYSVWIGGSILASLSTFQQMWITKQEYDEAGPSIVHRKCF

SEQ ID NO: 36118 - protein, 381 aa, Homo sapiens
MAPGEKESGEGPAKSALRKIRTATLVISLARGWQQWANENSIRQAQEPTGWLPGGTQDSPQAPKPITPPTSHQKAQSAPKSPPRLPEGHGDGQSSEKAPEVSHIKKKEVSKTVVSKTYERGGDVSHLSHRYERDAGVLEPGQPENDIDRILHSHGSPTRRRKCANLVSELTKGWRVMEQEEPTWRSDSVDTEDSGYGGEAEERPEQDGVQVAVVRIKRPLPSQVNRFTEKLNCKAQQKYSPVGNLKGRWQQWADEHIQSQKLNPFSEEFDYELAMSTRLHKGDEGYGRPKEGTKTAERAKRAEEHIYREMMDMCFIICTMARHRRDGKIQVTFGDLFDRYVRISDKVVGILMRARKHGLVDFEGEMLWQGRDDHVVITLLK

SEQ ID NO: 36119 - protein, 894 aa, Homo sapiens
MNQIEPGVQYNYVYDEDEYMIQEEEWDRDLLLDPAWEKQQRKTFTAWCNSHLRKAGTQIENIEEDFRNGLKLMLLLEVISGERLPKPDRGKMRFHKIANVNKALDYIASKGVKLVSIGAEEIVDGNVKMTLGMIWTIILRFAIQDISVEETSAKEGLLLWCQRKTAPYRNVNIQNFHTSWKDGLGLCALIHRHRPDLIDYSKLNKDDPIGNINLAMEIAEKHLDIPKMLDAEDIVNTPKPDERAIMTYVSCFYHAFAGAEQAETAANRICKVLAVNQENERLMEEYERLASELLEWIRRTIPWLENRTPEKTMQAMQKKLEDFRDYRRKHKPPKVQEKCQLEINFNTLQTKLRISNRPAFMPSEGKMVSDIAGAWQRLEQAEKGYEEWLLNEIRRLERLEHLAEKFRQKASTHETWAYGKEQILLQKDYESASLTEVRALLRKHEAFESDLAAHQDRVEQIAAIAQELNELDYHDAVNVNDRCQKICDQWDRLGTLTQKRREALERMEKLLETIDQLHLEFAKRAAPFNNWMEGAMEDLQDMFIVHSIEEIQSLITAHEQFKATLPEADGERQSIMAIQNEVEKVIQSYNIRISSSNPYSTVTMDELRTKWDKVKQLVPIRDQSLQEELARQHANERLRRQFAAQANAIGPWIQNKMEEIARSSIQITGALEDQMNQLKQYEHNIINYKNNIDKLEGDHQLIQEALVFDNKHTNYTMEHIRVGWELLLTTIARTINEVETQILTRDAKGITQEQMNEFRASFNHFDRRKNGLMDHEDFRACLISMGYDLGEAEFARIMTLVDPNGQGTVTFQSFIDFMTRETADTDTAEQVIASFRILASDKPYILAEELRRELPPDQAQYCIKRMPAYSGPGSVPGALDYAAFSSALYGESDL

SEQ ID NO: 36120 - protein, 894 aa, Homo sapiens
MNQIEPGVQYNYVYDEDEYMIQEEEWDRDLLLDPAWEKQQRKTFTAWCNSHLRKAGTQIENIEEDFRNGLKLMLLLEVISGERLPKPDRGKMRFHKIANVNKALDYIASKGVKLVSIGAEEIVDGNVKMTLGMIWTIILRFAIQDISVEETSAKEGLLLWCQRKTAPYRNVNIQNFHTSWKDGLGLCALIHRHRPDLIDYSKLNKDDPIGNINLAMEIAEKHLDIPKMLDAEDLVYTARPDERAIMTYVSCYYHAFAGAQKAETAANRICKVLAVNQENERLMEEYERLASELLEWIRRTIPWLENRTPEKTMQAMQKKLEDFRDYRRKHKPPKVQEKCQLEINFNTLQTKLRISNRPAFMPSEGKMVSDIAGAWQRLEQAEKGYEEWLLNEIRRLERLEHLAEKFRQKASTHETWAYGKEQILLQKDYESASLTEVRALLRKHEAFESDLAAHQDRVEQIAAIAQELNELDYHDAVNVNDRCQKICDQWDRLGTLTQKRREALERMEKLLETIDQLHLEFAKRAAPFNNWMEGAMEDLQDMFIVHSIEEIQSLITAHEQFKATLPEADGERQSIMAIQNEVEKVIQSYNIRISSSNPYSTVTMDELRTKWDKVKQLVPIRDQSLQEELARQHANERLRRQFAAQANAIGPWIQNKMEEIARSSIQITGALEDQMNQLKQYEHNIINYKNNIDKLEGDHQLIQEALVFDNKHTNYTMEHIRVGWELLLTTIARTINEVETQILTRDAKGITQEQMNEFRASFNHFDRRKNGLMDHEDFRACLISMGYDLGEAEFARIMTLVDPNGQGTVTFQSFIDFMTRETADTDTAEQVIASFRILASDKPYILAEELRRELPPDQAQYCIKRMPAYSGPGSVPGALDYAAFSSALYGESDL

SEQ ID NO: 36121 - protein, 663 aa, Homo sapiens
STLSSVEGPPESSTCSYQEMRRSSVNSSAMAETAANRICKVLAVNQENERLMEEYERLASELLEWIRRTIPWLENRTPEKTMQAMQKKLEDFRDYRRKHKPPKVQEKCQLEINFNTLQTKLRISNRPAFMPSEGKMVSDIAGAWQRLEQAEKGYEEWLLNEIRRLERLEHLAEKFRQKASTHETWAYGKEQILLQKDYESASLTEVRALLRKHEAFESDLAAHQDRVEQIAAIAQELNELDYHDAVNVNDRCQKICDQWDRLGTLTQKRREALERMEKLLETIDQLHLEFAKRAAPFNNWMEGAMEDLQDMFIVHSIEEIQSLITAHEQFKATLPEADGERQSIMAIQNEVEKVIQSYNIRISSSNPYSTVTMDELRTKWDKVKQLVPIRDQSLQEELARQHANERLRRQFAAQANAIGPWIQNKMEEIARSSIQITGALEDQMNQLKQYEHNIINYKNNIDKLEGDHQLIQEALVFDNKHTNYTMEHIRVGWELLLTTIARTINEVETQILTRDAKGITQEQMNEFRASFNHFDRRKNGLMDHEDFRACLISMGYDLGEAEFARIMTLVDPNGQGTVTFQSFIDFMTRETADTDTAEQVIASFRILASDKPYILAEELRRELPPDQAQYCIKRMPAYSGPGSVPGALDYAAFSSALYGESDL

SEQ ID NO: 36122 - protein, 388 aa, Homo sapiens
MEKLLETIDQLHLEFAKRAAPFNNWMEGAMEDLQDMFIVHSIEEIQSLITAHEQFKATLPEADGERQSIMAIQNEVEKVIQSYNIRISSSNPYSTVTMDELRTKWDKVKQLVPIRDQSLQEELARQHANERLRRQFAAQANAIGPWIQNKMEEIARSSIQITGALEDQMNQLKQYEHNIINYKNNIDKLEGDHQLIQEALVFDNKHTNYTMEHIRVGWELLLTTIARTINEVETQILTRDAKGITQEQMNEFRASFNHFDRRKNGLMDHEDFRACLISMGYDLGEAEFARIMTLVDPNGQGTVTFQSFIDFMTRETADTDTAEQVIASFRILASDKPYILAEELRRELPPDQAQYCIKRMPAYSGPGSVPGALDYAAFSSALYGESDL

SEQ ID NO: 36123 - protein, 376 aa, Homo sapiens
MFNPHALDVPAVIFDNGSGLCKAGLSGEIGPRHVISSVLGHCKFNVPLARLNQKYFVGQEALYKYEALHLHYPIERGLVTGWDDMEKLWKHLFERELGVKPSQQPVLMTEPSLNPREIREKLAEMMFETFSVPGFYLSNHAVAALYASACVTGLVVDSGDGVTCTVPIFEGYSLPHAVTKLCMAGRDITEHLTRLLFASGFNFPCILNKAVVNNIKEKLCYIALEPEKELRKSRGEVLGAYRLPDGHVIHFGDELYQVPEVLFAPDQLGIHSPGLSKMVSSSIMKCDTDIQNKLYADIVLSGGTTLLPGLEERLMKEVEQLASKGTPIKITASPDRCFSAWIGASIMTSMSSFKQMWVTSADFKEYGTSVVQRRCF

SEQ ID NO: 36124 - protein, 377 aa, Homo sapiens
MFNPHALDSPAVIFDNGSGFCKAGLSGEFGPRHMVSSIVGHLKFQAPSAEANQKKYFVGEEALYKQEALQLHSPFERGLITGWDDVERLWKHLFEWELGVKPSDQPLLATEPSLNPRENREKMAEVMFENFGVPAFYLSDQAVLALYASACVTGLVVDSGDAVTCTVPIFEGYSLPHAVTKLHVAGRDITELLMQLLLASGHTFPCQLDKGLVDDIKKKLCYVALEPEKELSRRPEEVLREYKLPDGNIISLGDPLHQAPEALFVPQQLGSQSPGLSNMVSSSITKCDTDIQKILFGEIVLSGGTTLFHGLDDRLLKELEQLASKDTPIKITAPPDRWFSTWIGASIVTSLSSFKQMWVTAADFKEFGTSVVQRRCF

SEQ ID NO: 36125 - protein, 328 aa, Homo sapiens
MFNPHALDSPAVIFDNGSGFCKAGLSGEFGPRHMVSSIVGHLKFQAPSAEANQKKYFVGEEALYKQEALQLHSPFERGLITGWDDVERLWKHLFEWELGVKPSDQPLLATEPSLNPRENREKMAEVMFENFGVPAFYLSDQAVLALYASACVTGLVVDSGDAVTCTVPIFEGYSLPHAVTKLHVAGRDITELLMQLLLASGHTFPCQLDKGLVDDIKKKLCYVALEPEKELSRRPEEVLREYKLPDGNIISLGDPLHQAPEALFVPQQLGSQSPGLSNMVSSSITKCDTDIQKILFGEIVLSGGTTLFHGLDDRLLHLDWSLHRHLSE

SEQ ID NO: 36126 - protein, 583 aa, Homo sapiens
MESKGASSCRLLFCLLISATVFRPGLGWYTVNSAYGDTIIIPCRLDVPQNLMFGKWKYEKPDGSPVFIAFRSSTKKSVQYDDVPEYKDRLNLSENYTLSISNARISDEKRFVCMLVTEDNVFEAPTIVKVFKQPSKPEIVSKALFLETEQLKKLGDCISEDSYPDGNITWYRNGKVLHPLEGAVVIIFKKEMDPVTQLYTMTSTLEYKTTKADIQMPFTCSVTYYGPSGQKTIHSEQAVFDIYYPTEQVTIQVLPPKNAIKEGDNITLKCLGNGNPPPEEFLFYLPGQPEGIRSSNTYTLTDVRRNATGDYKCSLIDKKSMIASTAITVHYLDLSLNPSGEVTRQIGDALPVSCTISASRNATVVWMKDNIRLRSSPSFSSLHYQDAGNYVCETALQEVEGLKKRESLTLIVEGKPQIKMTKKTDPSGLSKTIICHVEGFPKPAIQWTITGSGSVINQTEESPYINGRYYSKIIISPEENVTLTCTAENQLERTVNSLNVSAISIPEHDEADEISDENREKVNDQAKLIVGIVVGLLLAALVAGVVYWLYMKKSKTASKHVNKDLGNMEENKKLEENNHKTEA

SEQ ID NO: 36127 - protein, 305 aa, Homo sapiens
MDPVTQLYTMTSTLEYKTTKADIQMPFTCSVTYYGPSGQKTIHSEQAVFDIYYLDLSLNPSGEVTRQIGDALPVSCTISASRNATVVWMKDNIRLRSSPSFSSLHYQDAGNYVCETALQEVEGLKKRESLTLIVEGKPQIKMTKKTDPSGLSKTIICHVEGFPKPAIQWTITGSGSVINQTEESPYINGRYYSKIIISPEENVTLTCTAENQLERTVNSLNVSAISIPEHDEADEISDENREKVNDQAKLIVGIVVGLLLAALVAGVVYWLYMKKSKTASKHVNKDLGNMEENKKLEENNHKTEA

SEQ ID NO: 36128 - protein, 344 aa, Homo sapiens
  VARIANT 1: note = MOD_RES - Any amino acid
XLGDCISEDSYPDGNITWYRNGKVLHPLEGAVVIIFKKEMDPVTQLYTMTSTLEYKTTKADIQMPFTCSVTYYGPSGQKTIHSEQAVFDIYYLDLSLNPSGEVTRQIGDALPVSCTISASRNATVVWMKDNIRLRSSPSFSSLHYQDAGNYVCETALQEVEGLKKRESLTLIVEGKPQIKMTKKTDPSGLSKTIICHVEGFPKPAIQWTITGSGSVINQTEESPYINGRYYSKIIISPEENVTLTCTAENQLERTVNSLNVSAISIPEHDEADEISDENREKVNDQAKLIVGIVVGLLLAALVAGVVYWLYMKKSKTASKHVNKDLGNMEENKKLEENNHKTEA

SEQ ID NO: 36129 - protein, 570 aa, Homo sapiens
MESKGASSCRLLFCLLISATVFRPGLGWYTVNSAYGDTIIIPCRLDVPQNLMFGKWKYEKPDGSPVFIAFRSSTKKSVQYDDVPEYKDRLNLSENYTLSISNARISDEKRFVCMLVTEDNVFEAPTIVKVFKQPSKPEIVSKALFLETEQLKKLGDCISEDSYPDGNITWYRNGKVLHPLEGAVVIIFKKEMDPVTQLYTMTSTLEYKTTKADIQMPFTCSVTYYGPSGQKTIHSEQAVFDIYYPTEQVTIQVLPPKNAIKEGDNITLKCLGNGNPPPEEFLFYLPGQPEGIRSSNTYTLTDVRRNATGDYKCSLIDKKSMIASTAITVHYLDLSLNPSGEVTRQIGDALPVSCTISASRNATVVWMKDNIRLRSSPSFSSLHYQDAGNYVCETALQEVEGLKKRESLTLIVEGKPQIKMTKKTDPSGLSKTIICHVEGFPKPAIQWTITGSGSVINQTEESPYINGRYYSKIIISPEENVTLTCTAENQLERTVNSLNVSANENREKVNDQAKLIVGIVVGLLLAALVAGVVYWLYMKKSKTASKHVNKDLGNMEENKKLEENNHKTEA

SEQ ID NO: 36130 - protein, 357 aa, Homo sapiens
MEVLRPQLIRIDGRNYRKNPVQEQTYQHEEDEEDFYQGSMECADEPCDAYEVEQTPQGFRSTLRAPSLLYKHIVGKRGDTRKKIEMETKTSISIPKPGQDGEIVITGQHRNGVISARTRIDVLLDTFRRKQPFTHFLAFFLNEVEVQEGFLRFQEEVLAKCSMDHGVDSSIFQNPKKLHLTIGMLVLLSEEEIQQTCEMLQQCKEEFINDISGGKPLEVEMAGIEYMNDDPGMVDVLYAKVHMKDGSNRLQELVDRVLERFQASGLIVKEWNSVKLHATVMNTLFRKDPNAEGRYNLYTAEGKYIFKERESFDGRNILKLFENFYFGSLKLNSIHISQRFTVDSFGNYASCGQIDFS

SEQ ID NO: 36131 - protein, 357 aa, Homo sapiens; identical to SEQ ID NO: 36130

SEQ ID NO: 36132 - protein, 400 aa, Homo sapiens
MEVLRPQLIRIDGRNYRKNPVQEQTYQHEEDEEDFYQGSMECADEPCDAYEVEQTPQGFRSTLRAPSLLYNLIHLNTSNDCGFQKITLDCQNIYTWKSRHIVGKRGDTRKKIEMETKTSISIPKPGQDGEIVITGQHRNGVISARTRIDVLLDTFRRKQPFTHFLAFFLNEVEVQEGFLRFQEEVLAKCSMDHGVDSSIFQNPKKLHLTIGMLVLLSEEEIQQTCEMLQQCKEEFINDISGGKPLEVEMAGIEYMNDDPGMVDVLYAKVHMKDGSNRLQELVDRVLERFQASGLIVKEWNSVKLHATVMNTLFRKDPNAEGRYNLYTAEGKYIFKERESFDGRNILKSFALLPRLEYNDAISAHCNLCLPGSSDSPASASQVAGITGVSDAYSQSLPGKS

SEQ ID NO: 36133 - protein, 357 aa, Homo sapiens; identical to SEQ ID NO: 36130

SEQ ID NO: 36134 - protein, 400 aa, Homo sapiens; identical to SEQ ID NO: 36132

SEQ ID NO: 36135 - protein, 357 aa, Homo sapiens; identical to SEQ ID NO: 36130

SEQ ID NO: 36136 - protein, 292 aa, Homo sapiens
  VARIANT 1: note = MOD_RES - Any amino acid
XYKHIVGKRGDTRKKIEMETKTSISIPKPGQDGEIVITGQHRNGVISARTRIDVLLDTFRRKQPFTHFLAFFLNEVEVQEGFLRFQEEVLAKCSMDHGVDSSIFQNPKKLHLTIGMLVLLSEEEIQQTCEMLQQCKEEFINDISGGKPLEVEMAGIEYMNDDPGMVDVLYAKVHMKDGSNRLQELVDRVLERFQASGLIVKEWNSVKLHATVMNTLFRKDPNAEGRYNLYTAEGKYIFKERESFDGRNILKSFALLPRLEYNDAISAHCNLCLPGSSDSPASASQVAGITVV

SEQ ID NO: 36137 - protein, 275 aa, Homo sapiens
METKTSISIPKPGQDGEIVITGQHRNGVISARTRIDVLLDTFRRKQPFTHFLAFFLNEVEVQEGFLRFQEEVLAKCSMDHGVDSSIFQNPKKLHLTIGMLVLLSEEEIQQTCEMLQQCKEEFINDISGGKPLEVEMAGIEYMNDDPGMVDVLYAKVHMKDGSNRLQELVDRVLERFQASGLIVKEWNSVKLHATVMNTLFRKDPNAEGRYNLYTAEGKYIFKERESFDGRNILKSFALLPRLEYNDAISAHCNLCLPGSSDSPASASQVAGITVV

SEQ ID NO: 36138 - protein, 123 aa, Homo sapiens
MEVLRPQLIRIDGRNYRKNPVQEQTYQHEEDEEDFYQGSMECADEPCDAYEVEQTPQGFRSTLRAPSLLYKHIVGKRGDTRKKIEMETKTSISIPKPGQDGEIVITGQHRNGVISARTRIDVL

SEQ ID NO: 36139 - protein, 103 aa, Homo sapiens
MEVLRPQLIRIDGRNYRKNPVQEQTYQHEEDEEDFYQGSMECADEPCDAYEVEQTPQGFRSTLRAPSLLYKHIVGKRGDTRKKIEMETKTSISIPKPGQDGEI

SEQ ID NO: 36140 - protein, 152 aa, Homo sapiens
MEVLRPQLIRIDGRNYRKNPVQEQTYQHEEDEEDFYQGSMECADEPCDAYEVEQTPQGFRSTLRAPSLLYKHIVGKRGDTRKKIEMETKTSISIPKPGQDGEIVITGQHRNGVISARTRIDVLLDTFRRKQPFTHFLAFFLNEVEVQEGFLR

SEQ ID NO: 36141 - protein, 56 aa, Homo sapiens
MEVLRPQLIRIDGRNYRKNPVQEQTYQHEEDEEDFYQGSMECADEPCDAYEVEQTP

SEQ ID NO: 36142 - protein, 379 aa, Homo sapiens
MMKYPGTWPCQGIIGISFGESVMEVLRPQLIRIDGRNYRKNPVQEQTYQHEEDEEDFYQGSMECADEPCDAYEVEQTPQGFRSTLRAPSLLYKHIVGKRGDTRKKIEMETKTSISIPKPGQDGEIVITGQHRNGVISARTRIDVLLDTFRRKQPFTHFLAFFLNEVEVQEGFLRFQEEVLAKCSMDHGVDSSIFQNPKKLHLTIGMLVLLSEEEIQQTCEMLQQCKEEFINDISGGKPLEVEMAGIEYMNDDPGMVDVLYAKVHMKDGSNRLQELVDRVLERFQASGLIVKEWNSVKLHATVMNTLFRKDPNAEGRYNLYTAEGKYIFKERESFDGRNILKLFENFYFGSLKLNSIHISQRFTVDSFGNYASCGQIDFS

SEQ ID NO: 36143 - protein, 757 aa, Homo sapiens
MPALPLDQLQITHKDPKTGKLRTSPALHPEQKADRYFVLYKPPPKDNIPALVEEYLERATFVANDLDWLLALPHDKFWCQVIFDETLQKCLDSYLRYVPRKFDEGVASAPEVVDMQKRLHRSVFLTFLRMSTHKESKDHFISPSAFGEILYNNFLFDIPKILDLCVLFGKGNSPLLQKMIGNIFTQQPSYYSDLDETLPTILQVFSNILQHCGLQGDGANTTPQKLEERGRLTPSDMPLLELKDIVLYLCDTCTTLWAFLDIFPLACQTFQKHDFCYRLASFYEAAIPEMESAIKKRRLEDSKLLGDLWQRLSHSRKKLMEIFHIILNQICLLPILESSCDNIQGFIEEFLQIFSSLLQEKRFLRDYDALFPVAEDISLLQQASSVLDETRTAYILQAVESAWEGVDRRKATDAKDPSVIEEPNGEPNGVTVTAEAVSQASSHPENSEEEECMGAAAAVGPAMCGVELDSLISQVKDLLPDLGEGFILACLEYYHYDPEQVINNILEERLAPTLSQLDRNLDREMKPDPTPLLTSRHNVFQNDEFDVFSRDSVDLSRVHKGKSTRKEENTRSLLNDKRAVAAQRQRYEQYSVVVEEVPLQPGESLPYHSVYYEDEYDDTYDGNQVGANDADSDDELISRRPFTIPQVLRTKVPREGQEEDDDDEEDDADEEAPKPDHFVQDPAVLREKAEARRMAFLAKKGYRHDSSTAVAGSPRGHGQSRETTQERRKKEANKATRANHNRRTMADRKRSKGMIPS

SEQ ID NO: 36144 - protein, 757 aa, Homo sapiens; identical to SEQ ID NO: 36143

SEQ ID NO: 36145 - protein, 240 aa, Homo sapiens
MPALPLDQLQITHKDPKTGKLRTSPALHPEQKADRYFVLYKPPPKDNIPALVEEYLERATFVANDLDWLLALPHDKFWCQVIFDETLQKCLDSYLRYVPRKFDEGVASAPEVVDMQKRLHRSVFLTFLRMSTHKESKDHFISPSAFGEILYNNFLFDIPKILDLCVLFGKGNSPLLQKMIGNIFTQQPSYYSDLDETLPTILQVFSNILQHCGLQGDGANTTPQKLEERGRLTPSDMPLL

SEQ ID NO: 36146 - protein, 681 aa, Homo sapiens
MPALPLDQLQITHKDPKTGKLRTSPALVIFDETLQKCLDSYLRYVPRKFDEGVASAPEVVDMQKRLHRSVFLTFLRMSTHKESKILDLCVLFGKGNSPLLQKMIGNIFTQQPSYYSDLDETLPTILQVFSNILQHCGLQGDGANTTPQKLEERGRLTPSDMPLLELKDIVLYLCDTCTTLWAFLDIFPLACQTFQKHDFCYRLASFYEAAIPEMESAIKKRRLEDSKLLGDLWQRLSHSRKKLMEIFHIILNQICLLPILESSCDNIQGFIEEFLQIFSSLLQEKRFLRDYDALFPVAEDISLLQQASSVLDETRTAYILQAVESAWEGVDRRKATDAKDPSVIEEPNGEPNGVTVTAEAVSQASSHPENSEEEECMGAAAAVGPAMCGVELDSLISQVKDLLPDLGEGFILACLEYYHYDPEQVINNILEERLAPTLSQLDRNLDREMKPDPTPLLTSRHNVFQNDEFDVFSRDSVDLSRVHKGKSTRKEENTRSLLNDKRAVAAQRQRYEQYSVVVEEVPLQPGESLPYHSVYYEDEYDDTYDGNQVGANDADSDDELISRRPFTIPQVLRTKVPREGQEEDDDDEEDDADEEAPKPDHFVQDPAVLREKAEARRMAFLAKKGYRHDSSTAVAGSPRGHGQSRETTQERRKKEANKATRANHNRRTMADRKRSKGMIPS

SEQ ID NO: 36147 - protein, 176 aa, Homo sapiens
MALPRLTGALRSFSNVTKQDNYNEEVADLKIKRSKLHEQVLDLGLTWKKIIKFLNEKLEKSKMQSINEDLKDILHAAKQIVGTDNGREAIESGAAFLFMTFHLKDSVGHKETKAIKQMFGPFPSSSATAACNATNRIISHFSQDDLTALVQMTEKEHGDRVFFGKNLAFSFDMHDL

SEQ ID NO: 36148 - protein, 111 aa, Homo sapiens
MALPRLTGALRSFSNVTKQDNYNEEVADLKIKRSKLHEQVLDLGLTWKKIIKFLNEKLEKSKMQSINEDLKDILHAAKQIEVNCPFQKRRLDGKEEDEKMSRASDRFRGLR

SEQ ID NO: 36149 - protein, 2202 aa, Homo sapiens
MALPRLTGALRSFSNVTKQDNYNEEVADLKIKRSKLHEQVLDLGLTWKKIIKFLNEKLEKSKMQSINEDLKDILHAAKQIVGTDNGREAIESGAAFLFMTFHLKDSVGHKETKAIKQMFGPFPSSSATAACNATNRIISHFSQDDLTALVQMTEKEHGDRVFFGKNLAFSFDMHDLDHFDELPINGETQKTISLDYKKFLNEHLQEACTPELKPVEKTNGSFLWCEVEKYLNSTLKEMTEVPRVEDLCCTLYDMLASIKSGDELQDELFELLGPEGLELIEKLLQNRITIVDRFLNSSNDHRFQALQDNCKKILGENAKPNYGCQVTIQSEQEKQLMKQYRREEKRIARREKKAGEDLEVSEGLMCFDPKELRIQREQALLNARSVPILSRQRDADVEKIHYPHVYDSQAEAMKTSAFIAGAKMILPEGIQRENNKLYEEVRIPYSEPMPLSFEEKPVYIQDLDEIGQLAFKGMKRLNRIQSIVFETAYNTNENMLICAPTGAGKTNIAMLTVLHEIRQHFQQGVIKKNEFKIVYVAPMKALAAEMTDYFSRRLEPLGIIVKELTGDMQLSKSEILRTQMLVTTPEKWDVVTRKSVGDVALSQIVRLLILDEVHLLHEDRGPVLESIVARTLRQVESTQSMIRILGLSATLPNYLDVATFLHVNPYIGLFFFDGRFRPVPLGQTFLGIKCANKMQQLNNMDEVCYENVLKQVKAGHQVMVFVHARNATVRTAMSLIERAKNCGHIPFFFPTQGHDYVLAEKQVQRSRNKQVRELFPDGFSIHHAGMLRQDRNLVENLFSNGHIKVLVCTATLAWGVNLPAHAVIIKGTQIYAAKRGSFVDLGILDVMQIFGRAGRPQFDKFGEGIIITTHDKLSHYLTLLTQRNPIESQFLESLADNLNAEIALGTVTNVEEAVKWISYTYLYVRMRANPLAYGISHKAYQIDPTLRKHREQLVIEVGRKLDKAQMIRFEERTGYFSSTDLGRTASHYYIKYNTIETFNELFDAHKTEGDIFAIVSKAEEFDQIKVREEEIEELDTLLSNFCELSTPGGVENSYGKINILLQTYISRGEMDSFSLISDSAYVAQNAARIVRALFEIALRKRWPTMTYRLLNLSKVIDKRLWGWASPLRQFSILPPHILTRLEEKKLTVDKLKDMRKDEIGHILHHVNIGLKVKQCVHQIPSVMMEASIQPITRTVLRVTLSIYADFTWNDQVHGTVGEPWWIWVEDPTNDHIYHSEYFLALKKQVISKEAQLLVFTIPIFEPLPSQYYIRAVSDRWLGAEAVCIINFQHLILPERHPPHTELLDLQPLPITALGCKAYEALYNFSHFNPVQTQIFHTLYHTDCNVLLGAPTGSGKTVAAELAIFRVFNKYPTSKAVYIAPLKALVRERMDDWKVRIEEKLGKKVIELTGDVTPDMKSIAKADLIVTTPEKWDGVSRSWQNRNYVQQVTILIIDEIHLLGEERGPVLEVIVSRTNFISSHTEKPVRIVGLSTALANARDLADWLNIKQMGLFNFRPSVRPVPLEVHIQGFPGQHYCPRMASMNKPAFQAIRSHSPAKPVLIFVSSRRQTRLTALELIAFLATEEDPKQWLNMDEREMENIIATVRDSNLKLTLAFGIGMHHAGLHERDRKTVEELFVNCKVQVLIATSTLAWGVNFPAHLVIIKGTEYYDGKTRRYVDFPITDVLQMMGRAGRPQFDDQGKAVILVHDIKKDFYKKFLYEPFPVESSLLGVLSDHLNAEIAGGTITSKQDALDYITWTYFFRRLIMNPSYYNLGDVSHDSVNKFLSHLIEKSLIELELSYCIEIGEDNRSIEPLTYGRIASYYYLKHQTVKMFKDRLKPECSTEELLSILSDAEEYTDLPVRHNEDHMNSELAKCLPIESNPHSFDSPHTKAHLLLQAHLSRAMLPCPDYDTDTKTVLDQALRVCQAMLDVAANQGWLVTVLNITNLIQMVIQGRWLKDSSLLTLPNIENHHLHLFKKWKPIMKGPHARGRTSIESLPELIHACGGKDHVFSSMVESELHAAKTKQAWNFLSHLPVINVGISVKGSWDDLVEGHNELSVSTLTADKRDDNKWIKLHADQEYVLQVSLQRVHFGFHKGKPESCAVTPRFPKSKDEGWFLILGEVDKRELIALKRVGYIRNHHVASLSFYTPEIPGRYIYTLYFMSDCYLGLDQQYDIYLNVTQASLSAQVNTKVSDSLTDLALK

SEQ ID NO: 36150 - protein, 271 aa, Homo sapiens
MEDSHKSTTSETAPQPGSAVQGAHISHIAQQVSSLSESEESQDSSDSIGSSQKAHGILARRPSYRKILKDLSSEDTRGRKGDGENSGVSAAVTSMSVPTPIYQTSSGQYIAIAPNGALQLASPGTDGVQGLQTLTMTNSGSTQQGTTILQYAQTSDGQQILVPSNQVVVQTASGDMQTYQIRTTPSATSLPQTVVMTSPVTLTSQTTKTDDPQLKREIRLMKNREAARECRRKKKEYVKCLENRVAVLENQNKTLIEELKTLKDLYSNKSV

SEQ ID NO: 36151 - protein, 136 aa, Homo sapiens
MTNSGSTQQGTTILQYAQTSDGQQILVPSNQVVVQTASGDMQTYQIRTTPSATSLPQTVVMTSPVTLTSQTTKTDDPQLKREIRLMKNREAARECRRKKKEYVKCLENRVAVLENQNKTLIEELKTLKDLYSNKSV

SEQ ID NO: 36152 - protein, 200 aa, Homo sapiens
MEDSHKSTTSETAPQPGSAVQGAHISHIAQQVSSLSESEESQDSSDSIGSSQKAHGILARRPSYRKILKDLSSEDTRGRKGDGENSGVSAAVTSMSVPTPIYQTSSGQYIAIAPNGALQLASPGTDGVQGLQTLTMTNSGSTQQGTTILQYAQTSDGQQILVPSNQVVVQTASGDMQTYQIRTTPSATSLPQTVVMTSPV

SEQ ID NO: 36153 - protein, 170 aa, Homo sapiens
MEDSHKSTTSETAPQPGSAVQGAHISHIAQQVSSLSESEESQDSSDSIGSSQKAHGILARRPSYRKILKDLSSEDTRGRKGDGENSGVSAAVTSMSVPTPIYQTSSGQYIAIAPNGALQLASPGTDGVQGLQTLTMTNSGSTQQGTTILQYAQTSDGQQILVPSNQVVVQ

SEQ ID NO: 36154 - protein, 106 aa, Homo sapiens
MMLQHPGQVSASEEELRFAIQNKHLCHRMSSALESVTVSDRPLGVSITKAEVAPEEDERKKRRRERNKIAAAKCRNKKKEKTECLQKLPRPFWVQKTCIWAVDSCK

SEQ ID NO: 36155 - protein, 181 aa, Homo sapiens
MMLQHPGQVSASEVSASAIVPCLSPPGSLVFEDFANLTPFVKEELRFAIQNKHLCHRMSSALESVTVSDRPLGVSITKAEVAPEEDERKKRRRERNKIAAAKCRNKKKEKTECLQKESEKLESVNAELKAQIEELKNEKQHLIYMLNLHRPTCIVRAQNGRTPEDERNLFIQQIKEGTLQS

SEQ ID NO: 36156 - protein, 175 aa, Homo sapiens
MMLQHPGQVSASEVSASAIVPCLSPPGSLVFEDFANLTPFVKEELRFAIQNKHLCHRMSSALESVTVSDRPLGVSITKAEVAPEEDERKKRRRERNKIAAAKCRNKKKEKTECLQKESEKLESVNAELKAQIEELKNEKQHLIYMLNLHRPTCIVRAQNGRTPEDERNLFIQQIK

SEQ ID NO: 36157 - protein, 135 aa, Homo sapiens
MMLQHPGQVSASEVSASAIVPCLSPPGSLVFEDFANLTPFVKEELRFAIQNKHLCHRMSSALESVTVSDRPLGVSITKAEVAPEEDERKKRRRERNKIAAAKCRNKKKEKTECLQKLPRPFWVQKTCIWAVDSCK

SEQ ID NO: 36158 - protein, 124 aa, Homo sapiens
MSSALESVTVSDRPLGVSITKAEVAPEEDERKKRRRERNKIAAAKCRNKKKEKTECLQKESEKLESVNAELKAQIEELKNEKQHLIYMLNLHRPTCIVRAQNGRTPEDERNLFIQQIKEGTLQS

SEQ ID NO: 36159 - protein, 181 aa, Homo sapiens; identical to SEQ ID NO: 36155

SEQ ID NO: 36160 - protein, 135 aa, Homo sapiens; identical to SEQ ID NO: 36157

SEQ ID NO: 36161 - protein, 351 aa, Homo sapiens
MTEMSFLSSEVLVGDLMSPFDQSGLGAEESLGLLDDYLEVAKHFKPHGFSSDKAKAGSSEWLAVDGLVSPSNNSKEDAFSGTDWMLEKMDLKEFDLDALLGIDDLETMPDDLLTTLDDTCDLFAPLVQETNKQPPQTVNPIGHLPESLTKPDQVAPFTFLQPLPLSPGVLSSTPDHSFSLELGSEVDITEGDRKPDYTAYVAMIPQCIKEEDTPSDNDSGICMSPESYLGSPQHSPSTRGSPNRSLPSPGVLCGSARPKPYDPPGEKMVAAKVKGEKLDKKLKKMEQNKTAATRYRQKKRAEQEALTGECKELEKKNEALKERADSLAKEIQYLKDLIEEVRKARGKKRVP

SEQ ID NO: 36162 - protein, 351 aa, Homo sapiens; identical to SEQ ID NO: 36161

SEQ ID NO: 36163 - protein, 351 aa, Homo sapiens; identical to SEQ ID NO: 36161

SEQ ID NO: 36164 - protein, 282 aa, Homo sapiens
MSLLATLGLELDRALLPASGLGWLVDYGKLPPAPAPLAPYEVLGGALEGGLPVGGEPLAGDGFSDWMTERVDFTALLPLEPPLPPGTLPQPSPTPPDLEAMASLLKKELEQMEDFFLDAPPLPPPSPPPLPPPPLPPAPSLPLSLPSFDLPQPPVLDTLDLLAIYCRNEAGQEEVGMPPLPPPQQPPPPSPPQPSRLAPYPHPATTRGDRKQKKRDQNKSAALRYRQRKRAEGEALEGECQGLEARNRELKERAESVEREIQYVKDLLIEVYKARSQRTRSC

SEQ ID NO: 36165 - protein, 670 aa, Homo sapiens
MGEPAGVAGTMESPFSPGLFHRLDEDWDSALFAELGYFTDTDELQLEAANETYENNFDNLDFDLDLMPWESDIWDINNQICTVKDIKAEPQPLSPASSSYSVSSPRSVDSYSSTQHVPEELDLSSSSQMSPLSLYGENSNSLSSAEPLKEDKPVTGPRNKTENGLTPKKKIQVNSKPSIQPKPLLLPAAPKTQTNSSVPAKTIIIQTVPTLMPLAKQQPIISLQPAPTKGQTVLLSQPTVVQLQAPGVLPSAQPVLAVAGGVTQLPNHVVNVVPAPSANSPVNGKLSVTKPVLQSTMRNVGSDIAVLRRQQRMIKNRESACQSRKKKKEYMLGLEARLKAALSENEQLKKENGTLKRQLDEVVSENQRLKVPSPKRRVVCVMIVLAFIILNYGPMSMLEQDSRRMNPSVSPANQRRHLLGFSAKEAQDTSDGIIQKNSYRYDHSVSNDKALMVLTEEPLLYIPPPPCQPLINTTESLRLNHELRGWVHRHEVERTKSRRMTNNQQKTRILQGALEQGSNSQLMAVQYTETTSSISRNSGSELQVYYASPRSYQDFFEAIRRRGDTFYVVSFRRDHLLLPATTHNKTTRPKMSIVLPAININENVINGQDYEVMMQIDCQVMDTRILHIKSSSVPPYLRDQQRNQTNTFFGSPPAATEATHVVSTIPESLQ

SEQ ID NO: 36166 - protein, 703 aa, Homo sapiens
MAELMLLSEIADPTRFFTDNLLSPEDWGLQNSTLYSGLDEVAEEQTQLFRCPEQDVPFDGSSLDVGMDVSPSEPPWELLPIFPDLQVKSEPSSPCSSSSLSSESSRLSTEPSSEALGVGEVLHVKTESLAPPLCLLGDDPTSSFETVQINVIPTSDDSSDVQTKIEPVSPCSSVNSEASLLSADSSSQAFIGEEVLEVKTESLSPSGCLLWDVPAPSLGAVQISMGPSLDGSSGKALPTRKPPLQPKPVVLTTVPMPSRAVPPSTTVLLQSLVQPPPVSPVVLIQGAIRVQPEGPAPSLPRPERKSIVPAPMPGNSCPPEVDAKLLKRQQRMIKNRESACQSRRKKKEYLQGLEARLQAVLADNQQLRRENAALRRRLEALLAENSELKLGSGNRKVVCIMVFLLFIAFNFGPVSISEPPSAPISPRMNKGEPQPRRHLLGFSEQEPVQGVEPLQGSSQGPKEPQPSPTDQPSFSNLTAFPGGAKELLLRDLDQLFLSSDCRHFNRTESLRLADELSGWVQRHQRGRRKIPQRAQERQKSQPRKKSPPVKAVPIQPPGPPERDSVGQLQLYRHPDRSQPAFLDAIDRREDTFYVVSFRRDHLLLPAISHNKTSRPKMSLVMPAMAPNETLSGRGAPGDYEEMMQIECEVMDTRVIHIKTSTVPPSLRKQPSPTPGNATGGPLPVSAASQAHQASHQPLYLNHP

SEQ ID NO: 36167 - protein, 222 aa, Homo sapiens
MAELMLLSEIADPTRFFTDNLLSPEDWGLQNSTLYSGLDEVAEEQTQLFRCPEQDVPFDGSSLDVGMDVSPTDQPSFSNLTAFPGGAKELLLRDLDQLFLSSDCRHFNRTESLRLADELSGWVQRHQRGRRKIPQRAQERQKSQPRKKSPPVKAVPIQPPGPPERDSVGQLQLYRHPDRSQPAFLDAIDRREDTFYVVSFRRTTCCSQPSATTRPPGPRCPW

SEQ ID NO: 36168 - protein, 700 aa, Homo sapiens
MAELMLLSEIADPTRFFTDNLLSPEDWDSTLYSGLDEVAEEQTQLFRCPEQDVPFDGSSLDVGMDVSPSEPPWELLPIFPDLQVKSEPSSPCSSSSLSSESSRLSTEPSSEALGVGEVLHVKTESLAPPLCLLGDDPTSSFETVQINVIPTSDDSSDVQTKIEPVSPCSSVNSEASLLSADSSSQAFIGEEVLEVKTESLSPSGCLLWDVPAPSLGAVQISMGPSLDGSSGKALPTRKPPLQPKPVVLTTVPMPSRAVPPSTTVLLQSLVQPPPVSPVVLIQGAIRVQPEGPAPSLPRPERKSIVPAPMPGNSCPPEVDAKLLKRQQRMIKNRESACQSRRKKKEYLQGLEARLQAVLADNQQLRRENAALRRRLEALLAENSELKLGSGNRKVVCIMVFLLFIAFNFGPVSISEPPSAPISPRMNKGEPQPRRHLLGFSEQEPVQGVEPLQGSSQGPKEPQPSPTDQPSFSNLTAFPGGAKELLLRDLDQLFLSSDCRHFNRTESLRLADELSGWVQRHQRGRRKIPQRAQERQKSQPRKKSPPVKAVPIQPPGPPERDSVGQLQLYRHPDRSQPAFLDAIDRREDTFYVVSFRRDHLLLPAISHNKTSRPKMSLVMPAMAPNETLSGRGAPGDYEEMMQIECEVMDTRVIHIKTSTVPPSLRKQPSPTPGNATGGPLPVSAASQAHQASHQPLYLNHP

SEQ ID NO: 36169 - protein, 703 aa, Homo sapiens; identical to SEQ ID NO: 36166

SEQ ID NO: 36170 - protein, 700 aa, Homo sapiens; identical to SEQ ID NO: 36168

SEQ ID NO: 36171 - protein, 142 aa, Homo sapiens
  VARIANT 1: note = MOD_RES - Any amino acid
XQPSPTDQPSFSNLTAFPGGAKELLLRDLDQLFLSSDCRHFNRTESLRLADELSGWVQRHQRGRRKIPQRAQERQSLDTSPSRSLSHGRSHLQLRQSPSNPLDPQKGILWASCNYIATQTVRSQHSWMQLTDGKTHFMLSLS

SEQ ID NO: 36172 - protein, 142 aa, Homo sapiens; identical to SEQ ID NO: 36171
  VARIANT 1: note = MOD_RES - Any amino acid

SEQ ID NO: 36173 - protein, 703 aa, Homo sapiens; identical to SEQ ID NO: 36166

SEQ ID NO: 36174 - protein, 703 aa, Homo sapiens; identical to SEQ ID NO: 36166

SEQ ID NO: 36175 - protein, 700 aa, Homo sapiens; identical to SEQ ID NO: 36168

SEQ ID NO: 36176 - protein, 142 aa, Homo sapiens; identical to SEQ ID NO: 36171
  VARIANT 1: note = MOD_RES - Any amino acid

SEQ ID NO: 36177 - protein, 700 aa, Homo sapiens; identical to SEQ ID NO: 36168

SEQ ID NO: 36178 - protein, 142 aa, Homo sapiens; identical to SEQ ID NO: 36171
  VARIANT 1: note = MOD_RES - Any amino acid

SEQ ID NO: 36179 - protein, 222 aa, Homo sapiens; identical to SEQ ID NO: 36167

SEQ ID NO: 36180 - protein, 222 aa, Homo sapiens; identical to SEQ ID NO: 36167

SEQ ID NO: 36181 - protein, 222 aa, Homo sapiens; identical to SEQ ID NO: 36167

SEQ ID NO: 36182 - protein, 307 aa, Homo sapiens
MGDDRPFVCNAPGCGQRFTNEDHLAVHKHKHEMTLKFGPARTDSVIIADQTPTPTRFLKNCEEVGLFNELASSFEHEFKKAADEDEKKAAAGPLDMSLPSTPDIKIKEEEPVEVDSSPPDSPASSPCSPPLKEKSPAQPTPSTGGRRRRTVDEDPDERRQRFLERNRAAASRCRQKRKLWVSSLEKKAEELTSQNIQLSNEVTLLRNEVAQLKQLLLAHKDCPVTALQKKTQGYLESPKESSEPTGSPAPVIQHSSATAPSNGLSVRSAAEAVATSVLTQMASQRTELSMPIQSHVIMTPQSQSAGR

SEQ ID NO: 36183 - protein, 494 aa, Homo sapiens
MGDDRPFVCNAPGCGQRFTNEDHLAVHKHKHEMTLKFGPARTDSVIIADQTPTPTRFLKNCEEVGLFNELASSFEHEFKKAADEDEKKARSRTVAKKLVAAAGPLDMSLPSTPDIKIKEEEPVEVDSSPPDSPASSPCSPPLKEKEVTPKPVLISTPTPTIVRPGSLPLHLGYDPLHPTLPSPTSVITQAPPSNRQMGSPTGSLPLVMHLANGQTMPVLPGPPVQMPSVISLARPVSMVPNIPGIPGPPVNSSGSISPSGHPIPSEAKMRLKATLTHQVSSINGGCGMVVGTASTMVTARPEQSQILIQHPDAPSPAQPQVSPAQPTPSTGGRRRRTVDEDPDERRQRFLERNRAAASRCRQKRKLWVSSLEKKAEELTSQNIQLSNEVTLLRNEVAQLKQLLLAHKDCPVTALQKKTQGYLESPKESSEPTGSPAPVIQHSSATAPSNGLSVRSAAEAVATSVLTQMASQRTELSMPIQSHVIMTPQSQSAGR

SEQ ID NO: 36184 - protein, 462 aa, Homo sapiens
MGDDRPFVCNAPGCGQRFTNEDHLAVHKHKHEMTLKFGPARTDSVIIADQTPTPTRFLKNCEEVGLFNELASSFEHEFKKAADEDEKKAAAGPLDMSLPSTPDIKIKEEEPVEEVTPKPVLISTPTPTIVRPGSLPLHLGYDPLHPTLPSPTSVITQAPPSNRQMGSPTGSLPLVMHLANGQTMPVLPGPPVQMPSVISLARPVSMVPNIPGIPGPPVNSSGSISPSGHPIPSEAKMRLKATLTHQVSSINGGCGMVVGTASTMVTARPEQSQILIQHPDAPSPAQPQVSPAQPTPSTGGRRRRTVDEDPDERRQRFLERNRAAASRCRQKRKLWVSSLEKKAEELTSQNIQLSNEVTLLRNEVAQLKQLLLAHKDCPVTALQKKTQGYLESPKESSEPTGSPAPVIQHSSATAPSNGLSVRSAAEAVATSVLTQMASQRTELSMPIQSHVIMTPQSQSAGR

SEQ ID NO: 36185 - protein, 483 aa, Homo sapiens
MGDDRPFVCNAPGCGQRFTNEDHLAVHKHKHEMTLKFGPARTDSVIIADQTPTPTRFLKNCEEVGLFNELASSFEHEFKKAADEDEKKAAAGPLDMSLPSTPDIKIKEEEPVEVDSSPPDSPASSPCSPPLKEKEVTPKPVLISTPTPTIVRPGSLPLHLGYDPLHPTLPSPTSVITQAPPSNRQMGSPTGSLPLVMHLANGQTMPVLPGPPVQMPSVISLARPVSMVPNIPGIPGPPVNSSGSISPSGHPIPSEAKMRLKATLTHQVSSINGGCGMVVGTASTMVTARPEQSQILIQHPDAPSPAQPQVSPAQPTPSTGGRRRRTVDEDPDERRQRFLERNRAAASRCRQKRKLWVSSLEKKAEELTSQNIQLSNEVTLLRNEVAQLKQLLLAHKDCPVTALQKKTQGYLESPKESSEPTGSPAPVIQHSSATAPSNGLSVRSAAEAVATSVLTQMASQRTELSMPIQSHVIMTPQSQSAGR

SEQ ID NO: 36186 - protein, 483 aa, Homo sapiens; identical to SEQ ID NO: 36185

SEQ ID NO: 36187 - protein, 494 aa, Homo sapiens; identical to SEQ ID NO: 36183

SEQ ID NO: 36188 - protein, 117 aa, Homo sapiens
MGDDRPFVCNAPGCGQRFTNEDHLAVHKHKHEMTLKFGPARTDSVIIADQTPTPTRFLKNCEEVGLFNELASSFEHEFKKAADEDEKKARSRTVAKKLVVFRPRLFLLCFGIIFLIG

SEQ ID NO: 36189 - protein, 117 aa, Homo sapiens; identical to SEQ ID NO: 36188

SEQ ID NO: 36190 - protein, 1270 aa, Homo sapiens
MDSLEEPQKKVFKARKTMRVSDRQQLEAVYKVKEELLKTDVKLLNGNHENGDLDPTSPLENMDYIKDKEEVNGIEEICFDPEGSKAEWKETPCILSVNVKNKQDDDLNCEPLSPHNITPEPVSKLPAEPVSGDPAPGDLDAGDPASGVLASGDSTSGDPTSSEPSSSDAASGDATSGDAPSGDVSPGDATSGDATADDLSSGDPTSSDPIPGEPVPVEPISGDCAADDIASSEITSVDLASGAPASTDPASDDLASGDLSSSELASDDLATGELASDELTSESTFDRTFEPKSVPVCEPVPEIDNIEPSSNKDDDFLEKNGADEKLEQIQSKDSLDEKNKADNNIDANEETLETDDTTICSDRPPENEKKVEEDIITELALGEDAISSSMEIDQGEKNEDETSADLVETINENVIEDNKSENILENTDSMETDEIIPILEKLAPSEDELTCFSKTSLLPIDETNPDLEEKMESSFGSPSKQESSESLPKEAFLVLSDEEDISGEKDESEVISQNETCSPAEVESNEKDNKPEEEEQVIHEDDERPSEKNEFSRRKRSKSEDMDNVQSKRRRYMEEEYEAEFQVKITAKGDINQKLQKVIQWLLEEKLCALQCAVFDKTLAELKTRVEKIECNKRHKTVLTELQAKIARLTKRFEAAKEDLKKRHEHPPNPPVSPGKTVNDVNSNNNMSYRNAGTVRQMLESKRNVSESAPPSFQTPVNTVSSTNLVTPPAVVSSQPKLQTPVTSGSLTATSVLPAPNTATVVATTQVPSGNPQPTISLQPLPVILHVPVAVSSQPQLLQSHPGTLVTNQPSGNVEFISVQSPPTVSGLTKNPVSLPSLPNPTKPNNVPSVPSPSIQRNPTASAAPLGTTLAVQAVPTAHSIVQATRTSLPTVGPSGLYSPSTNRGPIQMKIPISAFSTSSAAEQNSNTTPRIENQTNKTIDASVSKKAADSTSQCGKATGSDSSGVIDLTMDDEESGASQDPKKLNHTPVSTMSSSQPVSRPLQPIQPAPPLQPSGVPTSGPSQTTIHLLPTAPTTVNVTHRPVTQVTTRLPVPRAPANHQVVYTTLPAPPAQAPLRGTVMQAPAVRQVNPQNSVTVRVPQTTTYVVNNGLTLGSTGPQLTVHHRPPQVHTEPPRPVHPAPLPEAPQPQRLPPEAASTSLPQKPHLKLARVQSQNGIVLSWSVLEVDRSCATVDSYHLYAYHEEPSATVPSQWKKIGEVKALPLPMACTLTQFVSGSKYYFAVRAKDIYGRFGPFCDPQSTDVISSTQSS

SEQ ID NO: 36191 - protein, 515 aa, Homo sapiens
MDSLEEPQKKVFKARKTMRVSDRQQLEAVYKVKEELLKTDVKLLNGNHENGDLDPTSPLENMDYIKDKEEVNGIEEICFDPEGSKAEWKETPCILSVNVKNKQDDDLNCEPLSPHNITPEPVSKLPAEPVSGDPAPGDLDAGDPASGVLASGDSTSGDPTSSEPSSSDAASGDATSGDAPSGDVSPGDATSGDATADDLSSGDPTSSDPIPGEPVPVEPISGDCAADDIASSEITSVDLASGAPASTDPASDDLASGDLSSSELASDDLATGELASDELTSESTFDRTFEPKSVPVCEPVPEIDNIEPSSNKDDDFLEKNGADEKLEQIQSKDSLDEKNKADNNIDANEETLETDDTTICSDRPPENEKKVEEDIITELALGEDAISSSMEIDQGEKNEDETSADLVETINENVIEDNKSENILENTDSMETDEIIPILEKLAPSEDELTCFSKTSLLPIDETNPDLEEKMESSFGSPSKQESSESLPKEAFLVLSDEEDISGEKDESEVISQNE

SEQ ID NO: 36192 - protein, 125 aa, Homo sapiens
MDSLEEPQKKVFKARKTMRVSDRQQLEAVYKVKEELLKTDVKLLNGNHENGDLDPTSPLENMDYIKDKEEVNGIEEICFDPEGSKAEWKETPCILSVNVKNKQDDDLNCEPLSPHNITPEPVSKL

SEQ ID NO: 36193 - protein, 152 aa, Homo sapiens
MDSLEEPQKKVFKARKTMRVSDRQQLEAVYKVKEELLKTDVKLLNGNHENGDLDPTSPLENMDYIKDKEEVNGIEEICFDPEGSKAEWKETPCILSVNVKNKQDDDLNCEPLSPHNITPEPVSKLPAEPVSGDPAPGDLDAGDPASGVLASG

SEQ ID NO: 36194 - protein, 103 aa, Homo sapiens
MDSLEEPQKKVFKARKTMRVSDRQQLEAVYKVKEELLKTDVKLLNGNHENGDLDPTSPLENMDYIKDKEEVNGIEEICFDPEGSKAEWKETPCILSVNVKNKQ

SEQ ID NO: 36195 - protein, 89 aa, Homo sapiens
MDSLEEPQKKVFKARKTMRVSDRQQLEAVYKVKEELLKTDVKLLNGNHENGDLDPTSPLENMDYIKDKEEVNGIEEICFDPEGSKAEWK

SEQ ID NO: 36196 - protein, 177 aa, Homo sapiens
MDSLEEPQKKVFKARKTMRVSDRQQLEAVYKVKEELLKTDVKLLNGNHENGDLDPTSPLENMDYIKDKEEVNGIEEICFDPEGSKAEWKETPCILSVNVKNKQDDDLNCEPLSPHNITPEPVSKLPAEPVSGDPAPGDLDAGDPASGVLASGDSTSGDPTSSEPSSSDAASGDATSG

SEQ ID NO: 36197 - protein, 1270 aa, Homo sapiens; identical to SEQ ID NO: 36190

SEQ ID NO: 36198 - protein, 169 aa, Homo sapiens
MDSLEEPQKKVFKARKTMRVSDRQQLEAVYKVKEELLKTDVKLLNGNHENGDLDPTSPLENMDYIKDKEEVNGIEEICFDPEGSKAEWKETPCILSVNVKNKQDDDLNCEPLSPHNITPEPVSKLPAEPVSGDPAPGDLDAGDPASGVLASGDSTSGDPTSSEPSSSDA

SEQ ID NO: 36199 - protein, 32 aa, Homo sapiens
MDSLEEPQKKVFKARKTMRVSDRQQLEAVYKV

SEQ ID NO: 36200 - protein, 132 aa, Homo sapiens
MDSLEEPQKKVFKARKTMRVSDRQQLEAVYKVKEELLKTDVKLLNGNHENGDLDPTSPLENMDYIKDKEEVNGIEEICFDPEGSKAEWKETPCILSVNVKNKQDDDLNCEPLSPHNITPEPVSKLPAEPVSG

SEQ ID NO: 36201 - protein, 176 aa, Homo sapiens
MDSLEEPQKKVFKARKTMRVSDRQQLEAVYKVKEELLKTDVKLLNGNHENGDLDPTSPLENMDYIKDKEEVNGIEEICFDPEGSKAEWKETPCILSVNVKNKQDDDLNCEPLSPHNITPEPVSKLPAEPVSGDPAPGDLDAGDPASGVLASGDSTSGDPTSSEPSSSDAASGDATS

SEQ ID NO: 36202 - protein, 59 aa, Homo sapiens
MDSLEEPQKKVFKARKTMRVSDRQQLEAVYKVKEELLKTDVKLLNGNHENGDLDPTSPL

SEQ ID NO: 36203 - protein, 1105 aa, Homo sapiens
MDSLEEPQKKVFKARKTMRVSDRQQLEAVYKVKEELLKTDVKLLNGNHENGDLDPTSPLENMDYIKDKEEVNGIEEICFDPEGSKAEWKETPCILSVNVKNKQDDDLNCEPLSPHNITPEPVSKLPAEPVSGDPAPGDLDAGDPASGVLASGDSTSGDPTSSEPSSSDAASGDATSGDAPSGDVSPGDATSGDATADDLSSGDPTSSDPIPGEPVPVEPISGDCAADDIASSEITSVDLASGAPASTDPASDDLASGDLSSSELASDDLATGELASDELTSESTFDRTFEPKSVPVCEPVPEIDNIEPSSNKDDDFLEKNGADEKLEQIQSKDSLDEKNKADNNIDANEETLETDDTTICSDRPPENEKKVEEDIITELALGEDAISSSMEIDQGEKNEDETSADLVETINENVIEDNKSENILENTDSMETDEIIPILEKLAPSEDELTCFSKTSLLPIDETNPDLEEKMESSFGSPSKQESSESLPKEAFLVLSDEEDISGEKDESEVISQNETCSPEVESNEKDNKPEEEEQVIHEDDERPSEKNEFSRRKRSKSEDMDNVQSKRRRYMEEEYEAEFQVKITAKGDINQKLQKVIQWLLEEKLCALQCAVFDKTLAELKTRVEKIECNKRHKTVLTELQAKIARLTKRFEAAKEDLKKRHEHPPNPPVSPGKTVNDVNSNNNMSYRNAGTVRQMLESKRNVSESAPPSFQTPVNTVSSTNLVTPPAVVSSQPKLQTPVTSGSLTATSVLPAPNTATVVATTQVPSGNPQPTISLQPLPVILHVPVAVSSQPQLLQSHPGTLVTNQPSGNVEFISVQSPPTVSGLTKNPVSLPSLPNPTKPNNVPSVPSPSIQRNPTASAAPLGTTLAVQAVPTAHSIVQATRTSLPTVGPSGLYSPSTNRGPIQMKIPISAFSTSSAAEQNSNTTPRIENQTNKTIDASVSKKAADSTSQCGKATGSDSSGVIDLTMDDEESGASQDPKKLNHTPVSTMSSSQPVSRPLQPIQPAPPLQPSGVPTSGPSQTTIHLLPTAPTTVNVTHRPVTQVTTRLPVPRAPANHQVVYTTLPAPPAQAPLRGTVMQAPAVRQVNPQNSKRFFLYMAPRYM

SEQ ID NO: 36204 - protein, 1278 aa, Homo sapiens
MHQDQRFRMDSLEEPQKKVFKARKTMRVSDRQQLEAVYKVKEELLKTDVKLLNGNHENGDLDPTSPLENMDYIKDKEEVNGIEEICFDPEGSKAEWKETPCILSVNVKNKQDDDLNCEPLSPHNITPEPVSKLPAEPVSGDPAPGDLDAGDPASGVLASGDSTSGDPTSSEPSSSDAASGDATSGDAPSGDVSPGDATSGDATADDLSSGDPTSSDPIPGEPVPVEPISGDCAADDIASSEITSVDLASGAPASTDPASDDLASGDLSSSELASDDLATGELASDELTSESTFDRTFEPKSVPVCEPVPEIDNIEPSSNKDDDFLEKNGADEKLEQIQSKDSLDEKNKADNNIDANEETLETDDTTICSDRPPENEKKVEEDIITELALGEDAISSSMEIDQGEKNEDETSADLVETINENVIEDNKSENILENTDSMETDEIIPILEKLAPSEDELTCFSKTSLLPIDETNPDLEEKMESSFGSPSKQESSESLPKEAFLVLSDEEDISGEKDESEVISQNETCSPAEVESNEKDNKPEEEEQVIHEDDERPSEKNEFSRRKRSKSEDMDNVQSKRRRYMEEEYEAEFQVKITAKGDINQKLQKVIQWLLEEKLCALQCAVFDKTLAELKTRVEKIECNKRHKTVLTELQAKIARLTKRFEAAKEDLKKRHEHPPNPPVSPGKTVNDVNSNNNMSYRNAGTVRQMLESKRNVSESAPPSFQTPVNTVSSTNLVTPPAVVSSQPKLQTPVTSGSLTATSVLPAPNTATVVATTQVPSGNPQPTISLQPLPVILHVPVAVSSQPQLLQSHPGTLVTNQPSGNVEFISVQSPPTVSGLTKNPVSLPSLPNPTKPNNVPSVPSPSIQRNPTASAAPLGTTLAVQAVPTAHSIVQATRTSLPTVGPSGLYSPSTNRGPIQMKIPISAFSTSSAAEQNSNTTPRIENQTNKTIDASVSKKAADSTSQCGKATGSDSSGVIDLTMDDEESGASQDPKKLNHTPVSTMSSSQPVSRPLQPIQPAPPLQPSGVPTSGPSQTTIHLLPTAPTTVNVTHRPVTQVTTRLPVPRAPANHQVVYTTLPAPPAQAPLRGTVMQAPAVRQVNPQNSVTVRVPQTTTYVVNNGLTLGSTGPQLTVHHRPPQVHTEPPRPVHPAPLPEAPQPQRLPPEAASTSLPQKPHLKLARVQSQNGIVLSWSVLEVDRSCATVDSYHLYAYHEEPSATVPSQWKKIGEVKALPLPMACTLTQFVSGSKYYFAVRAKDIYGRFGPFCDPQSTDVISSTQSS

SEQ ID NO: 36205 - protein, 169 aa, Homo sapiens; identical to SEQ ID NO: 36198

SEQ ID NO: 36206 - protein, 543 aa, Homo sapiens
MASPDRSKRKILKAKKTMPLSCRKQVEMLNKSRNVEALKTAIGSNVPSGNQSFSPSVITRTTEITKCSPSENGASSLDSNKNSISEKSKVFSQNCIKPVEEIVHSETKLEQVVCSYQKPSRTTESPSRVFTEEAKDSLNTSENDSEHQTNVTRSLFEHEGACSLKSSCCPPSVLSGVVQMPESTVTSTVGDKKTDQMVFHLETNSNSESHDKRQSDNILCSEDSGFVPVEKTPNLVNSVTSNNCADDILKTDECSRTSISNCESADSTWQSSLDTNNNSHYQKKRMFSENEENVKRMKTSEQINENICVSLERQTAFLEQVRHLIQQEIYSINYELFDKKLKELNQRIGKTECRNKHEGIADKLLAKIAKLQRRIKTVLLFQRNCLKPNMLSSNGASKVANSEAMILDKNLESVNSPIEKSSVNYEPSNPSEKGSKKINLSSDQNKSVSESNNDDVMLISVESPNLTTPITSNPTDTRKITSGNSSNSPNAEVMKVQYPPWSHIRKLLQTQRKQPHWHKMQSRFLSPLSTCHLSQNHQHHYLN

SEQ ID NO: 36207 - protein, 682 aa, Homo sapiens
MASPDRSKRKILKAKKTMPLSCRKQVEMLNKSRNVEALKTAIGSNVPSGNQSFSPSVITRTTEITKCSPSENGASSLDSNKNSISEKSKVFSQNCIKPVEEIVHSETKLEQVVCSYQKPSRTTESPSRVFTEEAKDSLNTSENDSEHQTNVTRSLFEHEGACSLKSSCCPPSVLSGVVQMPESTVTSTVGDKKTDQMVFHLETNSNSESHDKRQSDNILCSEDSGFVPVEKTPNLVNSVTSNNCADDILKTDECSRTSISNCESADSTWQSSLDTNNNSHYQKKRMFSENEENVKRMKTSEQINENICVSLERQTAFLEQVRHLIQQEIYSINYELFDKKLKELNQRIGKTECRNKHEGIADKLLAKIAKLQRRIKTVLLFQRNCLKPNMLSSNGASKVANSEAMILDKNLESVNSPIEKSSVNYEPSNPSEKGSKKINLSSDQNKSVSESNNDDVMLISVESPNLTTPITSNPTDTRKITSGNSSNSPNAEVMAVQKKLDSIIDLTKEGLSNCNTESPVSPLESHSKAASNSKETTPLAQNAVQVPESFEHLPPLPEPPAPLPELVDKTRDTLPPQKPELKVKRVFRPNGIALTWNITKINPKCAPVESYHLFLCHENSNNKLIWKKIGEIKALPLPMACTLSQFLASNRYYFTVQSKDIFGRYGPFCDIKSIPGFSENLT

SEQ ID NO: 36208 - protein, 543 aa, Homo sapiens; identical to SEQ ID NO: 36206

SEQ ID NO: 36209 - protein, 682 aa, Homo sapiens; identical to SEQ ID NO: 36207

SEQ ID NO: 36210 - protein, 425 aa, Homo sapiens
MASPDRSKRKILKAKKTMPLSCRKQVEMLNKSRNVEALKTAIGSNVPSGNQSFSPSVITRTTEITKCSPSENGASSLDSNKNSISEKSKVFSQNCIKPVEEIVHSETKLEQVVCSYQKPSRTTESPSRVFTEEAKDSLNTSENDSEHQTNVTRSLFEHEGACSLKSSCCPPSVLSGVVQMPESTVTSTVGDKKTDQMVFHLETNSNSESHDKRQSDNILCSEDSGFVPVEKTPNLVNSVTSNNCADDILKTDECSRTSISNCESADSTWQSSLDTNNNSHYQKKRMFSENEENVKRMKTSEQINENICVSLERQTAFLEQVRHLIQQEIYSINYELFDKKLKELNQRIGKTECRNKHEGIADKLLAKIAKLQRRIKTVLLFQRNCLKPNMLSSNGASKIPEKLHQEILAILPMLKLWLYRRNLIL

SEQ ID NO: 36211 - protein, 226 aa, Homo sapiens
MLISVESPNLTTPITSNPTDTRKITSGNSSNSPNAEVMAVQKKLDSIIDLTKEGLSNCNTESPVSPLESHSKAASNSKETTPLAQNAVQVPESFEHLPPLPEPPAPLPELVDKTRDTLPPQKPELKVKRVFRPNGIALTWNITKINPKCAPVESYHLFLCHENSNNKLIWKKIGEIKALPLPMACTLSQFLASNRYYFTVQSKDIFGRYGPFCDIKSIPGFSENLT

SEQ ID NO: 36212 - protein, 198 aa, Homo sapiens [sequence omitted]

SEQ ID NO: 36213 - protein, 822 aa, Homo sapiens
MEEEEEAIGLLDKVLEDEDVFLLEECELGTPTSPGSGSPFLVAVKVEAGKGLEMRKLVLSGFLASEEIYINQLEALLLPMKPLKATATTSQPVLTIQQIETIFYKIQDIYEIHKEFYDNLCPKVQQWDSQVTMGHLFQKLASQLGVYKAFVDNYKVALETAEKCSQSNNQFQKISEELKVKGPKDSKDSHTSVTMEALLYKPIDRVTRSTLVLHDLLKHTPVDHPDYPLLQDALRISQNFLSSINEDIDPRRTAVTTPKGETRQLVKDGFLVEVSESSRKLRHVFLFTDVLLCAKLKKTSAGKHQQYDCKWYIPLADLVFPSPEESEASPQVHPFPDHELEDMKMKISALKSEIQKEKANKGQSRAIERLKKKMFENEFLLLLNSPTIPFRIHNRNGKSYLFLLSSDYERSEWREAIQKLQKKDLQAFVLSSVELQVLTGSCFKLRTVHNIPVTSNKDDDESPGLYGFLHVIVHSAKGFKQSANLYCTLEVDSFGYFVSKAKTRVFRDTAEPKWDEEFEIELEGSQSLRILCYEKCYDKTKVNKDNNEIVDKIMGKGQIQLDPQTVETKNWHTDVIEMNGIKVEFSMKFTSRDMSLKRTPSKKQTGVFGVKISVVTKRERSKVPYIVRQCVEEVEKRGIEEVGIYRISGVATDIQALKAVFDANNKDILLMLSDMDINAIAGTLKLYFRELPEPLLTDRLYPAFMEGIALSDPAAKENCMMHLLRSLPDPNLITFLFLLEHLKRVAEKEPINKMSLHNLATVFGPTLLRPSEVESKAHLTSAADIWSHDVMAQVQVLLYYLQHPPISFAELKRNTLYFSTDV

SEQ ID NO: 36214 - protein, 859 aa, Homo sapiens
MEPLSHRGLPRLSWIDTLYSNFSYGTDEYDGEGNEEQKGPPEGSETMPYIDESPTMSPQLSARSQGGGDGVSPTPPEGLAPGVEAGKGLEMRKLVLSGFLASEEIYINQLEALLLPMKPLKATATTSQPVLTIQQIETIFYKIQDIYEIHKEFYDNLCPKVQQWDSQVTMGHLFQKLASQLGVYKAFVDNYKVALETAEKCSQSNNQFQKISEELKVKGPKDSKDSHTSVTMEALLYKPIDRVTRSTLVLHDLLKHTPVDHPDYPLLQDALRISQNFLSSINEDIDPRRTAVTTPKGETRQLVKDGFLVEVSESSRKLRHVFLFTDVLLCAKLKKTSAGKHQQYDCKWYIPLADLVFPSPEESEASPQVHPFPDHELEDMKMKISALKSEIQKEKANKGQSRAIERLKKKMFENEFLLLLNSPTIPFRIHNRNGKSYLFLLSSDYERSEWREAIQKLQKKDLQAFVLSSVELQVLTGSCFKLRTVHNIPVTSNKDDDESPGLYGFLHVIVHSAKGFKQSANLYCTLEVDSFGYFVSKAKTRVFRDTAEPKWDEEFEIELEGSQSLRILCYEKCYDKTKVNKDNNEIVDKIMGKGQIQLDPQTVETKNWHTDVIEMNGIKVEFSMKFTSRDMSLKRTPSKKQTGVFGVKISVVTKRERSKVPYIVRQCVEEVEKRGIEEVGIYRISGVATDIQALKAVFDANNKDILLMLSDMDINAIAGTLKLYFRELPEPLLTDRLYPAFMEGIALSDPAAKENCMMHLLRSLPDPNLITFLFLLEHLKRVAEKEPINKMSLHNLATVFGPTLLRPSEVESKAHLTSAADIWSHDVMAQVQVLLYYLQHPPISFAELKRNTLYFSTDV

SEQ ID NO: 36215 - protein, 363 aa, Homo sapiens
MKPLKATATTSQPVLTIQQIETIFYKIQDIYEIHKEFYDNLCPKVQQWDSQVTMGHLFQKLASQLGVYKAFVDNYKVALETAEKCSQSNNQFQKISEELKVKGPKDSKDSHTSVTMEALLYKPIDRVTRSTLVLHDLLKHTPVDHPDYPLLQDALRISQNFLSSINEDIDPRRTAVTTPKGETRQLVKDGFLVEVSESSRKLRHVFLFTDVLLCAKLKKTSAGKHQQYDCKWYIPLADLVFPSPEESEASPQVHPFPDHELEDMKMKISALKSEIQKEEVEKRGIEEVGIYRISGVATDIQALKAVFDANNKDILLMLSDMDINAIAGTLKLYFRELPEPLLTDRLSPCPTPTSSPSSSCWNT

SEQ ID NO: 36216 - protein, 641 aa, Homo sapiens
MEILLIIRFCCNCTYALLYKPIDRVTRSTLVLHDLLKHTPVDHPDYPLLQDALRISQNFLSSINEDIDPRRTAVTTPKGETRQLVKDGFLVEVSESSRKLRHVFLFTDVLLCAKLKKTSAGKHQQYDCKWYIPLADLVFPSPEESEASPQVHPFPDHELEDMKMKISALKSEIQKEKANKGQSRAIERLKKKMFENEFLLLLNSPTIPFRIHNRNGKSYLFLLSSDYERSEWREAIQKLQKKDLQAFVLSSVELQVLTGSCFKLRTVHNIPVTSNKDDDESPGLYGFLHVIVHSAKGFKQSANLYCTLEVDSFGYFVSKAKTRVFRDTAEPKWDEEFEIELEGSQSLRILCYEKCYDKTKVNKDNNEIVDKIMGKGQIQLDPQTVETKNWHTDVIEMNGIKVEFSMKFTSRDMSLKRTPSKKQTGVFGVKISVVTKRERSKVPYIVRQCVEEVEKRGIEEVGIYRISGVATDIQALKAVFDANNKDILLMLSDMDINAIAGTLKLYFRELPEPLLTDRLYPAFMEGIALSDPAAKENCMMHLLRSLPDPNLITFLFLLEHLKRVAEKEPINKMSLHNLATVFGPTLLRPSEVESKAHLTSAADIWSHDVMAQVQVLLYYLQHPPISFAELKRNTLYFSTDV

SEQ ID NO: 36217 - protein, 310 aa, Homo sapiens
MTDVLPQPDCSPKAGREPLALEESGSKRPPNTGARLWGRVRNKLLRNKLDPQTVETKNWHTDVIEMNGIKVEFSMKFTSRDMSLKRTPSKKQTGVFGVKISVVTKRERSKVPYIVRQCVEEVEKRGIEEVGIYRISGVATDIQALKAVFDANNKDILLMLSDMDINAIAGTLKLYFRELPEPLLTDRLYPAFMEGIALSDPAAKENCMMHLLRSLPDPNLITFLFLLEHLKRVAEKEPINKMSLHNLATVFGPTLLRPSEVESKAHLTSAADIWSHDVMAQVQVLLYYLQHPPISFAELKRNTLYFSTDV

SEQ ID NO: 36218 - protein, 813 aa, Homo sapiens
MPYIDESPTMSPQLSARSQGGGDGVSPTPPEGLAPGVEAGKGLEMRKLVLSGFLASEEIYINQLEALLLPMKPLKATATTSQPVLTIQQIETIFYKIQDIYEIHKEFYDNLCPKVQQWDSQVTMGHLFQKLASQLGVYKAFVDNYKVALETAEKCSQSNNQFQKISEELKVKGPKDSKDSHTSVTMEALLYKPIDRVTRSTLVLHDLLKHTPVDHPDYPLLQDALRISQNFLSSINEDIDPRRTAVTTPKGETRQLVKDGFLVEVSESSRKLRHVFLFTDVLLCAKLKKTSAGKHQQYDCKWYIPLADLVFPSPEESEASPQVHPFPDHELEDMKMKISALKSEIQKEKANKGQSRAIERLKKKMFENEFLLLLNSPTIPFRIHNRNGKSYLFLLSSDYERSEWREAIQKLQKKDLQAFVLSSVELQVLTGSCFKLRTVHNIPVTSNKDDDESPGLYGFLHVIVHSAKGFKQSANLYCTLEVDSFGYFVSKAKTRVFRDTAEPKWDEEFEIELEGSQSLRILCYEKCYDKTKVNKDNNEIVDKIMGKGQIQLDPQTVETKNWHTDVIEMNGIKVEFSMKFTSRDMSLKRTPSKKQTGVFGVKISVVTKRERSKVPYIVRQCVEEVEKRGIEEVGIYRISGVATDIQALKAVFDANNKDILLMLSDMDINAIAGTLKLYFRELPEPLLTDRLYPAFMEGIALSDPAAKENCMMHLLRSLPDPNLITFLFLLEHLKRVAEKEPINKMSLHNLATVFGPTLLRPSEVESKAHLTSAADIWSHDVMAQVQVLLYYLQHPPISFAELKRNTLYFSTDV

SEQ ID NO: 36219 - protein, 443 aa, Homo sapiens
MLTNGKEQVIKSCVSLPELNAQVFCHSSNNVTKTECCFTDFCNNITLHLPTASPNAPKLGPMELAIIITVPVCLLSIAAMLTVWACQGRQCSYRKKKRPNVEEPLSECNLVNAGKTLKDLIYDVTASGSGSGLPLLVQRTIARTIVLQEIVGKGRFGEVWHGRWCGEDVAVKIFSSRDERSWFREAEIYQTVMLRHENILGFIAADNKDNGTWTQLWLVSEYHEQGSLYDYLNRNIVTVAGMIKLALSIASGLAHLHMEIVGTQGKPAIAHRDIKSKNILVKKCETCAIADLGLAVKHDSILNTIDIPQNPKVGTKRYMAPEMLDDTMNVNIFESFKRADIYSVGLVYWEIARRCSVGGIVEEYQLPYYDMVPSDPSIEEMRKVVCDQKFRPSIPNQWQSCEALRVMGRIMRECWYANGAARLTALRIKKTISQLCVKEDCKA

SEQ ID NO: 36220 - protein, 503 aa, Homo sapiens
MTLGSPRKGLLMLLMALVTQGDPVKPSRGPLVTCTCESPHCKGPTCRGAWCTVVLVREEGRHPQEHRGCGNLHRELCRGRPTEFVNHYCCDSHLCNHNVSLVLEATQPPSEQPGTDGQLALILGPVLALLALVALGVLGLWHVRRRQEKQRGLHSELGESSLILKASEQGDSMLGDLLDSDCTTGSGSGLPFLVQRTVARQVALVECVGKGRYGEVWRGLWHGESVAVKIFSSRDEQSWFRETEIYNTVLLRHDNILGFIASDMTSRNSSTQLWLITHYHEHGSLYDFLQRQTLEPHLALRLAVSAACGLAHLHVEIFGTQGKPAIAHRDFKSRNVLVKSNLQCCIADLGLAVMHSQGSDYLDIGNNPRVGTKRYMAPEVLDEQIRTDCFESYKWTDIWAFGLVLWEIARRTIVNGIVEDYRPPFYDVVPNDPSFEDMKKVVCVDQQTPTIPNRLAADPVLSGLAQMMRECWYPNPSARLTALRIKKTLQKISNSPEKPKVIQ

SEQ ID NO: 36221 - protein, 503 aa, Homo sapiens; identical to SEQ ID NO: 36220

SEQ ID NO: 36222 - protein, 329 aa, Homo sapiens
MALTPPLLLLSAGTMTLGSPRKGLLMLLMALVTQGKGRYGEVWRGLWHGESVAVKIFSSRDEQSWFRETEIYNTVLLRHDNILGFIASDMTSRNSSTQLWLITHYHEHGSLYDFLQRQTLEPHLALRLAVSAACGLAHLHVEIFGTQGKPAIAHRDFKSRNVLVKSNLQCCIADLGLAVMHSQGSDYLDIGNNPRVGTKRYMAPEVLDEQIRTDCFESYKWTDIWAFGLVLWEIARRTIVNGIVEDYRPPFYDVVPNDPSFEDMKKVVCVDQQTPTIPNRLAADPVLSGLAQMMRECWYPNPSARLTALRIKKTLQKISNSPEKPKVIQ

SEQ ID NO: 36223 - protein, 159 aa, Homo sapiens
MALTPPLLLLSAGTMTLGSPRKGLLMLLMALVTQGDPVKPSRGPLVTCTCESPHCKGPTCRGAWCTVVLVREEGRHPQEHRGCGNLHRELCRGRPTEFVNHYCCDSHLCNHNVSLVLEGKGRYGEVWRGLWHGESVAVKIFSSRDEQSWFRETEIYNTV

SEQ ID NO: 36224 - protein, 517 aa, Homo sapiens
MALTPPLLLLSAGTMTLGSPRKGLLMLLMALVTQGDPVKPSRGPLVTCTCESPHCKGPTCRGAWCTVVLVREEGRHPQEHRGCGNLHRELCRGRPTEFVNHYCCDSHLCNHNVSLVLEATQPPSEQPGTDGQLALILGPVLALLALVALGVLGLWHVRRRQEKQRGLHSELGESSLILKASEQGDSMLGDLLDSDCTTGSGSGLPFLVQRTVARQVALVECVGKGRYGEVWRGLWHGESVAVKIFSSRDEQSWFRETEIYNTVLLRHDNILGFIASDMTSRNSSTQLWLITHYHEHGSLYDFLQRQTLEPHLALRLAVSAACGLAHLHVEIFGTQGKPAIAHRDFKSRNVLVKSNLQCCIADLGLAVMHSQGSDYLDIGNNPRVGTKRYMAPEVLDEQIRTDCFESYKWTDIWAFGLVLWEIARRTIVNGIVEDYRPPFYDVVPNDPSFEDMKKVVCVDQQTPTIPNRLAADPVLSGLAQMMRECWYPNPSARLTALRIKKTLQKISNSPEKPKVIQ

SEQ ID NO: 36225 - protein, 509 aa, Homo sapiens
MVDGVMILPVLIMIALPSPSMEDEKPKVNPKLYMCVCEGLSCGNEDHCEGQQCFSSLSINDGFHVYQKGCFQVYEQGKMTCKTPPSPGQAVECCQGDWCNRNITAQLPTKGKSFPGTQNFHLEVGLIILSVVFAVCLLACLLGVALRKFKRRNQERLNPRDVEYGTIEGLITTNVGDSTLADLLDHSCTSGSGSGLPFLVQRTVARQITLLECVGKGRYGEVWRGSWQGENVAVKIFSSRDEKSWFRETELYNTVMLRHENILGFIASDMTSRHSSTQLWLITHYHEMGSLYDYLQLTTLDTVSCLRIVLSIASGLAHLHIEIFGTQGKPAIAHRDLKSKNILVKKNGQCCIADLGLAVMHSQSTNQLDVGNNPRVGTKRYMAPEVLDETIQVDCFDSYKRVDIWAFGLVLWEVARRMVSNGIVEDYKPPFYDVVPNDPSFEDMRKVVCVDQQRPNIPNRWFSDPTLTSLAKLMKECWYQNPSARLTALRIKKTLTKIDNSLDKLKTDC

SEQ ID NO: 36226 - protein, 509 aa, Homo sapiens; identical to SEQ ID NO: 36225

SEQ ID NO: 36227 - protein, 509 aa, Homo sapiens; identical to SEQ ID NO: 36225

SEQ ID NO: 36228 - protein, 87 aa, Homo sapiens
MVDGVMILPVLIMIALPSPSMEDEKPKVNPKLYMCVCEGLSCGNEDHCEGQQCFSSLSINDGFHVYQKGCFQVYEQGKMTCKTPPSP

SEQ ID NO: 36229 - protein, 21 aa, Homo sapiens
MVDGVMILPVLIMIALPSPSM

SEQ ID NO: 36230 - protein, 71 aa, Homo sapiens
MVDGVMILPVLIMIALPSPSMEDEKPKVNPKLYMCVCEGLSCGNEDHCEGQQCFSSLSINDGFHVYQKGCF

SEQ ID NO: 36231 - protein, 509 aa, Homo sapiens; identical to SEQ ID NO: 36225

SEQ ID NO: 36232 - protein, 87 aa, Homo sapiens; identical to SEQ ID NO: 36228

SEQ ID NO: 36233 - protein, 73 aa, Homo sapiens
MVDGVMILPVLIMIALPSPSMEDEKPKVNPKLYMCVCEGLSCGNEDHCEGQQCFSSLSINDGFHVYQKGCFQV

SEQ ID NO: 36234 - protein, 505 aa, Homo sapiens
MAESAGASSFFPLVVLLLAGSGGSGPRGVQALLCACTSCLQANYTCETDGACMVSIFNLDGMEHHVRTCIPKVELVPAGKPFYCLSSEDLRNTHCCYTDYCNRIDLRVPSGHLKEPEHPSMWGPVELVGIIAGPVFLLFLIIIIVFLVINYHQRVYHNRQRLDMEDPSCEMCLSKDKTLQDLVYDLSTSGSGSGLPLFVQRTVARTIVLQEIIGKGRFGEVWRGRWRGGDVAVKIFSSREERSWFREAEIYQTVMLRHENILGFIAADNKDNGTWTQLWLVSDYHEHGSLFDYLNRYTVTIEGMIKLALSAASGLAHLHMEIVGTQGKPGIAHRDLKSKNILVKKNGMCAIADLGLAVRHDAVTDTIDIAPNQRVGTKRYMAPEVLDETINMKHFDSFKCADIYALGLVYWEIARRCNSGGVHEEYQLPYYDLVPSDPSIEEMRKVVCDQKLRPNIPNWWQSYEALRVMGKMMRECWYANGAARLTALRIKKTLSQLSVQEDVKI

SEQ ID NO: 36235 - protein, 487 aa, Homo sapiens
MAESAGASSFFPLVVLLLAGSGGSGPRGVQALLCACTSCLQANYTCETDGACMVSIFNLDGMEHHVRTCIPKVELVPAGKPFYCLSSEDLRNTHCCYTDYCNRIDLRVPSGHLKEPEHPSMWGPVELVGIIAGPVFLLFLIIIIVFLVINYHQRVYHNRQRLDMEDPSCEMCLSKDKTLQDLVYDLSTSGSGSGLPLFVQRTVARTIVLQEIIGKGRFGEVWRGRWRGGDVAVKIFSSREERSWFREAEIYQTVMLRHENILGFIAADNKDNGTWTQLWLVSDYHEHGSLFDYLNRYTVTIEGMIKLALSAASGLAHLHMEIVGTQGKPGIAHRDLKSKNILVKKNGMCAIADLGLAVRHDAVTDTIDIAPNQRVGTKRYMAPEVLDETINMKHFDSFKCADIYALGLVYWEIARRCNSGGTFLFCLCSYLPFQDAGSPKAVLLPPFFLQPVGCLLPEPESSFKVAIKGVEVAVLRVRLFFRDQFVE

SEQ ID NO: 36236 - protein, 476 aa, Homo sapiens
MAESAGASSFFPLVVLLLAGSGGSGPRGVQALLCACTSCLQANYTCETDGACMVSIFNLDGMEHHVRTCIPKVELVPAGKPFYCLSSEDLRNTHCCYTDYCNRIDLRVPSGHLKEPEHPSMWGPVELVGIIAGPVFLLFLIIIIVFLVINYHQRVYHNRQRLDMEDPSCEMCLSKDKTLQDLVYDLSTSGSGSGLPLFVQRTVARTIVLQEIIGKGRFGEVWRGRWRGGDVAVKIFSSREERSWFREAEIYQTVMLRHENILGFIAADNKDNGTWTQLWLVSDYHEHGSLFDYLNRYTVTIEGMIKLALSAASGLAHLHMEIVGTQGKPGIAHRDLKSKNILVKKNGMCAIADLGLAVRHDAVTDTIDIAPNQRVGTKRYMAPEVLDETINMKHFDSFKCADIYALGLVYWEIARRCNSGGVHEEYQLPYYDLVPSDPSIEEMRKVVCDQKLRPNIPNWWQSYEVRSWPPAAFPSA

SEQ ID NO: 36237 - protein, 546 aa, Homo sapiens
MAESAGASSFFPLVVLLLAGSGGSGPRGVQALLCACTSCLQANYTCETDGACMVSIFNLDGMEHHVRTCIPKVELVPAGKPFYCLSSEDLRNTHCCYTDYCNRIDLRVPSGHLKEPEHPSMWGPVELVGIIAGPVFLLFLIIIIVFLVINYHQRVYHNRQRLDMEDPSCEMCLSKDKTLQDLVYDLSTSGSGSGLPLFVQRTVARTIVLQEIIGKGRFGEVWRGRWRGGDVAVKIFSSREERSWFREAEIYQTVMLRHENILGFIAADNKADCSFLTLPWEVVMVSAAPKLRSLRLQYKGGRGRARFLFPLNNGTWTQLWLVSDYHEHGSLFDYLNRYTVTIEGMIKLALSAASGLAHLHMEIVGTQGKPGIAHRDLKSKNILVKKNGMCAIADLGLAVRHDAVTDTIDIAPNQRVGTKRYMAPEVLDETINMKHFDSFKCADIYALGLVYWEIARRCNSGGVHEEYQLPYYDLVPSDPSIEEMRKVVCDQKLRPNIPNWWQSYEALRVMGKMMRECWYANGAARLTALRIKKTLSQLSVQEDVKI

SEQ ID NO: 36238 - protein, 453 aa, Homo sapiens
MVSIFNLDGMEHHVRTCIPKVELVPAGKPFYCLSSEDLRNTHCCYTDYCNRIDLRVPSGHLKEPEHPSMWGPVELVGIIAGPVFLLFLIIIIVFLVINYHQRVYHNRQRLDMEDPSCEMCLSKDKTLQDLVYDLSTSGSGSGLPLFVQRTVARTIVLQEIIGKGRFGEVWRGRWRGGDVAVKIFSSREERSWFREAEIYQTVMLRHENILGFIAADNKDNGTWTQLWLVSDYHEHGSLFDYLNRYTVTIEGMIKLALSAASGLAHLHMEIVGTQGKPGIAHRDLKSKNILVKKNGMCAIADLGLAVRHDAVTDTIDIAPNQRVGTKRYMAPEVLDETINMKHFDSFKCADIYALGLVYWEIARRCNSGGVHEEYQLPYYDLVPSDPSIEEMRKVVCDQKLRPNIPNWWQSYEALRVMGKMMRECWYANGAARLTALRIKKTLSQLSVQEDVKI

SEQ ID NO: 36239 - protein, 493 aa, Homo sapiens
MTRALCSALRQALLLLAAAAELSPGLKCVCLLCDSSNFTCQTEGACWASVMLTNGKEQVIKSCVSLPELNAQVFCHSSNNVTKTECCFTDFCNNITLHLPTASPNAPKLGPMELAIIITVPVCLLSIAAMLTVWACQGRQCSYRKKKRPNVEEPLSECNLVNAGKTLKDLIYDVTASGSGSGLPLLVQRTIARTIVLQEIVGKGRFGEVWHGRWCGEDVAVKIFSSRDERSWFREAEIYQTVMLRHENILGFIAADNKDNGTWTQLWLVSEYHEQGSLYDYLNRNIVTVAGMIKLALSIASGLAHLHMEIVGTQGKPAIAHRDIKSKNILVKKCETCAIADLGLAVKHDSILNTIDIPQNPKVGTKRYMAPEMLDDTMNVNIFESFKRADIYSVGLVYWEIARRCSVGGIVEEYQLPYYDMVPSDPSIEEMRKVVCDQKFRPSIPNQWQSCEALRVMGRIMRECWYANGAARLTALRIKKTISQLCVKEDCKA

SEQ ID NO: 36240 - protein, 413 aa, Homo sapiens
MTRALCSALRQALLLLAAAAELSPGLKCVCLLCDSSNFTCQTEGACWASVMLTNGKEQVIKSCVSLPELNAQVFCHSSNNVTKTECCFTDFCNNITLHLPTGLPLLVQRTIARTIVLQEIVGKGRFGEVWHGRWCGEDVAVKIFSSRDERSWFREAEIYQTVMLRHENILGFIAADNKDNGTWTQLWLVSEYHEQGSLYDYLNRNIVTVAGMIKLALSIASGLAHLHMEIVGTQGKPAIAHRDIKSKNILVKKCETCAIADLGLAVKHDSILNTIDIPQNPKVGTKRYMAPEMLDDTMNVNIFESFKRADIYSVGLVYWEIARRCSVGGIVEEYQLPYYDMVPSDPSIEEMRKVVCDQKFRPSIPNQWQSCEALRVMGRIMRECWYANGAARLTALRIKKTISQLCVKEDCKA

SEQ ID NO: 36241 - protein, 336 aa, Homo sapiens
MTRALCSALRQALLLLAAAAELSPGLKCVCLLCDSSNFTCQTEGACWASVMLTNGKEQVIKSCVSLPELNAQVFCHSSNNVTKTECCFTDFCNNITLHLPTDNGTWTQLWLVSEYHEQGSLYDYLNRNIVTVAGMIKLALSIASGLAHLHMEIVGTQGKPAIAHRDIKSKNILVKKCETCAIADLGLAVKHDSILNTIDIPQNPKVGTKRYMAPEMLDDTMNVNIFESFKRADIYSVGLVYWEIARRCSVGGIVEEYQLPYYDMVPSDPSIEEMRKVVCDQKFRPSIPNQWQSCEALRVMGRIMRECWYANGAARLTALRIKKTISQLCVKEDCKA

SEQ ID NO: 36242 - protein, 513 aa, Homo sapiens
MGAAAKLAFAVFLISCSSGAILGRSETQECLFFNANWEKDRTNQTGVEPCYGDKDKRRHCFATWKNISGSIEIVKQGCWLDDINCYDRTDCVEKKDSPEVYFCCCEGNMCNEKFSYFPEMEVTQPTSNPVTPKPPYYNILLYSLVPLMLIAGIVICAFWVYRHHKMAYPPVLVPTQDPGPPPPSPLLGLKPLQLLEVKARGRFGCVWKAQLLNEYVAVKIFPIQDKQSWQNEYEVYSLPGMKHENILQFIGAEKRGTSVDVDLWLITAFHEKGSLSDFLKANVVSWNELCHIAETMARGLAYLHEDIPGLKDGHKPAISHRDIKSKNVLLKNNLTACIADFGLALKFEAGKSAGDTHGQVGTRRYMAPEVLEGAINFQRDAFLRIDMYAMGLVLWELASRCTAADGPVDEYMLPFEEEIGQHPSLEDMQEVVVHKKKRPVLRDYWQKHAGMAMLCETIEECWDHDAEARLSAGCVGERITQMQRLTNIITTEDIVTVVTMVTNVDFPPKESSL

SEQ ID NO: 36243 - protein, 513 aa, Homo sapiens; identical to SEQ ID NO: 36242

SEQ ID NO: 36244 - protein, 405 aa, Homo sapiens
MCNEKFSYFPEMEVTQPTSNPVTPKPPYYNILLYSLVPLMLIAGIVICAFWVYRHHKMAYPPVLVPTQDPGPPPPSPLLGLKPLQLLEVKARGRFGCVWKAQLLNEYVAVKIFPIQDKQSWQNEYEVYSLPGMKHENILQFIGAEKRGTSVDVDLWLITAFHEKGSLSDFLKANVVSWNELCHIAETMARGLAYLHEDIPGLKDGHKPAISHRDIKSKNVLLKNNLTACIADFGLALKFEAGKSAGDTHGQVGTRRYMAPEVLEGAINFQRDAFLRIDMYAMGLVLWELASRCTAADGPVDEYMLPFEEEIGQHPSLEDMQEVVVHKKKRPVLRDYWQKHAGMAMLCETIEECWDHDAEARLSAGCVGERITQMQRLTNIITTEDIVTVVTMVTNVDFPPKESSL

SEQ ID NO: 36245 - protein, 512 aa, Homo sapiens
MTAPWVALALLWGSLCAGSGRGEAETRECIYYNANWELERTNQSGLERCEGEQDKRLHCYASWRNSSGTIELVKKGCWLDDFNCYDRQECVATEENPQVYFCCCEGNFCNERFTHLPEAGGPEVTYEPPPTAPTLLTVLAYSLLPIGGLSLIVLLAFWMYRHRKPPYGHVDIHEDPGPPPPSPLVGLKPLQLLEIKARGRFGCVWKAQLMNDFVAVKIFPLQDKQSWQSEREIFSTPGMKHENLLQFIAAEKRGSNLEVELWLITAFHDKGSLTDYLKGNIITWNELCHVAETMSRGLSYLHEDVPWCRGEGHKPSIAHRDFKSKNVLLKSDLTAVLADFGLAVRFEPGKPPGDTHGQVGTRRYMAPEVLEGAINFQRDAFLRIDMYAMGLVLWELVSRCKAADGPVDEYMLPFEEEIGQHPSLEELQEVVVHKKMRPTIKDHWLKHPGLAQLCVTIEECWDHDAEARLSAGCVEERVSLIRRSVNGTTSDCLVSLVTSVTNVDLPPKESSI

SEQ ID NO: 36246 - protein, 396 aa, Homo sapiens
MELDHRTSGGLHAYPGPRGGQVAKPNVILQIGKCRAEMLEHVRRTHRHLLAEVSKQVERELKGLHRSVGKLESNLDGYVPTSDSQRWKKSIKACLCRCQETIANLERWVKREMHVWREVFYRLERWADRLESTGGKYPVGSESARHTVSVGVGGPESYCHEADGYDYTVSPYAITPPPAAGELPGQEPAEAQQYQPWVPGEDGQPSPGVDTQIFEDPREFLSHLEEYLRQVGGSEEYWLSQIQNHMNGPAKKWWEFKQGSVKNWVEFKKEFLQYSEGTLSREAIQRELDLPQKQGEPLDQFLWRKRDLYQTLYVDADEEEIIQYVVGTLQPKLKRFLRHPLPKTLEQLIQRGMEVQDDLEQAAEPAGPHLPVEDEAETLTPAPNSESVASDRTQPE

SEQ ID NO: 36247 - protein, 528 aa, Homo sapiens
MAAVLNAERLEVSVDGLTLSPDPEERPGAEGAPLLPPPLPPPSPPGSGRGPGASGEQPEPGEAAAGGAAEEARRLEQRWGFGLEELYGLALRFFKEKDGKAFHPTYEEKLKLVALHKQVLMGPYNPDTCPEVGFFDVLGNDRRREWAALGNMSKEDAMVEFVKLLNRCCHLFSTYVASHKIEKEEQEKKRKEEEERRRREEEERERLQKEEEKRRREEEERLRREEEERRRIEEERLRLEQQKQQIMAALNSQTAVQFQQYAAQQYPGNYEQQQILIRQLQEQHYQQYMQQLYQVQLAQQQAALQKQQEVVVAGSSLPTSSKVNATVPSNMMSVNGQAKTHTDSSEKELEPEAAEEALENGPKESLPVIAAPSMWTRPQIKDFKEKIQQDADSVITVGRGEVVTVRVPTHEEGSYLFWEFATDNYDIGFGVYFEWTDSPNTAVSVHVSESSDDDEEEEENIGCEEKAKKNANKPLLDEIVPVYRRDCHEEVYAGSHQYPGRGVYLLKFDNSYSLWRSKSVYYRVYYTR

SEQ ID NO: 36248 - protein, 780 aa, Homo sapiens
MKPGATGESDLAEVLPQHKFDSKSLEAYLNQHLSGFGAEREATLTIAQYRAGKSNPTFYLQKGFQTYVLRKKPPGSLLPKAHQIDREFKVQKALFSIGFPVPKPILYCSDTSVIGTEFYVMEHVQGRIFRDLTIPGLSPAERSAIYVATVETLAQLRSLNIQSLQLEGYGIGAGYCKRQVSTWTKQYQAAAHQDIPAMQQLSEWLMKNLPDNDNEENLIHGDFRLDNIVFHPKECRVIAVLDWELSTIGHPLSDLAHFSLFYFWPRTVPMINQGSYSENSGIPSMEELISIYCRCRGINSILPNWNFFLALSYFKMAGIAQGVYSRYLLGNNSSEDSFLFANIVQPLAETGLQLSKRTFSTVLPQIDTTGQLFVQTRKGQEVLIKVKHFMKQHILPAEKEVTEFYVQNENSVDKWGKPLVIDKLKEMAKVEGLWNLFLPAVSGLSHVDYALIAEETGKCFFAPDVFNCQAPDTGNMEVLHLYGSEEQKKQWLEPLLQGNITSCFCMTEPDVASSDATNIECSIQRDEDSYVINGKKWWSSGAGNPKCKIAIVLGRTQNTSLSRHKQHSMILVPMNTPGVKIIRPLSVFGYTDNFHGGHFEIHFNQVRVPATNLILGEGRGFEISQGRLGPGRIHHCMRTVGLAERALQIMCERATQRIAFKKKLYAHEVVAHWIAESRIAIEKIRLLTLKAAHSMDTLGSAGAKKEIAMIKVAAPRAVSKIVDWAIQVCGGAGVSQDYPLANMYAITRVLRLADGPDEVHLSAIATMELRDQAKRLTAKI

SEQ ID NO: 36249 - protein, 676 aa, Homo sapiens
MKPGATGESDLAEVLPQHKFDSKSLEAYLNQHLSGFGAEREATLTIAQYRAGKSNPTFYLQKGFQTYVLRKKPPGSLLPKAHQIDREFKVQKALFSIGFPVPKPILYCSDTSVIGTEFYVMEHVQGRIFRDLTIPGLSPAERSAIYVATVETLAQLRSLNIQSLQLEGYGIGAGYCKRQVSTWTKQYQAAAHQDIPAMQQLSEWLMKNLPDNDNEENLIHGDFRLDNIVFHPKECRVIAVLDWELSTIGHPLSDLAHFSLFYFWPRTVPMINQGSYSENSGIPSMEELISIYCRCRGINSILPNWNFFLALSYFKMAGIAQGVYSRYLLGNNSSEDSFLFANIVQPLAETGLQLSKRTFSTVLPQIDTTGQLFVQTRKGQEVLIKVKHFMKQHILPAEKEVTEFYVQNENSVDKWGKPLVIDKLKEMAKVEGLWNLFLPAVSGLSHVDYALIAEETGKCFFAPDVFNCQAPDTGNMEVLHLYGSEEQKKQWLEPLLQGNITSCFCMTEPDVASSDATNIECSIQRDEDSYVINGKKWWSSGAGNPKCKIAIVLGRTQNTSLSREVVAHWIAESRIAIEKIRLLTLKAAHSMDTLGSAGAKKEIAMIKVAAPRAVSKIVDWAIQVCGGAGVSQDYPLANMYAITRVLRLADGPDEVHLSAIATMELRDQAKRLTAKI

SEQ ID NO: 36250 - protein, 305 aa, Homo sapiens
MEVLHLYGSEEQKKQWLEPLLQGNITSCFCMTEPDVASSDATNIECSIQRDEDSYVINGKKWWSSGAGNPKCKIAIVLGRTQNTSLSRHKQHSMILVPMNTPGVKIIRPLSVFGYTDNFHGGHFEIHFNQVRVPATNLILGEGRGFEISQGRLGPGRIHHCMRTVGLAERALQIMCERATQRIAFKKKLYAHEVVAHWIAESRIAIEKIRLLTLKAAHSMDTLGSAGAKKEIAMIKVAAPRAVSKIVDWAIQVCGGAGVSQDYPLANMYAITRVLRLADGPDEVHLSAIATMELRDQAKRLTAKI

SEQ ID NO: 36251 - protein, 415 aa, Homo sapiens
MLWSGCRRFGARLGCLPGGLRVLVQTGHRSLTSCIDPSMGLNEEQKEFQKVAFDFAAREMAPNMAEWDQKELFPVDVMRKAAQLGFGGVYIQTDVGGSGLSRLDTSVIFEALATGCTSTTAYISIHNMCAWMIDSFGNEEQRHKFCPPLCTMEKFASYCLTEPGSGSDAASLLTSAKKQGDHYILNGSKAFISGAGESDIYVVMCRTGGPGPKGISCIVVEKGTPGLSFGKKEKKVGWNSQPTRAVIFEDCAVPVANRIGSEGQGFLIAVRGLNGGRINIASCSLGAAHASVILTRDHLNVRKQFGEPLASNQYLQFTLADMATRLVAARLMVRNAAVALQEERKDAVALCSMAKLFATDECFAICNQALQMHGGYGYLKDYAVQQYVRDSRVHQILEGSNEVMRILISRSLLQE

SEQ ID NO: 36252 - protein, 357 aa, Homo sapiens
MRKAAQLGFGGVYIQTDVGGSGLSRLDTSVIFEALATGCTSTTAYISIHNMCAWMIDSFGNEEQRHKFCPPLCTMEKFASYCLTEPGSGSDAASLLTSAKKQGDHYILNGSKAFISGAGESDIYVVMCRTGGPGPKGISCIVVEKGTPGLSFGKKEKKVGWNSQPTRAVIFEDCAVPVANRIGSEGQGFLIAVRGLNGGRINIASCSLGAAHASVILTRDHLNVRKQFGEPLASNQYLQFTLADMATRLVAARLMVRNAAVALQEERKDAVALCSMAKLFATDECFAICNQALQMHGGYGYLKDYAVQQYVRDSRVHQILEELFWQGPGVQSRSFVPFGGPQIALLLPFSSGDLREG

SEQ ID NO: 36253 - protein, 272 aa, Homo sapiens
MGLNEEQKEFQKVAFDFAAREMAPNMAEWDQKELFPVDVMRKAAQLGFGGVYIQTDVGGSGLSRLDTSVIFEALATGCTSTTAYISIHNMCAWMIDSFGNEEQRHKFCPPLCTMEKFASYCLTEPGSGSDAASLLTSAKKQGDHYILNGSKAFISGAGESDIYVVMCRTGGPGPKGISCIVVEKGTPGLSFGKKEKKVGWNSQPTRAVIFEDCAVPVANRIGSEGQGFLIAVRGLNGGRINIASCSLGCPRLCHPHPRPPQCPEAVWRASGQ

SEQ ID NO: 36254 - protein, 226 aa, Homo sapiens
MKSRKNFKKWPLTLLPERWLQIWQSGTRSMCAWMIDSFGNEEQRHKFCPPLCTMEKFASYCLTEPGSGSDAASLLTSAKKQGDHYILNGSKAFISGAGESDIYVVMCRTGGPGPKGISCIVVEKGTPGLSFGKKEKKVGWNSQPTRAVIFEDCAVPVANRIGSEGQGFLIAVRGLNGGRINIASCSLGAAHASVILTRDHLNVRKQFGEPLASNQKKQETLKLWIT

SEQ ID NO: 36255 - protein, 621 aa, Homo sapiens
MSGCGLFLRTTAAARACRGLVVSTANRRLLRTSPPVRAFAKELFLGKIKKKEVFPFPEVSQDELNEINQFLGPVEKFFTEEVDSRKIDQEGKIPDETLEKLKSLGLFGLQVPEEYGGLGFSNTMYSRLGEIISMDGSITVTLAAHQAIGLKGIILAGTEEQKAKYLPKLASGEHIAAFCLTEPASGSDAASIRSRATLSEDKKHYILNGSKVWITNGGLANIFTVFAKTEVVDSDGSVKDKITAFIVERDFGGVTNGKPEDKLGIRGSNTCEVHFENTKIPVENILGEVGDGFKVAMNILNSGRFSMGSVVAGLLKRLIEMTAEYACTRKQFNKRLSEFGLIQEKFALMAQKAYVMESMTYLTAGMLDQPGFPDCSIEAAMVKVFSSEAAWQCVSEALQILGGLGYTRDYPYERILRDTRILLIFEGTNEILRMYIALTGLQHAGRILTTRIHELKQAKVSTVMDTVGRRLRDSLGRTVDLGLTGNHGVVHPSLADSANKFEENTYCFGRTVETLLLRFGKTIMEEQLVLKRVANILINLYGMTAVLSRASRSIRIGLRNHDHEVLLANTFCVEAYLQNLFSLSQLDKYAPENLDEQIKKVSQQILEKRAYICAHPLDRTC

SEQ ID NO: 36256 - protein, 488 aa, Homo sapiens
MDGSITVTLAAHQAIGLKGIILAGTEEQKAKYLPKLASGEHIAAFCLTEPASGSDAASIRSRATLSEDKKHYILNGSKVWITNGGLANIFTVFAKTEVVDSDGSVKDKITAFIVERDFGGVTNGKPEDKLGIRGSNTCEVHFENTKIPVENILGEVGDGFKVAMNILNSGRFSMGSVVAGLLKRLIEMTAEYACTRKQFNKRLSEFGLIQEKFALMAQKAYVMESMTYLTAGMLDQPGFPDCSIEAAMVKVFSSEAAWQCVSEALQILGGLGYTRDYPYERILRDTRILLIFEGTNEILRMYIALTGLQHAGRILTTRIHELKQAKVSTVMDTVGRRLRDSLGRTVDLGLTGNHGVVHPSLADSANKFEENTYCFGRTVETLLLRFGKTIMEEQLVLKRVANILINLYGMTAVLSRASRSIRIGLRNHDHEVLLANTFCVEAYLQNLFSLSQLDKYAPENLDEQIKKVSQQILEKRAYICAHPLDRTC

SEQ ID NO: 36257 - protein, 168 aa, Homo sapiens
MEEQLVLKGGQHPHQPVWHDGRAVAGQPLHPHWAPQPRPRGSLGQHLLRGSLLAESLQPLSAGQVCSRKPRSRLRKCPSRSLRSEPISVPTLWTGHAERGQCPLLPPAPTHGPLLDDCYSFFRRLGLSQVKPFVPRLHLKGCRLAWESLFQVLTCRQCSLTGPSQLLN

SEQ ID NO: 36258 - protein, 412 aa, Homo sapiens
MAAALLARASGPARRALCPRAWRQLHTIYQSVELPETHQMLLQTCRDFAEKELFPIAAQVDKEHLFPAAQVKKMGGLGLLAMDVPEELGGAGLDYLAYAIAMEEISRGCASTGVIMSVNNSLYLGPILKFGSKEQKQAWVTPFTSGDKIGCFALSEPGNGSDAGAASTTARAEGDSWVLNGTKAWITNAWEASAAVVFASTDRALQNKGISAFLVPMPTPGLTLGKKEDKLGIRGSSTANLIFEDCRIPKDSILGEPGMGFKIAMQTLDMGRIGIASQALGIAQTALDCAVNYAENRMAFGAPLTKLQVIQFKLADMALALESARLLTWRAAMLKDNKKPFIKEAAMAKLAASEAATAISHQAIQILGGMGYVTEMPAERHYRDARITEIYEGTSEIQRLVIAGHLLRSYRS

SEQ ID NO: 36259 - protein, 454 aa, Homo sapiens
MAAGFGRCCRVLRSISRFHWRSQHTKANRQREPGLGFSFEFTEQQKEFQATARKFAREEIIPVAAEYDKTGEYPVPLIRRAWELGLMNTHIPENCDYSVCPLLEACTLYLDAFFLLLTGSNLNLHLNLGGLGLGTFDACLISEELAYGCTGVQTAIEGNSLGQMPIIIAGNDQQKKKYLGRMTEEPLMCAYCVTEPGAGSDVAGIKTKAEKKGDEYIINGQKMWITNGGKANWYFLLARSDPDPKAPANKAFTGFIVEADTPGIQIGRKELNMGQRCSDTRGIVFEDVKVPKENVLIGDGAGFKVAMGAFDKTRPVVAAGAVGLAQRALDEATKYALERKTFGKLLVEHQAISFMLAEMAMKVELARMSYQRAAWEVDSGRRNTYYASIAKAFAGDIANQLATDAVQILGGNGFNTEYPVEKLMRDAKIYQIYEGTSQIQRLIVAREHIDKYKN

SEQ ID NO: 36260 - protein, 421 aa, Homo sapiens
MAAGFGRCCRVLRSISRFHWRSQHTKANRQREPGLGFSFEFTEQQKEFQATARKFAREEIIPVAAEYDKTGEYPVPLIRRAWELGLMNTHIPENCGGLGLGTFDACLISEELAYGCTGVQTAIEGNSLGQMPIIIAGNDQQKKKYLGRMTEEPLMCAYCVTEPGAGSDVAGIKTKAEKKGDEYIINGQKMWITNGGKANWYFLLARSDPDPKAPANKAFTGFIVEADTPGIQIGRKELNMGQRCSDTRGIVFEDVKVPKENVLIGDGAGFKVAMGAFDKTRPVVAAGAVGLAQRALDEATKYALERKTFGKLLVEHQAISFMLAEMAMKVELARMSYQRAAWEVDSGRRNTYYASIAKAFAGDIANQLATDAVQILGGNGFNTEYPVEKLMRDAKIYQIYEGTSQIQRLIVAREHIDKYKN

SEQ ID NO: 36261 - protein, 425 aa, Homo sapiens
MAAGFGRCCRCSLQVLRSISRFHWRSQHTKANRQREPGLGFSFEFTEQQKEFQATARKFAREEIIPVAAEYDKTGEYPVPLIRRAWELGLMNTHIPENCGGLGLGTFDACLISEELAYGCTGVQTAIEGNSLGQMPIIIAGNDQQKKKYLGRMTEEPLMCAYCVTEPGAGSDVAGIKTKAEKKGDEYIINGQKMWITNGGKANWYFLLARSDPDPKAPANKAFTGFIVEADTPGIQIGRKELNMGQRCSDTRGIVFEDVKVPKENVLIGDGAGFKVAMGAFDKTRPVVAAGAVGLAQRALDEATKYALERKTFGKLLVEHQAISFMLAEMAMKVELARMSYQRAAWEVDSGRRNTYYASIAKAFAGDIANQLATDAVQILGGNGFNTEYPVEKLMRDAKIYQIYEGTSQIQRLIVAREHIDKYKN

SEQ ID NO: 36262 - protein, 385 aa, Homo sapiens
MLQEFTEQQKEFQATARKFAREEIIPVAAEYDKTGEYPVPLIRRAWELGLMNTHIPENCGGLGLGTFDACLISEELAYGCTGVQTAIEGNSLGQMPIIIAGNDQQKKKYLGRMTEEPLMCAYCVTEPGAGSDVAGIKTKAEKKGDEYIINGQKMWITNGGKANWYFLLARSDPDPKAPANKAFTGFIVEADTPGIQIGRKELNMGQRCSDTRGIVFEDVKVPKENVLIGDGAGFKVAMGAFDKTRPVVAAGAVGLAQRALDEATKYALERKTFGKLLVEHQAISFMLAEMAMKVELARMSYQRAAWEVDSGRRNTYYASIAKAFAGDIANQLATDAVQILGGNGFNTEYPVEKLMRDAKIYQIYEGTSQIQRLIVAREHIDKYKN

SEQ ID NO: 36263 - protein, 232 aa, Homo sapiens
MWITNGGKANWYFLLARSDPDPKAPANKAFTGFIVEADTPGIQIGRKELNMGQRCSDTRGIVFEDVKVPKENVLIGDGAGFKVAMGAFDKTRPVVAAGAVGLAQRALDEATKYALERKTFGKLLVEHQAISFMLAEMAMKVELARMSYQRAAWEVDSGRRNTYYASIAKAFAGDIANQLATDAVQILGGNGFNTEYPVEKLMRDAKIYQIYEGTSQIQRLIVAREHIDKYKN

SEQ ID NO: 36264 - protein, 430 aa, Homo sapiens [sequence omitted]

SEQ ID NO: 36265 - protein, 432 aa, Homo sapiens
MEGLAVRLLRGSRLLRRNFLTCLSSWKIPPHVSKSSQSEALLNITNNGIHFAPLQTFTDEEMMIKSSVKKFAQEQIAPLVSTMDENSKMEKSVIQGLFQQGLMGIEVDPEYGGTGASFLSTVLVIEELAKVDASVAVFCEIQNTLINTLIRKHGTEEQKATYLPQLTTEKVGSFCLSEAGAGSDSFALKTRADKEGDYYVLNGSKMWISSAEHAGLFLVMANVDPTIGYKGITSFLVDRDTPGLHIGKPENKLGLRASSTCPLTFENVKVPEANILGQIGHGYKYAIGSLNEGRIGIAAQMLGLAQGCFDYTIPYIKERIQFGKRLFDFQGLQHQVAHVATQLEAARLLTYNAARLLEAGKPFIKEASMAKYYASEIAGQTTSKCIEWMGGVGYTKDYPVEKYFRDAKIGTIYEGASNIQLNTIAKHIDAEY

SEQ ID NO: 36266 - protein, 330 aa, Homo sapiens
MGIEVDPEYGGTGASFLSTVLVIEELAKVDASVAVFCEIQNTLINTLIRKHGTEEQKATYLPQLTTEKVGSFCLSEAGAGSDSFALKTRADKEGDYYVLNGSKMWISSAEHAGLFLVMANVDPTIGYKGITSFLVDRDTPGLHIGKPENKLGLRASSTCPLTFENVKVPEANILGQIGHGYKYAIGSLNEGRIGIAAQMLGLAQGCFDYTIPYIKERIQFGKRLFDFQGLQHQVAHVATQLEAARLLTYNAARLLEAGKPFIKEASMAKYYASEIAGQTTSKCIEWMGGVGYTKDYPVEKYFRDAKIGTIYEGASNIQLNTIAKHIDAEY

SEQ ID NO: 36267 - protein, 655 aa, Homo sapiens
MQAARMAASLGRQLLRLGGGSSRLTALLGQPRPGPARRPYAGGAAQLALDKSDSHPSDALTRKKPAKAESKSFAVGMFKGQLTTDQVFPYPSVLNEEQTQFLKELVEPVSRFFEEVNDPAKNDALEMVEETTWQGLKELGAFGLQVPSELGGVGLCNTQYARLVEIVGMHDLGVGITLGAHQSIGFKGILLFGTKAQKEKYLPKLASGETVAAFCLTEPSSGSDAASIRTSAVPSPCGKYYTLNGSKLWISNGGLADIFTVFAKTPVTDPATGAVKEKITAFVVERGFGGITHGPPEKKMGIKASNTAEVFFDGVRVPSENVLGEVGSGFKVAMHILNNGRFGMAAALAGTMRGIIAKAVDHATNRTQFGEKIHNFGLIQEKLARMVMLQYVTESMAYMVSANMDQGATDFQIEAAISKIFGSEAAWKVTDECIQIMGGMGFMKEPGVERVLRDLRIFRIFEGTNDILRLFVALQGCMDKGKELSGLGSALKNPFGNAGLLLGEAGKQLRRRAGLGSGLSLSGLVHPELSRSGELAVRALEQFATVVEAKLIKHKKGIVNEQFLLQRLADGAIDLYAMVVVLSRASRSLSEGHPTAQHEKMLCDTWCIEAAARIREGMAALQSDPWQQELYRNFKSISKALVERGGVVTSNPLGF

SEQ ID NO: 36268 - protein, 633 aa, Homo sapiens
MQAARMAASLGRQLLRLGGGSSRLTALLGQPRPGPARRPYAGGAAQESKSFAVGMFKGQLTTDQVFPYPSVLNEEQTQFLKELVEPVSRFFEEVNDPAKNDALEMVEETTWQGLKELGAFGLQVPSELGGVGLCNTQYARLVEIVGMHDLGVGITLGAHQSIGFKGILLFGTKAQKEKYLPKLASGETVAAFCLTEPSSGSDAASIRTSAVPSPCGKYYTLNGSKLWISNGGLADIFTVFAKTPVTDPATGAVKEKITAFVVERGFGGITHGPPEKKMGIKASNTAEVFFDGVRVPSENVLGEVGSGFKVAMHILNNGRFGMAAALAGTMRGIIAKAVDHATNRTQFGEKIHNFGLIQEKLARMVMLQYVTESMAYMVSANMDQGATDFQIEAAISKIFGSEAAWKVTDECIQIMGGMGFMKEPGVERVLRDLRIFRIFEGTNDILRLFVALQGCMDKGKELSGLGSALKNPFGNAGLLLGEAGKQLRRRAGLGSGLSLSGLVHPELSRSGELAVRALEQFATVVEAKLIKHKKGIVNEQFLLQRLADGAIDLYAMVVVLSRASRSLSEGHPTAQHEKMLCDTWCIEAAARIREGMAALQSDPWQQELYRNFKSISKALVERGGVVTSNPLGF

SEQ ID NO: 36269 - protein, 701 aa, Homo sapiens
MPRGPQPSAARCTVDDESGLGAPGRGRAGRQSWVRARASGARRDSEMQAARMAASLGRQLLRLGGGSSRLTALLGQPRPGPARRPYAGGAAQLALDKSDSHPSDALTRKKPAKAESKSFAVGMFKGQLTTDQVFPYPSVLNEEQTQFLKELVEPVSRFFEEVNDPAKNDALEMVEETTWQGLKELGAFGLQVPSELGGVGLCNTQYARLVEIVGMHDLGVGITLGAHQSIGFKGILLFGTKAQKEKYLPKLASGETVAAFCLTEPSSGSDAASIRTSAVPSPCGKYYTLNGSKLWISNGGLADIFTVFAKTPVTDPATGAVKEKITAFVVERGFGGITHGPPEKKMGIKASNTAEVFFDGVRVPSENVLGEVGSGFKVAMHILNNGRFGMAAALAGTMRGIIAKAVDHATNRTQFGEKIHNFGLIQEKLARMVMLQYVTESMAYMVSANMDQGATDFQIEAAISKIFGSEAAWKVTDECIQIMGGMGFMKEPGVERVLRDLRIFRIFEGTNDILRLFVALQGCMDKGKELSGLGSALKNPFGNAGLLLGEAGKQLRRRAGLGSGLSLSGLVHPELSRSGELAVRALEQFATVVEAKLIKHKKGIVNEQFLLQRLADGAIDLYAMVVVLSRASRSLSEGHPTAQHEKMLCDTWCIEAAARIREGMAALQSDPWQQELYRNFKSISKALVERGGVVTSNPLGF

SEQ ID NO: 36270 - protein, 701 aa, Homo sapiens; identical to SEQ ID NO: 36269

SEQ ID NO: 36271 - protein, 678 aa, Homo sapiens
MLGGLAAAAGTRIMGKEIEAEAQRPLRQTWRPGQPPAMTAKTMSSRLTALLGQPRPGPARRPYAGGAAQLALDKSDSHPSDALTRKKPAKAESKSFAVGMFKGQLTTDQVFPYPSVLNEEQTQFLKELVEPVSRFFEEVNDPAKNDALEMVEETTWQGLKELGAFGLQVPSELGGVGLCNTQYARLVEIVGMHDLGVGITLGAHQSIGFKGILLFGTKAQKEKYLPKLASGETVAAFCLTEPSSGSDAASIRTSAVPSPCGKYYTLNGSKLWISNGGLADIFTVFAKTPVTDPATGAVKEKITAFVVERGFGGITHGPPEKKMGIKASNTAEVFFDGVRVPSENVLGEVGSGFKVAMHILNNGRFGMAAALAGTMRGIIAKAVDHATNRTQFGEKIHNFGLIQEKLARMVMLQYVTESMAYMVSANMDQGATDFQIEAAISKIFGSEAAWKVTDECIQIMGGMGFMKEPGVERVLRDLRIFRIFEGTNDILRLFVALQGCMDKGKELSGLGSALKNPFGNAGLLLGEAGKQLRRRAGLGSGLSLSGLVHPELSRSGELAVRALEQFATVVEAKLIKHKKGIVNEQFLLQRLADGAIDLYAMVVVLSRASRSLSEGHPTAQHEKMLCDTWCIEAAARIREGMAALQSDPWQQELYRNFKSISKALVERGGVVTSNPLGF

SEQ ID NO: 36272 - protein, 660 aa, Homo sapiens
MNPDLRRERDSASFNPELLTHILDGSPEKTRRRREIENMILNDPDFQHEDLNFLTRSQRYEVAVRKSAIMVKKMREFGIADPDEIMWFKNFVHRGRPEPLDLHLGMFLPTLLHQATAEQQERFFMPAWNLEIIGTYAQTEMGHGTHLRGLETTATYDPETQEFILNSPTVTSIKWWPGGLGKTSNHAIVLAQLITKGKCYGLHAFIVPIREIGTHKPLPGITVGDIGPKFGYDEIDNGYLKMDNHRIPRENMLMKYAQVKPDGTYVKPLSNKLTYGTMVFVRSFLVGEAARALSKACTIAIRYSAVRHQSEIKPGEPEPQILDFQTQQYKLFPLLATAYAFQFVGAYMKETYHRINEGIGQGDLSELPELHALTAGLKAFTSWTANTGIEACRMACGGHGYSHCSGLPNIYVNFTPSCTFEGENTVMMLQTARFLMKSYDQVHSGKLVCGMVSYLNDLPSQRIQPQQVAVWPTMVDINSPESLTEAYKLRAARLVEIAAKNLQKEVIHRKSKEVAWNLTSVDLVRASEAHCHYVVVKLFSEKLLKIQDKAIQAVLRSLCLLYSLYGISQNAGDFLQGSIMTEPQITQVNQRVKELLTLIRSDAVALVDAFDFQDVTLGSVLGRYDGNVYENLFEWAKNSPLNKAEVHESYKHLKSLQSKL

SEQ ID NO: 36273 - protein, 660 aa, Homo sapiens
MNPDLRRERDSASFNPELLTHILDGSPEKTRRRREIENMILNDPDFQHEDLNFLTRSQRYEVAVRKSAIMVKKMREFGIADPDEIMWFKKLHLVNFVEPVGLNYSMFIPTLLNQGTTAQKEKWLLSSKGLQIIGTYAQTEMGHGTHLRGLETTATYDPETQEFILNSPTVTSIKWWPGGLGKTSNHAIVLAQLITKGKCYGLHAFIVPIREIGTHKPLPGITVGDIGPKFGYDEIDNGYLKMDNHRIPRENMLMKYAQVKPDGTYVKPLSNKLTYGTMVFVRSFLVGEAARALSKACTIAIRYSAVRHQSEIKPGEPEPQILDFQTQQYKLFPLLATAYAFQFVGAYMKETYHRINEGIGQGDLSELPELHALTAGLKAFTSWTANTGIEACRMACGGHGYSHCSGLPNIYVNFTPSCTFEGENTVMMLQTARFLMKSYDQVHSGKLVCGMVSYLNDLPSQRIQPQQVAVWPTMVDINSPESLTEAYKLRAARLVEIAAKNLQKEVIHRKSKEVAWNLTSVDLVRASEAHCHYVVVKLFSEKLLKIQDKAIQAVLRSLCLLYSLYGISQNAGDFLQGSIMTEPQITQVNQRVKELLTLIRSDAVALVDAFDFQDVTLGSVLGRYDGNVYENLFEWAKNSPLNKAEVHESYKHLKSLQSKL

SEQ ID NO: 36274 - protein, 622 aa, Homo sapiens
MILNDPDFQHEDLNFLTRSQRYEVAVRKSAIMVKKMREFGIADPDEIMWFKNFVHRGRPEPLDLHLGMFLPTLLHQATAEQQERFFMPAWNLEIIGTYAQTEMGHGTHLRGLETTATYDPETQEFILNSPTVTSIKWWPGGLGKTSNHAIVLAQLITKGKCYGLHAFIVPIREIGTHKPLPGITVGDIGPKFGYDEIDNGYLKMDNHRIPRENMLMKYAQVKPDGTYVKPLSNKLTYGTMVFVRSFLVGEAARALSKACTIAIRYSAVRHQSEIKPGEPEPQILDFQTQQYKLFPLLATAYAFQFVGAYMKETYHRINEGIGQGDLSELPELHALTAGLKAFTSWTANTGIEACRMACGGHGYSHCSGLPNIYVNFTPSCTFEGENTVMMLQTARFLMKSYDQVHSGKLVCGMVSYLNDLPSQRIQPQQVAVWPTMVDINSPESLTEAYKLRAARLVEIAAKNLQKEVIHRKSKEVAWNLTSVDLVRASEAHCHYVVVKLFSEKLLKIQDKAIQAVLRSLCLLYSLYGISQNAGDFLQGSIMTEPQITQVNQRVKELLTLIRSDAVALVDAFDFQDVTLGSVLGRYDGNVYENLFEWAKNSPLNKAEVHESYKHLKSLQSKL

SEQ ID NO: 36275 - protein, 592 aa, Homo sapiens
MAAFIQRTPDNWHLRPDGNGPRFVHRGRPEPLDLHLGMFLPTLLHQATAEQQERFFMPAWNLEIIGTYAQTEMGHGTHLRGLETTATYDPETQEFILNSPTVTSIKWWPGGLGKTSNHAIVLAQLITKGKCYGLHAFIVPIREIGTHKPLPGITVGDIGPKFGYDEIDNGYLKMDNHRIPRENMLMKYAQVKPDGTYVKPLSNKLTYGTMVFVRSFLVGEAARALSKACTIAIRYSAVRHQSEIKPGEPEPQILDFQTQQYKLFPLLATAYAFQFVGAYMKETYHRINEGIGQGDLSELPELHALTAGLKAFTSWTANTGIEACRMACGGHGYSHCSGLPNIYVNFTPSCTFEGENTVMMLQTARFLMKSYDQVHSGKLVCGMVSYLNDLPSQRIQPQQVAVWPTMVDINSPESLTEAYKLRAARLVEIAAKNLQKEVIHRKSKEVAWNLTSVDLVRASEAHCHYVVVKLFSEKLLKIQDKAIQAVLRSLCLLYSLYGISQNAGDFLQGSIMTEPQITQVNQRVKELLTLIRSDAVALVDAFDFQDVTLGSVLGRYDGNVYENLFEWAKNSPLNKAEVHESYKHLKSLQSKL

SEQ ID NO: 36276 - protein, 660 aa, Homo sapiens; identical to SEQ ID NO: 36272

SEQ ID NO: 36277 - protein, 681 aa, Homo sapiens
MGSPVHRVSLGDTWSRQMHPDIESERYMQSFDVERLTNILDGGAQNTALRRKVESIIHSYPEFSCKDNYFMTQNERYKAAMRRAFHIRLIARRLGWLEDGRELGYAYRALSGDVALNIHRVFVRALRSLGSEEQIAKWDPLCKNIQIIATYAQTELGHGTYLQGLETEATYDAATQEFVIHSPTLTATKWWPGDLGRSATHALVQAQLICSGARRGMHAFIVPIRSLQDHTPLPGIIIGDIGPKMDFDQTDNGFLQLNHVRVPRENMLSRFAQVLPDGTYVKLGTAQSNYLPMVVVRVELLSGEILPILQKACVIAMRYSVIRRQSRLRPSDPEAKVLDYQTQQQKLFPQLAISYAFHFLAVSLLEFFQHSYTAILNQDFSFLPELHALSTGMKAMMSEFCTQGAEMCRRACGGHGYSKLSGLPSLVTKLSASCTYEGENTVLYLQVARFLVKSYLQTQMSPGSTPQRSLSPSVAYLTAPDLARCPAQRAADFLCPELYTTAWAHVAVRLIKDSVQHLQTLTQSGADQHEAWNQTTVIHLQAAKVHCYYVTVKGFTEALEKLENEPAIQQVLKRLCDLHAIHGILTNSGDFLHDAFLSGAQVDMARTAYLDLLRLIRKDAILLTDAFDFTDQCLNSALGCYDGNVYERLFQWAQKSPTNTQENPAYEEYIRPLLQSWRSKL

SEQ ID NO: 36278 - protein, 171 aa, Homo sapiens
MGSPVHRVSLGDTWSRQMHPDIESERYMQSFDVERLTNILDGGAQNTALRRKVESIIHSYPEFSCKDNYFMTQNERYKAAMRRAFHIRLIARRLGWLEDGRELGYAYRALSGDVALNIHRVFVRALRSLGSEEQIAKWDPLCKNIQIIATYAQTELGHGTYLQGLETEATY

SEQ ID NO: 36279 - protein, 700 aa, Homo sapiens
MASTVEGGDTALLPEFPRGPLDAYRARASFSWKELALFTEGEGMLRFKKTIFSALENDPLFARSPGADLSLEKYRELNFLRCKRIFEYDFLSVEDMFKSPLKVPALIQCLGMYDSSLAAKYLLHSLVFGSAVYSSGSERHLTYIQKIFRMEIFGCFALTELSHGSNTKAIRTTAHYDPATEEFIIHSPDFEAAKFWVGNMGKTATHAVVFAKLCVPGDQCHGLHPFIVQIRDPKTLLPMPGVMVGDIGKKLGQNGLDNGFAMFHKVRVPRQSLLNRMGDVTPEGTYVSPFKDVRQRFGASLGSLSSGRVSIVSLAILNLKLAVAIALRFSATRRQFGPTEEEEIPVLEYPMQQWRLLPYLAAVYALDHFSKSLFLDLVELQRGLASGDRSARQAELGREIHALASASKPLASWTTQQGIQECREACGGHGYLAMNRLGVLRDDNDPNCTYEGDNNILLQQTSNYLLGLLAHQVHDGACFRSPLKSVDFLDAYPGILDQKFEVSSVADCLDSAVALAAYKWLVCYLLRETYQKLNQEKRSGSSDFEARNKCQVSHGRPLALAFVELTVVQRFHEHVHQPSVPPSLRAVLGRLSALYALWSLSRHAALLYRGGYFSGEQAGEVLESAVLALCSQLKDDAVALVDVIAPPDFVLDSPIGRADGELYKNLWGAVLQESKVLERASWWPEFSVNKPVIGSLKSKL

SEQ ID NO: 36280 - protein, 624 aa, Homo sapiens
MASTVEGGDTALLPEFPRGPLDAYRARASFSWKELALFTEGEGMLRFKKTIFSALENDPLFARSPGADLSLEKYRELNFLRCKRIFEYDFLSVEDMFKSPLKVPALIQCLGMYDSSLAAKYLLHSLVFGSAVYSSGSERHLTYIQKIFRMEIFGCFALTELSHGSNTKAIRTTAHYDPATEEFIIHSPDFEAAKFWVGNMGKTATHAVVFAKLCVPGDQCHGLHPFIVQIRDPKTLLPMPGVMVGDIGKKLGQNGLDNGFAMFHKVRVPRQSLLNRMGDVTPEGTYVSPFKDVRQRFGASLGSLSSGRVSIVSLAILNLKLAVAIALRFSATRRQFGPTEEEEIPVLEYPMQQWRLLPYLAAVYALDHFSKSLFLDLVELQRGLASGDRSARQAELGREIHALASASKPLASWTTQQGIQECREACGGHGYLAMNRLGVLRDDNDPNCTYEGDNNILLQQTSNYLLGLLAHQVHDGACFRSPLKSVDFLDAYPGILDQKFEVSSVADCLDSAVALAAYKWLVCYLLRETYQKLNQEKRSGSSDFEARNKCQVSHGRPLALAFVELTVVQRFHEHVHQPSVPPSLRAVLGRLSALYALWSLSRHAALLYRAERRCSCPGRRDRSS

SEQ ID NO: 36281 - protein, 700 aa, Homo sapiens; identical to SEQ ID NO: 36279

SEQ ID NO: 36282 - protein, 724 aa, Homo sapiens
MPRNSGAGYGCPHGDPSMLDSRETPQESRQDMIVRTTQEKLKTSSLTDRQPLSKESLNHALELSVPEKVNNAQWDAPEEALWTTRADGRVRLRIDPSCPQLPYTVHRMFYEALDKYGDLIALGFKRQDKWEHISYSQYYLLARRAAKGFLKLGLKQAHSVAILGFNSPEWFFSAVGTVFAGGIVTGIYTTSSPEACQYIAYDCCANVIMVDTQKQLEKILKIWKQLPHLKAVVIYKEPPPNKMANVYTMEEFMELGNEVPEEALDAIIDTQQPNQCCVLVYTSGTTGNPKGVMLSQDNITWTARYGSQAGDIRPAEVQQEVVVSYLPLSHIAAQIYDLWTGIQWGAQVCFAEPDALKGSLVNTLREVEPTSHMGVPRVWEKIMERIQEVAAQSGFIRRKMLLWAMSVTLEQNLTCPGSDLKPFTTRLADYLVLAKVRQALGFAKCQKNFYGAAPMMAETQHFFLGLNIRLYAGYGLSETSGPHFMSSPYNYRLYSSGKLVPGCRVKLVNQDAEGIGEICLWGRTIFMGYLNMEDKTCEAIDEEGWLHTGDAGRLDADGFLYITGRLKELIITAGGENVPPVPIEEAVKMELPIISNAMLIGDQRKFLSMLLTLKCTLDPDTSDQTDNLTEQAMEFCQRVGSRATTVSEIIEKKDEAVYQAIEEGIRRVNMNAAARPYHIQKWAILERDFSISGGELGPTMKLKRLTVLEKYKGIIDSFYQEQKM

SEQ ID NO: 36283 - protein, 482 aa, Homo sapiens
MANVYTMEEFMELGNEVPEEALDAIIDTQQPNQCCVLVYTSGTTGNPKGVMLSQDNITWTARYGSQAGDIRPAEVQQEVVVSYLPLSHIAAQIYDLWTGIQWGAQVCFAEPDALKGSLVNTLREVEPTSHMGVPRVWEKIMERIQEVAAQSGFIRRKMLLWAMSVTLEQNLTCPGSDLKPFTTRLADYLVLAKVRQALGFAKCQKNFYGAAPMMAETQHFFLGLNIRLYAGYGLSETSGPHFMSSPYNYRLYSSGKLVPGCRVKLVNQDAEGIGEICLWGRTIFMGYLNMEDKTCEAIDEEGWLHTGDAGRLDADGFLYITGRLKELIITAGGENVPPVPIEEAVKMELPIISNAMLIGDQRKFLSMLLTLKCTLDPDTSDQTDNLTEQAMEFCQRVGSRATTVSEIIEKKDEAVYQAIEEGIRRVNMNAAARPYHIQKWAILERDFSISGGELGPTMKLKRLTVLEKYKGIIDSFYQEQKM

SEQ ID NO: 36284 - protein, 666 aa, Homo sapiens
MTGTPKTQEGAKDLEVDMNKTEVTPRLWTTCRDGEVLLRLSKHGPGHETPMTIPEFFRESVNRFGTYPALASKNGKKWEILNFNQYYEACRKAAKSLIKLGLERFHGVGILGFNSAEWFITAVGAILAGGLCVGIYATNSAEVCQYVITHAKVNILLVENDQQLQKILSIPQSSLEPLKAIIQYRLPMKKNNNLYSWDDFMELGRSIPDTQLEQVIESQKANQCAVLIYTSGTTGIPKGVMLSHDNITWIAGAVTKDFKLTDKHETVVSYLPLSHIAAQMMDIWVPIKIGALTYFAQADALKGTLVSTLKEVKPTVFIGVPQIWEKIHEMVKKNSAKSMGLKKKAFVWARNIGFKVNSKKMLGKYNTPVSYRMAKTLVFSKVKTSLGLDHCHSFISGTAPLNQETAEFFLSLDIPIGELYGLSESSGPHTISNQNNYRLLSCGKILTGCKNMLFQQNKDGIGEICLWGRHIFMGYLESETETTEAIDDEGWLHSGDLGQLDGLGFLYVTGHIKEILITAGGENVPPIPVETLVKKKIPIISNAMLVGDKLKFLSMLLTLKCEMNQMSGEPLDKLNFEAINFCRGLGSQASTVTEIVKQQDPLVYKAIQQGINAVNQEAMNNAQRIEKWVILEKDFSIYGGELGPMMKLKRHFVAQKYKKQIDHMYH

SEQ ID NO: 36285 - protein, 615 aa, Homo sapiens
MAVYVGMLRLGRLCAGSSGVLGARAALSRSWQEARLQGVRFLSSREVDRMVSTPIGGLSYVQGCTKKHLNSKTVGQCLETTAQRVPEREALVVLHEDVRLTFAQLKEEVDKAASGLLSIGLCKGDRLGMWGPNSYAWVLMQLATAQAGIILVSVNPAYQAMELEYVLKKVGCKALVFPKQFKTQQYYNVLKQICPEVENAQPGALKSQRLPDLTTVISVDAPLPGTLLLDEVVAAGSTRQHLDQLQYNQQFLSCHDPINIQFTSGTTGSPKGATLSHYNIVNNSNILGERLKLHEKTPEQLRMILPNPLYHCLGSVAGTMMCLMYGATLILASPIFNGKKALEAISRERGTFLYGTPTMFVDILNQPDFSSYDISTMCGGVIAGSPAPPELIRAIINKINMKDLVVAYGTTENSPVTFAHFPEDTVEQKAESVGRIMPHTEARIMNMEAGTLAKLNTPGELCIRGYCVMLGYWGEPQKTEEAVDQDKWYWTGDVATMNEQGFCKIVGRSKDMIIRGGENIYPAELEDFFHTHPKVQEVQVVGVKDDRMGEEICACIRLKDGEETTVEEIKAFCKGKISHFKIPKYIVFVTNYPLTISGKIQKFKLREQMERHLNL

SEQ ID NO: 36286 - protein, 640 aa, Homo sapiens
MAVYVGMLRLGRLCAGSSGVLGARAALSRSWQEARLQGVRFLSARGGMEAGRQRISVPSSFTASAAAHSREVDRMVSTPIGGLSYVQGCTKKHLNSKTVGQCLETTAQRVPEREALVVLHEDVRLTFAQLKEEVDKAASGLLSIGLCKGDRLGMWGPNSYAWVLMQLATAQAGIILVSVNPAYQAMELEYVLKKVGCKALVFPKQFKTQQYYNVLKQICPEVENAQPGALKSQRLPDLTTVISVDAPLPGTLLLDEVVAAGSTRQHLDQLQYNQQFLSCHDPINIQFTSGTTGSPKGATLSHYNIVNNSNILGERLKLHEKTPEQLRMILPNPLYHCLGSVAGTMMCLMYGATLILASPIFNGKKALEAISRERGTFLYGTPTMFVDILNQPDFSSYDISTMCGGVIAGSPAPPELIRAIINKINMKDLVVAYGTTENSPVTFAHFPEDTVEQKAESVGRIMPHTEARIMNMEAGTLAKLNTPGELCIRGYCVMLGYWGEPQKTEEAVDQDKWYWTGDVATMNEQGFCKIVGRSKDMIIRGGENIYPAELEDFFHTHPKVQEVQVVGVKDDRMGEEICACIRLKDGEETTVEEIKAFCKGKISHFKIPKYIVFVTNYPLTISGKIQKFKLREQMERHLNL

SEQ ID NO: 36287 - protein, 602 aa, Homo sapiens
MAVYVGMLRLGRLCAGSSGVLGARAALSRSWQEARLQGVRFLSSREVDRMVSTPIGGLSYVQGCTKKHLNSKTVGQCLETTAQRVPEREALVVLHEDVRLTFAQLKEEVDKAASGLLSIGLCKGDRLGMWGPNSYAWVLMQLATAQAMELEYVLKKVGCKALVFPKQFKTQQYYNVLKQICPEVENAQPGALKSQRLPDLTTVISVDAPLPGTLLLDEVVAAGSTRQHLDQLQYNQQFLSCHDPINIQFTSGTTGSPKGATLSHYNIVNNSNILGERLKLHEKTPEQLRMILPNPLYHCLGSVAGTMMCLMYGATLILASPIFNGKKALEAISRERGTFLYGTPTMFVDILNQPDFSSYDISTMCGGVIAGSPAPPELIRAIINKINMKDLVVAYGTTENSPVTFAHFPEDTVEQKAESVGRIMPHTEARIMNMEAGTLAKLNTPGELCIRGYCVMLGYWGEPQKTEEAVDQDKWYWTGDVATMNEQGFCKIVGRSKDMIIRGGENIYPAELEDFFHTHPKVQEVQVVGVKDDRMGEEICACIRLKDGEETTVEEIKAFCKGKISHFKIPKYIVFVTNYPLTISGKIQKFKLREQMERHLNL

SEQ ID NO: 36288 - protein, 572 aa, Homo sapiens
MAVYVGMLRLGRLCAGSSGVLGARAALSRSWQEARLQGVRFLSSREVDRMVSTPIGGLSYVQGCTKKHLNSKTVGQCLETTAQRVPEREALVVLHEDVRLTFAQLKEEVSVNPAYQAMELEYVLKKVGCKALVFPKQFKTQQYYNVLKQICPEVENAQPGALKSQRLPDLTTVISVDAPLPGTLLLDEVVAAGSTRQHLDQLQYNQQFLSCHDPINIQFTSGTTGSPKGATLSHYNIVNNSNILGERLKLHEKTPEQLRMILPNPLYHCLGSVAGTMMCLMYGATLILASPIFNGKKALEAISRERGTFLYGTPTMFVDILNQPDFSSYDISTMCGGVIAGSPAPPELIRAIINKINMKDLVVAYGTTENSPVTFAHFPEDTVEQKAESVGRIMPHTEARIMNMEAGTLAKLNTPGELCIRGYCVMLGYWGEPQKTEEAVDQDKWYWTGDVATMNEQGFCKIVGRSKDMIIRGGENIYPAELEDFFHTHPKVQEVQVVGVKDDRMGEEICACIRLKDGEETTVEEIKAFCKGKISHFKIPKYIVFVTNYPLTISGKIQKFKLREQMERHLNL

SEQ ID NO: 36289 - protein, 455 aa, Homo sapiens
MELEYVLKKVGCKALVFPKQFKTQQYYNVLKQICPEVENAQPGALKSQRLPDLTTVISVDAPLPGTLLLDEVVAAGSTRQHLDQLQYNQQFLSCHDPINIQFTSGTTGSPKGATLSHYNIVNNSNILGERLKLHEKTPEQLRMILPNPLYHCLGSVAGTMMCLMYGATLILASPIFNGKKALEAISRERGTFLYGTPTMFVDILNQPDFSSYDISTMCGGVIAGSPAPPELIRAIINKINMKDLVVAYGTTENSPVTFAHFPEDTVEQKAESVGRIMPHTEARIMNMEAGTLAKLNTPGELCIRGYCVMLGYWGEPQKTEEAVDQDKWYWTGDVATMNEQGFCKIVGRSKDMIIRGGENIYPAELEDFFHTHPKVQEVQVVGVKDDRMGEEICACIRLKDGEETTVEEIKAFCKGKISHFKIPKYIVFVTNYPLTISGKIQKFKLREQMERHLNL

SEQ ID NO: 36290 - protein, 576 aa, Homo sapiens
MLPHVVLTFRRLGCALASCRLAPARHRGSGLLHTAPVARSDRSAPVFTRALAFGDRIALVDQHGRHTYRELYSRSLRLSQEICRLCGCVGGDLREERVSFLCANDASYVVAQWASWMSGGVAVPLYRKHPAAQLEYVICDSQSSVVLASQEYLELLSPVVRKLGVPLLPLTPAIYTGAVEEPAEVPVPEQGWRNKGAMIIYTSGTTGRPKGVLSTHQNIRAVVTGLVHKWAWTKDDVILHVLPLHHVHGVVNALLCPLWVGATCVMMPEFSPQQVWEKFLSSETPRINVFMAVPTIYTKLMEYYDRHFTQPHAQDFLRAVCEEKIRLMVSGSAALPLPVLEKWKNITGHTLLERYGMTEIGMALSGPLTTAVRLPGSVGTPLPGVQVRIVSENPQREACSYTIHAEGDERGTKVTPGFEEKEGELLVRGPSVFREYWNKPEETKSAFTLDGWFKTGDTVVFKDGQYWIRGRTSVDIIKTGGYKVSALEVEWHLLAHPSITDVAVIGVPDMTWGQRVTAVVTLREGHSLSHRELKEWARNVLAPYAVPSELVLVEEIPRNQMGKIDKKALIRHFHPS

SEQ ID NO: 36291 - protein, 576 aa, Homo sapiens; identical to SEQ ID NO: 36290

SEQ ID NO: 36292 - protein, 237 aa, Homo sapiens
MLPHVVLTFRRLGCALASCRLAPARHRGSGLLHTAPVARSDRSAPVFTRALAFGDRIALVDQHGRHTYRELYSRSLRLSQEICRLCGCVGGDLREERVSFLCANDASYVVAQWASWMSGGVAVPLYRKHPAAQLEYVICDSQSSVVLASQEYLELLSPVVRKLGVPLLPLTPAIYTGAVEEPAEVPVPEQGWRNKGAMIIYTSGTTGRPKGVLSTHQNIRAVVTGLVHKWAWTKDDV

SEQ ID NO: 36293 - protein, 698 aa, Homo sapiens
MQAHELFRYFRMPELVDFRQYVRTLPTNTLMGFGAFAALTTFWYATRPKPLKPPCDLSMQSVEVAGSGGARRSALLDSDEPLVYFYDDVTTLYEGFQRGIQVSNNGPCLGSRKPDQPYEWLSYKQVAELSECIGSALIQKGFKTAPDQFIGIFAQNRPEWVIIEQGCFAYSMVIVPLYDTLGNEAITYIVNKAELSLVFVDKPEKAKLLLEGVENKLIPGLKIIVVMDAYGSELVERGQRCGVEVTSMKAMEDLGRANRRKPKPPAPEDLAVICFTSGTTGNPKGAMVTHRNIVSDCSAFVKATENTVNPCPDDTLISFLPLAHMFERVVECVMLCHGAKIGFFQGDIRLLMDDLKVLQPTVFPVVPRLLNRMFDRIFGQANTTLKRWLLDFASKRKEAELRSGIIRNNSLWDRLIFHKVQSSLGGRVRLMVTGAAPVSATVLTFLRAALGCQFYEGYGQTECTAGCCLTMPGDWTAGHVGAPMPCNLIKLVDVEEMNYMAAEGEGEVCVKGPNVFQGYLKDPAKTAEALDKDGWLHTGDIGKWLPNGTLKIIDRKKHIFKLAQGEYIAPEKIENIYMRSEPVAQVFVHGESLQAFLIAIVVPDVETLCSWAQKRGFEGSFEELCRNKDVKKAILEDMVRLGKDSGLKPFEQVKGITLHPELFSIDNGLLTPTMKAKRPELRNYFRSQIDDLYSTIKV

SEQ ID NO: 36294 - protein, 527 aa, Homo sapiens
MVIVPLYDTLGNEAITYIVNKAELSLVFVDKPEKAKLLLEGVENKLIPGLKIIVVMDAYGSELVERGQRCGVEVTSMKAMEDLGRANRRKPKPPAPEDLAVICFTSGTTGNPKGAMVTHRNIVSDCSAFVKATENTVNPCPDDTLISFLPLAHMFERVVECVMLCHGAKIGFFQGDIRLLMDDLKVLQPTVFPVVPRLLNRMFDRIFGQANTTLKRWLLDFASKRKEAELRSGIIRNNSLWDRLIFHKVQSSLGGRVRLMVTGAAPVSATVLTFLRAALGCQFYEGYGQTECTAGCCLTMPGDWTAGHVGAPMPCNLIKLVDVEEMNYMAAEGEGEVCVKGPNVFQGYLKDPAKTAEALDKDGWLHTGDIGKWLPNGTLKIIDRKKHIFKLAQGEYIAPEKIENIYMRSEPVAQVFVHGESLQAFLIAIVVPDVETLCSWAQKRGFEGSFEELCRNKDVKKAILEDMVRLGKDSGLKPFEQVKGITLHPELFSIDNGLLTPTMKAKRPELRNYFRSQIDDLYSTIKV

SEQ ID NO: 36295 - protein, 527 aa, Homo sapiens; identical to SEQ ID NO: 36294

SEQ ID NO: 36296 - protein, 698 aa, Homo sapiens; identical to SEQ ID NO: 36293

SEQ ID NO: 36297 - protein, 664 aa, Homo sapiens
MQAHELFRYFRMPELVDFRQYVRTLPTNTLMGFGAFAALTTFWYATRPKPLKPPCDLSMQSVEVAGSGGARRSALLDSDEPLVYFYDDVTTLYEGFQRGIQVSNNGPCLGSRKPDQPYEWLSYKQWVIIEQGCFAYSMVIVPLYDTLGNEAITYIVNKAELSLVFVDKPEKAKLLLEGVENKLIPGLKIIVVMDAYGSELVERGQRCGVEVTSMKAMEDLGRANRRKPKPPAPEDLAVICFTSGTTGNPKGAMVTHRNIVSDCSAFVKATENTVNPCPDDTLISFLPLAHMFERVVECVMLCHGAKIGFFQGDIRLLMDDLKVLQPTVFPVVPRLLNRMFDRIFGQANTTLKRWLLDFASKRKEAELRSGIIRNNSLWDRLIFHKVQSSLGGRVRLMVTGAAPVSATVLTFLRAALGCQFYEGYGQTECTAGCCLTMPGDWTAGHVGAPMPCNLIKLVDVEEMNYMAAEGEGEVCVKGPNVFQGYLKDPAKTAEALDKDGWLHTGDIGKWLPNGTLKIIDRKKHIFKLAQGEYIAPEKIENIYMRSEPVAQVFVHGESLQAFLIAIVVPDVETLCSWAQKRGFEGSFEELCRNKDVKKAILEDMVRLGKDSGLKPFEQVKGITLHPELFSIDNGLLTPTMKAKRPELRNYFRSQIDDLYSTIKV

SEQ ID NO: 36298 - protein, 698 aa, Homo sapiens; identical to SEQ ID NO: 36293

SEQ ID NO: 36299 - protein, 720 aa, Homo sapiens
MNNHVSSKPSTMKLKHTINPILLYFIHFLISLYTILTYIPFYFFSESRQEKSNRIKAKPVNSKPDSAYRSVNSLDGLASVLYPGCDTLDKVFTYAKNKFKNKRLLGTREVLNEEDEVQPNGKIFKKVILGQYNWLSYEDVFVRAFNFGNGLQMLGQKPKTNIAIFCETRAEWMIAAQACFMYNFQLVTLYATLGGPAIVHALNETEVTNIITSKELLQTKLKDIVSLVPRLRHIITVDGKPPTWSEFPKGIIVHTMAAVEALGAKASMENQPHSKPLPSDIAVIMYTSGSTGLPKGVMISHSNIIAGITGMAERIPELGEEDVYIGYLPLAHVLELSAELVCLSHGCRIGYSSPQTLADQSSKIKKGSKGDTSMLKPTLMAAVPEIMDRIYKNVMNKVSEMSSFQRNLFILAYNYKMEQISKGRNTPLCDSFVFRKVRSLLGGNIRLLLCGGAPLSATTQRFMNICFCCPVGQGYGLTESAGAGTISEVWDYNTGRVGAPLVCCEIKLKNWEEGGYFNTDKPHPRGEILIGGQSVTMGYYKNEAKTKADFFEDENGQRWLCTGDIGEFEPDGCLKIIDRKKDLVKLQAGEYVSLGKVEAALKNLPLVDNICAYANSYHSYVIGFVVPNQKELTELARKKGLKGTWEELCNSCEMENEVLKVLSEAAISASLEKFEIPVKIRLSPEPWTPETGLVTDAFKLKRKELKTHYQADIERMYGRK

SEQ ID NO: 36300 - protein, 720 aa, Homo sapiens; identical to SEQ ID NO: 36299

SEQ ID NO: 36301 - protein, 88 aa, Homo sapiens
MNNHVSSKPSTMKLKHTINPILLYFIHFLISLYTILTYIPFYFFSESRQEKSNRIKAKPVNSKPDSAYRSVNSLDGLASVLYPGCDTL

SEQ ID NO: 36302 - protein, 95 aa, Homo sapiens
MNNHVSSKPSTMKLKHTINPILLYFIHFLISLYTILTYIPFYFFSESRQEKSNRIKAKPVNSKPDSAYRSVNSLDGLASVLYPGCDTLDKVFTYA

SEQ ID NO: 36303 - protein, 683 aa, Homo sapiens
MLFIFNFLFSPLPTPALICILTFGAAIFLWLITRPQPVLPLLDLNNQSVGIEGGARKGVSQKNNDLTSCCFSDAKTMYEVFQRGLAVSDNGPCLGYRKPNQPYRWLSYKQVSDRAEYLGSCLLHKGYKSSPDQFVGIFAQNRPEWIISELACYTYSMVAVPLYDTLGPEAIVHIVNKADIAMVICDTPQKALVLIGNVEKGFTPSLKVIILMDPFDDDLKQRGEKSGIEILSLYDAENLGKEHFRKPVPPSPEDLSVICFTSGTTGDPKGAMITHQNIVSNAAAFLKCVEHAYEPTPDDVAISYLPLAHMFERIVQAVVYSCGARVGFFQGDIRLLADDMKTLKPTLFPAVPRLLNRIYDKVQNEAKTPLKKFLLKLAVSSKFKELQKGIIRHDSFWDKLIFAKIQDSLGGRVRVIVTGAAPMSTSVMTFFRAAMGCQVYEAYGQTECTGGCTFTLPGDWTSGHVGVPLACNYVKLEDVADMNYFTVNNEGEVCIKGTNVFKGYLKDPEKTQEALDSDGWLHTGDIGRWLPNGTLKIIDRKKNIFKLAQGEYIAPEKIENIYNRSQPVLQIFVHGESLRSSLVGVVVPDTDVLPSFAAKLGVKGSFEELCQNQVVREAILEDLQKIGKESGLKTFEQVKAIFLHPEPFSIENGLLTPTLKAKRGELSKYFRTQIDSLYEHIQD

SEQ ID NO: 36304 - protein, 683 aa, Homo sapiens; identical to SEQ ID NO: 36303

SEQ ID NO: 36305 - protein, 739 aa, Homo sapiens
MDALKPPCLWRNHERGKKDRDSCGRKNSEPGSPHSLEALRDAAPSQGLNFLLLFTKMLFIFNFLFSPLPTPALICILTFGAAIFLWLITRPQPVLPLLDLNNQSVGIEGGARKGVSQKNNDLTSCCFSDAKTMYEVFQRGLAVSDNGPCLGYRKPNQPYRWLSYKQVSDRAEYLGSCLLHKGYKSSPDQFVGIFAQNRPEWIISELACYTYSMVAVPLYDTLGPEAIVHIVNKADIAMVICDTPQKALVLIGNVEKGFTPSLKVIILMDPFDDDLKQRGEKSGIEILSLYDAENLGKEHFRKPVPPSPEDLSVICFTSGTTGDPKGAMITHQNIVSNAAAFLKCVEHAYEPTPDDVAISYLPLAHMFERIVQAVVYSCGARVGFFQGDIRLLADDMKTLKPTLFPAVPRLLNRIYDKVQNEAKTPLKKFLLKLAVSSKFKELQKGIIRHDSFWDKLIFAKIQDSLGGRVRVIVTGAAPMSTSVMTFFRAAMGCQVYEAYGQTECTGGCTFTLPGDWTSGHVGVPLACNYVKLEDVADMNYFTVNNEGEVCIKGTNVFKGYLKDPEKTQEALDSDGWLHTGDIGRWLPNGTLKIIDRKKNIFKLAQGEYIAPEKIENIYNRSQPVLQIFVHGESLRSSLVGVVVPDTDVLPSFAAKLGVKGSFEELCQNQVVREAILEDLQKIGKESGLKTFEQVKAIFLHPEPFSIENGLLTPTLKAKRGELSKYFRTQIDSLYEHIQD

SEQ ID NO: 36306 - protein, 465 aa, Homo sapiens
MLFPGASIVPECWLLVLIQNLGKEHFRKPVPPSPEDLSVICFTSGTTGDPKGAMITHQNIVSNAAAFLKCVEHAYEPTPDDVAISYLPLAHMFERIVQAVVYSCGARVGFFQGDIRLLADDMKTLKPTLFPAVPRLLNRIYDKVQNEAKTPLKKFLLKLAVSSKFKELQKGIIRHDSFWDKLIFAKIQDSLGGRVRVIVTGAAPMSTSVMTFFRAAMGCQVYEAYGQTECTGGCTFTLPGDWTSGHVGVPLACNYVKLEDVADMNYFTVNNEGEVCIKGTNVFKGYLKDPEKTQEALDSDGWLHTGDIGRWLPNGTLKIIDRKKNIFKLAQGEYIAPEKIENIYNRSQPVLQIFVHGESLRSSLVGVVVPDTDVLPSFAAKLGVKGSFEELCQNQVVREAILEDLQKIGKESGLKTFEQVKAIFLHPEPFSIENGLLTPTLKAKRGELSKYFRTQIDSLYEHIQD

SEQ ID NO: 36307 - protein, 683 aa, Homo sapiens; identical to SEQ ID NO: 36303

SEQ ID NO: 36308 - protein, 659 aa, Homo sapiens
MLFIFNFLFSPLPTPALICILTFGAAIFLWLITRPQPVLPLLDLNNQSVGIEGGARKGVSQKNNDLTSCCFSDAKTMYEVFQRGLAVSDNGPCLGYRKPNQPYRWLSYKQVSDRAEYLGSCLLHKGYKSSPDQFVGIFAQNRPEWIISELACYTYSMVAVPLYDTLGPEAIVHIVNKADIAMVICDTPQKALVLIGNVEKGFTPSLKVIILMDPFDDDLKQRGEKSGIEILSLYDAENLGKEHFRKPVPPSPEDLSVICFTSGTTGDPKGAMITHQNIVSNAAAFLKCVEHAYEPTPDDVAISYLPLAHMFERIVQAVVYSCGARVGFFQGDIRLLADDMKTLKPTLFPAVPRLLNRIYDKVQNEAKTPLKKFLLKLAVSSKFKELQKGIIRHDSFWDKLIFAKIQDSLGGRVRVIVTGAAPMSTSVMTFFRAAMGCQVYEAYGQTECTGGCTFTLPGDWTSGHVGVPLACNYVKLEDVADMNYFTVNNEGEVCIKGTNVFKGYLKDPEKTQEALDSDGWLHTGDIGRWLPNGTLKIIDRKKNIFKLAQGEYIAPEKIENIYNRSQPVLQIFVHGESLRSSLVGVVVPDTDVLPSFAAKLGVKGSFEELCQNQVKAIFLHPEPFSIENGLLTPTLKAKRGELSKYFRTQIDSLYEHIQD

SEQ ID NO: 36309 - protein, 722 aa, Homo sapiens
MLTFFLVSGGSLWLFVEFVLSLLEKMQTQEILRILRLPELGDLGQFFRSLSATTLVSMGALAAILAYWFTHRPKALQPPCNLLMQSEEVEDSGGARRSVIGSGPQLLTHYYDDARTMYQVFRRGLSISGNGPCLGFRKPKQPYQWLSYQEVADRAEFLGSGLLQHNCKACTDQFIGVFAQNRPEWIIVELACYTYSMVVVPLYDTLGPGAIRYIINTADISTVIVDKPQKAVLLLEHVERKETPGLKLIILMDPFEEALKERGQKCGVVIKSMQAVEDCGQENHQAPVPPQPDDLSIVCFTSGTTGNPKGAMLTHGNVVADFSGFLKVTESQWAPTCADVHISYLPLAHMFERMVQSVVYCHGGRVGFFQGDIRLLSDDMKALCPTIFPVVPRLLNRMYDKIFSQANTPLKRWLLEFAAKRKQAEVRSGIIRNDSIWDELFFNKIQASLGGCVRMIVTGAAPASPTVLGFLRAALGCQVYEGYGQTECTAGCTFTTPGDWTSGHVGAPLPCNHIKLVDVEELNYWACKGEGEICVRGPNVFKGYLKDPDRTKEALDSDGWLHTGDIGKWLPAGTLKIIDRKKHIFKLAQGEYVAPEKIENIYIRSQPVAQIYVHGDSLKAFLVGIVVPDPEVMPSWAQKRGIEGTYADLCTNKDLKKAILEDMVRLGKESGLHSFEQVKAIHIHSDMFSVQNGLLTPTLKAKRPELREYFKKQIEELYSISM

SEQ ID NO: 36310 - protein, 622 aa, Homo sapiens
MQTQEILRILRLPELGDLGQFFRSLSATTLDSGGARRSVIGSGPQLLTHYYDDARTMYQVFRRGLSISGNGPCLGFRKPKQPYQWLSYQEVADRAEFLGSGLLQHNCKACTDQFIGVFAQNRPEWIIVELACYTYSMVVVPLYDTLGPGAIRYIINTADISTVIVDKPQKAVLLLEHVERKETPGLKLIILMDPFEEALKERGQKCGVVIKSMQAVEDCGQENHQAPVPPQPDDLSIVCFTSGTTGNPKGAMLTHGNVVADFSGFLKVTEGDIRLLSDDMKALCPTIFPVVPRLLNRMYDKIFSQANTPLKRWLLEFAAKRKQAEVRSGIIRNDSIWDELFFNKIQASLGGCVRMIVTGAAPASPTVLGFLRAALGCQVYEGYGQTECTAGCTFTTPGDWTSGHVGAPLPCNHIKLVDVEELNYWACKGEGEICVRGPNVFKGYLKDPDRTKEALDSDGWLHTGDIGKWLPAGTLKIIDRKKHIFKLAQGEYVAPEKIENIYIRSQPVAQIYVHGDSLKAFLVGIVVPDPEVMPSWAQKRGIEGTYADLCTNKDLKKAILEDMVRLGKESGLHSFEQVKAIHIHSDMFSVQNGLLTPTLKAKRPELREYFKKQIEELYSISM

SEQ ID NO: 36311 - protein, 697 aa, Homo sapiens
MQTQEILRILRLPELGDLGQFFRSLSATTLVSMGALAAILAYWFTHRPKALQPPCNLLMQSEEVEDSGGARRSVIGSGPQLLTHYYDDARTMYQVFRRGLSISGNGPCLGFRKPKQPYQWLSYQEVADRAEFLGSGLLQHNCKACTDQFIGVFAQNRPEWIIVELACYTYSMVVVPLYDTLGPGAIRYIINTADISTVIVDKPQKAVLLLEHVERKETPGLKLIILMDPFEEALKERGQKCGVVIKSMQAVEDCGQENHQAPVPPQPDDLSIVCFTSGTTGNPKGAMLTHGNVVADFSGFLKVTEKVIFPRQDDVLISFLPLAHMFERVIQSVVYCHGGRVGFFQGDIRLLSDDMKALCPTIFPVVPRLLNRMYDKIFSQANTPLKRWLLEFAAKRKQAEVRSGIIRNDSIWDELFFNKIQASLGGCVRMIVTGAAPASPTVLGFLRAALGCQVYEGYGQTECTAGCTFTTPGDWTSGHVGAPLPCNHIKLVDVEELNYWACKGEGEICVRGPNVFKGYLKDPDRTKEALDSDGWLHTGDIGKWLPAGTLKIIDRKKHIFKLAQGEYVAPEKIENIYIRSQPVAQIYVHGDSLKAFLVGIVVPDPEVMPSWAQKRGIEGTYADLCTNKDLKKAILEDMVRLGKESGLHSFEQVKAIHIHSDMFSVQNGLLTPTLKAKRPELREYFKKQIEELYSISM

SEQ ID NO: 36312 - protein, 697 aa, Homo sapiens
MQTQEILRILRLPELGDLGQFFRSLSATTLVSMGALAAILAYWFTHRPKALQPPCNLLMQSEEVEDSGGARRSVIGSGPQLLTHYYDDARTMYQVFRRGLSISGNGPCLGFRKPKQPYQWLSYQEVADRAEFLGSGLLQHNCKACTDQFIGVFAQNRPEWIIVELACYTYSMVVVPLYDTLGPGAIRYIINTADISTVIVDKPQKAVLLLEHVERKETPGLKLIILMDPFEEALKERGQKCGVVIKSMQAVEDCGQENHQAPVPPQPDDLSIVCFTSGTTGNPKGAMLTHGNVVADFSGFLKVTESQWAPTCADVHISYLPLAHMFERMVQSVVYCHGGRVGFFQGDIRLLSDDMKALCPTIFPVVPRLLNRMYDKIFSQANTPLKRWLLEFAAKRKQAEVRSGIIRNDSIWDELFFNKIQASLGGCVRMIVTGAAPASPTVLGFLRAALGCQVYEGYGQTECTAGCTFTTPGDWTSGHVGAPLPCNHIKLVDVEELNYWACKGEGEICVRGPNVFKGYLKDPDRTKEALDSDGWLHTGDIGKWLPAGTLKIIDRKKHIFKLAQGEYVAPEKIENIYIRSQPVAQIYVHGDSLKAFLVGIVVPDPEVMPSWAQKRGIEGTYADLCTNKDLKKAILEDMVRLGKESGLHSFEQVKAIHIHSDMFSVQNGLLTPTLKAKRPELREYFKKQIEELYSISM

SEQ ID NO: 36313 - protein, 708 aa, Homo sapiens
MPEFVLSLLEKMQTQEILRILRLPELGDLGQFFRSLSATTLVSMGALAAILAYWFTHRPKALQPPCNLLMQSEEVEDSGGARRSVIGSGPQLLTHYYDDARTMYQVFRRGLSISGNGPCLGFRKPKQPYQWLSYQEVADRAEFLGSGLLQHNCKACTDQFIGVFAQNRPEWIIVELACYTYSMVVVPLYDTLGPGAIRYIINTADISTVIVDKPQKAVLLLEHVERKETPGLKLIILMDPFEEALKERGQKCGVVIKSMQAVEDCGQENHQAPVPPQPDDLSIVCFTSGTTGNPKGAMLTHGNVVADFSGFLKVTEKVIFPRQDDVLISFLPLAHMFERVIQSVVYCHGGRVGFFQGDIRLLSDDMKALCPTIFPVVPRLLNRMYDKIFSQANTPLKRWLLEFAAKRKQAEVRSGIIRNDSIWDELFFNKIQASLGGCVRMIVTGAAPASPTVLGFLRAALGCQVYEGYGQTECTAGCTFTTPGDWTSGHVGAPLPCNHIKLVDVEELNYWACKGEGEICVRGPNVFKGYLKDPDRTKEALDSDGWLHTGDIGKWLPAGTLKIIDRKKHIFKLAQGEYVAPEKIENIYIRSQPVAQIYVHGDSLKAFLVGIVVPDPEVMPSWAQKRGIEGTYADLCTNKDLKKAILEDMVRLGKESGLHSFEQVKAIHIHSDMFSVQNGLLTPTLKAKRPELREYFKKQIEELYSISM

SEQ ID NO: 36314 - protein, 667 aa, Homo sapiens
MQTQEILRILRLPELGDLGQFFRSLSATTLVSMGALAAILAYWFTHRPKALQPPCNLLMQSEEVEDSGGARRSVIGSGPQLLTHYYDDARTMYQVFRRGLSISGNGPCLGFRKPKQPYQWLSYQEVADRAEFLGSGLLQHNCKACTDQFIGVFAQNRPEWIIVELACYTYSMVVVPLYDTLGPGAIRYIINTADISTVIVDKPQKAVLLLEHVERKETPGLKLIILMDPFEEALKERGQKCGVVIKSMQAVEDCGQENHQAPVPPQPDDLSIVCFTSGTTGNPKGAMLTHGNVVADFSGFLKVTESQWAPTCADVHISYLPLAHMFERMVQSVVYCHGGRVGFFQGDIRLLSDDMKALCPTIFPVVPRLLNRMYDKIFSQANTPLKRWLLEFAAKRKQAEVRSGIIRNDSIWDELFFNKIQASLGGCVRMIVTGAAPASPTVLGFLRAALGCQVYEGYGQTECTAGCTFTTPGDWTSGHVGAPLPCNHIKLVDVEELNYWACKGEGEICVRGPNVFKGYLKDPDRTKEALDSDGWLHTGDIGKWLPAGTLKIIDRKKHIFKLAQGEYVAPEKIENIYIRSQPVAQIYVHGDSLKAFLVGIVVPDPEVMPSWAQKRGIEGTYADLCTNKDLKKAILEDMVRLGKESGLHSFEQDLPQCLIQIKVFSKY

SEQ ID NO: 36315 - protein, 722 aa, Homo sapiens
MLTFFLVSGGSLWLFVEFVLSLLEKMQTQEILRILRLPELGDLGQFFRSLSATTLVSMGALAAILAYWFTHRPKALQPPCNLLMQSEEVEDSGGARRSVIGSGPQLLTHYYDDARTMYQVFRRGLSISGNGPCLGFRKPKQPYQWLSYQEVADRAEFLGSGLLQHNCKACTDQFIGVFAQNRPEWIIVELACYTYSMVVVPLYDTLGPGAIRYIINTADISTVIVDKPQKAVLLLEHVERKETPGLKLIILMDPFEEALKERGQKCGVVIKSMQAVEDCGQENHQAPVPPQPDDLSIVCFTSGTTGNPKGAMLTHGNVVADFSGFLKVTEKVIFPRQDDVLISFLPLAHMFERVIQSVVYCHGGRVGFFQGDIRLLSDDMKALCPTIFPVVPRLLNRMYDKIFSQANTPLKRWLLEFAAKRKQAEVRSGIIRNDSIWDELFFNKIQASLGGCVRMIVTGAAPASPTVLGFLRAALGCQVYEGYGQTECTAGCTFTTPGDWTSGHVGAPLPCNHIKLVDVEELNYWACKGEGEICVRGPNVFKGYLKDPDRTKEALDSDGWLHTGDIGKWLPAGTLKIIDRKKHIFKLAQGEYVAPEKIENIYIRSQPVAQIYVHGDSLKAFLVGIVVPDPEVMPSWAQKRGIEGTYADLCTNKDLKKAILEDMVRLGKESGLHSFEQVKAIHIHSDMFSVQNGLLTPTLKAKRPELREYFKKQIEELYSISM

SEQ ID NO: 36316 - protein, 712 aa, Homo sapiens
MQTQEILRILRLPELGDLGQFFRSLSATTLVSMGALAAILAYWFTHRPKALQPPCNLLMQSEEVEDSGGARRSVIGSGPQLLTHYYDDARTMYQVFRRGLSISGNGPCLGFRKPKQPYQWLSYQEVADRAEFLGSGLLQHNCKACTDQFIGVFAQNRPEWIIVELACYTYSMVVVPLYDTLGPGAIRYIINTGLSCQEGASATASTQADISTVIVDKPQKAVLLLEHVERKETPGLKLIILMDPFEEALKERGQKCGVVIKSMQAVEDCGQENHQAPVPPQPDDLSIVCFTSGTTGNPKGAMLTHGNVVADFSGFLKVTEKVIFPRQDDVLISFLPLAHMFERVIQSVVYCHGGRVGFFQGDIRLLSDDMKALCPTIFPVVPRLLNRMYDKIFSQANTPLKRWLLEFAAKRKQAEVRSGIIRNDSIWDELFFNKIQASLGGCVRMIVTGAAPASPTVLGFLRAALGCQVYEGYGQTECTAGCTFTTPGDWTSGHVGAPLPCNHIKLVDVEELNYWACKGEGEICVRGPNVFKGYLKDPDRTKEALDSDGWLHTGDIGKWLPAGTLKIIDRKKHIFKLAQGEYVAPEKIENIYIRSQPVAQIYVHGDSLKAFLVGIVVPDPEVMPSWAQKRGIEGTYADLCTNKDLKKAILEDMVRLGKESGLHSFEQVKAIHIHSDMFSVQNGLLTPTLKAKRPELREYFKKQIEELYSISM

SEQ ID NO: 36317 - protein, 697 aa, Homo sapiens; identical to SEQ ID NO: 36312

SEQ ID NO: 36318 - protein, 606 aa, Homo sapiens
MYQVFRRGLSISGNGPCLGFRKPKQPYQWLSYQEVADRAEFLGSGLLQHNCKACTDQFIGVFAQNRPEWIIVELACYTYSMVVVPLYDTLGPGAIRYIINTADISTVIVDKPQKAVLLLEHVERKETPGLKLIILMDPFEEALKERGQKCGVVIKSMQAVEDCGQENHQAPVPPQPDDLSIVCFTSGTTGNPKGAMLTHGNVVADFSGFLKVTEKVIFPRQDDVLISFLPLAHMFERVIQSVVYCHGGRVGFFQGDIRLLSDDMKALCPTIFPVVPRLLNRMYDKIFSQANTPLKRWLLEFAAKRKQAEVRSGIIRNDSIWDELFFNKIQASLGGCVRMIVTGAAPASPTVLGFLRAALGCQVYEGYGQTECTAGCTFTTPGDWTSGHVGAPLPCNHIKLVDVEELNYWACKGEGEICVRGPNVFKGYLKDPDRTKEALDSDGWLHTGDIGKWLPAGTLKIIDRKKHIFKLAQGEYVAPEKIENIYIRSQPVAQIYVHGDSLKAFLVGIVVPDPEVMPSWAQKRGIEGTYADLCTNKDLKKAILEDMVRLGKESGLHSFEQVKAIHIHSDMFSVQNGLLTPTLKAKRPELREYFKKQIEELYSISM

SEQ ID NO: 36319 - protein, 228 aa, Homo sapiens [sequence omitted]

SEQ ID NO: 36320 - protein, 577 aa, Homo sapiens
MQWLMRFRTLWGIHKSFHNIHPAPSQLRCRSLSEFGAPRWNDYEVPEEFNFASYVLDYWAQKEKEGKRGPNPAFWWVNGQGDEVKWSFREMGDLTRRVANVFTQTCGLQQGDHLALMLPRVPEWWLVAVGCMRTGIIFIPATILLKAKDILYRLQLSKAKGIVTIDALASEVDSIASQCPSLKTKLLVSDHSREGWLDFRSLVKSASPEHTCVKSKTLDPMVIFFTSGTTGFPKMAKHSHGLALQPSFPGSRKLRSLKTSDVSWCLSDSGWIVATIWTLVEPWTAGCTVFIHHLPQFDTKVIIQTLLKYPINHFWGVSSIYRMILQQDFTSIRFPALEHCYTGGEVVLPKDQEEWKRRTGLLLYENYGQSETGLICATYWGMKIKPGFMGKATPPYDVQVIDDKGSILPPNTEGNIGIRIKPVRPVSLFMCYEGDPEKTAKVECGDFYNTGDRGKMDEEGYICFLGRSDDIINASGYRIGPAEVESALVEHPAVAESAVVGSPDPIRGEVVKAFIVLTPQFLSHDKDQLTKELQQHVKSVTAPYKYPRKVEFVSELPKTITGKIERKELRKKETGQM

SEQ ID NO: 36321 - protein, 577 aa, Homo sapiens; identical to SEQ ID NO: 36320

SEQ ID NO: 36322 - protein, 154 aa, Homo sapiens
MQWLMRFRTLWGIHKSFHNIHPAPSQLRCRSLSEFGAPRWNDYEVPEEFNFASYVLDYWAQKEKEGKRGPNPAFWWVNGQGDEVKWSFREMGDLTRRVANVFTQTCGLQQGDHLALMLPRVPEWWLVAVGCMRTGIIFIPATILLKAKDILYRL

SEQ ID NO: 36323 - protein, 577 aa, Homo sapiens
MHWLRKVQGLCTLWGTQMSSRTLYINSRQLVSLQWGHQEVPAKFNFASDVLDHWADMEKAGKRLPSPALWWVNGKGKELMWNFRELSENSQQAANVLSGACGLQRGDRVAVVLPRVPEWWLVILGCIRAGLIFMPGTIQMKSTDILYRLQMSKAKAIVAGDEVIQEVDTVASECPSLRIKLLVSEKSCDGWLNFKKLLNEASTTHHCVETGSQEASAIYFTSGTSGLPKMAEHSYSSLGLKAKMDAGWTGLQASDIMWTISDTGWILNILCSLMEPWALGACTFVHLLPKFDPLVILKTLSSYPIKSMMGAPIVYRMLLQQDLSSYKFPHLQNCVTVGESLLPETLENWRAQTGLDIRESYGQTETGLTCMVSKTMKIKPGYMGTAASCYDVQIIDDKGNVLPPGTEGDIGIRVKPIRPIGIFSGYVDNPDKTAANIRGDFWLLGDRGIKDEDGYFQFMGRANDIINSSGYRIGPSEVENALMEHPAVVETAVISSPDPVRGEVVKAFVVLASQFLSHDPEQLTKELQQHVKSVTAPYKYPRKIEFVLNLPKTVTGKIQRAKLRDKEWKMSGKARAQ

SEQ ID NO: 36324 - protein, 577 aa, Homo sapiens; identical to SEQ ID NO: 36323

SEQ ID NO: 36325 - protein, 498 aa, Homo sapiens
MWNFRELSENSQQAANVLSGACGLQRGDRVAVVLPRVPEWWLVILGCIRAGLIFMPGTIQMKSTDILYRLQMSKAKAIVAGDEVIQEVDTVASECPSLRIKLLVSEKSCDGWLNFKKLLNEASTTHHCVETGSQEASAIYFTSGTSGLPKMAEHSYSSLGLKAKMDAGWTGLQASDIMWTISDTGWILNILCSLMEPWALGACTFVHLLPKFDPLVILKTLSSYPIKSMMGAPIVYRMLLQQDLSSYKFPHLQNCVTVGESLLPETLENWRAQTGLDIRESYGQTETGLTCMVSKTMKIKPGYMGTAASCYDVQIIDDKGNVLPPGTEGDIGIRVKPIRPIGIFSGYVDNPDKTAANIRGDFWLLGDRGIKDEDGYFQFMGRANDIINSSGYRIGPSEVENALMEHPAVVETAVISSPDPVRGEVVKAFVVLASQFLSHDPEQLTKELQQHVKSVTAPYKYPRKIEFVLNLPKTVTGKIQRAKLRDKEWKMSGKARAQ

SEQ ID NO: 36326 - protein, 208 aa, Homo sapiens
MHWLRKVQGLCTLWGTQMSSRTLYINSRQLVSLQWGHQEVPAKFNFASDVLDHWADMEKAGKRLPSPALWWVNGKGKELMWNFRELSENSQQAANVLSGACGLQRGDRVAVVLPRVPEWWLVILGCIRAGLIFMPGTIQMKSTDILYRLQMSKAKAIVAGDEVIQEVDTVASECPSLRIKLLVSEKSCDGWLNFKKLLKYKVRHRDVK

SEQ ID NO: 36327 - protein, 349 aa, Homo sapiens
MRHPPLITVWRLEAKMDAGWTGLQASDIMWTISDTGWILNILCSLMEPWALGACTFVHLLPKFDPLVILKTLSSYPIKSMMGAPIVYRMLLQQDLSSYKFPHLQNCVTVGESLLPETLENWRAQTGLDIRESYGQTETGLTCMVSKTMKIKPGYMGTAASCYDVQIIDDKGNVLPPGTEGDIGIRVKPIRPIGIFSGYVDNPDKTAANIRGDFWLLGDRGIKDEDGYFQFMGRANDIINSSGYRIGPSEVENALMEHPAVVETAVISSPDPVRGEVVKAFVVLASQFLSHDPEQLTKELQQHVKSVTAPYKYPRKIEFVLNLPKTVTGKIQRAKLRDKEWKMSGKARAQ

SEQ ID NO: 36328 - protein, 577 aa, Homo sapiens; identical to SEQ ID NO: 36323

SEQ ID NO: 36329 - protein, 577 aa, Homo sapiens
MHWLRKVQGLCTLWGTQMSSRTLYINSRQLVSLQWGHQEVPAKFNFASDVLDHWADMEKAGKRLPSPALWWVNGKGKELMWNFRELSENSQQAANILSGACGLQRGDRVAVMLPRVPEWWLVILGCIRAGLIFMPGTIQMKSTDILYRLQMSKAKAIVAGDEVIQEVDTVASECPSLRIKLLVSEKSCDGWLNFKKLLNEASTTHHCVETGSQEASAIYFTSGTSGLPKMAEHSYSSLGLKAKMDAGWTGLQASDIMWTISDTGWILNILGSLLESWTLGACTFVHLLPKFDPLVILKTLSSYPIKSMMGAPIVYRMLLQQDLSSYKFPHLQNCLAGGESLLPETLENWRAQTGLDIREFYGQTETGLTCMVSKTMKIKPGYMGTAASCYDVQVIDDKGNVLPPGTEGDIGIRVKPIRPIGIFSGYVENPDKTAANIRGDFWLLGDRGIKDEDGYFQFMGRADDIINSSGYRIGPSEVENALMKHPAVVETAVISSPDPVRGEVVKAFVILASQFLSHDPEQLTKELQQHVKSVTAPYKYPRKIEFVLNLPKTVTGKIQRTKLRDKEWKMSGKARAQ

SEQ ID NO: 36330 - protein, 208 aa, Homo sapiens
MHWLRKVQGLCTLWGTQMSSRTLYINSRQLVSLQWGHQEVPAKFNFASDVLDHWADMEKAGKRLPSPALWWVNGKGKELMWNFRELSENSQQAANILSGACGLQRGDRVAVMLPRVPEWWLVILGCIRAGLIFMPGTIQMKSTDILYRLQMSKAKAIVAGDEVIQEVDTVASECPSLRIKLLVSEKSCDGWLNFKKLLKYKVRHREVK

SEQ ID NO: 36331 - protein, 586 aa, Homo sapiens
MLARVTRKMLRHAKCFQRLAIFGSVRALHKDNRTATPQNFSNYESMKQDFKLGIPEYFNFAKDVLDQWTDKEKAGKKPSNPAFWWINRNGEEMRWSFEELGSLSRKFANILSEACSLQRGDRVILILPRVPEWWLANVACLRTGTVLIPGTTQLTQKDILYRLQSSKANCIITNDVLAPAVDAVASKCENLHSKLIVSENSREGWGNLKELMKHASDSHTCVKTKHNEIMAIFFTSGTSGYPKMTAHTHSSFGLGLSVNGRFWLDLTPSDVMWNTSDTGWAKSAWSSVFSPWIQGACVFTHHLPRFEPTSILQTLSKYPITVFCSAPTVYRMLVQNDITSYKFKSLKHCVSAGEPITPDVTEKWRNKTGLDIYEGYGQTETVLICGNFKGMKIKPGSMGKPSPAFDVKIVDVNGNVLPPGQEGDIGIQVLPNRPFGLFTHYVDNPSKTASTLRGNFYITGDRGYMDKDGYFWFVARADDVILSSGYRIGPFEVENALNEHPSVAESAVVSSPDPIRGEVVKAFVVLNPDYKSHDQEQLIKEIQEHVKKTTAPYKYPRKVEFIQELPKTISGKTKRNELRKKEWKTI

SEQ ID NO: 36332 - protein, 438 aa, Homo sapiens
MLARVTRKMLRHAKCFQRLAIFGSVRALHKDNRTATPQNFSNYESMKQDFKLGIPEYFNFAKDVLDQWTDKEKAGKKPSNPAFWWINRNGEEMRWSFEELGSLSRKFANILSEACSLQRGDRVILILPRVPEWWLANVACLRTGTVLIPGTTQLTQKDILYRLQSSKANCIITNDVLAPAVDAVASKCENLHSKLIVSENSREGWGNLKELMKHASDSHTCVKTKHNEIMAIFFTSGTSGYPKMTAHTHSSFGLGLSVNGRFWLDLTPSDVMWNTSDTGWAKSAWSSVFSPWIQGACVFTHHLPRFEPTSILQTLSKYPITVFCSAPTVYRMLVQNDITSYKFKSLKHCVSAGEPITPDVTEKWRNKTGLDIYEGYGQTETVLICGNFKGMKIKPGSMGKPSPAFDVKVCTSPSRRMFNNPICTLPTYRLPPYKLSLL

SEQ ID NO: 36333 - protein, 578 aa, Homo sapiens
MKQDFKLGIPEYFNFAKDVLDQWTDKEKAGKKPSNPAFWWINRNGEEMRWSFEELGSLSRKFANILSEACSLQRGDRVILILPRVPEWWLANVACLRTGTVLIPGTTQLTQKDILYRLQSSKANCIITNDVLAPAVDAVASKCENLHSKLIVSENSREGWGNLKELMKVFLCHPGWSTVARSWLTATSTSLVQAILSLLSSWDYRHASDSHTCVKTKHNEIMAIFFTSGTSGYPKMTAHTHSSFGLGLSVNGRFWLDLTPSDVMWNTSDTGWAKSAWSSVFSPWIQGACVFTHHLPRFEPTSILQTLSKYPITVFCSAPTVYRMLVQNDITSYKFKSLKHCVSAGEPITPDVTEKWRNKTGLDIYEGYGQTETVLICGNFKGMKIKPGSMGKPSPAFDVKIVDVNGNVLPPGQEGDIGIQVLPNRPFGLFTHYVDNPSKTASTLRGNFYITGDRGYMDKDGYFWFVARADDVILSSGYRIGPFEVENALNEHPSVAESAVVSSPDPIRGEVVKAFVVLNPDYKSHDQEQLIKEIQEHVKKTTAPYKYPRKVEFIQELPKTISGKTKRNELRKKEWKTI

SEQ ID NO: 36334 - protein, 579 aa, Homo sapiens
MRPWLRHLVLQALRNSRAFCGSHGKPAPLPVPQKIVATWEAISLGRQLVPEYFNFAHDVLDVWSRLEEAGHRPPNPAFWWVNGTGAEIKWSFEELGKQSRKAANVLGGACGLQPGDRMMLVLPRLPEWWLVSVACMRTGTVMIPGVTQLTEKDLKYRLQASRAKSIITSDSLAPRVDAISAECPSLQTKLLVSDSSRPGWLNFRELLREASTEHNCMRTKSRDPLAIYFTSGTTGAPKMVEHSQSSYGLGFVASGRRWVALTESDIFWNTTDTGWVKAAWTLFSAWPNGSCIFVHELPRVDAKVILNTLSKFPITTLCCVPTIFRLLVQEDLTRYQFQSLRHCLTGGEALNPDVREKWKHQTGVELYEGYGQSETVVICANPKGMKIKSGSMGKASPPYDVQIVDDEGNVLPPGEEGNVAVRIRPTRPFCFFNCYLDNPEKTAASEQGDFYITGDRARMDKDGYFWFMGRNDDVINSSSYRIGPVEVESALAEHPAVLESAVVSSPDPIRGEVVKAFIVLTPAYSSHDPEALTRELQEHVKRVTAPYKYPRKVAFVSELPKTVSGKIQRSKLRSQEWGK

SEQ ID NO: 36335 - protein, 689 aa, Homo sapiens [sequence omitted]

SEQ ID NO: 36336 - protein, 153 aa, Homo sapiens
MAARTLGRGVGRLLGSLRGLSGQPARPPCGVSAPRRAASGPSGSAPAVAAAAAQPGSYPALSAQAAREPAAFWGPLARDTLVWDTPYHTVWDCDFSTGKIGWFLGGQLNVSVNCLDQHVRKSPESVALIWERDEPGTEVRITYSPWLQMPCGP

SEQ ID NO: 36337 - protein, 484 aa, Homo sapiens
MAARTLGRGVGRLLGSLRGLSGQPARPPCGVSAPRRAASGPSGSAPAVAAAAAQPGSYPALSAQAAREPAAFWGPLARDTLVWDTPYHTVWDCDFSTGKIGWFLGGQLNVSVNCLDQHVRKSPESVALIWERDEPGTEVRITYRELLETTCRLANTLKRHGVHRGDRVAIYMPVSPLAVAAMLACARIGAVHTVIFAGFSAESLAGRINDVGEPINCEAWEWLHRVVGDSRCTLVDTWWQTETGGICIAPRPSEEGAEILPAMAMRPFFGIVPVLMDEKGSVVEGSNVSGALCISQAWPGMARTIYGDHQRFVDAYFKAYPGYYFTGDGAYRTEGGYYQITGRMDDVINISGHRLGTAEIEDAIADHPAVPESAVIGYPHDIKGEAAFAFIVVKDSAGDSDVVVQELKSMVATKIAKYAVPDEILVVKRLPKTRSGKVMRRLLRKIITSEAQELGDTTTLEDPSIIAEILSVYQKCKDKQAAAK

SEQ ID NO: 36338 - protein, 575 aa, Homo sapiens
MAARTLGRGVGRLLGSLRGLSGQPARPPCGVSAPRRAASGPSGSAPAVAAAAAQPGSYPALSAQAAREPAAFWGPLARDTLVWDTPYHTVWDCDFSTGKIGWFLGGQLNVSVNCLDQHVRKSPESVALIWERDEPGTEVRITYRELLETTCRLANTLKRHGVHRGDRVAIYMPVSPLAVAAMLACARIGAVHTVIFAGFSAESLAGRINDAKCKVVITFNQGLRGGRVVELKKIVDEAVKHCPTVQHVLVAHRTDNKVHMGDLDVPLEQEMAKEDPVCAPESMGSEDMLFMLYTSGSTGMPKGIVHTQAGYLLYAALTHKLVFDHQPGDIFGCVADIGWITGHSYVVYGPLCNGATSVLFESTPVYPNAGRYWETVERLKINQFYGAPTAVRLLLKYGDAWVKKYDRSSLRTLGSVGEPINCEAWEWLHRVVGDSRCTLVDTWWQTETGGICIAPRPSEEGAEILPAMAMRPFFGIVPVLMDEKGSVVEGSNVSGALCISQAWPGMARTIYGDHQRFVDAYFKAYPGYYFTGDGAYRTEGGYYQITGRMDDVINILQIVGFFREAIRNSGDLLEH

SEQ ID NO: 36339 - protein, 606 aa, Homo sapiens
MLKTFLFLEKYFPCIKYSSACFPGTGLDVYDIKFAVLLHPQTALHFGPPPSLMAFSSLCCRELLETTCRLANTLKRHGVHRGDRVAIYMPVSPLAVAAMLACARIGAVHTVIFAGFSAESLAGRINDAKCKVVITFNQGLRGGRVVELKKIVDEAVKHCPTVQHVLVAHRTDNKVHMGDLDVPLEQEMAKEDPVCAPESMGSEDMLFMLYTSGSTGMPKGIVHTQAGYLLYAALTHKLVFDHQPGDIFGCVADIGWITGHSYVVYGPLCNGATSVLFESTPVYPNAGRYWETVERLKINQFYGAPTAVRLLLKYGDAWVKKYDRSSLRTLGSVGEPINCEAWEWLHRVVGDSRCTLVDTWWQTETGGICIAPRPSEEGAEILPAMAMRPFFGIVPVLMDEKGSVVEGSNVSGALCISQAWPGMARTIYGDHQRFVDAYFKAYPGYYFTGDGAYRTEGGYYQITGRMDDVINISGHRLGTAEIEDAIADHPAVPESAVIGYPHDIKGEAAFAFIVVKDSAGDSDVVVQELKSMVATKIAKYAVPDEILVVKRLPKTRSGKVMRRLLRKIITSEAQELGDTTTLEDPSIIAEILSVYQKCKDKQAAAK

SEQ ID NO: 36340 - protein, 568 aa, Homo sapiens
MRRRKERQPWDRFHFLHFAPHGRELLETTCRLANTLKRHGVHRGDRVAIYMPVSPLAVAAMLACARIGAVHTVIFAGFSAESLAGRINDAKCKVVITFNQGLRGGRVVELKKIVDEAVKHCPTVQHVLVAHRTDNKVHMGDLDVPLEQEMAKEDPVCAPESMGSEDMLFMLYTSGSTGMPKGIVHTQAGYLLYAALTHKLVFDHQPGDIFGCVADIGWITGHSYVVYGPLCNGATSVLFESTPVYPNAGRYWETVERLKINQFYGAPTAVRLLLKYGDAWVKKYDRSSLRTLGSVGEPINCEAWEWLHRVVGDSRCTLVDTWWQTETGGICIAPRPSEEGAEILPAMAMRPFFGIVPVLMDEKGSVVEGSNVSGALCISQAWPGMARTIYGDHQRFVDAYFKAYPGYYFTGDGAYRTEGGYYQITGRMDDVINISGHRLGTAEIEDAIADHPAVPESAVIGYPHDIKGEAAFAFIVVKDSAGDSDVVVQELKSMVATKIAKYAVPDEILVVKRLPKTRSGKVMRRLLRKIITSEAQELGDTTTLEDPSIIAEILSVYQKCKDKQAAAK

SEQ ID NO: 36341 - protein, 714 aa, Homo sapiens
MGLPEERVRSGSGSRGQEEAGAGGRARSWSPPPEVSRSAHVPSLQRYRELHRRSVEEPREFWGDIAKEFYWKTPCPGPFLRYNFDVTKGKIFIEWMKGATTNICYNVLDRNVHEKKLGDKVAFYWEGNEPGETTQITYHQLLVQVCQFSNVLRKQGIQKGDRVAIYMPMIPELVVAMLACARIGALHSIVFAGFSSESLCERILDSSCSLLITTDAFYRGEKLVNLKELADEALQKCQEKGFPVRCCIVVKHLGRAELGMGDSTSQSPPIKRSCPDVQGKLKEKSKRVQPQISWNQGIDLWWHELMQEAGDECEPEWCDAEDPLFILYTSGSTGKPKGVVHTVGGYMLYVATTFKYVFDFHAEDVFWCTADIGWITGHSYVTYGPLANGATSVLFEGIPTYPDVNRLWSIVDKYKVTKFYTAPTAIRLLMKFGDEPVTKHSRASLQVLGTVGEPINPEAWLWYHRVVGAQRCPIVDTFWQTETGGHMLTPLPGATPMKPGSATFPFFGVAPAILNESGEELEGEAEGYLVFKQPWPGIMRTVYGNHERFETTYFKKFPGYYVTGDGCQRDQDGYYWITGRIDDMLNVSGHLLSTAEVESALVEHEAVAEAAVVGHPHPVKGECLYCFVTLCDGHTFSPKLTEELKKQIREKIGPIATPDYIQNAPGLPKTRSGKIMRRVLRKIAQNDHDLGDMSTVADPSVISHLFSHRCLTIQ

SEQ ID NO: 36342 - protein, 651 aa, Homo sapiens
MMVRWALLCEFWGDIAKEFYWKTPCPGPFLRYNFDVTKGKIFIEWMKGATTNICYNVLDRNVHEKKLGDKVAFYWEGNEPGETTQITYHQLLVQVCQFSNVLRKQGIQKGDRVAIYMPMIPELVVAMLACARIGALHSIVFAGFSSESLCERILDSSCSLLITTDAFYRGEKLVNLKELADEALQKCQEKGFPVRCCIVVKHLGRAELGMGDSTSQSPPIKRSCPDVQISWNQGIDLWWHELMQEAGDECEPEWCDAEDPLFILYTSGSTGKPKGVVHTVGGYMLYVATTFKYVFDFHAEDVFWCTADIGWITGHSYVTYGPLANGATSVLFEGIPTYPDVNRLWSIVDKYKVTKFYTAPTAIRLLMKFGDEPVTKHSRASLQVLGTVGEPINPEAWLWYHRVVGAQRCPIVDTFWQTETGGHMLTPLPGATPMKPGSATFPFFGVAPAILNESGEELEGEAEGYLVFKQPWPGIMRTVYGNHERFETTYFKKFPGYYVTGDGCQRDQDGYYWITGRIDDMLNVSGHLLSTAEVESALVEHEAVAEAAVVGHPHPVKGECLYCFVTLCDGHTFSPKLTEELKKQIREKIGPIATPDYIQNAPGLPKTRSGKIMRRVLRKIAQNDHDLGDMSTVADPSVISHLFSHRCLTIQ

SEQ ID NO: 36343 - protein, 701 aa, Homo sapiens [sequence omitted]

SEQ ID NO: 36344 - protein, 699 aa, Homo sapiens
MGLPEERVRSGSGSRGQEEAGAGGRARSWSPPPEVSRSAHVPSLQRYRELHRRSVEEPREFWGDIAKEFYWKTPCPGPFLRYNFDVTKGKIFIEWMKGATTNICYNVLDRNVHEKKLGDKVAFYWEGNEPGETTQITYHQLLVQVCQFSNVLRKQGIQKGDRVAIYMPMIPELVVAMLACARIGALHSIVFAGFSSESLCERILDSSCSLLITTDAFYRGEKLVNLKELADEALQKCQEKGFPVRCCIVVKHLGRAELGMGDSTSQSPPIKRSCPDVQISWNQGIDLWWHELMQEAGDECEPEWCDAEHSSSCTPVAPQANPRVWFTQLGATCYVATTFKYVFDFHAEDVFWCTADIGWITGHSYVTYGPLANGATSVLFEGIPTYPDVNRLWSIVDKYKVTKFYTAPTAIRLLMKFGDEPVTKHSRASLQVLGTVGEPINPEAWLWYHRVVGAQRCPIVDTFWQTETGGHMLTPLPGATPMKPGSATFPFFGVAPAILNESGEELEGEAEGYLVFKQPWPGIMRTVYGNHERFETTYFKKFPGYYVTGDGCQRDQDGYYWITGRIDDMLNVSGHLLSTAEVESALVEHEAVAEAAVVGHPHPVKGECLYCFVTLCDGHTFSPKLTEELKKQIREKIGPIATPDYIQNAPGLPKTRSGKIMRRVLRKIAQNDHDLGDMSTVADPSVISHLFSHRCLTIQ

SEQ ID NO: 36345 - protein, 409 aa, Homo sapiens
MQEAGDECEPEWCDAEDPLFILYTSGSTGKPKGVVHTVGGYMLYVATTFKYVFDFHAEDVFWCTADIGWITGHSYVTYGPLANGATSVLFEGIPTYPDVNRLWSIVDKYKVTKFYTAPTAIRLLMKFGDEPVTKHSRASLQVLGTVGEPINPEAWLWYHRVVGAQRCPIVDTFWQTETGGHMLTPLPGATPMKPGSATFPFFGVAPAILNESGEELEGEAEGYLVFKQPWPGIMRTVYGNHERFETTYFKKFPGYYVTGDGCQRDQDGYYWITGRIDDMLNVSGHLLSTAEVESALVEHEAVAEAAVVGHPHPVKGECLYCFVTLCDGHTFSPKLTEELKKQIREKIGPIATPDYIQNAPGLPKTRSGKIMRRVLRKIAQNDHDLGDMSTVADPSVISHLFSHRCLTIQ

SEQ ID NO: 36346 - protein, 37 aa, Homo sapiens
MMVRWALLCGECRILGRHCQGILLEDSMPWPIPSVQL

SEQ ID NO: 36347 - protein, 686 aa, Homo sapiens
MKPSWLQCRKVTSAGGLGGPLPGSSPARGAGAALRALVVPGPRGGLGGRGCRALSSGSGSEYKTHFAASVTDPERFWGKAAEQISWYKPWTKTLENKHSPSTRWFVEGMLNICYNAVDRHIENGKGDKIAIIYDSPVTNTKATFTYKEVLEQVSKLAGVLVKHGIKKGDTVVIYMPMIPQAMYTMLACARIGAIHSLIFGGFASKELSSRIDHVKPKVVVTASFGIEPGRRVEYVPLVEEALKIGQHKPDKILIYNRPNMEAVPLAPGRDLDWDEEMAKAQSHDCVPVLSEHPLYILYTSGTTGLPKGVIRPTGGYAVMLHWSMSSIYGLQPGEVWWAASDLGWVVGHSYICYGPLLHGNTTVLYEGKPVGTPDAGAYFRVLAEHGVAALFTAPTAIRAIRQQDPGAALGKQYSLTRFKTLFVAGERCDVETLEWSKNVFRVPVLDHWWQTETGSPITASCVGLGNSKTPPPGQAGKSVPGYNVMILDDNMQKLKARCLGNIVVKLPLPPGAFSGLWKNQEAFKHLYFEKFPGYYDTMDAGYMDEEGYLYVMSRVDDVINVAGHRISAGAIEESILSHGTVADCAVVGKEDPLKGHVPLALCVLRKDINATEEQVLEEIVKHVRQNIGPVAAFRNAVFVKQLPKTRSGKIPRSALSAIVNGKPYKITSTIEDPSIFGHVEEMLKQA

SEQ ID NO: 36348 - protein, 368 aa, Homo sapiens
MLHWSMSSIYGLQPGEVWWAASDLGWVVGHSYICYGPLLHGNTTVLYEGKPVGTPDAGAYFRVLAEHGVAALFTAPTAIRAIRQQDPGAALGKQYSLTRFKTLFVAGERCDVETLEWSKNVFRVPVLDHWWQTETGSPITASCVGLGNSKTPPPGQAGKSVPGYNVMILDDNMQKLKARCLGNIVVKLPLPPGAFSGLWKNQEAFKHLYFEKFPGYYDTMDAGYMDEEGYLYVMSRVDDVINVAGHRISAGAIEESILSHGTVADCAVVGKEDPLKGHVPLALCVLRKDINATEEQVLEEIVKHVRQNIGPVAAFRNAVFVKQLPKTRSGKIPRSALSAIVNGKPYKITSTIEDPSIFGHVEEMLKQA

SEQ ID NO: 36349 - protein, 421 aa, Homo sapiens
MAATLILEPAGRCCWDEPVRIAVRGLAPEQPVTLRASLRDEKGALFQAHARYRADTLGELDLERAPALGGSFAGLEPMGLLWALEPEKPLVRLVKRDVRTPLAVELEVLDGHDPDPGRLLCRVRHERYFLPPGVRREPVRAGRVRGTLFLPPEPGPFPGIVDMFGTGGGLLEYRASLLAGKGFAVMALAYYNYEDLPKTMETLHLEYFEEAVNYLLSHPEVKGPGVGLLGISKGGELCLSMASFLKGITAAVVINGSVANVGGTLRYKGETLPPVGVNRNRIKVTKDGYADIVDVLNSPLEGPDQKSFIPVERAESTFLFLVGQDDHNWKSEFYANEACKRLQAHGRRKPQIICYPETGHYIEPPYFPLCRASLHALVGSPIIWGGEPRAHAMAQVDAWKQLQTFFHKHLGGHEGTIPSKV

SEQ ID NO: 36350 - protein, 594 aa, Homo sapiens
MIQNVGNHLRRGLASVFSNRTSRKSALRAGNDSAMADGEGYRNPTEVQMSQLVLPCHTNQRGELSVGQLLKWIDTTACLSAERHAGCPCVTASMDDIYFEHTISVGQVVNIKAKVNRAFNSSMEVGIQVASEDLCSEKQWNVCKALATFVARREITKVKLKQITPRTEEEKMEHSVAAERRRMRLVYADTIKDLLANCAIQGDLESRDCSRMVPAEKTRVESVELVLPPHANHQGNTFGGQIMAWMENVATIAASRLCRAHPTLKAIEMFHFRGPSQVGDRLVLKAIVNNAFKHSMEVGVCVEAYRQEAETHRRHINSAFMTFVVLDADDQPQLLPWIRPQPGDGERRYREASARKKIRLDRKYIVSCKQTEVPLSVPWDPSNQVYLSYNNVSSLKMLVAKDNWVLSSEISQVRLYTLEDDKFLSFHMEMVVHVDAAQAFLLLSDLRQRPEWDKHYRSVELVQQVDEDDAIYHVTSPALGGHTKPQDFVILASRRKPCDNGDPYVIALRSVTLPTHRETPEYRRGETLCSGFCLWREGDQLTKVSYYNQATPGVLNYVTTNVAGLSSEFYTTFKACEQFLLDNRNDLAPSLQTL

SEQ ID NO: 36351 - protein, 607 aa, Homo sapiens
MIQNVGNHLRRGLASVFSNRTSRKSALRAGNDSAMADGEGYRNPTEVQMSQLVLPCHTNQRGELSVGQLLKWIDTTACLSAERHAGCPCVTASMDDIYFEHTISVGQVVNIKAKVNRAFNSSMEVGIQVASEDLCSEKQWNVCKALATFVARREITKVKLKQITPRTEEEKMEHSVAAERRRMRLVYADTIKDLLANCAIQGDLESRDCSRMVPAEKTRVESVELVLPPHANHQGNTFGGQIMAWMENVATIAASRLCRAHPTLKAIEMFHFRGPSQVGDRLVLKAIVNNAFKHSMEVGVCVEAYRQEAETHRRHINSAFMTFVVLDADDQPQLLPWIRPQPGDGERRYREASARKKIRLDRKYIVSCKQTEVPLSVPWDPSNQVYLSYNNVSSLKMLVAKDNWVLSSEISQVRLYTLEDDKFLSFHMEMVVHVDAAQAFLLLSDLRQRPEWDKHYRSVELVQQVDEDDAIYHVTSPALGGHTKPQDFVILASRRKPCDNGDPYVIALRSVTLPTHRETPEYRRGETLCSGFCLWREGDQLTKCCWVRVSLTELVSASGFYSWGLESRSKGRRSDGWNGKLAGGHLSTLKAIPVAKINSRFGYLQDT

SEQ ID NO: 36352 - protein, 555 aa, Homo sapiens
MERPAPGEVVMSQAIQPAHATARGELSAGQLLKWIDTTACLAAEKHAGVSCVTASVDDIQFEETARVGQVITIKAKVTRAFSTSMEISIKVMVQDMLTGIEKLVSVAFSTFVAKPVGKEKIHLKPVTLLTEQDHVEHNLAAERRKVRLQHEDTFNNLMKESSKFDDLIFDEEEGAVSTRGTSVQSIELVLPPHANHHGNTFGGQIMAWMETVATISASRLCWAHPFLKSVDMFKFRGPSTVGDRLVFTAIVNNTFQTCVEVGVRVEAFDCQEWAEGRGRHINSAFLIYNAADDKENLITFPRIQPISKDDFRRYRGAIARKRIRLGRKYVISHKEEVPLCIHWDISKQASLSDSNVEALKKLAAKRGWEVTSTVEKIKIYTLEEHDVLSVWVEKHVGSPAHLAYRLLSDFTKRPLWDPHFVSCEVIDWVSEDDQLYHITCPILNDDKPKDLVVLVSRRKPLKDGNTYTVAVKSVILPSVPPSPQYIRSEIICAGFLIHAIDSNSCIVSYFNHMSASILPYFAGNLGGWSKSIEETAASCIQFLENPPDDGFVSTF

SEQ ID NO: 36353 - protein, 483 aa, Homo sapiens
MSNKLLSPHPHSVVLRSEFKMASSPAVLRASRLYQWSLKSSAQFLGSPQLRQVGQIIRVPARMAATLILEPAGRCCWDEPVRIAVRGLAPEQPVTLRASLRDEKGALFQAHARYRADTLGELDLERAPALGGSFAGLEPMGLLWALEPEKPLVRLVKRDVRTPLAVELEVLDGHDPDPGRLLCQTRHERYFLPPGVRREPVRVGRVRGTLFLPPEPGPFPGIVDMFGTGGGLLEYRASLLAGKGFAVMALAYYNYEDLPKTMETLHLEYFEEAMNYLLSHPEVKGPGVGLLGISKGGELCLSMASFLKGITAAVVINGSVANVGGTLHYKGETLPPVGVNRNRIKVTKDGYADIVDVLNSPLEGPDQKSFIPVERAESTFLFLVGQDDHNWKSEFYANEACKRLQAHGRRKPQIICYPETGHYIEPPYFPLCRASLHALVGSPIIWGGEPRAHAMAQVDAWKQLQTFFHKHLGGHEGTIPSKV

SEQ ID NO: 36354 - protein, 421 aa, Homo sapiens
MSATLILEPPGRCCWNEPVRIAVRGLAPEQRVTLRASLRDEKGALFRAHARYCADARGELDLERAPALGGSFAGLEPMGLLWALEPEKPFWRFLKRDVQIPFVVELEVLDGHDPEPGRLLCQAQHERHFLPPGVRRQSVRAGRVRATLFLPPGPGPFPGIIDIFGIGGGLLEYRASLLAGHGFATLALAYYNFEDLPNNMDNISLEYFEEAVCYMLQHPQVKGPGIGLLGISLGADICLSMASFLKNVSATVSINGSGISGNTAINYKHSSIPPLGYDLRRIKVAFSGLVDIVDIRNALVGGYKNPSMIPIEKAQGPILLIVGQDDHNWRSELYAQTVSERLQAHGKEKPQIICYPGTGHYIEPPYFPLCPASLHRLLNKHVIWGGEPRAHSKAQEDAWKQILAFFCKHLGGTQKTAVPKL

SEQ ID NO: 36355 - protein, 207 aa, Homo sapiens
MLQHPKVKGPSIALLGFSKGGDLCLSMASFLKGITATVLINACVANTVAPLHYKDMIIPKLVDDLGKVKITKSGFLTFMDTWSNPLEEHNHQSLVPLEKAQVPFLFIVGMDDQSWKSEFYAQIASERLQAHGKERPQIICYPETGHCIDPPYFPPSRASVHAVLGEAIFYGGEPKAHSKAQVDAWQQIQTFFHKHLNGKKSVKHSKI

SEQ ID NO: 36356 - protein, 168 aa, Homo sapiens
MLQHPKVKGPSIALLGFSKGGDLCLSMASFLKGITATVLINACVANTVAPLHYKDMIIPKLVDDLGKVKITKSGFLTFMDTWSNPLEEHNHQSLVPLEKAQVPFLFIVGMDDQSWKSEFYAQIASERLQAHGKERPQIICYPETGHCIDPPYFPPSRASVHAVLGEAI

SEQ ID NO: 36357 - protein, 370 aa, Homo sapiens
MARPGLIHSAPGLPDTCALLQPPAASAAAAPSMSGPDVETPSAIQICRIMRPDDANVAGNVHGGTILKMIEEAGAIISTRHCNSQNGERCVAALARVERTDFLSPMCIGEVAHVSAEITYTSKHSVEVQVNVMSENILTGAKKLTNKATLWYVPLSLKNVDKVLEVPPVVYSRQEQEEEGRKRYEAQKLERMETKWRNGDIVQPVLNPEPNTVSYSQSSLIHLVGPSDCTLHGFVHGGVTMKLMDEVAGIVAARHCKTNIVTASVDAINFHDKIRKGCVITISGRMTFTSNKSMEIEVLVDADPVVDSSQKRYRAASAFFTYVSLSQEGRSLPVPQLVPETEDEKKRFEEGKGRYLQMKAKRQGHAEPQP

SEQ ID NO: 36358 - protein, 329 aa, Homo sapiens
MAFQLSRIMRPDDANVAGNVHGGTILKMIEEAGAIISTRHCNSQNGERCVAALARVERTDFLSPMCIGEVAHVSAEITYTSKHSVEVQVNVMSENILTGAKKLTNKATLWYVPLSLKNVDKVLEVPPVVYSRQEQEEEGRKRYEAQKLERMETKWRNGDIVQPVLNPEPNTVSYSQSSLIHLVGPSDCTLHGFVHGGVTMKLMDEVAGIVAARHCKTNIVTASVDAINFHDKIRKGCVITISGRMTFTSNKSMEIEVLVDADPVVDSSQKRYRAASAFFTYVSLSQEGRSLPVPQLVPETEDEKKRFEEGKGRYLQMKAKRQGHAEPQP

SEQ ID NO: 36359 - protein, 350 aa, Homo sapiens
MLLLRRSLSLNVLRKEVDRACFGEKAKQIMRPDDANVAGNVHGGTILKMIEEAGAIISTRHCNSQNGERCVAALARVERTDFLSPMCIGEVAHVSAEITYTSKHSVEVQVNVMSENILTGAKKLTNKATLWYVPLSLKNVDKVLEVPPVVYSRQEQEEEGRKRYEAQKLERMETKWRNGDIVQPVLNPEPNTVSYSQSSLIHLVGPSDCTLHGFVHGGVTMKLMDEVAGIVAARHCKTNIVTASVDAINFHDKIRKGCVITISGRMTFTSNKSMEIEVLVDADPVVDSSQKRYRAASAFFTYVSLSQEGRSLPVPQLVPETEDEKKRFEEGKGRYLQMKAKRQGHAEPQP

SEQ ID NO: 36360 - protein, 380 aa, Homo sapiens
MKLLARALRLCEFGRQASSRRLVAGQGCVGPRRGCCAPVQVVGPRADLPPCGACITGRIMRPDDANVAGNVHGGTILKMIEEAGAIISTRHCNSQNGERCVAALARVERTDFLSPMCIGEVAHVSAEITYTSKHSVEVQVNVMSENILTGAKKLTNKATLWYVPLSLKNVDKVLEVPPVVYSRQEQEEEGRKRYEAQKLERMETKWRNGDIVQPVLNPEPNTVSYSQSSLIHLVGPSDCTLHGFVHGGVTMKLMDEVAGIVAARHCKTNIVTASVDAINFHDKIRKGCVITISGRMTFTSNKSMEIEVLVDADPVVDSSQKRYRAASAFFTYVSLSQEGRSLPVPQLVPETEDEKKRFEEGKGRYLQMKAKRQGHAEPQP

SEQ ID NO: 36361 - protein, 223 aa, Homo sapiens
MLLLRRSLSLNVLRKEVDRACFGEKAKQIMRPDDANVAGNVHGGTILKMIEEAGAIISTRHCNSQNGERCVAALARVERTDFLSPMCIGEVAHVSAEITYTSKHSVEVQVNVMSENILTGAKKLTNKATLWYVPLSLKNVDKVLEVPPVVYSRQEQEEEGRKRYEAQKLERMETKWRNGDIVQPVLNPEPNTVSYSQSSLIHLVGPSDCTLHGFVHGGGVDFH

SEQ ID NO: 36362 - protein, 265 aa, Homo sapiens
MCIGEVAHVSAEITYTSKHSVEVQVNVMSENILTGAKKLTNKATLWYVPLSLKNVDKVLEVPPVVYSRQEQEEEGRKRYEAQKLERMETKWRNGDIVQPVLNPEPNTVSYSQSSLIHLVGPSDCTLHGFVHGGVTMKLMDEVAGIVAARHCKTNIVTASVDAINFHDKIRKGCVITISGRMTFTSNKSMEIEVLVDADPVVDSSQKRYRAASAFFTYVSLSQEGRSLPVPQLVPETEDEKKRFEEGKGRYLQMKAKRQGHAEPQP

SEQ ID NO: 36363 - protein, 319 aa, Homo sapiens
MSSPQAPEDGQGCGDRGDPPGDLRSVLVTTVLNLEPLDEDLFRGRHYWVPAKRLFGGQIVGQALVAAAKSVSEDVHVHSLHCYFVRAGDPKLPVLYQVERTRTGSSFSVRSVKAVQHGKPIFICQASFQQAQPSPMQHQFSMPTVPPPEELLDCETLIDQYLRDPNLQKRYPLALNRIAAQEVPIEIKPVNPSPLSQLQRMEPKQMFWVRARGYIGEGDMKMHCCVAAYISDYAFLGTALLPHQWQHKVHFMVSLDHSMWFHAPFRADHWMLYECESPWAGGSRGLVHGRLWRQDGVLAVTCAQEGVIRVKPQVSESKL

SEQ ID NO: 36364 - protein, 113 aa, Homo sapiens
MSSPQAPEDGQGCGDRGDPPGDLRSVLVTTVLNLEPLDEDLFRGRHYWVPAKRLFGGQIVGQALVAAAKSVSEDVHVHSLHCYFVRAEQMPSCVLRRSPAEKSLWTFTVCDLY

SEQ ID NO: 36365 - protein, 439 aa, Homo sapiens
MRRAALRLCALGKGQLTPGRGLTQGPQNPKKQGIFHIHEVRDKLREIVGASTNWRDHVKAMEERKLLHSFLAKSQDGLPPRRMKDSYIEVLLPLGSEPELREKYLTVQNTVRFGRILEDLDSLGVLICYMHNKIHSAKMSPLSIVTALVDKIDMCKKSLSPEQDIKFSGHVSWVGKTSMEVKMQMFQLHGDEFCPVLDATFVMVARDSENKGPAFVNPLIPESPEEEELFRQGELNKGRRIAFSSTSLLKMAPSAEERTTIHEMFLSTLDPKTISFRSRVLPSNAVWMENSKLKSLEICHPQERNIFNRIFGGFLMRKAYELAWATACSFGGSRPFVVAVDDIMFQKPVEVGSLLFLSSQVCFTQNNYIQVRVHSEVASLQEKQHTTTNVFHFTFMSEKEVPLVFPKTYGESMLYLDGQRHFNSMSGPATLRKDYLVEP

SEQ ID NO: 36366 - protein, 379 aa, Homo sapiens
MEERKLLHSFLAKSQDGLPPRRMKDSYIEVLLPLGSEPELREKYLTVQNTVRFGRILEDLDSLGVLICYMHNKIHSAKMSPLSIVTALVDKIDMCKKSLSPEQDIKFSGHVSWVGKTSMEVKMQMFQLHGDEFCPVLDATFVMVARDSENKGPAFVNPLIPESPEEEELFRQGELNKGRRIAFSSTSLLKMAPSAEERTTIHEMFLSTLDPKTISFRSRVLPSNAVWMENSKLKSLEICHPQERNIFNRIFGGFLMRKAYELAWATACSFGGSRPFVVAVDDIMFQKPVEVGSLLFLSSQVCFTQNNYIQVRVHSEVASLQEKQHTTTNVFHFTFMSEKEVPLVFPKTYGESMLYLDGQRHFNSMSGPATLRKDYLVEP

SEQ ID NO: 36367 - protein, 448 aa, Homo sapiens
MRRAALRLCALGKGQLTPGRGLTQGPQNPKKQGIFHIHEACSSIHVNHVRDKLREIVGASTNWRDHVKAMEERKLLHSFLAKSQDGLPPRRMKDSYIEVLLPLGSEPELREKYLTVQNTVRFGRILEDLDSLGVLICYMHNKIHSAKMSPLSIVTALVDKIDMCKKSLSPEQDIKFSGHVSWVGKTSMEVKMQMFQLHGDEFCPVLDATFVMVARDSENKGPAFVNPLIPESPEEEELFRQGELNKGRRIAFSSTSLLKMAPSAEERTTIHEMFLSTLDPKTISFRSRVLPSNAVWMENSKLKSLEICHPQERNIFNRIFGGFLMRKAYELAWATACSFGGSRPFVVAVDDIMFQKPVEVGSLLFLSSQVCFTQNNYIQVRVHSEVASLQEKQHTTTNVFHFTFMSEKEVPLVFPKTYGESMLYLDGQRHFNSMSGPATLRKDYLVEP

SEQ ID NO: 36368 - protein, 422 aa, Homo sapiens
MTVFFKTLRNHWKKTTAGLCLLTWGGHWLYGKHCDNLLRRAACQEAQVFGNQLIPPNAQVKKATVFLNPAACKGKARTLFEKNAAPILHLSGMDVTIVKTDYEGQAKKLLELMENTDVIIVAGGDGTLQEVVTGVLRRTDEATFSKIPIGFIPLGETSSLSHTLFAESGNKVQHITDATLAIVKGETVPLDVLQIKGEKEQPVFAMTGLRWGSFRDAGVKVSKYWYLGPLKIKAAHFFSTLKEWPQTHQASISYTGPTERPPNEPEETPVQRPSLYRRILRRLASYWAQPQDALSQEVSPEVWKDVQLSTIELSITTRNNQLDPTSKEDFLNICIEPDTISKGDFITIGSRKVRNPKLHVEGTECLQASQCTLLIPEGAGGSFSIDSEEYEAMPVEVKLLPRKLQFFCDPRKREQMLTSPTQ

SEQ ID NO: 36369 - protein, 65 aa, Homo sapiens
MTVFFKTLRNHWKKTTAGLCLLTWGGHWLYGKHCDNLLRRAACQEAQHYQDESRWEPTLSRTPGS

SEQ ID NO: 36370 - protein, 65 aa, Homo sapiens; identical to SEQ ID NO: 36369

SEQ ID NO: 36371 - protein, 244 aa, Homo sapiens
MTVFFKTLRNHWKKTTAGLCLLTWGGHWLYGKHCDNLLRRAACQEAQVFGNQLIPPNAQVKKATVFLNPAACKGTLFEKNAAPILHLSGMDVTIVKTDYEGQAKKLLELMENTDVIIVAGGDGTLQEVVTGVLRRTDEATFSKIPIGFIPLGETSSLSHTLFAESGNKVQHITDATLAIVKGETVPLDVLQIKGEKEQPVFAMTGLRWGSFRDAGVKVSKYWYLGPLKIKAAHFFSTLKPFPKR

SEQ ID NO: 36372 - protein, 575 aa, Homo sapiens
MQSPWKILTVAPLFLLLSLQSSASPANDDQSRPSLSNGHTCVGCVLVVSVIEQLAQVHNSTVQASMERLCSYLPEKLFLKTTCYLVIDKFGSDIIKLLSADMNADVVCHTLEFCKQNTGQPLCHLYPLPKETWKFTLQKARQIVKKSPILKYSRSGSDICSLPVLAKICQKIKLAMEQSVPFKDVDSDKYSVFPTLRGYHWRGRDCNDSDESVYPGRRPNNWDVHQDSNCNGIWGVDPKDGVPYEKKFCEGSQPRGIILLGDSAGAHFHISPEWITASQMSLNSFINLPTALTNELDWPQLSGATGFLDSTVGIKEKSIYLRLWKRNHCNHRDYQNISRNGASSRNLKKFIESLSRNKVLDYPAIVIYAMIGNDVCSGKSDPVPAMTTPEKLYSNVMQTLKHLNSHLPNGSHVILYGLPDGTFLWDNLHNRYHPLGQLNKDMTYAQLYSFLNCLQVSPCHGWMSSNKTLRTLTSERAEQLSNTLKKIAASEKFTNFNLFYMDFAFHEIIQEWQKRGGQPWQLIEPVDGFHPNEVALLLLADHFWKKVQLQWPQILGKENPFNPQIKQVFGDQGGH

SEQ ID NO: 36373 - protein, 543 aa, Homo sapiens
MQSPWKILTVAPLFLLLSLQSSASPANDDQSRPSLSNGHTCVEKLFLKTTCYLVIDKFGSDIIKLLSADMNADVVCHTLEFCKQNTGQPLCHLYPLPKETWKFTLQKARQIVKKSPILKYSRSGSDICSLPVLAKICQKIKLAMEQSVPFKDVDSDKYSVFPTLRGYHWRGRDCNDSDESVYPGRRPNNWDVHQDSNCNGIWGVDPKDGVPYEKKFCEGSQPRGIILLGDSAGAHFHISPEWITASQMSLNSFINLPTALTNELDWPQLSGATGFLDSTVGIKEKSIYLRLWKRNHCNHRDYQNISRNGASSRNLKKFIESLSRNKVLDYPAIVIYAMIGNDVCSGKSDPVPAMTTPEKLYSNVMQTLKHLNSHLPNGSHVILYGLPDGTFLWDNLHNRYHPLGQLNKDMTYAQLYSFLNCLQVSPCHGWMSSNKTLRTLTSERAEQLSNTLKKIAASEKFTNFNLFYMDFAFHEIIQEWQKRGGQPWQLIEPVDGFHPNEVALLLLADHFWKKVQLQWPQILGKENPFNPQIKQVFGDQGGH

SEQ ID NO: 36374 - protein, 297 aa, Homo sapiens [sequence omitted]

SEQ ID NO: 36375 - protein, 686 aa, Homo sapiens
MQSPWKILTVAPLFLLLSLQSSASPANDDQSRPSLSNGHTCVGCVLVVSVIEQLAQVHNSTVQASMERLCSYLPEKLFLKTTCYLVIDKFGSDIIKLLSADMNADVVCHTLEFCKQNTGQPLCHLYPLPKETWKFTLQKARQIVKKSPILKYSRSGSDICSLPVLAKICQKIKLAMEQSVPFKDVDSDKYSVFPTLRGYHWRGRDCNDSDESVYPGRRPNNWDVHQDSNCNGIWGVDPKDGVPYEKKFCEGSQPRGIILLGDSAGAHFHISPEWITASQMSLNSFINLPTALTNELDWPQLSGATGFLDSTVGIKEKSIYLRLWKRNHCNHRDYQNISRNGASSRNLKKFIESLSRNKVLDYPAIVIYAMIGNDVCSGKSDPVPAMTTPEKLYSNVMQTLKHLNSHLPNGSHVILYGLPDGTFLWDNLHNRYHPLGQLNKDMTYAQLYSFLNCLQVSPCHGWMSSNKTLRTLTSERAEQLSNTLKKIAASEKFTNFNLFYMDFAFHEIIQEWQKRGGQPWQLIEPVDGFHPNERKSILLKGILMTSQTLDNQEWTQLTSWIKGNLTCDSRTREWLCCCWRIISGKRCSSSGPKSWERRIRSTPRLNRCLETKAGTEPLRSMHPWGAQGGRGLGKLIPQLWGLPRHRPKGLFFSSIFKCLSLNEEHIWTTVQCCVLPGSVTLPLFLK

SEQ ID NO: 36376 - protein, 663 aa, Homo sapiens
MQSPWKILTVAPLFLLLSLQSSASPANDDQSRPSLSNGHTCVGCVLVVSVIEQLAQVHNSTVQASMERLCSYLPEKLFLKTTCYLVIDKFGSDIIKLLSADMNADVVCHTLEFCKQNTGQPLCHLYPLPKETWKFTLQKARQIVKKSPILKYSRSGSDICSLPVLAKICQKIKLAMEQSVPFKDVDSDKYSVFPTLRGYHWRGRDCNDSDESVYPGRRPNNWDVHQDSNCNGIWGVDPKDGVPYEKKFCEGSQPRGIILLGDSAGAHFHISPEWITASQMSLNSFINLPTALTNELDWPQLSGATGFLDSTVGIKEKSIYLRLWKRNHCNHRDYQNISRNGASSRNLKKFIESLSRNKVLDYPAIVIYAMIGNDVCSGKSDPVPAMTTPEKLYSNVMQTLKHLNSHLPNGSHVILYGLPDGTFLWDNLHNRYHPLGQLNKDMTYAQLYSFLNCLQVSPCHGWMSSNKTLRTLTSERAEQLSNTLKKIAASEKFTNFNLFYMDFAFHEIIQEWQKRGGQPWQLIEPVDGFHPNERKSILLKGILMTSQTLDNQEWTQLTSWIKGNLTCDSRTREWLCCCWRIISGKRCSSSGPKSWERRIRSTPRLNRCLETKAGTEPLRSMHPWGAQGGRGLGKLIPQPYGGCHVTGPKDSSSAASLQMSFSQ

SEQ ID NO: 36377 - protein, 99 aa, Homo sapiens
MAEGNTLISVDYEIFGKVQGVFFRKHTQAEGKKLGLVGWVQNTDRGTVQGQLQGPISKVRHMQEWLETRGSPKSHIDKANFNNEKVILKLDYSDFQIVK

SEQ ID NO: 36378 - protein, 55 aa, Homo sapiens
MAEGNTLISVDYEIFGKVQGVFFRKHTQEMTVENRIAETHSKSCVPVSFATSYAG

SEQ ID NO: 36379 - protein, 99 aa, Homo sapiens; identical to SEQ ID NO: 36377

SEQ ID NO: 36380 - protein, 99 aa, Homo sapiens
MSTAQSLKSVDYEVFGRVQGVCFRMYTEDEARKIGVVGWVKNTSKGTVTGQVQGPEDKVNSMKSWLSKVGSPSSRIDRTNFSNEKTISKLEYSNFSIRY

SEQ ID NO: 36381 - protein, 97 aa, Homo sapiens
MCPLPLAAAAVAAPRAPLRLLNRGLAAAMSTAQSLKSVDYEVFGRVQGVCFRMYTEDEARKIGVVGWVKNTSKGTVTGQVQGPEDKVNSMLECSGLI

SEQ ID NO: 36382 - protein, 748 aa, Homo sapiens
MVLLRVLILLLSWAAGMGGQYGNPLNKYIRHYEGLSYNVDSLHQKHQRAKRAVSHEDQFLRLDFHAHGRHFNLRMKRDTSLFSDEFKVETSNKVLDYDTSHIYTGHIYGEEGSFSHGSVIDGRFEGFIQTRGGTFYVEPAERYIKDRTLPFHSVIYHEDDINYPHKYGPQGGCADHSVFERMRKYQMTGVEEVTQIPQEEHAANGPELLRKKRTTSAEKNTCQLYIQTDHLFFKYYGTREAVIAQISSHVKAIDTIYQTTDFSGIRNISFMVKRIRINTTADEKDPTNPFRFPNIGVEKFLELNSEQNHDDYCLAYVFTDRDFDDGVLGLAWVGAPSGSSGGICEKSKLYSDGKKKSLNTGIITVQNYGSHVPPKVSHITFAHEVGHNFGSPHDSGTECTPGESKNLGQKENGNYIMYARATSGDKLNNNKFSLCSIRNISQVLEKKRNNCFVESGQPICGNGMVEQGEECDCGYSDQCKDECCFDANQPEGRKCKLKPGKQCSPSQGPCCTAQCAFKSKSEKCRDDSDCAREGICNGFTALCPASDPKPNFTDCNRHTQVCINGQCAGSICEKYGLEECTCASSDGKDDKELCHVCCMKKMDPSTCASTGSVQWSRHFSGRTITLQPGSPCNDFRGYCDVFMRCRLVDADGPLARLKKAIFSPELYENIAEWIVAHWWAVLLMGIALIMLMAGFIKICSVHTPSSNPKLPPPKPLPGTLKRRRPPQPIQQPQRQRPRESYQMGHMRR

SEQ ID NO: 36383 - protein, 447 aa, Homo sapiens
MVLLRVLILLLSWAAGMGDRDFDDGVLGLAWVGAPSGSSGGICEKSKLYSDGKKKSLNTGIITVQNYGSHVPPKVSHITFAHEVGHNFGSPHDSGTECTPGESKNLGQKENGNYIMYARATSGDKLNNNKFSLCSIRNISQVLEKKRNNCFVESGQPICGNGMVEQGEECDCGYSDQCKDECCFDANQPEGRKCKLKPGKQCSPSQGPCCTAQCAFKSKSEKCRDDSDCAREGICNGFTALCPASDPKPNFTDCNRHTQVCINGQCAGSICEKYGLEECTCASSDGKDDKELCHVCCMKKMDPSTCASTGSVQWSRHFSGRTITLQPGSPCNDFRGYCDVFMRCRLVDADGPLARLKKAIFSPELYENIAEWIVAHWWAVLLMGIALIMLMAGFIKICSVHTPSSNPKLPPPKPLPGTLKRRRPPQPIQQPQRQRPRESYQMGHMRR

SEQ ID NO: 36384 - protein, 769 aa, Homo sapiens
MRLLRRWAFAALLLSLLPTPGLGTQGPAGALRWGGLPQLGGPGAPEVTEPSRLVRESSGGEVRKQQLDTRVRQEPPGGPPVHLAQVSFVIPAFNSNFTLDLELNHHLLSSQYVERHFSREGTTQHSTGAGDHCYYQGKLRGNPHSFAALSTCQGLHGVFSDGNLTYIVEPQEVAGPWGAPQGPLPHLIYRTPLLPDPLGCREPGCLFAVPAQSAPPNRPRLRRKRQVRRGHPTVHSETKYVELIVINDHQLFEQMRQSVVLTSNFAKSVVNLADVIYKEQLNTRIVLVAMETWADGDKIQVQDDLLETLARLMVYRREGLPEPSDATHLFSGRTFQSTSSGAAYVGGICSLSHGGGVNEYGNMGAMAVTLAQTLGQNLGMMWNKHRSSAGDCKCPDIWLGCIMEDTGFYLPRKFSRCSIDEYNQFLQEGGGSCLFNKPLKLLDPPECGNGFVEAGEECDCGSVQECSRAGGNCCKKCTLTHDAMCSDGLCCRRCKYEPRGVSCREAVNECDIAETCTGDSSQCPPNLHKLDGYYCDHEQGRCYGGRCKTRDRQCQVLWGHAAADRFCYEKLNVEGTERGSCGRKGSGWVQCSKQDVLCGFLLCVNISGAPRLGDLVGDISSVTFYHQGKELDCRGGHVQLADGSDLSYVEDGTACGPNMLCLDHRCLPASAFNFSTCPGSGERRICSHHGVCSNEGKCICQPDWTGKDCSIHNPLPTSPPTGETERYKGPSGTNIIIGSIAGAVLVAAIVLGGTGWGFKNIRRGRSGGA

SEQ ID NO: 36385 - protein, 523 aa, Homo sapiens
CWGSGHLLSSQYVERHFSREGTTQHSTGAGDHCYYQGKLRGNPHSFAALSTCQGLHGVFSDGNLTYIVEPQEVAGPWGAPQGPLPHLIYRTPLLPDPLGCREPGCLFAVPAQSAPPNRPRLRRKRQVRRGHPTVHSETKYVELIVINDHQLFEQMRQSVVLTSNFAKSVVNLADVIYKEQLNTRIVLVAMETWADGDKIQVQDDLLETLARLMVYRREGLPEPSDATHLFSGRTFQSTSSGAAYVGGICSLSHGGGVNEYGNMGAMAVTLAQTLGQNLGMMWNKHRSSAGDCKCPDIWLGCIMEDTGFYLPRKFSRCSIDEYNQFLQEGGGSCLFNKPLKLLDPPECGNGFVEAGEECDCGSVQECSRAGGNCCKKCTLTHDAMCSDGLCCRRCKYEPRGVSCREAVNECDIAETCTGDSSQCPPNLHKLDGYYCDHEQGRCYGGRCKTRDRQCQVLWGHAAADRFCYEKLNVEGTERGSCGRKGSGWVQCSKQPQQGRAVWLPPLCQHLWSSSARGPGGRHQ

SEQ ID NO: 36386 - protein, 569 aa, Homo sapiens
MQGTRLPVCCACPVGSSKPAEAEKEKVRRGHPTVHSETKYVELIVINDHQLFEQMRQSVVLTSNFAKSVVNLADVIYKEQLNTRIVLVAMETWADGDKIQVQDDLLETLARLMVYRREGLPEPSDATHLFSGRTFQSTSSGAAYVGGICSLSHGGGVNEYGNMGAMAVTLAQTLGQNLGMMWNKHRSSAGDCKCPDIWLGCIMEDTGFYLPRKFSRCSIDEYNQFLQEGGGSCLFNKPLKLLDPPECGNGFVEAGEECDCGSVQECSRAGGNCCKKCTLTHDAMCSDGLCCRRCKYEPRGVSCREAVNECDIAETCTGDSSQCPPNLHKLDGYYCDHEQGRCYGGRCKTRDRQCQVLWGHAAADRFCYEKLNVEGTERGSCGRKGSGWVQCSKQDVLCGFLLCVNISGAPRLGDLVGDISSVTFYHQGKELDCRGGHVQLADGSDLSYVEDGTACGPNMLCLDHRCLPASAFNFSTCPGSGERRICSHHGVCSNEGKCICQPDWTGKDCSIHNPLPTSPPTGETERYKGPSGTNIIIGSIAGAVLVAAIVLGGTGWGFKNIRRGRSGGA

SEQ ID NO: 36387 - protein, 738 aa, Homo sapiens
MAARPLPVSPARALLLALAGALLAPCEARGVSLWNQGRADEVVSASVGSGDLWIPVKSFDSKNHPEVLNIRLQRESKELIINLERNEGLIASSFTETHYLQDGTDVSLARNYTVILGHCYYHGHVRGYSDSAVSLSTCSGLRGLIVFENESYVLEPMKSATNRYKLFPAKKLKSVRGSCGSHHNTPNLAAKNVFPPPSQTWARRHKRETLKATKYVELVIVADNREFQRQGKDLEKVKQRLIEIANHVDKFYRPLNIRIVLVGVEVWNDMDKCSVSQDPFTSLHEFLDWRKMKLLPRKSHDNAQLVSGVYFQGTTIGMAPIMSMCTADQSGGIVMDHSDNPLGAAVTLAHELGHNFGMNHDTLDRGCSCQMAVEKGGCIMNASTGYPFPMVFSSCSRKDLETSLEKGMGVCLFNLPEVRESFGGQKCGNRFVEEGEECDCGEPEECMNRCCNATTCTLKPDAVCAHGLCCEDCQLKPAGTACRDSSNSCDLPEFCTGASPHCPANVYLHDGHSCQDVDGYCYNGICQTHEQQCVTLWGPGAKPAPGICFERVNSAGDPYGNCGKVSKSSFAKCEMRDAKCGKIQCQGGASRPVIGTNAVSIETNIPLQQGGRILCRGTHVYLGDDMPDPGLVLAGTKCADGKICLNRQCQNISVFGVHECAMQCHGRGVCNNRKNCHCEAHWAPPFCDKFGFGGSTDSGPIRQAEARQEAAESNRERGQGQEPVGSQEHASTASLTLI

SEQ ID NO: 36388 - protein, 909 aa, Homo sapiens
MAARPLPVSPARALLLALAGALLAPCEARGVSLWNQGRADEVVSASVGSGDLWIPVKSFDSKNHPEVLNIRLQRESKELIINLERNEGLIASSFTETHYLQDGTDVSLARNYTVILGHCYYHGHVRGYSDSAVSLSTCSGLRGLIVFENESYVLEPMKSATNRYKLFPAKKLKSVRGSCGSHHNTPNLAAKNVFPPPSQTWARRHKRETLKATKYVELVIVADNREFQRQGKDLEKVKQRLIEIANHVDKFYRPLNIRIVLVGVEVWNDMDKCSVSQDPFTSLHEFLDWRKMKLLPRKSHDNAQLVSGVYFQGTTIGMAPIMSMCTADQSGGIVMDHSDNPLGAAVTLAHELGHNFGMNHDTLDRGCSCQMAVEKGGCIMNASTGYPFPMVFSSCSRKDLETSLEKGMGVCLFNLPEVRESFGGQKCGNRFVEEGEECDCGEPEECMNRCCNATTCTLKPDAVCAHGLCCEDCQLKPAGTACRDSSNSCDLPEFCTGASPHCPANVYLHDGHSCQDVDGYCYNGICQTHEQQCVTLWGPGAKPAPGICFERVNSAGDPYGNCGKVSKSSFAKCEMRDAKCGKIQCQGGASRPVIGTNAVSIETNIPLQQGGRILCRGTHVYLGDDMPDPGLVLAGTKCADGKICLNRQCQNISVFGVHECAMQCHGRGVCNNRKNCHCEAHWAPPFCDKFGFGGSTDSGPIRQADNQGLTIGILVTILCLLAAGFVVYLKRKTLIRLLFTNKKTTIEKLRCVRPSRPPRGFQPCQAHLGHLGKGLMRKPPDSYPPKDNPRRLLQCQNVDISRPLNGLNVPQPQSTQRVLPPLHRAPRAPSVPARPLPAKPALRQAQGTCKPNPPQKPLPADPLARTTRLTHALARTPGQWETGLRLAPLRPAPQYPHQVPRSTHTAYIK

SEQ ID NO: 36389 - protein, 278 aa, Homo sapiens
MAARPLPVSPARALLLALAGALLAPCEARGVSLWNQGRADEVVSASVGSGDLWIPVKSFDSKNHPEVLNIRLQRESKELIINLERNEGLIASSFTETHYLQDGTDVSLARNYTGHCYYHGHVRGYSDSAVSLSTCSGLRGLIVFENESYVLEPMKSATNRYKLFPAKKLKSVRGSCGSHHNTPNLAAKNVFPPPSQTWARRHKRETLKATKYVELVIVADNREFQRQGKDLEKVKQRLIEIANHVDKFYRPLNIRIVLVGVEVWNDMDKCSVSQDPFT

SEQ ID NO: 36390 - protein, 814 aa, Homo sapiens
MRLALLWALGLLGAGSPLPSWPLPNIGGTEEQQAESEKAPREPLEPQVLQDDLPISLKKVLQTSLPEPLRIKLELDGDSHILELLQNRELVPGRPTLVWYQPDGTRVVSEGHTLENCCYQGRVRGYAGSWVSICTCSGLRGLVVLTPERSYTLEQGPGDLQGPPIISRIQDLHLPGHTCALSWRESVHTQKPPEHPLGQRHIRRRRDVVTETKTVELVIVADHSEAQKYRDFQHLLNRTLEVALLLDTFFRPLNVRVALVGLEAWTQRDLVEISPNPAVTLENFLHWRRAHLLPRLPHDSAQLVTGTSFSGPTVGMAIQNSICSPDFSGGVNMDHSTSILGVASSIAHELGHSLGLDHDLPGNSCPCPGPAPAKTCIMEASTDFLPGLNFSNCSRRALEKALLDGMGSCLFERLPSLPPMAAFCGNMFVEPGEQCDCGFLDDCVDPCCDSLTCQLRPGAQCASDGPCCQNCQLRPSGWQCRPTRGDCDLPEFCPGDSSQCPPDVSLGDGEPCAGGQAVCMHGRCASYAQQCQSLWGPGAQPAAPLCLQTANTRGNAFGSCGRNPSGSYVSCTPRDAICGQLQCQTGRTQPLLGSIRDLLWETIDVNGTELNCSWVHLDLGSDVAQPLLTLPGTACGPGLVCIDHRCQRVDLLGAQECRSKCHGHGVCDSNRHCYCEEGWAPPDCTTQLKATSSLTTGLLLSLLVLLVLVMLGASYWYRARLHQRLCQLKGPTCQYRAAQSGPSERPGPPQRALLARGTKSQGPAKPPPPRKPLPADPQGRCPSGDLPGPGAGIPPLVVPSRPAPPPPTVSSLYL

SEQ ID NO: 36391 - protein, 839 aa, Homo sapiens
MRLALLWALGLLGAGSPLPSWPLPNIGGTEEQQAESEKAPREPLEPQVLQDDLPISLKKVLQTSLPEPLRIKLELDGDSHILELLQNRELVPGRPTLVWYQPDGTRVVSEGHTLENCCYQGRVRGYAGSWVSICTCSGLRGLVVLTPERSYTLEQGPGDLQGPPIISRIQDLHLPGHTCALSWRESVHTQKPPEHPLGQRHIRRRRDVVTETKTVELVIVADHSEAQKYRDFQHLLNRTLEVALLLDTFFRPLNVRVALVGLEAWTQRDLVEISPNPAVTLENFLHWRRAHLLPRLPHDSAQLVTGTSFSGPTVGMAIQNSICSPDFSGGVNMDHSTSILGVASSIAHELGHSLGLDHDLPGNSCPCPGPAPAKTCIMEASTDFLPGLNFSNCSRRALEKALLDGMGSCLFERLPSLPPMAAFCGNMFVEPGEQCDCGFLDDCVDPCCDSLTCQLRPGAQCASDGPCCQNCQLRPSGWQCRPTRGDCDLPEFCPGDSSQCPPDVSLGDGEPCAGGQAVCMHGRCASYAQQCQSLWGPGAQPAAPLCLQTANTRGNAFGSCGRNPSGSYVSCTPRDAICGQLQCQTGRTQPLLGSIRDLLWETIDVNGTELNCSWVHLDLGSDVAQPLLTLPGTACGPGLVCIDHRCQRVDLLGAQECRSKCHGHGVCDSNRHCYCEEGWAPPDCTTQLKATSSLTTGLLLSLLVLLVLVMLGASYWYRARLHQRLCQLKGPTCQYRAAQSGPSERPGPPQRALLARGTKQASALSFPAPPSRPLPPDPVSKRLQSQGPAKPPPPRKPLPADPQGRCPSGDLPGPGAGIPPLVVPSRPAPPPPTVSSLYL

SEQ ID NO: 36392 - protein, 863 aa, Homo sapiens
MRLALLWALGLLGAGSPLPSWPLPNIGGTEEQQAESEKAPREPLEPQVLQDDLPISLKKVLQTSLPEPLRIKLELDGDSHILELLQNRELVPGRPTLVWYQPDGTRVVSEGHTLENCCYQGRVRGYAGSWVSICTCSGLRGLVVLTPERSYTLEQGPGDLQGPPIISRIQDLHLPGHTCALSWRESVHTQKPPEHPLGQRHIRRRRDVVTETKTVELVIVADHSEAQKYRDFQHLLNRTLEVALLLDTFFRPLNVRVALVGLEAWTQRDLVEISPNPAVTLENFLHWRRAHLLPRLPHDSAQLVTGTSFSGPTVGMAIQNSICSPDFSGGVNMDHSTSILGVASSIAHELGHSLGLDHDLPGNSCPCPGPAPAKTCIMEASTDFLPGLNFSNCSRRALEKALLDGMGSCLFERLPSLPPMAAFCGNMFVEPGEQCDCGFLDDCVDPCCDSLTCQLRPGAQCASDGPCCQNCQLRPSGWQCRPTRGDCDLPEFCPGDSSQCPPDVSLGDGEPCAGGQAVCMHGRCASYAQQCQSLWGPGAQPAAPLCLQTANTRGNAFGSCGRNPSGSYVSCTPRDAICGQLQCQTGRTQPLLGSIRDLLWETIDVNGTELNCSWVHLDLGSDVAQPLLTLPGTACGPGLVCIDHRCQRVDLLGAQECRSKCHGHGVCDSNRHCYCEEGWAPPDCTTQLKATSSLTTGLLLSLLVLLVLVMLGASYWYRARLHQRLCQLKGPTCQYRAAQSGPSERPGPPQRALLARGTKQASALSFPAPPSRPLPPDPVSKRLQAELADRPNPPTRPLPADPVVRSPKSQGPAKPPPPRKPLPADPQGRCPSGDLPGPGAGIPPLVVPSRPAPPPPTVSSLYL

SEQ ID NO: 36393 - protein, 838 aa, Homo sapiens
MRLALLWALGLLGAGSPLPSWPLPNIGGTEEQQAESEKAPREPLEPQVLQDDLPISLKKVLQTSLPEPLRIKLELDGDSHILELLQNRELVPGRPTLVWYQPDGTRVVSEGHTLENCCYQGRVRGYAGSWVSICTCSGLRGLVVLTPERSYTLEQGPGDLQGPPIISRIQDLHLPGHTCALSWRESVHTQKPPEHPLGQRHIRRRRDVVTETKTVELVIVADHSEAQKYRDFQHLLNRTLEVALLLDTFFRPLNVRVALVGLEAWTQRDLVEISPNPAVTLENFLHWRRAHLLPRLPHDSAQLVTGTSFSGPTVGMAIQNSICSPDFSGGVNMDHSTSILGVASSIAHELGHSLGLDHDLPGNSCPCPGPAPAKTCIMEASTDFLPGLNFSNCSRRALEKALLDGMGSCLFERLPSLPPMAAFCGNMFVEPGEQCDCGFLDDCVDPCCDSLTCQLRPGAQCASDGPCCQNCQLRPSGWQCRPTRGDCDLPEFCPGDSSQCPPDVSLGDGEPCAGGQAVCMHGRCASYAQQCQSLWGPGAQPAAPLCLQTANTRGNAFGSCGRNPSGSYVSCTPRDAICGQLQCQTGRTQPLLGSIRDLLWETIDVNGTELNCSWVHLDLGSDVAQPLLTLPGTACGPGLVCIDHRCQRVDLLGAQECRSKCHGHGVCDSNRHCYCEEGWAPPDCTTQLKATSSLTTGLLLSLLVLLVLVMLGASYWYRARLHQRLCQLKGPTCQYRAAQSGPSERPGPPQRALLARGTKAELADRPNPPTRPLPADPVVRSPKSQGPAKPPPPRKPLPADPQGRCPSGDLPGPGAGIPPLVVPSRPAPPPPTVSSLYL

SEQ ID NO: 36394 - protein, 772 aa, Homo sapiens
MRLALLWALGLLGAGSPLPSWPLPNIGGTEEQQAESEKAPREPLEPQVLQDDLPISLKKVLQTSLPEPLRIKLELDGDSHILELLQNRELVPGRPTLVWYQPDGTRVVSEGHTLENCCYQGRVRGYAGSWVSICTCSGLRGLVVLTPERSYTLEQGPGDLQGPPIISRIQDLHLPGHTCALSWRESVHTQKPPEHPLGQRHIRRRRDVVTETKTVELVIVADHSEAQKYRDFQHLLNRTLEVALLLDTFFRPLNVRVALVGLEAWTQRDLVEISPNPAVTLENFLHWRRAHLLPRLPHDSAQLVTGTSFSGPTVGMAIQNSICSPDFSGGVNMDHSTSILGVASSIAHELGHSLGLDHDLPGNSCPCPGPAPAKTCIMEASTDFLPGLNFSNCSRRALEKALLDGMGSCLFERLPSLPPMAAFCGNMFVEPGEQCDCGFLDDCVDPCCDSLTCQLRPGAQCASDGPCCQNCQLRPSGWQCRPTRGDCDLPEFCPGDSSQCPPDVSLGDGEPCAGGQAVCMHGRCASYAQQCQSLWGPGAQPAAPLCLQTANTRGNAFGSCGRNPSGSYVSCTPRDAICGQLQCQTGRTQPLLGSIRDLLWETIDVNGTELNCSWVHLDLGSDVAQPLLTLPGTACGPGLVCIDHRCQRVDLLGAQECRSKCHGHGVCDSNRHCYCEEGWAPPDCTTQLKATSSLTTGLLLSLLVLLVLVMLGASYWYRARLHQRLCQLKGPTCQYSLRGQPSPHPQGSHCLPTPRAGAHRVTCPAQGLESRP

SEQ ID NO: 36395 - protein, 520 aa, Homo sapiens
MRLALLWALGLLGAGSPLPSWPLPNIGGTEEQQAESEKAPREPLEPQVLQDDLPISLKKVLQTSLPEPLRIKLELDGDSHILELLQNRSFLPGLNFSNCSRRALEKALLDGMGSCLFERLPSLPPMAAFCGNMFVEPGEQCDCGFLDDCVDPCCDSLTCQLRPGAQCASDGPCCQNCQLRPSGWQCRPTRGDCDLPEFCPGDSSQCPPDVSLGDGEPCAGGQAVCMHGRCASYAQQCQSLWGPGAQPAAPLCLQTANTRGNAFGSCGRNPSGSYVSCTPRDAICGQLQCQTGRTQPLLGSIRDLLWETIDVNGTELNCSWVHLDLGSDVAQPLLTLPGTACGPGLVCIDHRCQRVDLLGAQECRSKCHGHGVCDSNRHCYCEEGWAPPDCTTQLKATSSLTTGLLLSLLVLLVLVMLGASYWYRARLHQRLCQLKGPTCQYRAAQSGPSERPGPPQRALLARGTKSQGPAKPPPPRKPLPADPQGRCPSGDLPGPGAGIPPLVVPSRPAPPPPTVSSLYL

SEQ ID NO: 36396 - protein, 862 aa, Homo sapiens
MRLALLWALGLLGAGSPLPSWPLPNIGGTEEQQAESEKAPREPLEPQVLQDDLPISLKKVLQTSLPEPLRIKLELDGDSHILELLQNRELVPGRPTLVWYQPDGTRVVSEGHTLENCCYQGRVRGYAGSWVSICTCSGLRGLVVLTPERSYTLEQGPGDLQGPPIISRIQDLHLPGHTCALSWRESVHTQKPPEHPLGQRHIRRRRDVVTETKTVELVIVADHSEAQKYRDFQHLLNRTLEVALLLDTFFRPLNVRVALVGLEAWTQRDLVEISPNPAVTLENFLHWRRAHLLPRLPHDSAQLVTGTSFSGPTVGMAIQNSICSPDFSGGVNMDHSTSILGVASSIAHELGHSLGLDHDLPGNSCPCPGPAPAKTCIMEASTDFLPGLNFSNCSRRALEKALLDGMGSCLFERLPSLPPMAAFCGNMFVEPGEQCDCGFLDDCVDPCCDSLTCQLRPGAQCASDGPCCQNCQLRPSGWQCRPTRGDCDLPEFCPGDSSQCPPDVSLGDGEPCAGGQAVCMHGRCASYAQQCQSLWGPGAQPAAPLCLQTANTRGNAFGSCGRNPSGSYVSCTPRDAICGQLQCQTGRTQPLLGSIRDLLWETIDVNGTELNCSWVHLDLGSDVAQPLLTLPGTACGPGLVCIDHRCQRVDLLGAQECRSKCHGHGVCDSNRHCYCEEGWAPPDCTTQLKATSSLTTGLLLSLLVLLVLVMLGASYWYRARLHQRLCQLKGPTCQYRAAQSGPSERPGPPQRALLARGTKASALSFPAPPSRPLPPDPVSKRLQAELADRPNPPTRPLPADPVVRSPKSQGPAKPPPPRKPLPADPQGRCPSGDLPGPGAGIPPLVVPSRPAPPPPTVSSLYL

SEQ ID NO: 36397 - protein, 796 aa, Homo sapiens
MRLALLWALGLLGAGSPLPSWPLPNIGGTEEQQAESEKAPREPLEPQVLQDDLPISLKKVLQTSLPEPLRIKLELDGDSHILELLQNRELVPGRPTLVWYQPDGTRVVSEGHTLENCCYQGRVRGYAGSWVSICTCSGLRGLVVLTPERSYTLEQGPGDLQGPPIISRIQDLHLPGHTCALSWRESVHTQKPPEHPLGQRHIRRRRDVVTETKTVELVIVADHSEAQKYRDFQHLLNRTLEVALLLDTFFRPLNVRVALVGLEAWTQRDLVEISPNPAVTLENFLHWRRAHLLPRLPHDSAQLVTGTSFSGPTVGMAIQNSICSPDFSGGVNMDHSTSILGVASSIAHELGHSLGLDHDLPGNSCPCPGPAPAKTCIMEASTDFLPGLNFSNCSRRALEKALLDGMGSCLFERLPSLPPMAAFCGNMFVEPGEQCDCGFLDDCVDPCCDSLTCQLRPGAQCASDGPCCQNCQLRPSGWQCRPTRGDCDLPEFCPGDSSQCPPDVSLGDGEPCAGGQAVCMHGRCASYAQQCQSLWGPGAQPAAPLCLQTANTRGNAFGSCGRNPSGSYVSCTPRDAICGQLQCQTGRTQPLLGSIRDLLWETIDVNGTELNCSWVHLDLGSDVAQPLLTLPGTACGPGLVCIDHRCQRVDLLGAQECRSKCHGHGVCDSNRHCYCEEGWAPPDCTTQLKATSSLTTGLLLSLLVLLVLVMLGASYWYRARLHQRLCQLKGPTCQYRLVLSASRPPLPGRCRLTLCPRDSSLRGQPSPHPQGSHCLPTPRAGAHRVTCPAQGLESRP

SEQ ID NO: 36398 - protein, 824 aa, Homo sapiens
MRLALLWALGLLGAGSPLPSWPLPNIVLSWGVLGPAGGTEEQQAESEKAPREPLEPQVLQDDLPISLKKVLQTSLPEPLRIKLELDGDSHILELLQNRELVPGRPTLVWYQPDGTRVVSEGHTLENCCYQGRVRGYAGSWVSICTCSGLRGLVVLTPERSYTLEQGPGDLQGPPIISRIQDLHLPGHTCALSWRESVHTQKPPEHPLGQRHIRRRRDVVTETKTVELVIVADHSEAQKYRDFQHLLNRTLEVALLLDTFFRPLNVRVALVGLEAWTQRDLVEISPNPAVTLENFLHWRRAHLLPRLPHDSAQLVTGTSFSGPTVGMAIQNSICSPDFSGGVNMDHSTSILGVASSIAHELGHSLGLDHDLPGNSCPCPGPAPAKTCIMEASTDFLPGLNFSNCSRRALEKALLDGMGSCLFERLPSLPPMAAFCGNMFVEPGEQCDCGFLDDCVDPCCDSLTCQLRPGAQCASDGPCCQNCQLRPSGWQCRPTRGDCDLPEFCPGDSSQCPPDVSLGDGEPCAGGQAVCMHGRCASYAQQCQSLWGPGAQPAAPLCLQTANTRGNAFGSCGRNPSGSYVSCTPRDAICGQLQCQTGRTQPLLGSIRDLLWETIDVNGTELNCSWVHLDLGSDVAQPLLTLPGTACGPGLVCIDHRCQRVDLLGAQECRSKCHGHGVCDSNRHCYCEEGWAPPDCTTQLKATSSLTTGLLLSLLVLLVLVMLGASYWYRARLHQRLCQLKGPTCQYRAAQSGPSERPGPPQRALLARGTKSQGPAKPPPPRKPLPADPQGRCPSGDLPGPGAGIPPLVVPSRPAPPPPTVSSLYL

SEQ ID NO: 36399 - protein, 918 aa, Homo sapiens
MPGGAGAARLCLLAFALQPLRPRAAREPGWTRGSEEGSPKLQHELIIPQWKTSESPVREKHPLKAELRVMAEGRELILDLEKNEQLFAPSYTETHYTSSGNPQTTTRKLEDHCFYHGTVRETELSSVTLSTCRGIRGLITVSSNLSYVIEPLPDSKGQHLIYRSEHLKPPPGNCGFEHSKPTTRDWALQFTQQTKKRPRRMKREDLNSMKYVELYLVADYLEFQKNRRDQDATKHKLIEIANYVDKFYRSLNIRIALVGLEVWTHGNMCEVSENPYSTLWSFLSWRRKLLAQKYHDNAQLITGMSFHGTTIGLAPLMAMCSVYQSGGVNMDHSENAIGVAATMAHEMGHNFGMTHDSADCCSASAADGGCIMAAATGHPFPKVFNGCNRRELDRYLQSGGGMCLSNMPDTRMLYGGRRCGNGYLEDGEECDCGEEEECNNPCCNASNCTLRPGAECAHGSCCHQCKLLAPGTLCREQARQCDLPEFCTGKSPHCPTNFYQMDGTPCEGGQAYCYNGMCLTYQEQCQQLWGPGARPAPDLCFEKVNVAGDTFGNCGKDMNGEHRKCNMRDAKCGKIQCQSSEARPLESNAVPIDTTIIMNGRQIQCRGTHVYRGPEEEGDMLDPGLVMTGTKCGYNHICFEGQCRNTSFFETEGCGKKCNGHGVCNNNQNCHCLPGWAPPFCNTPGHGGSIDSGPMPPESVGPVVAGVLVAILVLAVLMLMYYCCRQNNKLGQLKPSALPSKLRQQFSCPFRVSQNSGTGHANPTFKLQTPQGKRKVINTPEILRKPSQPPPRPPPDYLRGGSPPAPLPAHLSRAARNSPGPGSQIERTESSRRPPPSRPIPPAPNCIVSQDFSRPRPPQKALPANPVPGRRSLPRPGGASPLRPPGAGPQQSRPLAALAPKFPEYRSQRAGGMISSKI

SEQ ID NO: 36400 - protein, 920 aa, Homo sapiens
MPGGAGAARLCLLAFALQPLRPRAAREPGWTISRGSEEGSPKLQHELIIPQWKTSESPVREKHPLKAELRVMAEGRELILDLEKNEQLFAPSYTETHYTSSGNPQTTTRKLEDHCFYHGTVRETELSSVTLSTCRGIRGLITVSSNLSYVIEPLPDSKGQHLIYRSEHLKPPPGNCGFEHSKPTTRDWALQFTQQTKKRPRRMKREDLNSMKYVELYLVADYLEFQKNRRDQDATKHKLIEIANYVDKFYRSLNIRIALVGLEVWTHGNMCEVSENPYSTLWSFLSWRRKLLAQKYHDNAQLITGMSFHGTTIGLAPLMAMCSVYQSGGVNMDHSENAIGVAATMAHEMGHNFGMTHDSADCCSASAADGGCIMAAATGHPFPKVFNGCNRRELDRYLQSGGGMCLSNMPDTRMLYGGRRCGNGYLEDGEECDCGEEEECNNPCCNASNCTLRPGAECAHGSCCHQCKLLAPGTLCREQARQCDLPEFCTGKSPHCPTNFYQMDGTPCEGGQAYCYNGMCLTYQEQCQQLWGPGARPAPDLCFEKVNVAGDTFGNCGKDMNGEHRKCNMRDAKCGKIQCQSSEARPLESNAVPIDTTIIMNGRQIQCRGTHVYRGPEEEGDMLDPGLVMTGTKCGYNHICFEGQCRNTSFFETEGCGKKCNGHGVCNNNQNCHCLPGWAPPFCNTPGHGGSIDSGPMPPESVGPVVAGVLVAILVLAVLMLMYYCCRQNNKLGQLKPSALPSKLRQQFSCPFRVSQNSGTGHANPTFKLQTPQGKRKVINTPEILRKPSQPPPRPPPDYLRGGSPPAPLPAHLSRAARNSPGPGSQIERTESSRRPPPSRPIPPAPNCIVSQDFSRPRPPQKALPANPVPGRRSLPRPGGASPLRPPGAGPQQSRPLAALAPKFPEYRSQRAGGMISSKI

SEQ ID NO: 36401 - protein, 638 aa, Homo sapiens
MCEVSENPYSTLWSFLSWRRKLLAQKYHDNAQLITGMSFHGTTIGLAPLMAMCSVYQSGGVNMDHSENAIGVAATMAHEMGHNFGMTHDSADCCSASAADGGCIMAAATGHPFPKVFNGCNRRELDRYLQSGGGMCLSNMPDTRMLYGGRRCGNGYLEDGEECDCGEEEECNNPCCNASNCTLRPGAECAHGSCCHQCKLLAPGTLCREQARQCDLPEFCTGKSPHCPTNFYQMDGTPCEGGQAYCYNGMCLTYQEQCQQLWGPGARPAPDLCFEKVNVAGDTFGNCGKDMNGEHRKCNMRDAKCGKIQCQSSEARPLESNAVPIDTTIIMNGRQIQCRGTHVYRGPEEEGDMLDPGLVMTGTKCGYNHICFEGQCRNTSFFETEGCGKKCNGHGVCNNNQNCHCLPGWAPPFCNTPGHGGSIDSGPMPPESVGPVVAGVLVAILVLAVLMLMYYCCRQNNKLGQLKPSALPSKLRQQFSCPFRVSQNSGTGHANPTFKLQTPQGKRKVINTPEILRKPSQPPPRPPPDYLRGGSPPAPLPAHLSRAARNSPGPGSQIERTESSRRPPPSRPIPPAPNCIVSQKCLLPPAMILRAPQPSGTVVCLVISFNMAFYRSMRIRIEPGIKTKLLVLLVWKQF

SEQ ID NO: 36402 - protein, 955 aa, Homo sapiens
MPGGAGAARLCLLAFALQPLRPRAAREPGWTRGSEEGSPKLQHELIIPQWKTSESPVREKHPLKAELRVMAEGRELILDLEKNEQLFAPSYTETHYTSSGNPQTTTRKLEDHCFYHGTVRETELSSVTLSTCRGIRGLITVSSNLSYVIEPLPDSKGQHLIYRSEHLKPPPGNCGFEHSKPTTRDWALQFTQQTKKRPRRMKREDLNSMKYVELYLVADYLEFQKNRRDQDATKHKLIEIANYVDKFYRSLNIRIALVGLEVWTHGNMCEVSENPYSTLWSFLSWRRKLLAQKYHDNAQLITGMSFHGTTIGLAPLMAMCSVYQSGGVNMDHSENAIGVAATMAHEMGHNFGMTHDSADCCSASAADGGCIMAAATGHPFPKVFNGCNRRELDRYLQSGGGMCLSNMPDTRMLYGGRRCGNGYLEDGEECDCGEEEECNNPCCNASNCTLRPGAECAHGSCCHQCKLLAPGTLCREQARQCDLPEFCTGKSPHCPTNFYQMDGTPCEGGQAYCYNGMCLTYQEQCQQLWGPGARPAPDLCFEKVNVAGDTFGNCGKDMNGEHRKCNMRDAKCGKIQCQSSEARPLESNAVPIDTTIIMNGRQIQCRGTHVYRGPEEEGDMLDPGLVMTGTKCGYNHICFEGQCRNTSFFETEGCGKKCNGHGVCNNNQNCHCLPGWAPPFCNTPGHGGSIDSGPMPPESVGPVVAGVLVAILVLAVLMLMYYCCRQNNKLGQLKPSALPSKLRQQFSCPFRVSQNSGTGHANPTFKLQTPQGKRKVINTPEILRKPSQPPPRPPPDYLRGGSPPAPLPAHLSRAARNSPGPGSQIERTESSRRPPPSRPIPPAPNCIVSQDFSRPRPPQKALPANPVPGRRSLPRPGGASPLRPPGAGPQQSRPLAALAPKVSPREALKVKAGTRGLQGGRCRVEKTKQFMLLVVWTELPEQKPRAKHSCFLVPA

SEQ ID NO: 36403 - protein, 735 aa, Homo sapiens
MWRVLFLLSGLGGLRMDSNFDSLPVQITVPEKIRSIIKEGIESQASYKIVIEGKPYTVNLMQKNFLPHNFRVYSYSGTGIMKPLDQDFQNFCHYQGYIEGYPKSVVMVSTCTGLRGVLQFENVSYGIEPLESSVGFEHVIYQVKHKKADVSLYNEKDIESRDLSFKLQSVEPQQDFAKYIEMHVIVEKQLYNHMGSDTTVVAQKVFQLIGLTNAIFVSFNITIILSSLELWIDENKIATTGEANELLHTFLRWKTSYLVLRPHDVAFLLVYREKSNYVGATFQGKMCDANYAGGVVLHPRTISLESLAVILAQLLSLSMGITYDDINKCQCSGAVCIMNPEAIHFSGVKIFSNCSFEDFAHFISKQKSQCLHNQPRLDPFFKQQAVCGNAKLEAGEECDCGTEQDCALIGETCCDIATCRFKAGSNCAEGPCCENCLFMSKERMCRPSFEECDLPEYCNGSSASCPENHYVQTGHPCGLNQWICIDGVCMSGDKQCTDTFGKEVEFGPSECYSHLNSKTDVSGNCGISDSGYTQCEADNLQCGKLICKYVGKFLLQIPRATIIYANISGHLCIAVEFASDHADSQKMWIKDGTSCGSNKVCRNQRCVSSSYLGYDCTTDKCNDRGVCNNKKHCHCSASYLPPDCSVQSDLWPGGSIDSGNFPPVAIPARLPERRYIENIYHSKPMRWPFFLFIPFFIIFCVLIAIMVKVNFQRKKWRTEDYSSDEQPESESEPKG

SEQ ID NO: 36404 - protein, 716 aa, Homo sapiens
MWRVLFLLSGLGGLRMDSNFDSLPVQITVPEKIRSIIKEGIESQASYKIVIEGKPYTVNLMQKNFLPHNFRVYSYSGTGIMKPLDQDFQNFCHYQGYIEGYPKSVVMVSTCTGLRGVLQFENVSYGIEPLESSVGFEHVIYQVKHKKADVSLYNEKDIESRDLSFKLQSVEYNHMGSDTTVVAQKVFQLIGLTNAIFVSFNITIILSSLELWIDENKIATTGEANELLHTFLRWKTSYLVLRPHDVAFLLVYREKSNYVGATFQGKMCDANYAGGVVLHPRTISLESLAVILAQLLSLSMGITYDDINKCQCSGAVCIMNPEAIHFSGVKIFSNCSFEDFAHFISKQKSQCLHNQPRLDPFFKQQAVCGNAKLEAGEECDCGTEQDCALIGETCCDIATCRFKAGSNCAEGPCCENCLFMSKERMCRPSFEECDLPEYCNGSSASCPENHYVQTGHPCGLNQWICIDGVCMSGDKQCTDTFGKEVEFGPSECYSHLNSKTDVSGNCGISDSGYTQCEADNLQCGKLICKYVGKFLLQIPRATIIYANISGHLCIAVEFASDHADSQKMWIKDGTSCGSNKVCRNQRCVSSSYLGYDCTTDKCNDRGVCNNKKHCHCSASYLPPDCSVQSDLWPGGSIDSGNFPPVAIPARLPERRYIENIYHSKPMRWPFFLFIPFFIIFCVLIAIMVKVNFQRKKWRTEDYSSDEQPESESEPKG

SEQ ID NO: 36405 - protein, 776 aa, Homo sapiens
MVQLHQDTDPQIPKGQPCTLNSSEGGARPAVPHTLFSSALDRWLHNDSFIMAVGEPLVHIRVTLLLLWFGMFLSISGHSQARPSQYFTSPEVVIPLKVISRGRGAKAPGWLSYSLRFGGQRYIVHMRVNKLLFAAHLPVFTYTEQHALLQDQPFIQDDCYYHGYVEGVPESLVALSTCSGGFLGMLQINDLVYEIKPISVSATFEHLVYKIDSDDTQFPPMRCGLTEEKIAHQMELQLSYNFTLKQSSFVGWWTHQRFVELVVVVDNIRYLFSQSNATTVQHEVFNVVNIVDSFYHPLEVDVILTGIDIWTASNPLPTSGDLDNVLEDFSIWKNYNLNNRLQHDVAHLFIKDTQGMKLGVAYVKGICQNPFNTGVDVFEDNRLVVFAITLGHELGHNLGMQHDTQWCVCELQWCIMHAYRKVTTKFSNCSYAQYWDSTISSGLCIQPPPYPGNIFRLKYCGNLVVEEGEECDCGTIRQCAKDPCCLLNCTLHPGAACAFGICCKDCKFLPSGTLCRQQVGECDLPEWCNGTSHQCPDDVYVQDGISCNVNAFCYEKTCNNHDIQCKEIFGQDARSASQSCYQEINTQGNRFGHCGIVGTTYVKCWTPDIMCGRVQCENVGVIPNLIEHSTVQQFHLNDTTCWGTDYHLGMAIPDIGEVKDGTVCGPEKICIRKKCASMVHLSQACQPKTCNMRGICNNKQHCHCNHEWAPPYCKDKGYGGSADSGPPPKNNMEGLNVMGKLRYLSLLCLLPLVAFLLFCLHVLFKKRTKSKEDEEG

SEQ ID NO: 36406 - protein, 722 aa, Homo sapiens
MAVDGTLVYIRVTLLLLWLGVFLSISGYCQAGPSQHFTSPEVVIPLKVISRGRSAKAPGWLSYSLRFGGQKHVVHMRVKKLLVSRHLPVFTYTDDRALLEDQLFIPDDCYYHGYVEAAPESLVVFSACFGGFRGVLKISGLTYEIEPIRHSATFEHLVYKINSNETQFPAMRCGLTEKEVARQQLEFEEAENSALEPKSAGDWWTHAWFLELVVVVNHDFFIYSQSNISKVQEDVFLVVNIVDSMYKQLGTYIILIGIEIWNQGNVFPMTSIEQVLNDFSQWKQISLSQLQHDAAHMFIKNSLISILGLAYVAGICRPPIDCGVDNFQGDTWSLFANTVAHELGHTLGMQHDEEFCFCGERGCIMNTFRVPAEKFTNCSYADFMKTTLNQGSCLHNPPRLGEIFMLKRCGNGVVEREEQCDCGSVQQCEQDACCLLNCTLRPGAACAFGLCCKDCKFMPSGELCRQEVNECDLPEWCNGTSHQCPEDRYVQDGIPCSDSAYCYQKRCNNHDQHCREIFGKDAKSASQNCYKEINSQGNRFGHCGINGTTYLKCHISDVFCGRVQCENVRDIPLLQDHFTLQHTHINGVTCWGIDYHLRMNISDIGEVKDGTVCGPGKICIHKKCVSLSVLSHVCLPETCNMKGICNNKHHCHCGYGWSPPYCQHRGYGGSIDSGPASAKRGVFLPLIVIPSLSVLTFLFTVGLLMYLRQCSGPKETKAHSSG

SEQ ID NO: 36407 - protein, 906 aa, Homo sapiens
MQAAVAVSVPFLLLCVLGTCPPARCGQAGDASLMELEKRKENRFVERQSIVPLRLIYRSGGEDESRHDALDTRVRGDLGGPQLTHVDQASFQVDAFGTSFILDVVLNHDLLSSEYIERHIEHGGKTVEVKGGEHCYYQGHIRGNPDSFVALSTCHGLHGMFYDGNHTYLIEPEENDTTQEDFHFHSVYKSRLFEFSLDDLPSEFQQVNITPSKFILKPRPKRSKRQLRRYPRNVEEETKYIELMIVNDHLMFKKHRLSVVHTNTYAKSVVNMADLIYKDQLKTRIVLVAMETWATDNKFAISENPLITLREFMKYRRDFIKEKSDAVHLFSGSQFESSRSGAAYIGGICSLLKGGGVNEFGKTDLMAVTLAQSLAHNIGIISDKRKLASGECKCEDTWSGCIMGDTGYYLPKKFTQCNIEEYHDFLNSGGGACLFNKPSKLLDPPECGNGFIETGEECDCGTPAECVLEGAECCKKCTLTQDSQCSDGLCCKKCKFQPMGTVCREAVNDCDIRETCSGNSSQCAPNIHKMDGYSCDGVQGICFGGRCKTRDRQCKYIWGQKVTASDKYCYEKLNIEGTEKGNCGKDKDTWIQCNKRDVLCGYLLCTNIGNIPRLGELDGEITSTLVVQQGRTLNCSGGHVKLEEDVDLGYVEDGTPCGPQMMCLEHRCLPVASFNFSTCLSSKEGTICSGNGVCSNELKCVCNRHWIGSDCNTYFPHNDDAKTGITLSGNGVAGTNIIIGIIAGTILVLALILGITAWGYKNYREQRQLPQGDYVKKPGDGDSFYSDIPPGVSTNSASSSKKRSNGLSHSWSERIPDTKHISDICENGRPRSNSWQGNLGGNKKKIRGKRFRPRSNSTETLSPAKSPSSSTGSIASSRKYPYPMPPLPDEDKKVNRQSARLWETSI

SEQ ID NO: 36408 - protein, 899 aa, Homo sapiens [sequence omitted]

SEQ ID NO: 36409 - protein, 859 aa, Homo sapiens
MQAAVAVSVPFLLLCVLGTCPPARCGQAGDASLMELEKRKENRFVERQSIVPLRLIYRSGGEDESRHDALDTRVRGDLGGPQLTHVDQASFQVDAFGTSFILDVVLNHDLLSSEYIERHIEHGGKTVEVKGGEHCYYQGHIRGNPDSFVALSTCHGLHGMFYDGNHTYLIEPEENDTTQEDFHFHSVYKSRLFEFSLDDLPSEFQQVNITPSKFILKPRPKRSKRQLRRYPRNVEEETKYIELMIVNDHLMFKKHRLSVVHTNTYAKSVVNMADLIYKDQLKTRIVLVAMETWATDNKFAISENPLITLREFMKYRRDFIKEKSDAVHLFSGSQFESSRSGAAYIGGICSLLKGGGVNEFGKTDLMAVTLAQSLAHNIGIISDKRKLASGECKCEDTWSGCIMGDTGYYLPKKFTQCNIEEYHDFLNSGGGACLFNKPSKLLDPPECGNGFIETGEECDCGTPAECVLEGAECCKKCTLTQDSQCSDGLCCKKCKFQPMGTVCREAVNDCDIRETCSGNSSQCAPNIHKMDGYSCDGVQGICFGGRCKTRDRQCKYIWGQKVTASDKYCYEKLNIEGTEKGNCGKDKDTWIQCNKRDVLCGYLLCTNIGNIPRLGELDGEITSTLVVQQGRTLNCSGGHVKLEEDVDLGYVEDGTPCGPQMMCLEHRCLPVASFNFSTCLSSKEGTICSGNGVCSNELKCVCNRHWIGSDCNTYFPHNDDAKTGITLSGNGVAGTNIIIGIIAGTILVLALILGITAWGYKNYREQRQLPQGDYVKKPGDGDSFYSDIPPGVSTNSASSSKKRSNGLSHSWSERIPDTKHISDICENGRPRSNSWQGNLGGNKKKIRGKRFRPRSNSTE

SEQ ID NO: 36410 - protein, 870 aa, Homo sapiens
MQAAVAVSVPFLLLCVLGTCPPARCGQAGDASLMELEKRKENRFVERQSIVPLRLIYRSGGEDESRHDALDTRVRGDLGGPQLTHVDQASFQVDAFGTSFILDVVLNHDLLSSEYIERHIEHGGKTVEVKGGEHCYYQGHIRGNPDSFVALSTCHGLHGMFYDGNHTYLIEPEENDTTQEDFHFHSVYKSRLFEFSLDDLPSEFQQVNITPSKFILKPRPKRSKRQLRRYPRNVEEETKYIELMIVNDHLMFKKHRLSVVHTNTYAKSVVNMADLIYKDQLKTRIVLVAMETWATDNKFAISENPLITLREFMKYRRDFIKEKSDAVHLFSGSQFESSRSGAAYIGGICSLLKGGGVNEFGKTDLMAVTLAQSLAHNIGIISDKRKLASGECKCEDTWSGCIMGDTGYYLPKKFTQCNIEEYHDFLNSGGGACLFNKPSKLLDPPECGNGFIETGEECDCGTPAECVLEGAECCKKCTLTQDSQCSDGLCCKKCKFQPMGTVCREAVNDCDIRETCSGNSSQCAPNIHKMDGYSCDGVQGICFGGRCKTRDRQCKYIWGQKVTASDKYCYEKLNIEGTEKGNCGKDKDTWIQCNKRDVLCGYLLCTNIGNIPRLGELDGEITSTLVVQQGRTLNCSGGHVKLEEDVDLGYVEDGTPCGPQMMCLEHRCLPVASFNFSTCLSSKEGTICSGNGVCSNELKCVCNRHWIGSDCNTYFPHNDDAKTGITLSGNGVAGTNIIIGIIAGTILVLALILGITAWGYKNYREQRSNGLSHSWSERIPDTKHISDICENGRPRSNSWQGNLGGNKKKIRGKRFRPRSNSTETLSPAKSPSSSTGSIASSRKYPYPMPPLPDEDKKVNRQSARLWETSI

SEQ ID NO: 36411 - protein, 899 aa, Homo sapiens
MQAAVAVSVPFLLLCVLGTCPPARCGQAGDASLMELEKRKENRFVERQSIVPLRLIYRSGGEDESRHDALDTRVRGDLGGPQLTHVDQASFQVDAFGTSFILDVVLNHDLLSSEYIERHIEHGGKTVEVKGGEHCYYQGHIRGNPDSFVALSTCHGLHGMFYDGNHTYLIEPEENDTTQEDFHFHSVYKSRLFEFSLDDLPSEFQQVNITPSKFILKPRPKRSKRQLRRYPRNVEEETKYIELMIVNDHLMFKKHRLSVVHTNTYAKSVVNMADLIYKDQLKTRIVLVAMETWATDNKFAISENPLITLREFMKYRRDFIKEKSDAVHLFSGSQFESSRSGAAYIGGICSLLKGGGVNEFGKTDLMAVTLAQSLAHNIGIISDKRKLASGECKCEDTWSGCIMGDTGYYLPKKFTQCNIEEYHDFLNSGGGACLFNKPSKLLDPPECGNGFIETGEECDCGTPAECVLEGAECCKKCTLTQDSQCSDGLCCKKCKFQPMGTVCREAVNDCDIRETCSGNSSQCAPNIHKMDGYSCDGVQGICFGGRCKTRDRQCKYIWGQKVTASDKYCYEKLNIEGTEKGNCGKDKDTWIQCNKRDVLCGYLLCTNIGNIPRLGELDGEITSTLVVQQGRTLNCSGGHVKLEEDVDLGYVEDGTPCGPQMMCLEHRCLPVASFNFSTCLSSKEGTICSGNGVCSNELKCVCNRHWIGSDCNTYFPHNDDAKTGITLSGNGVAGTNIIIGIIAGTILVLALILGITAWGYKNYREQRSNGLSHSWSERIPDTKHISDICENGRPRSNSWQGNLGGNKKKIRGKRFRPRSNSTEYLNPWFKRDYNVAKWVEDVNKNTEGPYFRTLSPAKSPSSSTGSIASSRKYPYPMPPLPDEDKKVNRQSARLWETSI

SEQ ID NO: 36412 - protein, 775 aa, Homo sapiens
MLQGLLPVSLLLSVAVSAIKELPGVKKYEVVYPIRLHPLHKREAKEPEQQEQFETELKYKMTINGKIAVLYLKKNKNLLAPGYTETYYNSTGKEITTSPQIMDDCYYQGHILNEKVSDASISTCRGLRGYFSQGDQRYFIEPLSPIHRDGQEHALFKYNPDEKNYDSTCGMDGVLWAHDLQQNIALPATKLVKLKDRKVQEHEKYIEYYLVLDNGEFKRYNENQDEIRKRVFEMANYVNMLYKKLNTHVALVGMEIWTDKDKIKITPNASFTLENFSKWRGSVLSRRKRHDIAQLITATELAGTTVGLAFMSTMCSPYSVGVVQDHSDNLLRVAGTMAHEMGHNFGMFHDDYSCKCPSTICVMDKALSFYIPTDFSSCSRLSYDKFFEDKLSNCLFNAPLPTDIISTPICGNQLVEMGEDCDCGTSEECTNICCDAKTCKIKATFQCALGECCEKCQFKKAGMVCRPAKDECDLPEMCNGKSGNCPDDRFQVNGFPCHHGKGHCLMGTCPTLQEQCTELWGPGTEVADKSCYNRNEGGSKYGYCRRVDDTLIPCKANDTMCGKLFCQGGSDNLPWKGRIVTFLTCKTFDPEDTSQEIGMVANGTKCGDNKVCINAECVDIEKAYKSTNCSSKCKGHAVCDHELQCQCEEGWIPPDCDDSSVVFHFSIVVGVLFPMAVIFVVVAMVIRHQSSREKQKKDQRPLSTTGTRPHKQKRKPQMVKAVQPQEMSQMKPHVYDLPVEGNEPPASFHKDTNALPPTVFKDNPVSTPKDSNPKA

SEQ ID NO: 36413 - protein, 483 aa, Homo sapiens
MEIWTDKDKIKITPNASFTLENFSKWRGSVLSRRKRHDIAQLITATELAGTTVGLAFMSTMCSPYSVGVVQDHSDNLLRVAGTMAHEMGHNFGMFHDDYSCKCPSTICVMDKALSFYIPTDFSSCSRLSYDKFFEDKLSNCLFNAPLPTDIISTPICGNQLVEMGEDCDCGTSEECTNICCDAKTCKIKATFQCALGECCEKCQFKKAGMVCRPAKDECDLPEMCNGKSGNCPDDRFQVNGFPCHHGKGHCLMGTCPTLQEQCTELWGPGTEVADKSCYNRNEGGSKYGYCRRVDDTLIPCKANDTMCGKLFCQGGSDNLPWKGRIVTFLTCKTFDPEDTSQEIGMVANGTKCGDNKVCINAECVDIEKAYKSTNCSSKCKGHAVCDHELQCQCEEGWIPPDCDDSSVVFRRLLHCGWGAVPNGGHFCGGCYGNPAPELQRKAEERSEATIYHWHQATQTEEETPDGKGCSTPRDESDEAPCV

SEQ ID NO: 36414 - protein, 540 aa, Homo sapiens
MLQGLLPVSLLLSVAVSAIKELPGVKKYEVVYPIRLHPLHKREAKEPEQQEQFETELKYKMTINGKIAVLYLKKNKNLLAPGYTETYYNSTGKEITTSPQIMDDCYYQGHILNEKVSDASISTCRGLRGYFSQGDQRYFIEPLSPIHRDGQEHALFKYNPDEKNYDSTCGMDGVLWAHDLQQNIALPATKLVKLKDRKVQEHEKYIEYYLVLDNGEFKRYNENQDEIRKRVFEMANYVNMLYKKLNTHVALVGMEIWTDKDKIKITPNASFTLENFSKWRGSVLSRRKRHDIAQLITATELAGTTVGLAFMSTMCSPYSVGVVQDHSDNLLRVAGTMAHEMGHNFGMFHDDYSCKCPSTICVMDKALSFYIPTDFSSCSRLSYDKFFEDKLSNCLFNAPLPTDIISTPICGNQLVEMGEDCDCGTSEECTNICCDAKTCKIKATFQCALGECCEKCQFKKAGMVCRPAKDECDLPEMCNGKSGNCPDDRFQVNGFPCHHGKGHCLMGTCPTLQEQCTELWGPGRRTNPFPCACAKENHFR

SEQ ID NO: 36415 - protein, 307 aa, Homo sapiens
MANYVNMLYKKLNTHVALVGMEIWTDKDKIKITPNASFTLENFSKWRGSVLSRRKRHDIAQLITATELAGTTVGLAFMSTMCSPYSVGVVQDHSDNLLRVAGTMAHEMGHNFGMFHDDYSCKCPSTICVMDKALSFYIPTDFSSCSRLSYDKFFEDKLSNCLFNAPLPTDIISTPICGNQLVEMGEDCDCGTSEECTNICCDAKTCKIKATFQCALGECCEKCQFKKAGMVCRPAKDECDLPEMCNGKSGNCPDDRFQVNGFPCHHGKGHCLMGTCPTLQEQCTELWGPGRRTNPFPCACAKENHFR

SEQ ID NO: 36416 - protein, 820 aa, Homo sapiens
MKMLLLLHCLGVFLSCSGHIQDEHPQYHSPPDVVIPVRITGTTRGMTPPGWLSYILPFGGQKHIIHIKVKKLLFSKHLPVFTYTDQGAILEDQPFVQNNCYYHGYVEGDPESLVSLSTCFGGFQGILQINDFAYEIKPLAFSTTFEHLVYKMDSEEKQFSTMRSGFMQNEITCRMEFEEIDNSTQKQSSYVGWWIHFRIVEIVVVIDNYLYIRYERNDSKLLEDLYVIVNIVDSILDVIGVKVLLFGLEIWTNKNLIVVDDVRKSVHLYCKWKSENITPRMQHDTSHLFTTLGLRGLSGIGAFRGMCTPHRSCAIVTFMNKTLGTFSIAVAHHLGHNLGMNHDEDTCRCSQPRCIMHEGNPPITKFSNCSYGDFWEYTVERTKCLLETVHTKDIFNVKRCGNGVVEEGEECDCGPLKHCAKDPCCLSNCTLTDGSTCAFGLCCKDCKFLPSGKVCRKEVNECDLPEWCNGTSHKCPDDFYVEDGIPCKERGYCYEKSCHDRNEQCRRIFGAGANTASETCYKELNTLGDRVGHCGIKNATYIKCNISDVQCGRIQCENVTEIPNMSDHTTVHWARFNDIMCWSTDYHLGMKGPDIGEVKDGTECGIDHICIHRHCVHITILNSNCSPAFCNKRGICNNKHHCHCNYLWDPPNCLIKGYGGSVDSGPPPKRKKKKKFCYLCILLLIVLFILLCCLYRLCKKSKPIKKQQDVQTPSAKEEEKIQRRPHELPPQSQPWVMPSQSQPPVTPSQSHPQVMPSQSQPPVTPSQSQPRVMPSQSQPPVMPSQSHPQLTPSQSQPPVTPSQRQPQLMPSQSQPPVTPS

SEQ ID NO: 36417 - protein, 820 aa, Homo sapiens; identical to SEQ ID NO: 36416

SEQ ID NO: 36418 - protein, 820 aa, Homo sapiens; identical to SEQ ID NO: 36416

SEQ ID NO: 36419 - protein, 44 aa, Homo sapiens
MKMLLLLHCLGVFLSCSGHIQDEHPQYHSPPDVVIPVRITGTTR

SEQ ID NO: 36420 - protein, 90 aa, Homo sapiens
MKMLLLLHCLGVFLSCSGHIQDEHPQYHSPPDVVIPVRITGTTRGMTPPGWLSYILPFGGQKHIIHIKVKKLLFSKHLPVFTYTDQGAIL

SEQ ID NO: 36421 - protein, 14 aa, Homo sapiens
MKMLLLLHCLGVFL

SEQ ID NO: 36422 - protein, 820 aa, Homo sapiens; identical to SEQ ID NO: 36416

SEQ ID NO: 36423 - protein, 790 aa, Homo sapiens
MRSVQIFLSQCRLLLLLVPTMLLKSLGEDVIFHPEGEFDSYEVTIPEKLSFRGEVQGVVSPVSYLLQLKGKKHVLHLWPKRLLLPRHLRVFSFTEHGELLEDHPYIPKDCNYMGSVKESLDSKATISTCMGGLRGVFNIDAKHYQIEPLKASPSFEHVVYLLKKEQFGNQVCGLSDDEIEWQMAPYENKARLRDFPGSYKHPKYLELILLFDQSRYRFVNNNLSQVIHDAILLTGIMDTYFQDVRMRIHLKALEVWTDFNKIRVGYPELAEVLGRFVIYKKSVLNARLSSDWAHLYLQRKYNDALAWSFGKVCSLEYAGSVSTLLDTNILAPATWSAHELGHAVGMSHDEQYCQCRGRLNCIMGSGRTGFSNCSYISFFKHISSGATCLNNIPGLGYVLKRCGNKIVEDNEECDCGSTEECQKDRCCQSNCKLQPGANCSIGLCCHDCRFRPSGYVCRQEGNECDLAEYCDGNSSSCPNDVYKQDGTPCKYEGRCFRKGCRSRYMQCQSIFGPDAMEAPSECYDAVNLIGDQFGNCEITGIRNFKKCESANSICGRLQCINVETIPDLPEHTTIISTHLQAENLMCWGTGYHLSMKPMGIPDLGMINDGTSCGEGRVCFKKNCVNSSVLQFDCLPEKCNTRGVCNNRKNCHCMYGWAPPFCEEVGYGGSIDSGPPGLLRGAIPSSIWVVSIIMFRLILLILSVVFVFFRQVIGNHLKPKQEKMPLSKAKTEQEESKTKTVQEESKTKTGQEESEAKTGQEESKAKTGQEESKANIESKRPKAKSVKKQKK

SEQ ID NO: 36424 - protein, 781 aa, Homo sapiens
MRSVQIFLSQCRLLLLLVPTMLLKSLGEDVIFHPEGEFDSYEVTIPEKLSFRGEVQGVVSPVSYLLQLKGKKHVLHLWPKRLLLPRHLRVFSFTEHGELLEDHPYIPKDCNYMGSVKESLDSKATISTCMGGLRGVFNIDAKHYQIEPLKASPSFEHVVYLLKKEQFGNQVCGLSDDEIEWQMAPYENKARLRDFPGSYKHPKYLELILLFDQSRYRFVNNNLSQVIHDAILLTGIMDTYFQDVRMRIHLKALEVWTDFNKIRVGYPELAEVLGRFVIYKKSVLNARLSSDWAHLYLQRKYNDALAWSFGKVCSLEYAGSVSTLLDTNILAPATWSAHELGHAVGMSHDEQYCQCRGRLNCIMGSGRTGFSNCSYISFFKHISSGATCLNNIPGLGYVLKRCGNKIVEDNEECDCGSTEECQKDRCCQSNCKLQPGANCSIGLCCHDCRFRPSGYVCRQEGNECDLAEYCDGNSSSCPNDVYKQDGTPCKYEGRCFRKGCRSRYMQCQSIFGPDAMEAPSECYDAVNLIGDQFGNCEITGIRNFKKCESANSICGRLQCINVETIPDLPEHTTIISTHLQAENLMCWGTGYHLSMKPMGIPDLGMINDGTSCGEGRVCFKKNCVNSSVLQFDCLPEKCNTRGVCNNRKNCHCMYGWAPPFCEEVGYGGSIDSGPPGLLRGAIPSSIWVVSIIMFRLILLILSVVFVFFRQVIGNHLKPKQEKMPLSKAKTEQEESKTKTVQEESKTKTGQEESEAKTGQEESKANIESKRPKAKSVKKQKK

SEQ ID NO: 36425 - protein, 179 aa, Homo sapiens
MGWRPRRARGTPLLLLLLLLLLWPVPGAGVLQGHIPGQPVTPHWVLDGQPWRTVSLEEPVSKPDMGLVALEAEGQELLLELEKNQLLAPGYIETHYGPDGQPVVLAPNHTVRCFHGLWDAPPEGRREARRTRKYLELYIVADHTLFLTRHRNLNHTKQRLLEVANYVDQVVNSAGDAHG

SEQ ID NO: 36426 - protein, 111 aa, Homo sapiens
MGWRPRRARGTPLLLLLLLLLLWPVPGAGVLQGHIPGQPVTPHWVLDGQPWRTVSLEEPVSKPDMGLVALEAEGQELLLELEKNQLLAPGYIETHYGPAQECRDLCCFAHN

SEQ ID NO: 36427 - protein, 787 aa, Homo sapiens
MGWRPRRARGTPLLLLLLLLLLWPVPGAGVLQGHIPGQPVTPHWVLDGQPWRTVSLEEPVSKPDMGLVALEAEGQELLLELEKNHRLLAPGYIETHYGPDGQPVVLAPNHTDHCHYQGRVRGFPDSWVVLCTCSGMSGLITLSRNASYYLRPWPPRGSKDFSTHEIFRMEQLLTWKGTCGHRDPGNKAGMTSLPGGPQSRGRREARRTRKYLELYIVADHTLFLTRHRNLNHTKQRLLEVANYVDQLLRTLDIQVALTGLEVWTERDRSRVTQDANATLWAFLQWRRGLWAQRPHDSAQLLTGRAFQGATVGLAPVEGMCRAESSGGVSTDHSELPIGAAATMAHEIGHSLGLSHDPDGCCVEAAAESGGCVMAAATGHPFPRVFSACSRRQLRAFFRKGGGACLSNAPDPGLPVPPALCGNGFVEAGEECDCGPGQECRDLCCFAHNCSLRPGAQCAHGDCCVRCLLKPAGALCRQAMGDCDLPEFCTGTSSHCPPDVYLLDGSPCARGSGYCWDGACPTLEQQCQQLWGPGSHPAPEACFQVVNSAGDAHGNCGQDSEGHFLPCAGRDALCGKLQCQGGKPSLLAPHMVPVDSTVHLDGQEVTCRGALALPSAQLDLLGLGLVEPGTQCGPRMVCNSNHNCHCAPGWAPPFCDKPGFGGSMDSGPVQAENHDTFLLAMLLSVLLPLLPGAGLAWCCYRLPGAHLQRCSWGCRRDPACSGPKDGPHRDHPLGGVHPMELGPTATGQPWPLDPENSHEPSSHPEKPLPAVSPDPQADQVQMPRSCLW

SEQ ID NO: 36428 - protein, 813 aa, Homo sapiens
MGWRPRRARGTPLLLLLLLLLLWPVPGAGVLQGHIPGQPVTPHWVLDGQPWRTVSLEEPVSKPDMGLVALEAEGQELLLELEKNHRLLAPGYIETHYGPDGQPVVLAPNHTDHCHYQGRVRGFPDSWVVLCTCSGMSGLITLSRNASYYLRPWPPRGSKDFSTHEIFRMEQLLTWKGTCGHRDPGNKAGMTSLPGGPQSRGRREARRTRKYLELYIVADHTLFLTRHRNLNHTKQRLLEVANYVDQLLRTLDIQVALTGLEVWTERDRSRVTQDANATLWAFLQWRRGLWAQRPHDSAQLLTGRAFQGATVGLAPVEGMCRAESSGGVSTDHSELPIGAAATMAHEIGHSLGLSHDPDGCCVEAAAESGGCVMAAATGHPFPRVFSACSRRQLRAFFRKGGGACLSNAPDPGLPVPPALCGNGFVEAGEECDCGPGQECRDLCCFAHNCSLRPGAQCAHGDCCVRCLLKPAGALCRQAMGDCDLPEFCTGTSSHCPPDVYLLDGSPCARGSGYCWDGACPTLEQQCQQLWGPGSHPAPEACFQVVNSAGDAHGNCGQDSEGHFLPCAGRDALCGKLQCQGGKPSLLAPHMVPVDSTVHLDGQEVTCRGALALPSAQLDLLGLGLVEPGTQCGPRMVCQSRRCRKNAFQELQRCLTACHSHGVCNSNHNCHCAPGWAPPFCDKPGFGGSMDSGPVQAENHDTFLLAMLLSVLLPLLPGAGLAWCCYRLPGAHLQRCSWGCRRDPACSGPKDGPHRDHPLGGVHPMELGPTATGQPWPLDPENSHEPSSHPEKPLPAVSPDPQADQVQMPRSCLW

SEQ ID NO: 36429 - protein, 138 aa, Homo sapiens
MGWRPRRARGTPLLLLLLLLLLWPVPGAGVLQGHIPGQPVTPHWVLDGQPWRTVSLEEPVSKPDMGLVALEAEGQELLLELEKNHRLLAPGYIETHYGPDGQPVVLAPNHTVRCFHGLWDAPPEVPPHHSYPYSSLHS

SEQ ID NO: 36430 - protein, 180 aa, Homo sapiens
MGWRPRRARGTPLLLLLLLLLLWPVPGAGVLQGHIPGQPVTPHWVLDGQPWRTVSLEEPVSKPDMGLVALEAEGQELLLELEKNQLLAPGYIETHYGPDGQPVVLAPNHTVRCFHGLWDAPPEGRREARRTRKYLELYIVADHTLFLTRHRNLNHTKQRLLEVANYVDQECRDLCCFAHN

SEQ ID NO: 36431 - protein, 812 aa, Homo sapiens
MGWRPRRARGTPLLLLLLLLLLWPVPGAGVLQGHIPGQPVTPHWVLDGQPWRTVSLEEPVSKPDMGLVALEAEGQELLLELEKNHRLLAPGYIETHYGPDGQPVVLAPNHTDHCHYQGRVRGFPDSWVVLCTCSGMSGLITLSRNASYYLRPWPPRGSKDFSTHEIFRMEQLLTWKGTCGHRDPGNKAGMTSLPGGPQSRGRREARRTRKYLELYIVADHTLFLTRHRNLNHTKQRLLEVANYVDQLLRTLDIQVALTGLEVWTERDRSRVTQDANATLWAFLQWRRGLWAQRPHDSAQLLTGRAFQGATVGLAPVEGMCRAESSGGVSTDHSELPIGAAATMAHEIGHSLGLSHDPDGCCVEAAAESGGCVMAAATGHPFPRVFSACSRRQLRAFFRKGGGACLSNAPDPGLPVPPALCGNGFVEAGEECDCGPGQECRDLCCFAHNCSLRPGAQCAHGDCCVRCLLKPAGALCRQAMGDCDLPEFCTGTSSHCPPDVYLLDGSPCARGSGYCWDGACPTLEQQCQQLWGPGSHPAPEACFQVVNSAGDAHGNCGQDSEGHFLPCAGRDALCGKLQCQGGKPSLLAPHMVPVDSTVHLDGQEVTCRGALALPSAQLDLLGLGLVEPGTQCGPRMVCQSRRCRKNAFQELQRCLTACHSHGVCNSNHNCHCAPGWAPPFCDKPGFGGSMDSGPVQAENHDTFLLAMLLSVLLPLLPGAGLAWCCYRLPGAHLQRCSWGCRRDPACSGPKDGPHRDHPLGGVHPMELGPTATGQPWPLDPENSHEPSSHPEKPLPAVSPDPQDQVQMPRSCLW

SEQ ID NO: 36432 - protein, 151 aa, Homo sapiens
MGWRPRRARGTPLLLLLLLLLLWPVPGAGVLQGHIPGQPVTPHWVLDGQPWRTVSLEEPVSKPDMGLVALEAEGQELLLELEKNQDALCGKLQCQGGKPSLLAPHMVPVDSTVHLDGQEVTCRGALALPSAQLDLLGLGLVEPGTQCGPRM

SEQ ID NO: 36433 - protein, 692 aa, Homo sapiens
MGWRPRRARGTPLLLLLLLLLLWPVPGAGVLQGHIPGQPVTPHWVLDGQPWRTVSLEEPVSKPDMGLVALEAEGQELLLELEKNHRLLAPGYIETHYGPDGQPVVLAPNHTDHCHYQGRVRGFPDSWVVLCTCSGMSGLITLSRNASYYLRPWPPRGSKDFSTHEIFRMEQLLTWKGTCGHRDPGNKAGMTSLPGGPQSRGRREARRTRKYLELYIVADHTLFLTRHRNLNHTKQRLLEVANYVDQLLRTLDIQVALTGLEVWTERDRSRRQLRAFFRKGGGACLSNAPDPGLPVPPALCGNGFVEAGEECDCGPGQECRDLCCFAHNCSLRPGAQCAHGDCCVRCLLKPAGALCRQAMGDCDLPEFCTGTSSHCPPDVYLLDGSPCARGSGYCWDGACPTLEQQCQQLWGPGSHPAPEACFQVVNSAGDAHGNCGQDSEGHFLPCAGRDALCGKLQCQGGKPSLLAPHMVPVDSTVHLDGQEVTCRGALALPSAQLDLLGLGLVEPGTQCGPRMVCQSRRCRKNAFQELQRCLTACHSHGVCNSNHNCHCAPGWAPPFCDKPGFGGSMDSGPVQAENHDTFLLAMLLSVLLPLLPGAGLAWCCYRLPGAHLQRCSWGCRRDPACSGPKDGPHRDHPLGGVHPMELGPTATGQPWPLDPENSHEPSSHPEKPLPAVSPDPQDQVQMPRSCLW

SEQ ID NO: 36434 - protein, 173 aa, Homo sapiens [sequence omitted]

SEQ ID NO: 36435 - protein, 96 aa, Homo sapiens
MGWRPRRARGTPLLLLLLLLLLWPVPGAGVLQGHIPGQPVTPHWVLDGQPWRTVSLEEPVSKPDMGLVALEAEGQELLLELEKNQFAIATITATVL

SEQ ID NO: 36436 - protein, 754 aa, Homo sapiens
MLPGCIFLMILLIPQVKEKFILGVEGQQLVRPKKLPLIQKRDTGHTHDDDILKTYEEELLYEIKLNRKTLVLHLLRSREFLGSNYSETFYSMKGEAFTRHPQIMDHCFYQGSIVHEYDSAASISTCNGLRGFFRINDQRYLIEPVKYSDEGEHLVFKYNLRVPYGANYSCTELNFTRKTVPGDNESEEDSKIKGIHDEKYVELFIVADDTVYRRNGHPHNKLRNRIWGMVNFVNMIYKTLNIHVTLVGIEIWTHEDKIELYSNIETTLLRFSFWQEKILKTRKDFDHVVLLSGKWLYSHVQGISYPGGMCLPYYSTSIIKDLLPDTNIIANRMAHQLGHNLGMQHDEFPCTCPSGKCVMDSDGSIPALKFSKCSQNQYHQYLKDYKPTCMLNIPFPYNFHDFQFCGNKKLDEGEECDCGPAQECTNPCCDAHTCVLKPGFTCAEGECCESCQIKKAGSICRPAKDECDFPEMCTGHSPACPKDQFRVNGFPCKNSEGYCFMGKCPTREDQCSELFDDEAIESHDICYKMNTKGNKFGYCKNKENRFLPCEEKDVRCGKIYCTGGELSSLLGEDKTYHLKDPQKNATVKCKTIFLYHDSTDIGLVASGTKCGEGMVCNNGECLNMEKVYISTNCPSQCNENPVDGHGLQCHCEEGQAPVACEETLHVTNITILVVVLVLVIVGIGVLILLVRYRKCIKLKQVQSPPTETLGVENKGYFGDEQQIRTEPILPEIHFLNKPASKDSRGIADPNQSAK

SEQ ID NO: 36437 - protein, 551 aa, Homo sapiens
VCPRSYFLEGRGSYSFLSLFSTSPAPYRRNGHPHNKLRNRIWGMVNFVNMIYKTLNIHVTLVGIEIWTHEDKIELYSNIETTLLRFSFWQEKILKTRKDFDHVVLLSGKWLYSHVQGISYPGGMCLPYYSTSIIKDLLPDTNIIANRMAHQLGHNLGMQHDEFPCTCPSGKCVMDSDGSIPALKFSKCSQNQYHQYLKDYKPTCMLNIPFPYNFHDFQFCGNKKLDEGEECDCGPAQECTNPCCDAHTCVLKPGFTCAEGECCESCQIKKAGSICRPAKDECDFPEMCTGHSPACPKDQFRVNGFPCKNSEGYCFMGKCPTREDQCSELFDDEAIESHDICYKMNTKGNKFGYCKNKENRFLPCEEKDVRCGKIYCTGGELSSLLGEDKTYHLKDPQKNATVKCKTIFLYHDSTDIGLVASGTKCGEGMVCNNGECLNMEKVYISTNCPSQCNENPVDGHGLQCHCEEGQAPVACEETLHVTNITILVVVLVLVIVGIGVLILLVRYRKCIKLKQVQSPPTETLGVENKGYFGDEQQIRTEPILPEIHFLN

SEQ ID NO: 36438 - protein, 824 aa, Homo sapiens
MRGLGLWLLGAMMLPAIAPSRPWALMEQYEVVLPWRLPGPRVRRALPSHLGLHPERVSYVLGATGHNFTLHLRKNRDLLGSGYTETYTAANGSEVTEQPRGQDHCFYQGHVEGYPDSAASLSTCAGLRGFFQVGSDLHLIEPLDEGGEGGRHAVYQAEHLLQTAGTCGVSDDSLGSLLGPRTAAVFRPRPGDSLPSRETRYVELYVVVDNAEFQMLGSEAAVRHRVLEVVNHVDKLYQKLNFRVVLVGLEIWNSQDRFHVSPDPSVTLENLLTWQARQRTRRHLHDNVQLITGVDFTGTTVGFARVSAMCSHSSGAVNQDHSKNPVGVACTMAHEMGHNLGMDHDENVQGCRCQERFEAGRCIMAGSIGSSFPRMFSDCSQAYLESFLERPQSVCLANAPDLSHLVGGPVCGNLFVERGEQCDCGPPEDCRNRCCNSTTCQLAEGAQCAHGTCCQECKVKPAGELCRPKKDMCDLEEFCDGRHPECPEDAFQENGTPCSGGYCYNGACPTLAQQCQAFWGPGGQAAEESCFSYDILPGCKASRYRADMCGVLQCKGGQQPLGRAICIVDVCHALTTEDGTAYEPVPEGTRCGPEKVCWKGRCQDLHVYRSSNCSAQCHNHGVCNHKQECHCHAGWAPPHCAKLLTEVHAASGSLPVFVVVVLVLLAVVLVTLAGIIVYRKARSRILSRNVAPKTTMGRSNPLFHQAASRVPAKGGAPAPSRGPQELVPTTHPGQPARHPASSVALKRPPPAPPVTVSSPPFPVPVYTRQAPKQVIKPTFAPPVPPVKPGAGAANPGPAEGAVGPKVALKPPIQRKQGAGAPTAP

SEQ ID NO: 36439 - protein, 733 aa, Homo sapiens
MRGLGLWLLGAMMLPGPAPREGELRPWGHRAQLHPPPAEEQGPAGLRLHRDLYGCQWLRGDGAASRAGPLLLPGPRRGVPGLSRQPQHLCRPQVGSDLHLIEPLDEGGEGGRHAVYQAEHLLQTAGTCGVSDDSLGSLLGPRTAAVFRPRPGDSLPSRETRYVELYVVVDNAEFQMLGSEAAVRHRVLEVVNHVDKLYQKLNFRVVLVGLEIWNSQDRFHVSPDPSVTLENLLTWQARQRTRRHLHDNVQLITGVDFTGTTVGFARVSAMCSHSSGAVNQDHSKNPVGVACTMAHEMGHNLGMDHDENVQGCRCQERFEAGRCIMAGSIGSSFPRMFSDCSQAYLESFLERPQSVCLANAPDLSHLVGGPVCGNLFVERGEQCDCGPPEDCRNRCCNSTTCQLAEGAQCAHGTCCQECKVKPAGELCRPKKDMCDLEEFCDGRHPECPEDAFQENGTPCSGGYCYNGACPTLAQQCQAFWGPGGQAAEESCFSYDILPGCKASRYRADMCGVLQCKGGQQPLGRAICIVDVCHALTTEDGTAYEPVPEGTRCGPEKVCNHKQECHCHAGWAPPHCAKLLTEVHAASGSLPVFVVVVLVLLAVVLVTLAGIIVYRKARSRILSRNVAPKTTMGRSNPLFHQAASRVPAKGGAPAPSRGPQELVPTTHPGQPARHPASSVALKRPPPAPPVTVSSPPFPVPVYTRQAPKQGAVGPKVALKPPIQRKQGAGAPTAP

SEQ ID NO: 36440 - protein, 742 aa, Homo sapiens
MRGLGLWLLGAMMLPAIAPSRPWALMEQYEVVLPWRLPGPRVRRALPSHLGLHPERVSYVLGATGHNFTLHLRKNRDLLGSGYTETYTAANGSEVTEQPRGQDHCFYQGHVEGYPDSAASLSTCAGLRGFFQVGSDLHLIEPLDEGGEGGRHAVYQAEHLLQTAGTCGVSDDSLGSLLGPRTAAVFRPRPGDSLPSRETRYVELYVVVDNAEFQMLGSEAAVRHRVLEVVNHVDKLYQKLNFRVVLVGLEIWNSQDRFHVSPDPSVTLENLLTWQARQRTRRHLHDNVQLITGVDFTGTTVGFARVSAMCSHSSGAVNQDHSKNPVGVACTMAHEMGHNLGMDHDENVQGCRCQERFEAGRCIMAGSIGSSFPRMFSDCSQAYLESFLERPQSVCLANAPDLSHLVGGPVCGNLFVERGEQCDCGPPEDCRNRCCNSTTCQLAEGAQCAHGTCCQECKVKPAGELCRPKKDMCDLEEFCDGRHPECPEDAFQENGTPCSGGYCYNGACPTLAQQCQAFWGPGGQAAEESCFSYDILPGCKASRYRADMCGVLQCKGGQQPLGRAICIVDVCHALTTEDGTAYEPVPEGTRCGPEKVCWKGRCQDLHVYRSSNCSAQCHNHGVCNHKQECHCHAGWAPPHCAKLLTEVHAGCQPRAGQGRGSSPIQGPPRAGPHHPPGPARPTPGLLGGSEEAAPCSSGHCVQPTLPSSCLHPAGTKAGHQANVRTPSAPSQTRGWCGQPWSS

SEQ ID NO: 36441 - protein, 819 aa, Homo sapiens
MGSGARFPSGTLRVRWLLLLGLVGPVLGAARPGFQQTSHLSSYEIITPWRLTRERREAPRPYSKQVSYVIQAEGKEHIIHLERNKDLLPEDFVVYTYNKEGTLITDHPNIQNHCHYRGYVEGVHNSSIALSDCFGLRGLLHLENASYGIEPLQNSSHFEHIIYRMDDVYKEPLKCGVSNKDIEKETAKDEEEEPPSMTQLLRRRRAVLPQTRYVELFIVVDKERYDMMGRNQTAVREEMILLANYLDSMYIMLNIRIVLVGLEIWTNGNLINIVGGAGDVLGNFVQWREKFLITRRRHDSAQLVLKKGFGGTAGMAFVGTVCSRSHAGGINVFGQITVETFASIVAHELGHNLGMNHDDGRDCSCGAKSCIMNSGASGSRNFSSCSAEDFEKLTLNKGGNCLLNIPKPDEAYSAPSCGNKLVDAGEECDCGTPKECELDPCCEGSTCKLKSFAECAYGDCCKDCRFLPGGTLCRGKTSECDVPEYCNGSSQFCQPDVFIQNGYPCQNNKAYCYNGMCQYYDAQCQVIFGSKAKAAPKDCFIEVNSKGDRFGNCGFSGNEYKKCATGNALCGKLQCENVQEIPVFGIVPAIIQTPSRGTKCWGVDFQLGSDVPDPGMVNEGTKCGAGKICRNFQCVDASVLNYDCDVQKKCHGHGVCNSNKNCHCENGWAPPNCETKGYGGSVDSGPTYNEMNTALRDGLLVFFFLIVPLIVCAIFIFIKRDQLWRSYFRKKRSQTYESDGKNQANPSRQPGSVPRHVSPVTPPREVPIYANRFAVPTYAAKQPQQFPSRPPPPQPKVSSQGNLIPARPAPAPPLYSSLT

SEQ ID NO: 36442 - protein, 967 aa, Homo sapiens
MQRAVPEGFGRRKLGSDMGNAERAPGSRSFGPVPTLLLLAAALLAVSDALGRPSEEDEELVVPELERAPGHGTTRLRLHAFDQQLDLELRPDSSFLAPGFTLQNVGRKSGSETPLPETDLAHCFYSGTVNGDPSSAAALSLCEGVRGAFYLLGEAYFIQPLPAASERLATAAPGEKPPAPLQFHLLRRNRQGDVGGTCGVVDDEPRPTGKAETEDEDEGTEGEDEGAQWSPQDPALQGVGQPTGTGSIRKKRFVSSHRYVETMLVADQSMAEFHGSGLKHYLLTLFSVAARLYKHPSIRNSVSLVVVKILVIHDEQKGPEVTSNAALTLRNFCNWQKQHNPPSDRDAEHYDTAILFTRQDLCGSQTCDTLGMADVGTVCDPSRSCSVIEDDGLQAAFTTAHELGHVFNMPHDDAKQCASLNGVNQDSHMMASMLSNLDHSQPWSPCSAYMITSFLDNGHGECLMDKPQNPIQLPGDLPGTSYDANRQCQFTFGEDSKHCPDAASTCSTLWCTGTSGGVLVCQTKHFPWADGTSCGEGKWCINGKCVNKTDRKHFDTPFHGSWGMWGPWGDCSRTCGGGVQYTMRECDNPVPKNGGKYCEGKRVRYRSCNLEDCPDNNGKTFREEQCEAHNEFSKASFGSGPAVEWIPKYAGVSPKDRCKLICQAKGIGYFFVLQPKVVDGTPCSPDSTSVCVQGQCVKAGCDRIIDSKKKFDKCGVCGGNGSTCKKISGSVTSAKPGYHDIITIPTGATNIEVKQRNQRGSRNNGSFLAIKAADGTYILNGDYTLSTLEQDIMYKGVVLRYSGSSAALERIRSFSPLKEPLTIQVLTVGNALRPKIKYTYFVKKKKESFNAIPTFSAWVIEEWGECSKSCELGWQRRLVECRDINGQPASECAKEVKPASTRPCADHPCPQWQLGEWSSCSKTCGKGYKKRSLKCLSHDGGVLSHESCDPLKKPKHFIDFCTMAECS

SEQ ID NO: 36443 - protein, 1103 aa, Homo sapiens
MAPACQILRWALALGLGLMFEVTHAFRSQDEFLSSLESYEIAFPTRVDHNGALLAFSPPPPRRQRRGTGATAESRLFYKVASPSTHFLLNLTRSSRLLAGHVSVEYWTREGLAWQRAARPHCLYAGHLQGQASTSHVAISTCGGLHGLIVADEEEYLIEPLHGGPKGSRSPEESGPHVVYKRSSLRHPHLDTACGVRDEKPWKGRPWWLRTLKPPPARPLGNETERGQPGLKRSVSRERYVETLVVADKMMVAYHGRRDVEQYVLAIMNIVAKLFQDSSLGSTVNILVTRLILLTEDQPTLEITHHAGKSLDSFCKWQKSIVNHSGHGNAIPENGVANHDTAVLITRYDICIYKNKPCGTLGLAPVGGMCERERSCSVNEDIGLATAFTIAHEIGHTFGMNHDGVGNSCGARGQDPAKLMAAHITMKTNPFVWSSCSRDYITSFLDSGLGLCLNNRPPRQDFVYPTVAPGQAYDADEQCRFQHGVKSRQCKYGEVCSELWCLSKSNRCITNSIPAAEGTLCQTHTIDKGWCYKRVCVPFGSRPEGVDGAWGPWTPWGDCSRTCGGGVSSSSRHCDSPRPTIGGKYCLGERRRHRSCNTDDCPPGSQDFREVQCSEFDSIPFRGKFYKWKTYRGGGVKACSLTCLAEGFNFYTERAAAVVDGTPCRPDTVDICVSGECKHVGCDRVLGSDLREDKCRVCGGDGSACETIEGVFSPASPGAGYEDVVWIPKGSVHIFIQDLNLSLSHLALKGDQESLLLEGLPGTPQPHRLPLAGTTFQLRQGPDQVQSLEALGPINASLIVMVLARTELPALRYRFNAPIARDSLPPYSWHYAPWTKCSAQCAGGSQVQAVECRNQLDSSAVAPHYCSAHSKLPKRQRACNTEPCPPDWVVGNWSLCSRSCDAGVRSRSVVCQRRVSAAEEKALDDSACPQPRPPVLEACHGPTCPPEWAALDWSECTPSCGPGLRHRVVLCKSADHRATLPPAHCSPAAKPPATMRCNLRRCPPARWVAGEWGECSAQCGVGQRQRSVRCTSHTGQASHECTEALRPPTTQQCEAKCDSPTPGDGPEECKDVNKVAYCPLVLKFQFCSRAYFRQMCCKTCHGH

SEQ ID NO: 36444 - protein, 847 aa, Homo sapiens
QDDGGLSRAPGCGAVCPGHHEHCQVAKLFQDSSLGSTVNILVTRLILLTEDQPTLEITHHAGKSLDSFCKWQKSIVNHSGHGNAIPENGVANHDTAVLITRYDICIYKNKPCGTLGLAPVGGMCERERSCSVNEDIGLATAFTIAHEIGHTFGMNHDGVGNSCGARGQDPAKLMAAHITMKTNPFVWSSCSRDYITSFLDSGLGLCLNNRPPRQDFVYPTVAPGQAYDADEQCRFQHGVKSRQCKYGEVCSELWCLSKSNRCITNSIPAAEGTLCQTHTIDKGWCYKRVCVPFGSRPEGVDGAWGPWTPWGDCSRTCGGGVSSSSRHCDSPRPTIGGKYCLGERRRHRSCNTDDCPPGSQDFREVQCSEFDSIPFRGKFYKWKTYRGGGVKACSLTCLAEGFNFYTERAAAVVDGTPCRPDTVDICVSGECKHVGCDRVLGSDLREDKCRVCGGDGSACETIEGVFSPASPGAGYEDVVWIPKGSVHIFIQDLNLSLSHLALKGDQESLLLEGLPGTPQPHRLPLAGTTFQLRQGPDQVQSLEALGPINASLIVMVLARTELPALRYRFNAPIARDSLPPYSWHYAPWTKCSAQCAGGSQVQAVECRNQLDSSAVAPHYCSAHSKLPKRQRACNTEPCPPDWVVGNWSLCSRSCDAGVRSRSVVCQRRVSAAEEKALDDSACPQPRPPVLEACHGPTCPPEWAALDWSEVSRPLPSRPLGCPGGVSTETPLRGLQVSCPLLTSHWGSTLSTKRPFQLQCTPSCGPGLRHRVVLCKSADHRATLPPAHCSPAAKPPATMRCNLRRCPPARWVAGEWGECSAQCGVGQRQRSVRCTSHTGQASHECTEA

SEQ ID NO: 36445 - protein, 1509 aa, Homo sapiens
MPCAQRSWLANLSVVAQLLNFGALCYGRQPQPGPVRFPDRRQEHFIKGLPEYHVVGPVRVDASGHFLSYGLHYPITSSRRKRDLDGSEDWVYYRISHEEKDLFFNLTVNQGFLSNSYIMEKRYGNLSHVKMMASSAPLCHLSGTVLQQGTRVGTAALSACHGLTGFFQLPHGDFFIEPVKKHPLVEGGYHPHIVYRRQKVPETKEPTCGLKDSVNISQKQELWREKWERHNLPSRSLSRRSISKERWVETLVVADTKMIEYHGSENVESYILTIMNMVTGLFHNPSIGNAIHIVVVRLILLEEEEQGLKIVHHAEKTLSSFCKWQKSINPKSDLNPVHHDVAVLLTRKDICAGFNRPCETLGLSHLSGMCQPHRSCNINEDSGLPLAFTIAHELGHSFGIQHDGKENDCEPVGRHPYIMSRQLQYDPTPLTWSKCSEEYITRFLDRGWGFCLDDIPKKKGLKSKVIAPGVIYDVHHQCQLQYGPNATFCQEVENVCQTLWCSVKGFCRSKLDAAADGTQCGEKKWCMAGKCITVGKKPESIPGGWGRWSPWSHCSRTCGAGVQSAERLCNNPEPKFGGKYCTGERKRYRLCNVHPCRSEAPTFRQMQCSEFDTVPYKNELYHWFPIFNPGYVDIGLIPKGARDIRVMEIEGAGNFLAIRSEDPEKYYLNGGFIIQWNGNYKLAGTVFQYDRKGDLEKLMATGPTNESVWIQLLFQVTNPGIKYEYTIQKDGLDNDVEQQMYFWQYGHWTECSVTCGTGIRRQTAHCIKKGRGMVKATFCDPETQPNGRQKKCHEKACPPRWWAGEWEACSATCGPHGEKKRTVLCIQTMVSDEQALPPTDCQHLLKPKTLLSCNRDILCPSDWTVGNWSECSVSCGGGVRIRSVTCAKNHDEPCDVTRKPNSRALCGLQQCPSSRRVLKPNKGTISNGKNPPTLKPVPPPTSRPRMLTTPTGPESMSTSTPAISSPSPTTASKEGDLGGKQWQDSSTQPELSSRYLISTGSTSQPILTSQSLSIQPSEENVSSSDTGPTSEGGLVATTTSGSGLSSSRNPITWPVTPFYNTLTKGPEMEIHSGSGEEREQPEDKDESNPVIWTKIRVPGNDAPVESTEMPLAPPLTPDLSRESWWPPFSTVMEGLLPSQRPTTSETGTPRVEGMVTEKPANTLLPLGGDHQPEPSGKTANRNHLKLPNNMNQTKSSEPVLTEEDATSLITEGFLLNASNYKQLTNGHGSAHWIVGNWSECSTTCGLGAYWRRVECSTQMDSDCAAIQRPDPAKRCHLRPCAGWKVGNWSKCSRNCSGGFKIREIQCVDSRDHRNLRPFHCQFLAGIPPPLSMSCNPEPCEAWQVEPWSQCSRSCGGGVQERGVFCPGGLCDWTKRPTSTMSCNEHLCCHWATGNWDLCSTSCGGGFQKRTVQCVPSEGNKTEDQDQCLCDHKPRPPEFKKCNQQACKKSADLLCTKDKLSASFCQTLKAMKKCSVPTVRAECCFSCPQTHITHTQRQRRQRLLQKSKEL

SEQ ID NO: 36446 - protein, 1594 aa, Homo sapiens
MPCAQRSWLANLSVVAQLLNFGALCYGRQPQPGPVRFPDRRQEHFIKGLPEYHVVGPVRVDASGHFLSYGLHYPITSSRRKRDLDGSEDWVYYRISHEEKDLFFNLTVNQGFLSNSYIMEKRYGNLSHVKMMASSAPLCHLSGTVLQQGTRVGTAALSACHGLTGFFQLPHGDFFIEPVKKHPLVEGGYHPHIVYRRQKVPETKEPTCGLKDSVNISQKQELWREKWERHNLPSRSLSRRSISKERWVETLVVADTKMIEYHGSENVESYILTIMNMVTGLFHNPSIGNAIHIVVVRLILLEEEEQGLKIVHHAEKTLSSFCKWQKSINPKSDLNPVHHDVAVLLTRKDICAGFNRPCETLGLSHLSGMCQPHRSCNINEDSGLPLAFTIAHELGHSFGIQHDGKENDCEPVGRHPYIMSRQLQYDPTPLTWSKCSEEYITRFLDRGWGFCLDDIPKKKGLKSKVIAPGVIYDVHHQCQLQYGPNATFCQEVENVCQTLWCSVKGFCRSKLDAAADGTQCGEKKWCMAGKCITVGKKPESIPGGWGRWSPWSHCSRTCGAGVQSAERLCNNPEPKFGGKYCTGERKRYRLCNVHPCRSEAPTFRQMQCSEFDTVPYKNELYHWFPIFNPAHPCELYCRPIDGQFSEKMLDAVIDGTPCFEGGNSRNVCINGICKMVGCDYEIDSNATEDRCGVCLGDGSSCQTVRKMFKQKEGSGYVDIGLIPKGARDIRVMEIEGAGNFLAIRSEDPEKYYLNGGFIIQWNGNYKLAGTVFQYDRKGDLEKLMATGPTNESVWIQLLFQVTNPGIKYEYTIQKDGLDNDVEQQMYFWQYGHWTECSVTCGTGIRRQTAHCIKKGRGMVKATFCDPETQPNGRQKKCHEKACPPRWWAGEWEACSATCGPHGEKKRTVLCIQTMVSDEQALPPTDCQHLLKPKTLLSCNRDILCPSDWTVGNWSECSVSCGGGVRIRSVTCAKNHDEPCDVTRKPNSRALCGLQQCPSSRRVLKPNKGTISNGKNPPTLKPVPPPTSRPRMLTTPTGPESMSTSTPAISSPSPTTASKEGDLGGKQWQDSSTQPELSSRYLISTGSTSQPILTSQSLSIQPSEENVSSSDTGPTSEGGLVATTTSGSGLSSSRNPITWPVTPFYNTLTKGPEMEIHSGSGEEREQPEDKDESNPVIWTKIRVPGNDAPVESTEMPLAPPLTPDLSRESWWPPFSTVMEGLLPSQRPTTSETGTPRVEGMVTEKPANTLLPLGGDHQPEPSGKTANRNHLKLPNNMNQTKSSEPVLTEEDATSLITEGFLLNASNYKQLTNGHGSAHWIVGNWSECSTTCGLGAYWRRVECSTQMDSDCAAIQRPDPAKRCHLRPCAGWKVGNWSKCSRNCSGGFKIREIQCVDSRDHRNLRPFHCQFLAGIPPPLSMSCNPEPCEAWQVEPWSQCSRSCGGGVQERGVFCPGGLCDWTKRPTSTMSCNEHLCCHWATGNWDLCSTSCGGGFQKRTVQCVPSEGNKTEDQDQCLCDHKPRPPEFKKCNQQACKKSADLLCTKDKLSASFCQTLKAMKKCSVPTVRAECCFSCPQTHITHTQRQRRQRLLQKSKEL

SEQ ID NO: 36447 - protein, 232 aa, Homo sapiens
MPCAQRSWLANLSVVAQLLNFGALCYGRQPQPGPVRFPDRRQEHFIKGLPEYHVVGPVRVDASGHFLSYGLHYPITSSRRKRDLDGSEDWVYYRISHEEKDLFFNLTVNQGFLSNSYIMEKRYGNLSHVKMMASSAPLCHLSGTVLQQGTRVGTAALSACHGLTGFFQLPHGDFFIEPVKKHPLVEGGYHPHIVYRRQKVPETKEPTCGLKGIVTHMSSWVEESVLFFWLFY

SEQ ID NO: 36448 - protein, 1224 aa, Homo sapiens
MKPRARGWRGLAALWMLLAQVAEQAPACAMGPAAAAPGSPSVPRPPPPAERPGWMEKGEYDLVSAYEVDHRGDYVSHEIMHHQRRRRAVPVSEVESLHLRLKGSRHDFHMDLRTSSSLVAPGFIVQTLGKTGTKSVQTLPPEDFCFYQGSLRSHRNSSVALSTCQGLSGMIRTEEADYFLRPLPSHLSWKLGRAAQGSSPSHVLYKRSTEPHAPGASEVLVTSRTWELAHQPLHSSDLRLGLPQKQHFCGRRKKYMPQPPKEDLFILPDEYKSCLRHKRSLLRSHRNEELNVETLVVVDKKMMQNHGHENITTYVLTILNMVSALFKDGTIGGNINIAIVGLILLEDEQPGLVISHHADHTLSSFCQWQSGLMGKDGTRHDHAILLTGLDICSWKNEPCDTLGFAPISGMCSKYRSCTINEDTGLGLAFTIAHESGHNFGMIHDGEGNMCKKSEGNIMSPTLAGRNGVFSWSPCSRQYLHKFLSTAQAICLADQPKPVKEYKYPEKLPGELYDANTQCKWQFGEKAKLCMLDFKKDICKALWCHRIGRKCETKFMPAAEGTICGHDMWCRGGQCVKYGDEGPKPTHGHWSDWSSWSPCSRTCGGGVSHRSRLCTNPKPSHGGKFCEGSTRTLKLCNSQKCPRDSVDFRAAQCAEHNSRRFRGRHYKWKPYTQVEDQDLCKLYCIAEGFDFFFSLSNKVKDGTPCSEDSRNVCIDGICERVGCDNVLGSDAVEDVCGVCNGNNSACTIHRGLYTKHHHTNQYYHMVTIPSGARSIRIYEMNVSTSYISVRNALRRYYLNGHWTVDWPGRYKFSGTTFDYRRSYNEPENLIATGPTNETLIVELLFQGRNPGVAWEYSMPRLGTEKQPPAQPSYTWAIVRSECSVSCGGGQMTVREGCYRDLKFQVNMSFCNPKTRPVTGLVPCKVSACPPSWSVGNWSACSRTCGGGAQSRPVQCTRRVHYDSEPVPASLCPQPAPSSRQACNSQSCPPAWSAGPWAECSHTCGKGWRKRAVACKSTNPSARAQLLPDAVCTSEPKPRMHEACLLQRCHKPKKLQWLVSAWSQCSVTCERGTQKRFLKCAEKYVSGKYRELASKKCSHLPKPSLELERACAPLPCPRHPPFAAAGPSRGSWFASPWSQCTASCGGGVQTRSVQCLAGGRPASGCLLHQKPSASLACNTHFCPIAEKKDAFCKDYFHWCYLVPQHGMCSHKFYGKQCCKTCSKSNL

SEQ ID NO: 36449 - protein, 928 aa, Homo sapiens
MKPRARGWRGLAALWMLLAQVAEQAPACAMGPAAAAPGSPSVPRPPPPAERPGWMEKGEYDLVSAYEVDHRGDYVSHEIMHHQRRRRAVPVSEVESLHLRLKGSRHDFHMDLRTSSSLVAPGFIVQTLGKTGTKSVQTLPPEDFCFYQGSLRSHRNSSVALSTCQGLSGMIRTEEADYFLRPLPSHLSWKLGRAAQGSSPSHVLYKRSTEPHAPGASEVLVTSRTWELAHQPLHSSDLRLGLPQKQHFCGRRKKYMPQPPKEDLFILPDEYKSCLRHKRSLLRSHRNEELNVETLVVVDKKMMQNHGHENITTYVLTILNMVSALFKDGTIGGNINIAIVGLILLEDEQPGLVISHHADHTLSSFCQWQSGLMGKDGTRHDHAILLTGLDICSWKNEPCDTLGFAPISGMCSKYRSCTINEDTGLGLAFTIAHESGHNFGMIHDGEGNMCKKSEGNIMSPTLAGRNGVFSWSPCSRQYLHKFLSTAQAICLADQPKPVKEYKYPEKLPGELYDANTQCKWQFGEKAKLCMLDFKKDICKALWCHRIGRKCETKFMPAAEGTICGHDMWCRGGQCVKYGDEGPKPTHGHWSDWSSWSPCSRTCGGGVSHRSRLCTNPKPSHGGKFCEGSTRTLKLCNSQKCPRDSVDFRAAQCAEHNSRRFRGRHYKWKPYTQVEDQDLCKLYCIAEGFDFFFSLSNKVKDGTPCSEDSRNVCIDGICERVGCDNVLGSDAVEDVCGVCNGNNSACTIHRGLYTKHHHTNQYYHMVTIPSGARSIRIYEMNVSTSYISVRNALRRYYLNGHWTVDWPGRYKFSGTTFDYRRSYNEPENLIATGPTNETLIVELLFQGRNPGVAWEYSMPRLGTEKQPPAQPSYTWAIVRSECSVSCGGGQMTVREGCYRDFLYFMFYLSQLFASECPFKNTLLHAFLCK

SEQ ID NO: 36450 - protein, 1095 aa, Homo sapiens
MCDGALLPPLVLPVLLLLVWGLDPGTAVGDAAADVEVVLPWRVRPDDVHLPPLPAAPGPRRRRRPRTPPAAPRARPGERALLLHLPAFGRDLYLQLRRDLRFLSRGFEVEEAGAARRRGRPAELCFYSGRVLGHPGSLVSLSACGAAGGLVGLIQLGQEQVLIQPLNNSQGPFSGREHLIRRKWSLTPSPSAEAQRPEQLCKVLTEKKKPTWGRPSRDWRERRNAIRLTSEHTVETLVVADADMVQYHGAEAAQRFILTVMNMVYNMFQHQSLGIKINIQVTKLVLLRQRPAKLSIGHHGERSLESFCHWQNEEYGGARYLGNNQVPGGKDDPPLVDAAVFVTRTDFCVHKDEPCDTVGIAYLGGVCSAKRKCVLAEDNGLNLAFTIAHELGHNLGMNHDDDHSSCAGRSHIMSGEWVKGRNPSDLSWSSCSRDDLENFLKSKVSTCLLVTDPRSQHTVRLPHKLPGMHYSANEQCQILFGMNATFCRNMEHLMCAGLWCLVEGDTSCKTKLDPPLDGTECGADKWCRAGECVSKTPIPEHVDGDWSPWGAWSMCSRTCGTGARFRQRKCDNPPPGPGGTHCPGASVEHAVCENLPCPKGLPSFRDQQCQAHDRLSPKKKGLLTAVVVDDKPCELYCSPLGKESPLLVADRVLDGTPCGPYETDLCVHGKCQKIGCDGIIGSAAKEDRCGVCSGDGKTCHLVKGDFSHARGTALKDSGKGSINSDWKIELPGEFQIAGTTVRYVRRGLWEKISAKGPTKLPLHLMVLLFHDQDYGIHYEYTVPVNRTAENQSEPEKPQDSLFIWTHSGWEGCSVQCGGGERRTIVSCTRIVNKTTTLVNDSDCPQASRPEPQVRRCNLHPCQSRWVAGPWSPCSATCEKGFQHREVTCVYQLQNGTHVATRPLYCPGPRPAAVQSCEGQDCLSIWEASEWSQCSASCGKGVWKRTVACTNSQGKCDASTRPRAEEACEDYSGCYEWKTGDWSTCSSTCGKGLQSRVVQCMHKVTGRHGSECPALSKPAPYRQCYQEVCNDRINANTITSPRLAALTYKCTRDQWTVYCRVIREKNLCQDMRWYQRCCQTCRDFYANKMRQPPPNS

SEQ ID NO: 36451 - protein, 1221 aa, Homo sapiens
MECALLLACAFPAAGSGPPRGLAGLGRVAKALQLCCLCCASVAAALASDSSSGASGLNDDYVFVTPVEVDSAGSYISHDILHNGRKKRSAQNARSSLHYRFSAFGQELHLELKPSAILSSHFIVQVLGKDGASETQKPEVQQCFYQGFIRNDSSSSVAVSTCAGLSGLIRTRKNEFLISPLPQLLAQEHNYSSPAGHHPHVLYKRTAEEKIQRYRGYPGSGRNYPGYSPSHIPHASQSRETEYHHRRLQKQHFCGRRKKYAPKPPTEDTYLRFDEYGSSGRPRRSAGKSQKGLNVETLVVADKKMVEKHGKGNVTTYILTVMNMVSGLFKDGTIGSDINVVVVSLILLEQEPGGLLINHHADQSLNSFCQWQSALIGKNGKRHDHAILLTGFDICSWKNEPCDTLGFAPISGMCSKYRSCTINEDTGLGLAFTIAHESGHNFGMIHDGEGNPCRKAEGNIMSPTLTGNNGVFSWSSCSRQYLKKFLSTPQAGCLVDEPKQAGQYKYPDKLPGQIYDADTQCKWQFGAKAKLCSLGFVKDICKSLWCHRVGHRCETKFMPAAEGTVCGLSMWCRQGQCVKFGELGPRPIHGQWSAWSKWSECSRTCGGGVKFQERHCNNPKPQYGGLFCPGSSRIYQLCNINPCNENSLDFRAQQCAEYNSKPFRGWFYQWKPYTKVEEEDRCKLYCKAENFEFFFAMSGKVKDGTPCSPNKNDVCIDGVCELVGCDHELGSKAVSDACGVCKGDNSTCKFYKGLYLNQHKANEYYPVVLIPAGARSIEIQELQVSSSYLAVRSLSQKYYLTGGWSIDWPGEFPFAGTTFEYQRSFNRPERLYAPGPTNETLVFEILMQGKNPGIAWKYALPKVMNGTPPATKRPAYTWSIVQSECSVSCGGGYINVKAICLRDQNTQVNSSFCSAKTKPVTEPKICNAFSCPAYWMPGEWSTCSKACAGGQQSRKIQCVQKKPFQKEEAVLHSLCPVSTPTQVQACNSHACPPQWSLGPWSQCSKTCGRGVRKRELLCKGSAAETLPESQCTSLPRPELQEGCVLGRCPKNSRLQWVASSWSECSATCGLGVRKREMKCSEKGFQGKLITFPERRCRNIKKPNLDLEETCNRRACPAHPVYNMVAGWYSLPWQQCTVTCGGGVQTRSVHCVQQGRPSSSCLLHQKPPVLRACNTNFCPAPEKREDPSCVDFFNWCHLVPQHGVCNHKFYGKQCCKSCTRKI

SEQ ID NO: 36452 - protein, 274 aa, Homo sapiens
MECALLLACAFPAAGSGPPRGLAGLGRVAKALQLCCLCCASVAAALASDSSSGASGLNDDYVFVTPVEVDSAGSYISHDILHNGRKKRSAQNARSSLHYRFSAFGQELHLELKPSAILSSHFIVQVLGKDGASETQKPEVQQCFYQGFIRNDSSSSVAVSTCAGLSGLIRTRKNEFLISPLPQLLAQEHNYSSPAGHHPHVLYKRTAEEKIQRYRGYPGSGRNYPGYSPSHIPHASQSRETEYHHRRLQKQHFCGRRKKCICSQASHRGHLSKV

SEQ ID NO: 36453 - protein, 1211 aa, Homo sapiens
MDPPAGAARRLLCPALLLLLLLLPPPLLPPPPPPANARLAAAADPPGGPLGHGAERILAVPVRTDAQGRLVSHVVSAATSRAGVRARRAAPVRTPSFPGGNEEEPGSHLFYNVTVFGRDLHLRLRPNARLVAPGATMEWQGEKGTTRVEPLLGSCLYVGDVAGLAEASSVALSNCDGLAGLIRMEEEEFFIEPLEKGLAAQEAEQGRVHVVYRRPPTSPPLGGPQALDTGASLDSLDSLSRALGVLEEHANSSRRRARRHAADDDYNIEVLLGVDDSVVQFHGKEHVQKYLLTLMNIVNEIYHDESLGAHINVVLVRIILLSYGKSMSLIEIGNPSQSLENVCRWAYLQQKPDTGHDEYHDHAIFLTRQDFGPSGMQGYAPVTGMCHPVRSCTLNHEDGFSSAFVVAHETGHVLGMEHDGQGNRCGDEVRLGSIMAPLVQAAFHRFHWSRCSQQELSRYLHSYDCLLDDPFAHDWPALPQLPGLHYSMNEQCRFDFGLGYMMCTAFRTFDPCKQLWCSHPDNPYFCKTKKGPPLDGTMCAPGKHCFKGHCIWLTPDILKRDGSWGAWSPFGSCSRTCGTGVKFRTRQCDNPHPANGGRTCSGLAYDFQLCSRQDCPDSLADFREEQCRQWDLYFEHGDAQHHWLPHEHRDAKERCHLYCESRETGEVVSMKRMVHDGTRCSYKDAFSLCVRGDCRKVGCDGVIGSSKQEDKCGVCGGDNSHCKVVKGTFTRSPKKHGYIKMFEIPAGARHLLIQEVDATSHHLAVKNLETGKFILNEENDVDASSKTFIAMGVEWEYRDEDGRETLQTMGPLHGTITVLVIPVGDTRVSLTYKYMIHEDSLNVDDNNVLEEDSVVYEWALKKWSPCSKPCGGGSQFTKYGCRRRLDHKMVHRGFCAALSKPKAIRRACNPQECSQPVWVTGEWEPCSQTCGRTGMQVRSVRCIQPLHDNTTRSVHAKHCNDARPESRRACSRELCPGRWRAGPWSQCSVTCGNGTQERPVLCRTADDSFGICQEERPETARTCRLGPCPRNISDPSKKSYVVQWLSRPDPDSPIRKISSKGHCQGDKSIFCRMEVLSRYCSIPGYNKLCCKSCNLYNNLTNVEGRIEPPPGKHNDIDVFMPTLPVPTVAMEVRPSPSTPLEVPLNASSTNATEDHPETNAVDEPYKIHGLEDEVQPPNLIPRRPSPYEKTRNQRIQELIDEMRKKEMLGKF

SEQ ID NO: 36454 - protein, 566 aa, Homo sapiens
MDPPAGAARRLLCPALLLLLLLLPPPLLPPPPPPANARLAAAADPPGGPLGHGAERILAVPVRTDAQGRLVSHVVSAATSRAGVRARRAAPVRTPSFPGGNEEEPGSHLFYNVTVFGRDLHLRLRPNARLVAPGATMEWQGEKGTTRVEPLLGSCLYVGDVAGLAEASSVALSNCDGLAGLIRMEEEEFFIEPLEKGLAAQEAEQGRVHVVYRRPPTSPPLGGPQALDTGASLDSLDSLSRALGVLEEHANSSRRRARRHAADDDYNIEVLLGVDDSVVQFHGKEHVQKYLLTLMNIVNEIYHDESLGAHINVVLVRIILLSYGKSMSLIEIGNPSQSLENVCRWAYLQQKPDTGHDEYHDHAIFLTRQDFGPSGMQGYAPVTGMCHPVRSCTLNHEDGFSSAFVVAHETGHVLGMEHDGQGNRCGDEVRLGSIMAPLVQAAFHRFHWSRCSQQELSRYLHSYDCLLDDPFAHDWPALPQLPGLHYSMNEQCRFDFGLGYMMCTAFRTFDPCKQLWCSHPDNPYFCKTKKGPPLDGTMCAPGKFRPGAVAHACYPSTLGGQGRWIA

SEQ ID NO: 36455 - protein, 1504 aa, Homo sapiens
MWVAKWLTGLLYHLSLFITRSWEVDFHPRQEALVRTLTSYEVVIPERVNEFGEVFPQSHHFSRQKRSSEALEPMPFRTHYRFTAYGQLFQLNLTADASFLAAGYTEVHLGTPERGAWESDAGPSDLRHCFYRGQVNSQEDYKAVVSLCGGLTGTFKGQNGEYFLEPIMKADGNEYEDGHNKPHLIYRQDLNNSFLQTLKYCSVSESQIKETSLPFHTYSNMNEDLNVMKERVLGHTSKNVPLKDERRHSRKKRLISYPRYIEIMVTADAKVVSAHGSNLQNYILTLMSIVATIYKDPSIGNLIHIVVVKLVMIHREEEGPVINFDGATTLKNFCSWQQTQNDLDDVHPSHHDTAVLITREDICSSKEKCNMLGLSYLGTICDPLQSCFINEEKGLISAFTIAHELGHTLGVQHDDNPRCKEMKVTKYHVMAPALSFHMSPWSWSNCSRKYVTEFLDTGYGECLLDKPDEEIYNLPSELPGSRYDGNKQCELAFGPGSQMCPHINICMHLWCTSTEKLHKGCFTQHVPPADGTDCGPGMHCRHGLCVNKETETRPVNGEWGPWEPYSSCSRTCGGGIESATRRCNRPEPRNGGNYCVGRRMKFRSCNTDSCPKGTQDFREKQCSDFNGKHLDISGIPSNVRWLPRYSGIGTKDRCKLYCQVAGTNYFYLLKDMVEDGTPCGTESYNIDCNCVLKAAGCDHVLNSSAKIDKCGVCGGDNSSCKTITGVFNSSHYGYNVVVKIPAGATNVDIRQYSYSGQPDDSYLALSDAEGNFLFNGNFLLSTSKKEINVQGTRTVIEYSGSNNAVERINSTNRQEKEILIEVLCVGNLYNPDVHYSFNIPLEERSDMFTWDPYGPWEGCTKMCQGLQRRNITCIHKSDHSVVSDKECDHLPLPSFVTQSCNTDCELRWHVIGKSECSSQCGQGYRTLDIHCMKYSIHEGQTVQVDDHYCGDQLKPPTQELCHGNCVFTRWHYSEWSQCSRSCGGGERSRESYCMNNFGHRLADNECQELSRVTRENCNEFSCPSWAASEWSECLVTCGKGTKQRQVWCQLNVDHLSDGFCNSSTKPESLSPCELHTCASWQVGPWGPCTTTCGHGYQMRDVKCVNELASAVLEDTECHEASRPSDRQSCVLTPCSFISKLETALLPTVLIKKMAQWRHGSWTPCSVSCGRGTQARYVSCRDALDRIADESYCAHLPRPAEIWDCFTPCGEWQAGDWSPCSASCGHGKTTRQVLCMNYHQPIDENYCDPEVRPLMEQECSLAACPPAHSHFPSSPVQPSYYLSTNLPLTQKLEDNENQVVHPSVRGNQWRTGPWGSCSSSCSGGLQHRAVVCQDENGQSASYCDAASKPPELQQCGPGPCPQWNYGNWGECSQTCGGGIKSRLVICQFPNGQILEDHNCEIVNKPPSVIQCHMHACPADVSWHQEPWTSEDLKVKLLPQRTIILWELMKNIFCHGKHSHMYLINVVTDHLLYPRHCDPETIETYFLSLWSLQFTWGDLKYYKNSL

SEQ ID NO: 36456 - protein, 1910 aa, Homo sapiens
MWVAKWLTGLLYHLSLFITRSWEVDFHPRQEALVRTLTSYEVVIPERVNEFGEVFPQSHHFSRQKRSSEALEPMPFRTHYRFTAYGQLFQLNLTADASFLAAGYTEVHLGTPERGAWESDAGPSDLRHCFYRGQVNSQEDYKAVVSLCGGLTGTFKGQNGEYFLEPIMKADGNEYEDGHNKPHLIYRQDLNNSFLQTLKYCSVSESQIKETSLPFHTYSNMNEDLNVMKERVLGHTSKNVPLKDERRHSRKKRLISYPRYIEIMVTADAKVVSAHGSNLQNYILTLMSIVATIYKDPSIGNLIHIVVVKLVMIHREEEGPVINFDGATTLKNFCSWQQTQNDLDDVHPSHHDTAVLITREDICSSKEKCNMLGLSYLGTICDPLQSCFINEEKGLISAFTIAHELGHTLGVQHDDNPRCKEMKVTKYHVMAPALSFHMSPWSWSNCSRKYVTEFLDTGYGECLLDKPDEEIYNLPSELPGSRYDGNKQCELAFGPGSQMCPHINICMHLWCTSTEKLHKGCFTQHVPPADGTDCGPGMHCRHGLCVNKETETRPVNGEWGPWEPYSSCSRTCGGGIESATRRCNRPEPRNGGNYCVGRRMKFRSCNTDSCPKGTQDFREKQCSDFNGKHLDISGIPSNVRWLPRYSGIGTKDRCKLYCQVAGTNYFYLLKDMVEDGTPCGTETHDICVQGQCMAAGCDHVLNSSAKIDKCGVCGGDNSSCKTITGVFNSSHYGYNVVVKIPAGATNVDIRQYSYSGQPDDSYLALSDAEGNFLFNGNFLLSTSKKEINVQGTRTVIEYSGSNNAVERINSTNRQEKELILQVLCVGNLYNPDVHYSFNIPLEERSDMFTWDPYGPWEGCTKMCQGLQRRNITCIHKSDHSVVSDKECDHLPLPSFVTQSCNTDCELRWHVIGKSECSSQCGQGYRTLDIHCMKYSIHEGQTVQVDDHYCGDQLKPPTQELCHGNCVFTRWHYSEWSQCSRSCGGGERSRESYCMNNFGHRLADNECQELSRVTRENCNEFSCPSWAASEWSECLVTCGKGTKQRQVWCQLNVDHLSDGFCNSSTKPESLSPCELHTCASWQVGPWGPCTTTCGHGYQMRDVKCVNELASAVLEDTECHEASRPSDRQSCVLTPCSFISKLETALLPTVLIKKMAQWRHGSWTPCSVSCGRGTQARYVSCRDALDRIADESYCAHLPRPAEIWDCFTPCGEWQAGDWSPCSASCGHGKTTRQVLCMNYHQPIDENYCDPEVRPLMEQECSLAACPPAHSHFPSSPVQPSYYLSTNLPLTQKLEDNENQVVHPSVRGNQWRTGPWGSCSSSCSGGLQHRAVVCQDENGQSASYCDAASKPPELQQCGPGPCPQWNYGNWGECSQTCGGGIKSRLVICQFPNGQILEDHNCEIVNKPPSVIQCHMHACPADVSWHQEPWTSCSASCGKGRKYREVFCIDQFQRKLEDTNCSQVQKPPTHKACRSVRCPSWKANSWNECSVTCGSGVQQRDVYCRLKGVGQVVEEMCDQSTRPCSQRRCWSQDCVQHKGMERGRLNCSTSCERKDSHQRMECTDNQIRQVNEIVYNSSTISLTSKNCRNPPCNYIVVTADSSQCANNCGFSYRQRITYCTEIPSTKKHKLHRLRPIVYQECPVVPSSQVYQCINSCLHLATWKVGKWSKCSVTCGIGIMKRQVKCITKHGLSSDLCLNHLKPGAQKKCYANDCKSFTTCKEIQVKNHIRKDGDYYLNIKGRIIKIYCADMYLENPKEYLTLVQGEENFSEVYGFRLKNPYQCPFNGSRREDCECDNGHLAAGYTVFSKIRIDLTSMQIKTTDLLFSKTIFGNAVPFATAGDCYSAFRCPQGQFSINLSGTGMKISSTAKWLTQGSYTSVSIRRSEDGTRFFGKCGGYCGKCLPHMTTGLPIQVI

SEQ ID NO: 36457 - protein, 622 aa, Homo sapiens
MFTWDPYGPWEGCTKMCQGLQRRNITCIHKSDHSVVSDKECDHLPLPSFVTQSCNTDCELRWHVIGKSECSSQCGQGYRTLDIHCMKYSIHEGQTVQVDDHYCGDQLKPPTQELCHGNCVFTRWHYSEWSQCSRSCGGGERSRESYCMNNFGHRLADNECQELSRVTRENCNEFSCPSWAASEWSECLVTCGKGTKQRQVWCQLNVDHLSDGFCNSSTKPESLSPCELHTCASWQVGPWGPCTTTCGHGYQMRDVKCVNELASAVLEDTECHEASRPSDRQCSVSCGRGTQARYVSCRDALDRIADESYCAHLPRPAEIWDCFTPCGEWQAGDWSPCSASCGHGKTTRQVLCMNYHQPIDENYCDPEVRPLMEQECSLAACPPAHSHFPSSPVQPSYYLSTNLPLTQKLEDNENQVVHPSVRGNQWRTGPWGSCSSSCSGGLQHRAVVCQDENGQSASYCDAASKPPELQQCGPGPCPQWNYGNWGECSQTCGGGIKSRLVICQFPNGQILEDHNCEIVNKPPSVIQCHMHACPADVSWHQEPWTSEDLKVKLLPQRTIILWELMKNIFCHGKHSHMYLINVVTDHLLYPRHCDPETIETYFLSLWSLQFTWGDLKYYKNSL

SEQ ID NO: 36458 - protein, 1504 aa, Homo sapiens
MWVAKWLTGLLYHLSLFITRSWEVDFHPRQEALVRTLTSYEVVIPERVNEFGEVFPQSHHFSRQKRSSEALEPMPFRTHYRFTAYGQLFQLNLTADASFLAAGYTEVHLGTPERGAWESDAGPSDLRHCFYRGQVNSQEDYKAVVSLCGGLTGTFKGQNGEYFLEPIMKADGNEYEDGHNKPHLIYRQDLNNSFLQTLKYCSVSESQIKETSLPFHTYSNMNEDLNVMKERVLGHTSKNVPLKDERRHSRKKRLISYPRYIEIMVTADAKVVSAHGSNLQNYILTLMSIVATIYKDPSIGNLIHIVVVKLVMIHREEEGPVINFDGATTLKNFCSWQQTQNDLDDVHPSHHDTAVLITREDICSSKEKCNMLGLSYLGTICDPLQSCFINEEKGLISAFTIAHELGHTLGVQHDDNPRCKEMKVTKYHVMAPALSFHMSPWSWSNCSRKYVTEFLDTGYGECLLDKPDEEIYNLPSELPGSRYDGNKQCELAFGPGSQMCPHINICMHLWCTSTEKLHKGCFTQHVPPADGTDCGPGMHCRHGLCVNKETETRPVNGEWGPWEPYSSCSRTCGGGIESATRRCNRPEPRNGGNYCVGRRMKFRSCNTDSCPKGTQDFREKQCSDFNGKHLDISGIPSNVRWLPRYSGIGTKDRCKLYCQVAGTNYFYLLKDMVEDGTPCGTETHDICVQGQCMAAGCDHVLNSSAKIDKCGVCGGDNSSCKTITGVFNSSHYGYNVVVKIPAGATNVDIRQYSYSGQPDDSYLALSDAEGNFLFNGNFLLSTSKKEINVQGTRTVIEYSGSNNAVERINSTNRQEKELILQVLCVGNLYNPDVHYSFNIPLEERSDMFTWDPYGPWEGCTKMCQGLQRRNITCIHKSDHSVVSDKECDHLPLPSFVTQSCNTDCELRWHVIGKSECSSQCGQGYRTLDIHCMKYSIHEGQTVQVDDHYCGDQLKPPTQELCHGNCVFTRWHYSEWSQCSRSCGGGERSRESYCMNNFGHRLADNECQELSRVTRENCNEFSCPSWAASEWSECLVTCGKGTKQRQVWCQLNVDHLSDGFCNSSTKPESLSPCELHTCASWQVGPWGPCTTTCGHGYQMRDVKCVNELASAVLEDTECHEASRPSDRQSCVLTPCSFISKLETALLPTVLIKKMAQWRHGSWTPCSVSCGRGTQARYVSCRDALDRIADESYCAHLPRPAEIWDCFTPCGEWQAGDWSPCSASCGHGKTTRQVLCMNYHQPIDENYCDPEVRPLMEQECSLAACPPAHSHFPSSPVQPSYYLSTNLPLTQKLEDNENQVVHPSVRGNQWRTGPWGSCSSSCSGGLQHRAVVCQDENGQSASYCDAASKPPELQQCGPGPCPQWNYGNWGECSQTCGGGIKSRLVICQFPNGQILEDHNCEIVNKPPSVIQCHMHACPADVSWHQEPWTSEDLKVKLLPQRTIILWELMKNIFCHGKHSHMYLINVVTDHLLYPRHCDPETIETYFLSLWSLQFTWGDLKYYKNSL

SEQ ID NO: 36459 - protein, 1205 aa, Homo sapiens
MVLLSLWLIAAALVEVRTSADGQAGNEEMVQIDLPIKRYREYELVTPVSTNLEGRYLSHTLSASHKKRSARDVSSNPEQLFFNITAFGKDFHLRLKPNTQLVAPGAVVEWHETSLVPGNITDPINNHQPGSATYRIRRTEPLQTNCAYVGDIVDIPGTSVAISNCDGLAGMIKSDNEEYFIEPLERGKQMEEEKGRIHVVYKRSAVEQAPIDMSKDFHYRESDLEGLDDLGTVYGNIHQQLNETMRRRRHAGENDYNIEVLLGVDDSVVRFHGKEHVQNYLLTLMNIVNEIYHDESLGVHINVVLVRMIMLGYAKSISLIERGNPSRSLENVCRWASQQQRSDLNHSEHHDHAIFLTRQDFGPAGMQGYAPVTGMCHPVRSCTLNHEDGFSSAFVVAHETGHVLGMEHDGQGNRCGDETAMGSVMAPLVQAAFHRYHWSRCSGQELKRYIHSYDCLLDDPFDHDWPKLPELPGINYSMDEQCRFDFGVGYKMCTAFRTFDPCKQLWCSHPDNPYFCKTKKGPPLDGTECAAGKWCYKGHCMWKNANQQKQDGNWGSWTKFGSCSRTCGTGVRFRTRQCNNPMPINGGQDCPGVNFEYQLCNTEECQKHFEDFRAQQCQQRNSHFEYQNTKHHWLPYEHPDPKKRCHLYCQSKETGDVAYMKQLVHDGTHCSYKDPYSICVRGECVKVGCDKEIGSNKVEDKCGVCGGDNSHCRTVKGTFTRTPRKLGYLKMFDIPPGARHVLIQEDEASPHILAIKNQATGHYILNGKGEEAKSRTFIDLGVEWDYNIEDDIESLHTDGPLHDPVIVLIIPQENDTRSSLTYKYIIHEDSVPTINSNNVIQEELDTFEWALKSWSQCSKPCGGGFQYTKYGCRRKSDNKMVHRSFCEANKKPKPIRRMCNIQECTHPLWVAEEWEHCTKTCGSSGYQLRTVRCLQPLLDGTNRSVHSKYCMGDRPESRRPCNRVPCPAQWKTGPWSECSVTCGEGTEVRQVLCRAGDHCDGEKPESVRACQLPPCNDEPCLGDKSIFCQMEVLARYCSIPGYNKLCCESCSKRSSTLPPPYLLEAAETHDDVISNPSDLPRSLVMPTSLVPYHSETPAKKMSLSSISSVGGPNAYAAFRPNSKPDGANLRQRSAQQAGSKTVRLVTVPSSPPTKRVHLSSASQMAAASFFAASDSIGASSQARTSKKDGKIIDNRRPTRSSTLER

SEQ ID NO: 36460 - protein, 339 aa, Homo sapiens
MSQTGSHPGRGLAGRWLWGAQPCLLLPIVPLSWLVWLLLLLLASLLPSARLASPLPREEEIVFPEKLNGSVLPGSGAPARLLCRLQAFGETLLLELEQDSGVQVEGLTVQYLGQAPELLGGAEPGTYLTGTINGDPESVASLHWDGGALLGVLQYRGAELHLQPLEGGTPNSAGGPGAHILRRKSPASGQGPMCNVKAPLGSPSPRPRRAKRFASLSRFVETLVVADDKMAAFHGAGLKRYLLTVMAAAAKAFKHPSIRNPVSLVVTRLVILGSGEEGPQVGPSAAQTLRSFCAWQRGLNTPEDSDPDHFDTAILFTRQVRPQSAPQAMHCTILRSATT

SEQ ID NO: 36461 - protein, 837 aa, Homo sapiens
MSQTGSHPGRGLAGRWLWGAQPCLLLPIVPLSWLVWLLLLLLASLLPSARLASPLPREEEIVFPEKLNGSVLPGSGAPARLLCRLQAFGETLLLELEQDSGVQVEGLTVQYLGQAPELLGGAEPGTYLTGTINGDPESVASLHWDGGALLGVLQYRGAELHLQPLEGGTPNSAGGPGAHILRRKSPASGQGPMCNVKAPLGSPSPRPRRAKRFASLSRFVETLVVADDKMAAFHGAGLKRYLLTVMAAAAKAFKHPSIRNPVSLVVTRLVILGSGEEGPQVGPSAAQTLRSFCAWQRGLNTPEDSDPDHFDTAILFTRQDLCGVSTCDTLGMADVGTVCDPARSCAIVEDDGLQSAFTAAHELGHVFNMLHDNSKPCISLNGPLSTSRHVMAPVMAHVDPEEPWSPCSARFITDFLDNGYGHCLLDKPEAPLHLPVTFPGKDYDADRQCQLTFGPDSRHCPQLPPPCAALWCSGHLNGHAMCQTKHSPWADGTPCGPAQACMGGRCLHMDQLQDFNIPQAGGWGPWGPWGDCSRTCGGGVQFSSRDCTRPVPRNGGKYCEGRRTRFRSCNTEDCPTGSALTFREEQCAAYNHRTDLFKSFPGPMDWVPRYTGVAPQDQCKLTCQAQALGYYYVLEPRVVDGTPCSPDSSSVCVQGRCIHAGCDRIIGSKKKFDKCMVCGGDGSGCSKQSGSFRKFRYGYNNVVTIPAGATHILVRQQGNPGHRSIYLALKLPDGSYALNGEYTLMPSPTDVVLPGAVSLRYSGATAASETLSGHGPLAQPLTLQVLVAGNPQDTRLRYSFFVPRPTPSTPRPTPQDWLHRRAQILEILRRRPWAGRK

SEQ ID NO: 36462 - protein, 930 aa, Homo sapiens
MLLGWASLLLCAFRLPLAAVGPAATPAQDKAGQPPTAAAAAQPRRRQGEEVQERAEPPGHPHPLAQRRRSKGLVQNIDQLYSGGGKVGYLVYAGGRRFLLDLERDGSVGIAGFVPAGGGTSAPWRHRSHCFYRGTVDGSPRSLAVFDLCGGLDGFFAVKHARYTLKPLLRGPWAEEEKGRVYGDGSARILHVYTREGFSFEALPPRASCETPASTPEAHEHAPAHSNPSGRAALASQLLDQSALSPAGGSGPQTWWRRRRRSISRARQVELLLVADASMARLYGRGLQHYLLTLASIANRLYSHASIENHIRLAVVKVVVLGDKDKSLEVSKNAATTLKNFCKWQHQHNQLGDDHEEHYDAAILFTREDLCGHHSCDTLGMADVGTICSPERSCAVIEDDGLHAAFTVAHEIGHLLGLSHDDSKFCEETFGSTEDKRLMSSILTSIDASKPWSKCTSATITEFLDDGHGNCLLDLPRKQILGPEELPGQTYDATQQCNLTFGPEYSVCPGMDVCARLWCAVVRQGQMVCLTKKLPAVEGTPCGKGRICLQGKCVDKTKKKYYSTSSHGNWGSWGSWGQCSRSCGGGVQFAYRHCNNPAPRNNGRYCTGKRAIYRSCSLMPCPPNGKSFRHEQCEAKNGYQSDAKGVKTFVEWVPKYAGVLPADVCKLTCRAKGTGYYVVFSPKVTDGTECRLYSNSVCVRGKCVRTGCDGIIGSKLQYDKCGVCGGDNSSCTKIVGTFNKKSKGYTDVVRIPEGATHIKVRQFKAKDQTRFTAYLALKKKNGEYLINGKYMISTSETIIDINGTVMNYSGWSHRDDFLHGMGYSATKEILIVQILATDPTKPLDVRYSFFVPKKSTPKVNSVTSHGSNKVGSHTSQPQWVTGPWLACSRTCDTGWHTRTVQCQDGNRKLAKGCPLSQRPSAFKQCLLKKC

SEQ ID NO: 36463 - protein, 858 aa, Homo sapiens
MEILWKTLTWILSLIMASSEFHSDHRLSYSSQEEFLTYLEHYQLTIPIRVDQNGAFLSFTVKNDKHSRRRRSMDPIDPQQAVSKLFFKLSAYGKHFHLNLTLNTDFVSKHFTVEYWGKDGPQWKHDFLDNCHYTGYLQDQRSTTKVALSNCVGLHGVIATEDEEYFIEPLKNTTEDSKHFSYENGHPHVIYKKSALQQRHLYDHSHCGVSDFTRSGKPWWLNDTSTVSYSLPINNTHIHHRQKRSVSIERFVETLVVADKMMVGYHGRKDIEHYILSVMNIVAKLYRDSSLGNVVNIIVARLIVLTEDQPNLEINHHADKSLDSFCKWQKSILSHQSDGNTIPENGIAHHDNAVLITRYDICTYKNKPCGTLGLASVAGMCEPERSCSINEDIGLGSAFTIAHEIGHNFGMNHDGIGNSCRKVMKQQYGSSHYCEYQSFFLVCLQSRLHHQLSREVCRELWCLSKSNRCVTNSIPAAEGTLCQTGNIEKGWCYQGDCVPFGTWPQSIDGGWGPWSLWGECSRTCGGGVSSSLRHCDSPAPSGGGKYCLGERKRYRSCNTDPCPLGSRDFREKQCADFDNMPFRGKYYNWKPYTGGGVKPCALNCLAEGYNFYTERAPAVIDGTQCNADSLDICINGECKHVGCDNILGSDAREDRCRVCGGDGSTCDAIEGFFNDSLPRGGYMEVVQIPRGSVHIEVREVAMSKNYIALKSEGDDYYINGAWTIDWPRKFDVAGTAFHYKRPTDEPESLEALGPTSENLIVMVLLQEQNLGIRYKFNVPITRTGSGDNEVGFTWNHQPWSECSATCAGGKMPTRQPTQRARWRTKHILSYALCLLKKLIGNISCRFASSCNLAKETLL

SEQ ID NO: 36464 - protein, 1117 aa, Homo sapiens
MEILWKTLTWILSLIMASSEFHSDHRLSYSSQEEFLTYLEHYQLTIPIRVDQNGAFLSFTVKNDKHSRRRRSMDPIDPQQAVSKLFFKLSAYGKHFHLNLTLNTDFVSKHFTVEYWGKDGPQWKHDFLDNCHYTGYLQDQRSTTKVALSNCVGLHGVIATEDEEYFIEPLKNTTEDSKHFSYENGHPHVIYKKSALQQRHLYDHSHCGVSDFTRSGKPWWLNDTSTVSYSLPINNTHIHHRQKRSVSIERFVETLVVADKMMVGYHGRKDIEHYILSVMNIVAKLYRDSSLGNVVNIIVARLIVLTEDQPNLEINHHADKSLDSFCKWQKSILSHQSDGNTIPENGIAHHDNAVLITRYDICTYKNKPCGTLGLASVAGMCEPERSCSINEDIGLGSAFTIAHEIGHNFGMNHDGIGNSCGTKGHEAAKLMAAHITANTNPFSWSACSRDYITSFLDSGRGTCLDNEPPKRDFLYPAVAPGQVYDADEQCRFQYGATSRQCKYGEVCRELWCLSKSNRCVTNSIPAAEGTLCQTGNIEKGWCYQGDCVPFGTWPQSIDGGWGPWSLWGECSRTCGGGVSSSLRHCDSPAPSGGGKYCLGERKRYRSCNTDPCPLGSRDFREKQCADFDNMPFRGKYYNWKPYTGGGVKPCALNCLAEGYNFYTERAPAVIDGTQCNADSLDICINGECKHVGCDNILGSDAREDRCRVCGGDGSTCDAIEGFFNDSLPRGGYMEVVQIPRGSVHIEVREVAMSKNYIALKSEGDDYYINGAWTIDWPRKFDVAGTAFHYKRPTDEPESLEALGPTSENLIVMVLLQEQNLGIRYKFNVPITRTGSGDNEVGFTWNHQPWSECSATCAGGVQRQEVVCKRLDDNSIVQNNYCDPDSKPPENQRACNTEPCPPEWFIGDWLECSKTCDGGMRTRAVLCIRKIGPSEEETLDYSGCLTHRPVEKEPCNNQSCPPQWVALDWSECTPKCGPGFKHRIVLCKSSDLSKTFPAAQCPEESKPPVRIRCSLGRCPPPRWVTGDWGQCSAQCGLGQQMRTVQCLSYTGQASSDCLETVRPPSMQQCESKCDSTPISNTEECKDVNKVAYCPLVLKFKFCSRAYFRQMCCKTCQGH

SEQ ID NO: 36465 - protein, 468 aa, Homo sapiens
MEILWKTLTWILSLIMASSEFHSDHRLSYSSQEEFLTYLEHYQLTIPIRVDQNGAFLSFTVKNDKHSRRRRSMDPIDPQQAVSKLFFKLSAYGKHFHLNLTLNTDFVSKHFTVEYWGKDGPQWKHDFLDNCHYTGYLQDQRSTTKVALSNCVGLHGVIATEDEEYFIEPLKNTTEDSKHFSYENGHPHVIYKKSALQQRHLYDHSHCGVSDFTRSGKPWWLNDTSTVSYSLPINNTHIHHRQKRSVSIERFVETLVVADKMMVGYHGRKDIEHYILSVMNIVAKLYRDSSLGNVVNIIVARLIVLTEDQPNLEINHHADKSLDSFCKWQKSILSHQSDGNTIPENGIAHHDNAVLITRYDICTYKNKPCGTLGLASVAGMCEPERSCSINEDIGLGSAFTIAHEIGHNFGMNHDGIGNSCGTKGHEAAKLMAAHITANTNPFSWSACSRDYITSFLEFLKLGDSISGS

SEQ ID NO: 36466 - protein, 1686 aa, Homo sapiens
MPGGPSPRSPAPLLRPLLLLLCALAPGAPGPAPGRATEGRAALDIVHPVRVDAGGSFLSYELWPRALRKRDVSVRRDAPAFYELQYRGRELRFNLTANQHLLAPGFVSETRRRGGLGRAHIRAHTPACHLLGEVQDPELEGGLAAISACDGLKGVFQLSNEDYFIEPLDSAPARPGHAQPHVVYKRQAPERLAQRGDSSAPSTCGVQVYPELESRRERWEQRQQWRRPRLRRLHQRSVSKEKWVETLVVADAKMVEYHGQPQVESYVLTIMNMVAGLFHDPSIGNPIHITIVRLVLLEDEEEDLKITHHADNTLKSFCKWQKSINMKGDAHPLHHDTAILLTRKDLCAAMNRPCETLGLSHVAGMCQPHRSCSINEDTGLPLAFTVAHELGHSFGIQHDGSGNDCEPVGKRPFIMSPQLLYDAAPLTWSRCSRQYITRFLDRGWGLCLDDPPAKDIIDFPSVPPGVLYDVSHQCRLQYGAYSAFCEDMDNVCHTLWCSVGTTCHSKLDAAVDGTRCGENKWCLSGECVPVGFRPEAVDGGWSGWSAWSICSRSCGMGVQSAERQCTQPTPKYKGRYCVGERKRFRLCNLQACPAGRPSFRHVQCSHFDAMLYKGQLHTWVPVVNDVNPCELHCRPANEYFAEKLRDAVVDGTPCYQVRASRDLCINGICKNVGCDFEIDSGAMEDRCGVCHGNGSTCHTVSGTFEEAEGLGYVDVGLIPAGAREIRIQEVAEAANFLALRSEDPEKYFLNGGWTIQWNGDYQVAGTTFTYARRGNWENLTSPGPTKEPVWIQLLFQESNPGVHYEYTIHREAGGHDEVPPPVFSWHYGPWTKCTVTCGRGVQRQNVYCLERQAGPVDEEHCDPLGRPDDQQRKCSEQPCPARWWAGEWQLCSSSCGPGGLSRRAVLCIRSVGLDEQSALEPPACEHLPRPPTETPCNRHVPCPATWAVGNWSQCSVTCGEGTQRRNVLCTNDTGVPCDEAQQPASEVTCSLPLCRWPLGTLGPEGSGSGSSSHELFNEADFIPHHLAPRPSPASSPKPGTMGNAIEEEAPELDLPGPVFVDDFYYDYNFINFHEDLSYGPSEEPDLDLAGTGDRTPPPHSHPAAPSTGSPVPATEPPAAKEEGVLGPWSPSPWPSQAGRSPPPPSEQTPGNPLINFLPEEDTPIGAPDLGLPSLSWPRVSTDGLQTPATPESQNDFPVGKDSQSQLPPPWRDRTNEVFKDDEEPKGRGAPHLPPRPSSTLPPLSPVGSTHSSPSPDVAELWTGGTVAWEPALEGGLGPVDSELWPTVGVASLLPPPIAPLPEMKVRDSSLEPGTPSFPTPGPGSWDLQTVAVWGTFLPTTLTGLGHMPEPALNPGPKGQPESLSPEVPLSSRLLSTPAWDSPANSHRVPETQPLAPSLAEAGPPADPLVVRNAGWQAGNWSECSTTCGLGAVWRPVRCSSGRDEDCAPAGRPQPARRCHLRPCATWHSGNWSKCSRSCGGGSSVRDVQCVDTRDLRPLRPFHCQPGPAKPPAHRPCGAQPCLSWYTSSWRECSEACGGGEQQRLVTCPEPGLCEEALRPNTTRPCNTHPCTQWVVGPWGQCSGPCGGGVQRRLVKCVNTQTGLPEEDSDQCGHEAWPESSRPCGTEDCEPVEPPRCERDRLSFGFCETLRLLGRCQLPTIRTQCCRSCSPPSHGAPSRGHQRVARR

SEQ ID NO: 36467 - protein, 460 aa, Homo sapiens
MPGGPSPRSPAPLLRPLLLLLCALAPGAPGPAPGRATEGRAALDIVHPVRVDAGGSFLSYELWPRALRKRDVSVRRDAPAFYELQYRGRELRFNLTANQHLLAPGFVSETRRRGGLGRAHIRAHTPACHLLGEVQDPELEGGLAAISACDGLKGVFQLSNEDYFIEPLDSAPARPGHAQPHVVYKRQAPERLAQRGDSSAPSTCGVQVYPELESRRERWEQRQQWRRPRLRRLHQRSVSKEKWVETLVVADAKMVEYHGQPQVESYVLTIMNMVAGLFHDPSIGNPIHITIVRLVLLEDEEEDLKITHHADNTLKSFCKWQKSINMKGDAHPLHHDTAILLTRKDLCAAMNRPCETLGLSHVAGMCQPHRSCSINEDTGLPLAFTVAHELGHSSCTTPLPSPGPAAAASISPGSLSVQRQNVYCLERQAGPVDEEHCDPLGRPDDQQRKCSEQPCPASAQ

SEQ ID NO: 36468 - protein, 889 aa, Homo sapiens
MLPAPAAPRWPPLLLLLLLLLPLARGAPARPAAGGQASELVVPTRLPGSAGELALHLSAFGKGFVLRLAPDDSFLAPEFKIERLGGSGRATGGERGLRGCFFSGTVNGEPESLAAVSLCRGLSGSFLLDGEEFTIQPQGAGGSLAQPHRLQRWGPAGARPLPRGPEWEVETGEGQRQERGDHQEDSEEESQEEEAEGASEPPPPLGATSRTKRFVSEARFVETLLVADASMAAFYGADLQNHILTLMSVAARIYKHPSIKNSINLMVVKVLIVEDEKWGPEVSDNGGLTLRNFCNWQRRFNQPSDRHPEHYDTAILLTRQNFCGQEGLCDTLGVADIGTICDPNKSCSVIEDEGLQAAHTLAHELGHVLSMPHDDSKPCTRLFGPMGKHHVMAPLFVHLNQTLPWSPCSAMYLTELLDGGHGDCLLDAPAAALPLPTGLPGRMALYQLDQQCRQIFGPDFRHCPNTSAQDVCAQLWCHTDGAEPLCHTKNGSLPWADGTPCGPGHLCSEGSCLPEEEVERPKPVADGGWAPWGPWGECSRTCGGGVQFSHRECKDPEPQNGGRYCLGRRAKYQSCHTEECPPDGKSFREQQCEKYNAYNYTDMDGNLLQWVPKYAGVSPRDRCKLFCRARGRSEFKVFEAKVIDGTLCGPETLAICVRGQCVKAGCDHVVDSPRKLDKCGVCGGKGNSCRKVSGSLTPTNYGYNDIVTIPAGATNIDVKQRSHPGVQNDGNYLALKTADGQYLLNGNLAISAIEQDILVKGTILKYSGSIATLERLQSFRPLPEPLTVQLLTVPGEVFPPKVKYTFFVPNDVDFSMQSSKERATTNIIQPLLHAQWVLGDWSECSSTCGAGWQRRTVECRDPSGQASATCNKALKPEDAKPCESQLCPL

SEQ ID NO: 36469 - protein, 918 aa, Homo sapiens
AARARLGGGGAGGAGCASQRGRRGSAPAAGPRGPSRPCTRLIPLFLERAAGPRSGRQHLPAPGGLLPSPARSHRRSPHAPRPRRPPVASAPAAAAAAAAAGPRRPGPARSRGAGLGAGGAHAVARLRGCFFSGTVNGEPESLAAVSLCRGLSGSFLLDGEEFTIQPQGAGGSLAQPHRLQRWGPAGARPLPRGPEWEVETGEGQRQERGDHQEDSEEESQEEEAEGASEPPPPLGATSRTKRFVSEARFVETLLVADASMAAFYGADLQNHILTLMSVAARIYKHPSIKNSINLMVVKVLIVEDEKWGPEVSDNGGLTLRNFCNWQRRFNQPSDRHPEHYDTAILLTRQNFCGQEGLCDTLGVADIGTICDPNKSCSVIEDEGLQAAHTLAHELGHVLSMPHDDSKPCTRLFGPMGKHHVMAPLFVHLNQTLPWSPCSAMYLTELLDGGHGDCLLDAPAAALPLPTGLPGRMALYQLDQQCRQIFGPDFRHCPNTSAQDVCAQLWCHTDGAEPLCHTKNGSLPWADGTPCGPGHLCSEGSCLPEEEVERPKPVADGGWAPWGPWGECSRTCGGGVQFSHRECKDPEPQNGGRYCLGRRAKYQSCHTEECPPDGKSFREQQCEKYNAYNYTDMDGNLLQWVPKYAGVSPRDRCKLFCRARGRSEFKVFEAKVIDGTLCGPETLAICVRGQCVKAGCDHVVDSPRKLDKCGVCGGKGNSCRKVSGSLTPTNYGYNDIVTIPAGATNIDVKQRSHPGVQNDGNYLALKTADGQYLLNGNLAISAIEQDILVKGTILKYSGSIATLERLQSFRPLPEPLTVQLLTVPGEVFPPKVKYTFFVPNDVDFSMQSSKERATTNIIQPLLHAQWVLGDWSECSSTCGAGWQRRTVECRDPSGQASATCNKALKPEDAKPCESQLCPL

SEQ ID NO: 36470 - protein, 1907 aa, Homo sapiens
MQFVSWATLLTLLVRDLAEMGSPDAAAAVRKDRLHPRQVKLLETLSEYEIVSPIRVNALGEPFPTNVHFKRTRRSINSATDPWPAFASSSSSSTSSQAHYRLSAFGQQFLFNLTANAGFIAPLFTVTLLGTPGVNQTKFYSEEEAELKHCFYKGYVNTNSEHTAVISLCSGMLGTFRSHDGDYFIEPLQSMDEQEDEEEQNKPHIIYRRSAPQREPSTGRHACDTSEHKNRHSKDKKKTRARKWGERINLAGDVAALNSGLATEAFSAYGNKTDNTREKRTHRRTKRFLSYPRFVEVLVVADNRMVSYHGENLQHYILTLMSIDGPSISFNAQTTLKNFCQWQHSKNSPGGIHHDTAVLLTRQDICRAHDKCDTLGLAELGTICDPYRSCSISEDSGLSTAFTIAHELGHVFNMPHDDNNKCKEEGVKSPQHVMAPTLNFYTNPWMWSKCSRKYITEFLDTGYGECLLNEPESRPYPLPVQLPGILYNVNKQCELIFGPGSQVCPYMMQCRRLWCNNVNGVHKGCRTQHTPWADGTECEPGKHCKYGFCVPKEMDVPVTDGSWGSWSPFGTCSRTCGGGIKTAIRECNRPEPKNGGKYCVGRRMKFKSCNTEPCLKQKRDFRDEQCAHFDGKHFNINGLLPNVRWVPKYSGILMKDRCKLFCRVAGNTAYYQLRDRVIDGTPCGQDTNDICVQGLCRQAGCDHVLNSKARRDKCGVCGGDNSSCKTVAGTFNTVHYGYNTVVRIPAGATNIDVRQHSFSGETDDDNYLALSSSKGEFLLNGNFVVTMAKREIRIGNAVVEYSGSETAVERINSTDRIEQELLLQVLSVGKLYNPDVRYSFNIPIEDKPQQFYWNSHGPWQACSKPCQGERKRKLVCTRESDQLTVSDQRCDRLPQPGHITEPCGTDCDLRWHVASRSECSAQCGLGYRTLDIYCAKYSRLDGKTEKVDDGFCSSHPKPSNREKCSGECNTGGWRYSAWTECSKSCDGGTQRRRAICVNTRNDVLDDSKCTHQEKVTIQRCSEFPCPQWKSGDWSECLVTCGKGHKHRQVWCQFGEDRLNDRMCDPETKPTSMQTCQQPECASWQAGPWGQCSVTCGQGYQLRAVKCIIGTYMSVVDDNDCNAATRPTDTQDCELPSCHPPPAAPETRRSTYSAPRTQWRFGSWTPCSATCGKGTRMRYVSCRDENGSVADESACATLPRPVAKEECSVTPCGQWKALDWSSCSVTCGQGRATRQVMCVNYSDHVIDRSECDQDYIPETDQDCSMSPCPQRTPDSGLAQHPFQNEDYRPRSASPSRTHVLGGNQWRTGPWGACSSTCAGGSQRRVVVCQDENGYTANDCVERIKPDEQRACESGPCPQWAYGNWGECTKLCGGGIRTRLVVCQRSNGERFPDLSCEILDKPPDREQCNTHACPHDAAWSTGPWSSCSVSCGRGHKQRNVYCMAKDGSHLESDYCKHLAKPHGHRKCRGGRCPKWKAGAWSQCSVSCGRGVQQRHVGCQIGTHKIARETECNPYTRPESERDCQGPRCPLYTWRAEEWQECTKTCGEGSRYRKVVCVDDNKNEVHGARCDVSKRPVDRESCSLQPCEYVWITGEWSECSVTCGKGYKQRLVSCSEIYTGKENYEYSYQTTINCPGTQPPSVHPCYLRDCPVSATWRVGNWGSCSVSCGVGVMQRSVQCLTNEDQPSHLCHTDLKPEERKTCRNVYNCELPQNCKEVKRLKGASEDGEYFLMIRGKLLKIFCAGMHSDHPKEYVTLVHGDSENFSEVYGHRLHNPTECPYNGSRRDDCQCRKDYTAAGFSSFQKIRIDLTSMQIITTDLQFARTSEGHPVPFATAGDCYSAAKCPQGRFSINLYGTGLSLTESARWISQGNYAVSDIKKSPDGTRVVGKCGGYCGKCTPSSGTGLEVRVL

SEQ ID NO: 36471 - protein, 991 aa, Homo sapiens
  VARIANT 1: note = MOD_RES - Any amino acid
XECSAQCGLGYRTLDIYCAKYSRLDGKTEKVDDGFCSSHPKPSNREKCSGECNTGGWRYSAWTECSKSCDGGTQRRRAICVNTRNDVLDDSKCTHQEKVTIQRCSEFPCPQWKSGDWSECLVTCGKGHKHRQVWCQFGEDRLNDRMCDPETKPTSMQTCQQPECASWQAGPWGQCSVTCGQGYQLRAVKCIIGTYMSVVDDNDCNAATRPTDTQDCELPSCHPPPAAPETRRSTYSAPRTQWRFGSWTPCSATCGKGTRMRYVSCRDENGSVADESACATLPRPVAKEECSVTPCGQWKALDWSSCSVTCGQGRATRQVMCVNYSDHVIDRSECDQDYIPETDQDCSMSPCPQRTPDSGLAQHPFQNEDYRPRSASPSRTHVLGGNQWRTGPWGACSSTCAGGSQRRVVVCQDENGYTANDCVERIKPDEQRACESGPCPQWAYGNWGECTKLCGGGIRTRLVVCQRSNGERFPDLSCEILDKPPDREQCNTHACPHDAAWSTGPWSSCSVSCGRGHKQRNVYCMAKDGSHLESDYCKHLAKPHGHRKCRGGRCPKWKAGAWSQCSVSCGRGVQQRHVGCQIGTHKIARETECNPYTRPESERDCQGPRCPLYTWRAEEWQECTKTCGEGSRYRKVVCVDDNKNEVHGARCDVSKRPVDRESCSLQPCEYVWITGEWSECSVTCGKGYKQRLVSCSEIYTGKENYEYSYQTTINCPGTQPPSVHPCYLRDCPVSATWRVGNWGSCSVSCGVGVMQRSVQCLTNEDQPSHLCHTDLKPEERKTCRNVYNCELPQNCKEVKRLKGASEDGEYFLMIRGKLLKIFCAGMHSDHPKEYVTLVHGDSENFSEVYGHRLHNPTECPYNGSRRDDCQCRKDYTAAGFSSFQKIRIDLTSMQIITTDLQFARTSEGHPVPFATAGDCYSAAKCPQGRFSINLYGTGLSLTESARWISQGNYAVSDIKKSPDGTRVVGKCGGYCGKCTPSSGTGLEVRVL

SEQ ID NO: 36472 - protein, 1935 aa, Homo sapiens
MQFVSWATLLTLLVRDLAEMGSPDAAAAVRKDRLHPRQVKLLETLSEYEIVSPIRVNALGEPFPTNVHFKRTRRSINSATDPWPAFASSSSSSTSSQAHYRLSAFGQQFLFNLTANAGFIAPLFTVTLLGTPGVNQTKFYSEEEAELKHCFYKGYVNTNSEHTAVISLCSGMLGTFRSHDGDYFIEPLQSMDEQEDEEEQNKPHIIYRRSAPQREPSTGRHACDTSEHKNRHSKDKKKTRARKWGERINLAGDVAALNSGLATEAFSAYGNKTDNTREKRTHRRTKRFLSYPRFVEVLVVADNRMVSYHGENLQHYILTLMSIVASIYKDPSIGNLINIVIVNLIVIHNEQDGPSISFNAQTTLKNFCQWQHSKNSPGGIHHDTAVLLTRQDICRAHDKCDTLGLAELGTICDPYRSCSISEDSGLSTAFTIAHELGHVFNMPHDDNNKCKEEGVKSPQHVMAPTLNFYTNPWMWSKCSRKYITEFLDTGYGECLLNEPESRPYPLPVQLPGILYNVNKQCELIFGPGSQVCPYMMQCRRLWCNNVNGVHKGCRTQHTPWADGTECEPGKHCKYGFCVPKEMDVPVTDGSWGSWSPFGTCSRTCGGGIKTAIRECNRPEPKNGGKYCVGRRMKFKSCNTEPCLKQKRDFRDEQCAHFDGKHFNINGLLPNVRWVPKYSGILMKDRCKLFCRVAGNTAYYQLRDRVIDGTPCGQDTNDICVQGLCRQAGCDHVLNSKARRDKCGVCGGDNSSCKTVAGTFNTVHYGYNTVVRIPAGATNIDVRQHSFSGETDDDNYLALSSSKGEFLLNGNFVVTMAKREIRIGNAVVEYSGSETAVERINSTDRIEQELLLQVLSVGKLYNPDVRYSFNIPIEDKPQQFYWNSHGPWQACSKPCQGERKRKLVCTRESDQLTVSDQRCDRLPQPGHITEPCGTDCDLRWHVASRSECSAQCGLGYRTLDIYCAKYSRLDGKTEKVDDGFCSSHPKPSNREKCSGECNTGGWRYSAWTECSKSCDGGTQRRRAICVNTRNDVLDDSKCTHQEKVTIQRCSEFPCPQWKSGDWSECLVTCGKGHKHRQVWCQFGEDRLNDRMCDPETKPTSMQTCQQPECASWQAGPWGQCSVTCGQGYQLRAVKCIIGTYMSVVDDNDCNAATRPTDTQDCELPSCHPPPAAPETRRSTYSAPRTQWRFGSWTPCSATCGKGTRMRYVSCRDENGSVADESACATLPRPVAKEECSVTPCGQWKALDWSSCSVTCGQGRATRQVMCVNYSDHVIDRSECDQDYIPETDQDCSMSPCPQRTPDSGLAQHPFQNEDYRPRSASPSRTHVLGGNQWRTGPWGACSSTCAGGSQRRVVVCQDENGYTANDCVERIKPDEQRACESGPCPQWAYGNWGECTKLCGGGIRTRLVVCQRSNGERFPDLSCEILDKPPDREQCNTHACPHDAAWSTGPWSSCSVSCGRGHKQRNVYCMAKDGSHLESDYCKHLAKPHGHRKCRGGRCPKWKAGAWSQCSVSCGRGVQQRHVGCQIGTHKIARETECNPYTRPESERDCQGPRCPLYTWRAEEWQECTKTCGEGSRYRKVVCVDDNKNEVHGARCDVSKRPVDRESCSLQPCEYVWITGEWSECSVTCGKGYKQRLVSCSEIYTGKENYEYSYQTTINCPGTQPPSVHPCYLRDCPVSATWRVGNWGSCSVSCGVGVMQRSVQCLTNEDQPSHLCHTDLKPEERKTCRNVYNCELPQNCKEVKRLKGASEDGEYFLMIRGKLLKIFCAGMHSDHPKEYVTLVHGDSENFSEVYGHRLHNPTECPYNGSRRDDCQCRKDYTAAGFSSFQKIRIDLTSMQIITTDLQFARTSEGHPVPFATAGDCYSAAKCPQGRFSINLYGTGLSLTESARWISQGNYAVSDIKKSPDGTRVVGKCGGYCGKCTPSSGTGLEVRVL

SEQ ID NO: 36473 - protein, 391 aa, Homo sapiens
MILNGEEIILSLQKTKHLLGPDYTETLYSPRGEEITTKPENMEHCYYKGNILNEKNSVASISTCDGLRGYFTHHHQRYQIKPLKSTDEKEHAVFTSNQEEQDPANHTCGVKSTDGKQGPIRISRSLKSPEKEDFLRAQKYIDLYLVLDNAFYKNYNENLTLIRSFVFDVMNLLNVIYNTIDVQVALVGMEIWSDGDKIKVVPSASTTFDNFLRWHSSNLGKKIHDHAQLLSGISFNNRRVGLAASNSLCSPSSVAVIEAKKKNNVALVGVMSHELGHVLGMPDVPFNTKCPSGSCVMNQYLSSKFPKDFSTSCRAHFERYLLSQKPKCLLQAPIPTNIMTTPVCGNHLLEVGEDCDCGSPKECTNLCCEALTCKLKPGTDCGGDAPNHTTE

SEQ ID NO: 36474 - protein, 470 aa, Homo sapiens
MLRGISQLPAVATMSWVLLPVLWLIVQTQAIAIKQTPELTLHEIVCPKKLHILHKREIKNNQTEKHGKEERYEPEVQYQMILNGEEIILSLQKTKHLLGPDYTETLYSPRGEEITTKPENMEHCYYKGNILNEKNSVASISTCDGLRGYFTHHHQRYQIKPLKSTDEKEHAVFTSNQEEQDPANHTCGVKSTDGKQGPIRISRSLKSPEKEDFLRAQKYIDLYLVLDNAFYKNYNENLTLIRSFVFDVMNLLNVIYNTIDVQVALVGMEIWSDGDKIKVVPSASTTFDNFLRWHSSNLGKKIHDHAQLLSGISFNNRRVGLAASNSLCSPSSVAVIEAKKKNNVALVGVMSHELGHVLGMPDVPFNTKCPSGSCVMNQYLSSKFPKDFSTSCRAHFERYLLSQKPKCLLQAPIPTNIMTTPVCGNHLLEVGEDCDCGSPKECTNLCCEALTCKLKPGTDCGGDAPNHTTE

SEQ ID NO: 36475 - protein, 391 aa, Homo sapiens; identical to SEQ ID NO: 36473

SEQ ID NO: 36476 - protein, 683 aa, Homo sapiens
MECCRRATPGTLLLFLAFLLLSSRTARSEEDRDGLWDAWGPWSECSRTCGGGASYSLRRCLSSKSCEGRNIRYRTCSNVDCPPEAGDFRAQQCSAHNDVKHHGQFYEWLPVSNDPDNPCSLKCQAKGTTLVVELAPKVLDGTRCYTESLDMCISGLCQIVGCDHQLGSTVKEDNCGVCNGDGSTCRLVRGQYKSQLSATKSDDTVVAIPYGSRHIRLVLKGPDHLYLETKTLQGTKGENSLSSTGTFLVDNSSVDFQKFPDKEILRMAGPLTADFIVKIRNSGSADSTVQFIFYQPIIHRWRETDFFPCSATCGGGYQLTSAECYDLRSNRVVADQYCHYYPENIKPKPKLQECNLDPCPASDGYKQIMPYDLYHPLPRWEATPWTACSSSCGGGIQSRAVSCVEEDIQGHVTSVEEWKCMYTPKMPIAQPCNIFDCPKWLAQEWSPCTVTCGQGLRYRVVLCIDHRGMHTGGCSPKTKPHIKEECIVPTPCYKPKEKLPVEAKLPWFKQAQELEEGAAVSEEPSFIPEAWSACTVTCGVGTQVRIVRCQVLLSFSQSVADLPIDECEGPKPASQRACYAGPCSGEIPEFNPDETDGLFGGLQDFDELYDWEYEGFTKCSESCGGGVQEAVVSCLNKQTREPAEENLCVTSRRPPQLLKSCNLDPCPARSSIDSAWNACNVLC

SEQ ID NO: 36477 - protein, 466 aa, Homo sapiens
MCLTDEWGFFFFFFLGVPEAEVTWFRNKSKLGSPHHLHEGSLLLTNVSSSDQGLYSCRAANLHGELTESTQLLILDPPQVPTQLEDIRALLAATGPNLPSVLTSPLGTQLVLDPGNSALLGCPIKGHPVPNITWFHGGQPIVTATGLTHHILAAGQILQVANLSGGSQGEFSCLAQNEAGVLMQKASLVIQDYWWSVDRLATCSASCGNRGVQQPRLRCLLNSTEVNPAHCAGKVRPAVQPIACNRRDCPSRWMVTSWSACTRSCGGGVQTRRVTCQKLKASGISTPVSNDMCTQVAKRPVDTQACNQQLCVEWAFSSWGQCNGPCIGPHLAVQHRQVFCQTRDGITLPSEQCSALPRPVSTQNCWSEACSVHWRVSLWTLCTATCGNYGFQSRRVECVHARTNKAVPEHLCSWGPRPANWQRCNITPCENMECRDTTRYCEKVKQLKLCQLSQFKSRCCGTCGKA

SEQ ID NO: 36478 - protein, 525 aa, Homo sapiens
MECCRRATPGTLLLFLAFLLLSSRTARSEEDRDGLWDAWGPWSECSRTCGGGASYSLRRCLSSKSCEGRNIRYRTCSNVDCPPEAGDFRAQQCSAHNDVKHHGQFYEWLPVSNDPDNPCSLKCQAKGTTLVVELAPKVLDGTRCYTESLDMCISGLCQIVGCDHQLGSTVKEDNCGVCNGDGSTCRLVRGQYKSQLSATKSDDTVVAIPYGSRHIRLVLKGPDHLYLETKTLQGTKGENSLSSTGTFLVDNSSVDFQKFPDKEILRMAGPLTADFIVKIRNSGSADSTVQFIFYQPIIHRWRETDFFPCSATCGGGYQLTSAECYDLRSNRVVADQYCHYYPENIKPKPKLQECNLDPCPASDGYKQIMPYDLYHPLPRWEATPWTACSSSCGGGIQSRAVSCVEEDIQGHVTSVEEWKCMYTPKMPIAQPCNIFDCPKWLAQEWSPCTVTCGQGLRYRVVLCIDHRGMHTGGCSPKTKPHIKEECIVPTPCYKPKEKLPVEAKLPWFKQAQELEEGAAVSEEPS

SEQ ID NO: 36479 - protein, 261 aa, Homo sapiens
MCLTDEWGFFFFFFLGVPEAEVTWFRNKSKLGSPHHLHEGSLLLTNVSSSDQGLYSCRAANLHGELTESTQLLILDPPQVPTQLEDIRALLAATGPNLPSVLTSPLGTQLVLDPGNSALLGCPIKGHPVPNITWFHGGQPIVTATGLTHHILAAGQILQVANLSGGSQGEFSCLAQNEAGVLMQKASLVIQDYWWSVDRLATCSASCGNRGVQQPRLRCLLNSTEVNPAHCAGKVRPAVQPIACNRRDCPSRAMGLASGLT

SEQ ID NO: 36480 - protein, 1762 aa, Homo sapiens
MECCRRATPGTLLLFLAFLLLSSRTARSEEDRDGLWDAWGPWSECSRTCGGGASYSLRRCLSSKSCEGRNIRYRTCSNVDCPPEAGDFRAQQCSAHNDVKHHGQFYEWLPVSNDPDNPCSLKCQAKGTTLVVELAPKVLDGTRCYTESLDMCISGLCQIVGCDHQLGSTVKEDNCGVCNGDGSTCRLVRGQYKSQLSATKSDDTVVAIPYGSRHIRLVLKGPDHLYLETKTLQGTKGENSLSSTGTFLVDNSSVDFQKFPDKEILRMAGPLTADFIVKIRNSGSADSTVQFIFYQPIIHRWRETDFFPCSATCGGGYQLTSAECYDLRSNRVVADQYCHYYPENIKPKPKLQECNLDPCPASDGYKQIMPYDLYHPLPRWEATPWTACSSSCGGGIQSRAVSCVEEDIQGHVTSVEEWKCMYTPKMPIAQPCNIFDCPKWLAQEWSPCTVTCGQGLRYRVVLCIDHRGMHTGGCSPKTKPHIKEECIVPTPCYKPKEKLPVEAKLPWFKQAQELEEGAAVSEEPSFIPEAWSACTVTCGVGTQVRIVRCQVLLSFSQSVADLPIDECEGPKPASQRACYAGPCSGEIPEFNPDETDGLFGGLQDFDELYDWEYEGFTKCSESCGGGVQEAVVSCLNKQTREPAEENLCVTSRRPPQLLKSCNLDPCPARWEIGKWSPCSLTCGVGLQTRDVFCSHLLSREMNETVILADELCRQPKPSTVQACNRFNCPPAWYPAQWQPCSRTCGGGVQKREVLCKQRMADGSFLELPETFCSASKPACQQACKKDDCPSEWLLSDWTECSTSCGEGTQTRSAICRKMLKTGLSTVVNSTLCPPLPFSSSIRPCMLATCARPGRPSTKHSPHIAAARKVYIQTRRQRKLHFVVGGFAYLLPKTAVVLRCPARRVRKPLITWEKDGQHLISSTHVTVAPFGYLKIHRLKPSDAGVYTCSAGPAREHFVIKLIGGNRKLVARPLSPRSEEEVLAGRKGGPKEALQTHKHQNGIFSNGSKAEKRGLAANPGSRYDDLVSRLLEQGGWPGELLASWEAQDSAERNTTSEEDPGAEQVLLHLPFTMVTEQRRLDDILGNLSQQPEELRDLYSKHLVAQLAQEIFRSHLEHQDTLLKPSERRTSPVTLSPHKHVSGFSSSLRTSSTGDAGGGSRRPHRKPTILRKISAAQQLSASEVVTHLGQTVALASGTLSVLLHCEAIGHPRPTISWARNGEEVQFSDRILLQPDDSLQILAPVEADVGFYTCNATNALGYDSVSIAVTLAGKPLVKTSRMTVINTEKPAVTVDIGSTIKTVQGVNVTINCQVAGVPEAEVTWFRNKSKLGSPHHLHEGSLLLTNVSSSDQGLYSCRAANLHGELTESTQLLILDPPQVPTQLEDIRALLAATGPNLPSVLTSPLGTQLVLDPGNSALLGCPIKGHPVPNITWFHGGQPIVTATGLTHHILAAGQILQVANLSGGSQGEFSCLAQNEAGVLMQKASLVIQDYWWSVDRLATCSASCGNRGVQQPRLRCLLNSTEVNPAHCAGKVRPAVQPIACNRRDCPSRWMVTSWSACTRSCGGGVQTRRVTCQKLKASGISTPVSNDMCTQVAKRPVDTQACNQQLCVEWAFSSWGQCNGPCIGPHLAVQHRQVFCQTRDGITLPSEQCSALPRPVSTQNCWSEACSVHWRVSLWTLCTATCGNYGFQSRRVECVHARTNKAVPEHLCSWGPRPANWQRCNITPCENMECRDTTRYCEKVKQLKLCQLSQFKSRCCGTCGKA

SEQ ID NO: 36481 - protein, 439 aa, Homo sapiens
MECCRRATPGTLLLFLAFLLLSSRTARSEEDRDGLWDAWGPWSECSRTCGGGASYSLRRCLSSKSCEGRNIRYRTCSNVDCPPEAGDFRAQQCSAHNDVKHHGQFYEWLPVSNDPDNPCSLKCQAKGTTLVVELAPKVLDGTRCYTESLDMCISGLCQIVGCDHQLGSTVKEDNCGVCNGDGSTCRLVRGQYKSQLSATKSDDTVVAIPYGSRHIRLVLKGPDHLYLETKTLQGTKGENSLSSTGTFLVDNSSVDFQKFPDKEILRMAGPLTADFIVKIRNSGSADSTVQFIFYQPIIHRWRETDFFPCSATCGGGYQLTSAECYDLRSNRVVADQYCHYYPENIKPKPKLQECNLDPCPARWEATPWTACSSSCGGGIQSRAVSCVEEDIQGHVTSVEEWKCMYTPKMPIAQPCNIFDCPKWLAQEWSPVTVPSFFVH

SEQ ID NO: 36482 - protein, 951 aa, Homo sapiens
MDGRWQCSCWAWFLLVLAVVAGDTVSTGSTDNSPTSNSLEGGTDATAFWWGEWTKWTACSRSCGGGVTSQERHCLQQRRKSVPGPGNRTCTGTSKRYQLCRVQECPPDGRSFREEQCVSFNSHVYNGRTHQWKPLYPDDYVHISSKPCDLHCTTVDGQRQLMVPARDGTSCKLTDLRGVCVSGKCEPIGCDGVLFSTHTLDKCGICQGDGSSCTHVTGNYRKGNAHLGYSLVTHIPAGARDIQIVERKKSADVLALADEAGYYFFNGNYKVDSPKNFNIAGTVVKYRRPMDVYETGIEYIVAQGPTNQGLNVMVWNQNGKSPSITFEYTLLQPPHESRPQPIYYGFSESAESQGLDGAGLMGFVPHNGSLYGQASSERLGLDNRLFGHPGLDMELGPSQGQETNEVCEQAGGGACEGPPRGKGFRDRNVTGTPLTGDKDDEEVDTHFASQEFFSANAISDQLLGAGSDLKDFTLNETVNSIFAQGAPRSSLAESFFVDYEENEGAGPYLLNGSYLELSSDRVANSSSEAPFPNVSTSLLTSAGNRTHKARTRPKARKQGVSPADMYRWKLSSHEPCSATCTTGVMSAYAMCVRYDGVEVDDSYCDALTRPEPVHEFCAGRECQPRWETSSWSECSRTCGEGYQFRVVRCWKMLSPGFDSSVYSDLCEAAEAVRPEERKTCRNPACGPQWEMSEWSECTAKCGERSVVTRDIRCSEDEKLCDPNTRPVGEKNCTGPPCDRQWTVSDWGPCSGSCGQGRTIRHVYCKTSDGRVVPESQCQMETKPLAIHPCGDKNCPAHWLAQDWERCNTTCGRGVKKRLVLCMELANGKPQTRSGPECGLAKKPPEESTCFERPCFKWYTSPWSECTKTCGVGVRMRDVKCYQGTDIVRGCDPLVKPVGRQACDLQPCPTEPPDDSCQDQPGTNCALAIKVNLCGHWYYSKACCRSCRPPHS

SEQ ID NO: 36483 - protein, 951 aa, Homo sapiens; identical to SEQ ID NO: 36482

SEQ ID NO: 36484 - protein, 1060 aa, Homo sapiens
MLFEVGEGGGAGEEGKGRGRPGRSLCTHAAPARTAHLAPSALRSARPFLWEDNLLTRSQGLPDNHDQLVPDNLEAWALAGPRGLFPKRTLVIWKRIGAGLVVTVALLPRMDGRWQCSCWAWFLLVLAVVAGDTVSTGSTDNSPTSNSLEGGTDATAFWWGEWTKWTACSRSCGGGVTSQERHCLQQRRKSVPGPGNRTCTGTSKRYQLCRVQECPPDGRSFREEQCVSFNSHVYNGRTHQWKPLYPDDYVHISSKPCDLHCTTVDGQRQLMVPARDGTSCKLTDLRGVCVSGKCEPIGCDGVLFSTHTLDKCGICQGDGSSCTHVTGNYRKGNAHLGYSLVTHIPAGARDIQIVERKKSADVLALADEAGYYFFNGNYKVDSPKNFNIAGTVVKYRRPMDVYETGIEYIVAQGPTNQGLNVMVWNQNGKSPSITFEYTLLQPPHESRPQPIYYGFSESAESQGLDGAGLMGFVPHNGSLYGQASSERLGLDNRLFGHPGLDMELGPSQGQETNEVCEQAGGGACEGPPRGKGFRDRNVTGTPLTGDKDDEEVDTHFASQEFFSANAISDQLLGAGSDLKDFTLNETVNSIFAQGAPRSSLAESFFVDYEENEGAGPYLLNGSYLELSSDRVANSSSEAPFPNVSTSLLTSAGNRTHKARTRPKARKQGVSPADMYRWKLSSHEPCSATCTTGVMSAYAMCVRYDGVEVDDSYCDALTRPEPVHEFCAGRECQPRWETSSWSECSRTCGEGYQFRVVRCWKMLSPGFDSSVYSDLCEAAEAVRPEERKTCRNPACGPQWEMSEWSECTAKCGERSVVTRDIRCSEDEKLCDPNTRPVGEKNCTGPPCDRQWTVSDWGPCSGSCGQGRTIRHVYCKTSDGRVVPESQCQMETKPLAIHPCGDKNCPAHWLAQDWERCNTTCGRGVKKRLVLCMELANGKPQTRSGPECGLAKKPPEESTCFERPCFKWYTSPWSECTKTCGVGVRMRDVKCYQGTDIVRGCDPLVKPVGRQACDLQPCPTEPPDDSCQDQPGTNCALAIKVNLCGHWYYSKACCRSCRPPHS

SEQ ID NO: 36485 - protein, 1691 aa, Homo sapiens
MASWTSPWWVLIGMVFMHSPLPQTTAEKSPGAYFLPEFALSPQGSFLEDTTGEQFLTYRYDDQTSRNTRSDEDKDGNWDAWGDWSDCSRTCGGGASYSLRRCLTGRNCEGQNIRYKTCSNHDCPPDAEDFRAQQCSAYNDVQYQGHYYEWLPRYNDPAAPCALKCHAQGQNLVVELAPKVLDGTRCNTDSLDMCISGICQAVGCDRQLGSNAKEDNCGVCAGDGSTCRLVRGQSKSHVSPEKREENVIAVPLGSRSVRITVKGPAHLFIESKTLQGSKGEHSFNSPGVFLVENTTVEFQRGSERQTFKIPGPLMADFIFKTRYTAAKDSVVQFFFYQPISHQWRQTDFFPCTVTCGGGYQLNSAECVDIRLKRVVPDHYCHYYPENVKPKPKLKECSMDPCPSSDGFKEIMPYDHFQPLPRWEHNPWTACSVSCGGGIQRRSFVCVEESMHGEILQVEEWKCMYAPKPKVMQTCNLFDCPKWIAMEWSQCTVTCGRGLRYRVVLCINHRGEHVGGCNPQLKLHIKEECVIPIPCYKPKEKSPVEAKLPWLKQAQELEETRIATEEPTFIPEPWSACSTTCGPGVQVREVKCRVLLTFTQTETELPEEECEGPKLPTERPCLLEACDESPASRELDIPLPEDSETTYDWEYAGFTPCTATCVGGHQEAIAVCLHIQTQQTVNDSLCDMVHRPPAMSQACNTEPCPPRWHVGSWGPCSATCGVGIQTRDVYCLHPGETPAPPEECRDEKPHALQACNQFDCPPGWHIEEWQQCSRTCGGGTQNRRVTCRQLLTDGSFLNLSDELCQGPKASSHKSCARTDCPPHLAVGDWSKCSVSCGVGIQRRKQVCQRLAAKGRRIPLSEMMCRDLPGLPLVRSCQMPECSKIKSEMKTKLGEQGPQILSVQRVYIQTREEKRINLTIGSRAYLLPNTSVIIKCPVRRFQKSLIQWEKDGRCLQNSKRLGITKSGSLKIHGLAAPDIGVYRCIAGSAQETVVLKLIGTDNRLIARPALREPMREYPGMDHSEANSLGVTWHKMRQMWNNKNDLYLDDDHISNQPFLRALLGHCSNSAGSTNSWELKNKQFEAAVKQGAYSMDTAQFDELIRNMSQLMETGEVSDDLASQLIYQLVAELAKAQPTHMQWRGIQEETPPAAQLRGETGSVSQSSHAKNSGKLTFKPKGPVLMRQSQPPSISFNKTINSRIGNTVYITKRTEVINILCDLITPSEATYTWTKDGTLLQPSVKIILDGTGKIQIQNPTRKEQGIYECSVANHLGSDVESSSVLYAEAPVILSVERNITKPEHNHLSVVVGGIVEAALGANVTIRCPVKGVPQPNITWLKRGGSLSGNVSLLFNGSLLLQNVSLENEGTYVCIATNALGKAVATSVLHLLERRWPESRIVFLQGHKKYILQATNTRTNSNDPTGEPPPQEPFWEPGNWSHCSATCGHLGARIQRPQCVMANGQEVSEALCDHLQKPLAGFEPCNIRDCPARWFTSVWSQCSVSCGEGYHSRQVTCKRTKANGTVQVVSPRACAPKDRPLGRKPCFGHPCVQWEPGNRCPGRCMGRAVRMQQRHTACQHNSSDSNCDDRKRPTLRRNCTSGACDVCWHTGPWKPCTAACGRGFQSRKVDCIHTRSCKPVAKRHCVQKKKPISWRHCLGPSCDRDCTDTTHYCMFVKHLNLCSLDRYKQRCCQSCQEG

SEQ ID NO: 36486 - protein, 1074 aa, Homo sapiens
MENWTGRPWLYLLLLLSLPQLCLDQEVLSGHSLQTPTEEGQGPEGVWGPWVQWASCSQPCGVGVQRRSRTCQLPTVQLHPSLPLPPRPPRHPEALLPRGQGPRPQTSPETLPLYRTQSRGRGGPLRGPASHLGREETQEIRAARRSRLRDPIKPGMFGYGRVPFALPLHRNRRHPRSPPRSELSLISSRGEEAIPSPTPRAEPFSANGSPQTELPPTELSVHTPSPQAEPLSPETAQTEVAPRTRPAPLRHHPRAQASGTEPPSPTHSLGEGGFFRASPQPRRPSSQGWASPQVAGRRPDPFPSVPRGRGQQGQGPWGTGGTPHGPRLEPDPQHPGAWLPLLSNGPHASSLWSLFAPSSPIPRCSGESEQLRACSQAPCPPEQPDPRALQCAAFNSQEFMGQLYQWEPFTEVQGSQRCELNCRPRGFRFYVRHTEKVQDGTLCQPGAPDICVAGRCLSPGCDGILGSGRRPDGCGVCGGDDSTCRLVSGNLTDRGGPLGYQKILWIPAGALRLQIAQLRPSSNYLALRGPGGRSIINGNWAVDPPGSYRAGGTVFRYNRPPREEGKGESLSAEGPTTQPVDVYMIFQEENPGVFYQYVISSPPPILENPTPEPPVPQLQPEILRVEPPLAPAPRPARTPGTLQRQVRIPQMPAPPHPRTPLGSPAAYWKRVGHSACSASCGKGVWRPIFLCISRESGEELDERSCAAGARPPASPEPCHGTPCPPYWEAGEWTSCSRSCGPGTQHRQLQCRQEFGGGGSSVPPERCGHLPRPNITQSCQLRLCGHWEVGSPWSQCSVRCGRGQRSRQVRCVGNNGDEVSEQECASGPPQPPSREACDMGPCTTAWFHSDWSSKCSAECGTGIQRRSVVCLGSGAALGPGQGEAGAGTGQSCPTGSRPPDMRACSLGPCERTWRWYTGPWGECSSECGSGTQRRDIICVSKLGTEFNVTSPSNCSHLPRPPALQPCQGQACQDRWFSTPWSPCSRSCQGGTQTREVQCLSTNQTLSTRCPPQLRPSRKRPCNSQPCSQRPDDQCKDSSPHCPLVVQARLCVYPYYTATCCRSCAHVLERSPQDPS

SEQ ID NO: 36487 - protein, 1074 aa, Homo sapiens; identical to SEQ ID NO: 36486

SEQ ID NO: 36488 - protein, 1097 aa, Homo sapiens
MENWTGRPWLYLLLLLSLPQLCLDQEVLSGHSLQTPTEEGQGPEGVWGPWVQWASCSQPCGVGVQRRSRTCQLPTVQLHPSLPLPPRPPRHPEALLPRGQGPRPQTSPETLPLYRTQSRGRGGPLRGPASHLGREETQEIRAARRSRLRDPIKPGMFGYGRVPFALPLHRNRRHPRSPPRSELSLISSRGEEAIPSPTPRAEPFSANGSPQTELPPTELSVHTPSPQAEPLSPETAQTEVAPRTRPAPLRHHPRAQASGTEPPSPTHSLGEGGFFRASPQPRRPSSQGWASPQVAGRRPDPFPSVPRGRGQQGQGPWGTGGTPHGPRLEPDPQHPGAWLPLLSNGPHASSLWSLFAPSSPIPRCSGESEQLRACSQAPCPPEQPDPRALQCAAFNSQEFMGQLYQWEPFTEAPLLPLRHAFFLLPGAGSGDSTGVQGSQRCELNCRPRGFRFYVRHTEKVQDGTLCQPGAPDICVAGRCLSPGCDGILGSGRRPDGCGVCGGDDSTCRLVSGNLTDRGGPLGYQKILWIPAGALRLQIAQLRPSSNYLALRGPGGRSIINGNWAVDPPGSYRAGGTVFRYNRPPREEGKGESLSAEGPTTQPVDVYMIFQEENPGVFYQYVISSPPPILENPTPEPPVPQLQPEILRVEPPLAPAPRPARTPGTLQRQVRIPQMPAPPHPRTPLGSPAAYWKRVGHSACSASCGKGVWRPIFLCISRESGEELDERSCAAGARPPASPEPCHGTPCPPYWEAGEWTSCSRSCGPGTQHRQLQCRQEFGGGGSSVPPERCGHLPRPNITQSCQLRLCGHWEVGSPWSQCSVRCGRGQRSRQVRCVGNNGDEVSEQECASGPPQPPSREACDMGPCTTAWFHSDWSSKCSAECGTGIQRRSVVCLGSGAALGPGQGEAGAGTGQSCPTGSRPPDMRACSLGPCERTWRWYTGPWGECSSECGSGTQRRDIICVSKLGTEFNVTSPSNCSHLPRPPALQPCQGQACQDRWFSTPWSPCSRSCQGGTQTREVQCLSTNQTLSTRCPPQLRPSRKRPCNSQPCSQRPDDQCKDSSPHCPLVVQARLCVYPYYTATCCRSCAHVLERSPQDPS

SEQ ID NO: 36489 - protein, 877 aa, Homo sapiens
MENWTGRPWLYLLLLLSLPQLCLDQEVLSGHSLQTPTEEGQGPEGVWGPWVQWASCSQPCGVGVQRRSRTCQLPTVQLHPSLPLPPRPPRHPEALLPRGQGPRPQTSPETLPLYRTQSRGRGGPLRGPASHLGREETQEIRAARRSRLRDPIKPGMFGYGRVPFALPLHRNRRHPRSPPRSELSLISSRGEEAIPSPTPRAEPFSANGSPQTELPPTELSVHTPSPQAEPLSPETAQTEVAPRTRPAPLRHHPRAQASGTEPPSPTHSLGEGGFFRASPQPRRPSSQGWASPQVAGRRPDPFPSVPRGRGQQGQGPWGTGGTPHGPRLEPDPQHPGAWLPLLSNGPHASSLWSLFAPSSPIPRCSGESEQLRACSQAPCPPEQPDPRALQCAAFNSQEFMGQLYQWEPFTEVQGSQRCELNCRPRGFRFYVRHTEKVQDGTLCQPGAPDICVAGRCLSPGCDGILGSGRRPDGCGVCGGDDSTCRLVSGNLTDRGGPLGYQKILWIPAGALRLQIAQLRPSSNYLALRGPGGRSIINGNWAVDPPGSYRAGGTVFRYNRPPREEGKGESLSAEGPTTQPVDVYMIFQEENPGVFYQYVISSPPPILENPTPEPPVPQLQPEILRVEPPLAPAPRPARTPGTLQRQVRIPQMPAPPHPRTPLGSPAAYWKRVGHSACSASCGKGVWRPIFLCISRESGEELDERSCAAGARPPASPEPCHGTPCPPYWEAGEWTSCSRSCGPGTQHRQLQCRQEFGGGGSSVPPERCGHLPRPNITQSCQLRLCGHWEVGSPWSQCSVRCGRGQRSRQVRCVGNNGDEVSEQECASGPPQPPSREACDMGPCTTAWFHSDWSSKVSPEPPAISCILGNHAQDTSAFPA

SEQ ID NO: 36490 - protein, 436 aa, Homo sapiens
MGSLALAGVLMAVESVGVMILPVALFRGTSLTEGAPWAIRRSCGFQREPCGSRLPSSGLAPTTWHFVALGRSIINGNWAVDPPGSYRAGGTVFRYNRPPREEGKGESLSAEGPTTQPVDVYMIFQEENPGVFYQYVISSPPPILENPTPEPPVPQLQPEILRVEPPLAPAPRPARTPGTLQRQVRIPQMPAPPHPRTPLGSPAAYWKRVGHSACSASCGKGVWRPIFLCISRESGEELDERSCAAGARPPASPEPCHGTPCPPYWEAGEWTSCSRSCGPGTQHRQLQCRQEFGGGGSSVPPERCGHLPRPNITQSCQLRLCGHWEVGSPWSQCSVRCGRGQRSRQVRCVGNNGDEVSEQECASGPPQPPSREACDMGPCTTAWFHSDWSSKCSAECGTGIQRRSVVCLGSGAALGPGQGEAGAGTGQSCPTGSRPP

SEQ ID NO: 36491 - protein, 709 aa, Homo sapiens
MPGIDKLPIEETLEDSPQTRSLLGVFEEDATAISNYMNQLYQAMHRIYDAQNELSAATHLTSKLLKEYEKQRFPLGGDDEVMSSTLQQFSKVIDELSSCHAVLSTQLADAMMFPITQFKERDLKEILTLKEVFQIASNDHDAAINRYSRLSKKRENDKVKYEVTEDVYTSRKKQHQTMMHYFCALNTLQYKKKIALLEPLLGYMQAQISFFKMGSENLNEQLEEFLANIGTSVQNVRREMDSDIETMQQTIEDLEVASDPLYVPDPDPTKFPVNRNLTRKAGYLNARNKTGLVSSTWDRQFYFTQGGNLMSQARGDVAGGLAMDIDNCSVMAVDCEDRRYCFQITSFDGKKSSILQAESKKDHEEWICTINNISKQIYLSENPEETAARVNQSALEAVTPSPSFQQRHESLRPAAGQSRPPTARTSSSGSLGSESTNLAALSLDSLVAPDTPIQFDIISPVCEDQPGQAKAFGQGGRRTNPFGESGGSTKSETEDSILHQLFIVRFLGSMEVKSDDHPDVVYETMRQILAARAIHNIFRMTESHLLVTCDCLKLIDPQTQVTRLTFPLPCVVLYATHQENKRLFGFVLRTSSGRSESNLSSVCYIFESNNEGEKICDSVGLAKQIALHAELDRRASEKQKEIERVKEKQQKELNKQKQIEKDLEEQSRLIAASSRPNQASSEGQFVVLSSSQSEESDLGEGGKKRESEA

SEQ ID NO: 36492 - protein, 664 aa, Homo sapiens
MPAVDKLLLEEALQDSPQTRSLLSVFEEDAGTLTDYTNQLLQAMQRVYGAQNEMCLATQQLSKQLLAYEKQNFALGKGDEEVISTLHYFSKVVDELNLLHTELAKQLADTMVLPIIQFREKDLTEVSTLKDLFGLASNEHDLSMAKYSRLPKKKENEKVKTEVGKEVAAARRKQHLSSLQYYCALNALQYRKQMAMMEPMIGFAHGQINFFKKGAEMFSKRMDSFLSSVADMVQSIQVELEAEAEKMRVSQQELLSVDESVYTPDSDVAAPQINRNLIQKAGYLNLRNKTGLVTTTWERLYFFTQGGNLMCQPRGAVAGGLIQDLDNCSVMAVDCEDRRYCFQITTPNGKSGIILQAESRKENEEWICAINNISRQIYLTDNPEAVAIKLNQTALQAVTPITSFGKKQESSCPSQNLKNSEMENENDKIVPKATASLPEAEELIAPGTPIQFDIVLPATEFLDQNRGSRRTNPFGETEDESFPEAEDSLLQQMFIVRFLGSMAVKTDSTTEVIYEAMRQVLAARAIHNIFRMTESHLMVTSQSLRLIDPQTQVSRANFELTSVTQFAAHQENKRLVGFVIRVPESTGEESLSTYIFESNSEGEKICYAINLGKEIIEVQKDPEALAQLMLSIPLTNDGKYVLLNDQPDDDDGNPNEHRGAESEA

SEQ ID NO: 36493 - protein, 670 aa, Homo sapiens
MPAVDKLLLEEALQDSPQTRSLLSVFEEDAGTLTDYTNQLLQAMQRVYGAQNEMCLATQQLSKQLLAYEKQNFALGKGDEEVISTLHYFSKVVDELNLLHTELAKQLADTMVLPIIQFREKDLTEVSTLKDLFGLASNDVCLFLEHDLSMAKYSRLPKKKENEKVKTEVGKEVAAARRKQHLSSLQYYCALNALQYRKQMAMMEPMIGFAHGQINFFKKGAEMFSKRMDSFLSSVADMVQSIQVELEAEAEKMRVSQQELLSVDESVYTPDSDVAAPQINRNLIQKAGYLNLRNKTGLVTTTWERLYFFTQGGNLMCQPRGAVAGGLIQDLDNCSVMAVDCEDRRYCFQITTPNGKSGIILQAESRKENEEWICAINNISRQIYLTDNPEAVAIKLNQTALQAVTPITSFGKKQESSCPSQNLKNSEMENENDKIVPKATASLPEAEELIAPGTPIQFDIVLPATEFLDQNRGSRRTNPFGETEDESFPEAEDSLLQQMFIVRFLGSMAVKTDSTTEVIYEAMRQVLAARAIHNIFRMTESHLMVTSQSLRLIDPQTQVSRANFELTSVTQFAAHQENKRLVGFVIRVPESTGEESLSTYIFESNSEGEKICYAINLGKEIIEVQKDPEALAQLMLSIPLTNDGKYVLLNDQPDDDDGNPNEHRGAESEA

SEQ ID NO: 36494 - protein, 919 aa, Homo sapiens
MTDSKYFTTTKKGEIFELKAELNSDKKEKKKEAVKKVIASMTVGKDVSALFPDVVNCMQTDNLELKKLVYLYLMNYAKSQPDMAIMAVNTFVKDCEDPNPLIRALAVRTMGCIRVDKITEYLCEPLRKCLKDEDPYVRKTAAVCVAKLHDINAQLVEDQGFLDTLKDLISDSNPMVVANAVAALSEIAESHPSSNLLDLNPQSINKLLTALNECTEWGQIFILDCLANYMPKDDREAQSICERVTPRLSHANSAVVLSAVKVLMKFMEMLSKDLDYYGTLLKKLAPPLVTLLSAEPELQYVALRNINLIVQKRPEILKHEMKVFFVKYNDPIYVKLEKLDIMIRLASQANIAQVLAELKEYATEVDVDFVRKAVRAIGRCAIKVEQSAERCVSTLLDLIQTKVNYVVQEAIVVIKDIFRKYPNKYESVIATLCENLDSLDEPEARAAMIWIVGEYAERIDNADELLESFLEGFHDESTQVQLQLLTAIVKLFLKKPTETQELVQQVLSLATQDSDNPDLRDRGYIYWRLLSTDPVAAKEVVLAEKPLISEETDLIEPTLLDELICYIGTLASVYHKPPSAFVEGGRGVVHKSLPPRTASSESAESPETAPTGAPPGEQPDVIPAQGDLLGDLLNLDLGPPVSGPPLATSSVQMGAVDLLGGGLDSLIGGTNFVAPPTAAVPANLGAPIGSGLSDLFDLTSGVGTLSGSYVAPKAVGSISMDLQLTNKALQVMTDFAIQFNRNSFGLAPATPLQVHAPLSPNQTVEISLPLSTVGSVMKMEPLNNLQVAVKNNIDVFYFSTLYPLHILFVEDGKMDRQMFLATWKDIPNENEAQFQIRDCPLNAEAASSKLQSSNIFTVAKRNVEGQDMLYQSLKLTNGIWVLAELRIQPGNPSCTLSLKCRAPEVSQHVYQAYETILKN

SEQ ID NO: 36495 - protein, 942 aa, Homo sapiens
MTDSKYFTTTKKGEIFELKAELNSDKKEKKKEAVKKVIASMTVGKDVSALFPDVVNCMQTDNLELKKLVYLYLMNYAKSQPDMAIMAVNTFVKDCEDPNPLIRALAVRTMGCIRVDKITEYLCEPLRKCLKDEDPYVRKTAAVCVAKLHDINAQLVEDQGFLDTLKDLISDSNPMVVANAVAALSEIAESHPSSNLLDLNPQSINKLLTALNECTEWGQIFILDCLANYMPKDDREAQSICERVTPRLSHANSAVVLSAVKVLMKFMEMLSKDLDYYGTLLKKLAPPLVTLLSAEPELQYVALRNINLIVQKRPEILKHEMKVFFVKYNDPIYVKLEKLDIMIRLASQANIAQVLAELKEYATEVDVDFVRKAVRAIGRCAIKVEQSAERCVSTLLDLIQTKVNYVVQEAIVVIKDIFRKYPNKYESVIATLCENLDSLDEPEARAAMIWIVGEYAERIDNADELLESFLEGFHDESTQVQLQLLTAIVKLFLKKPTETQELVQQVLSLATQDSDNPDLRDRGYIYWRLLSTDPVAAKEVVLAEKPLISEETDLIEPTLLDELICYIGTLASVYHKPPSAFVEGGRGVVHKSLPPRTASSESAESPETAPTGAPPGEQPDVIPAQGDLLGDLLNLDLGPPVSGPPLATSSVQMGAVDLLGGGLDSLIGGTNFVAPPTAAVPANLGAPIGSGLSDLFDLTSGVGTLSGSYVAPKAVWLPAMKAKGLEISGTFTRQVGSISMDLQLTNKALQVMTDFAIQFNRNSFGLAPATPLQVHAPLSPNQTVEISLPLSTVGSVMKMEPLNNLQVAVKNNIDVFYFSTLYPLHILFVEDGKMDRQMFLATWKDIPNENEAQFQIRDCPLNAEAASSKLQSSNIFTVAKRNVEGQDMLYQSLKLTNGIWVLAELRIQPGNPSCTDLELSLKCRAPEVSQHVYQAYETILKN

SEQ ID NO: 36496 - protein, 949 aa, Homo sapiens
MTDSKYFTTTKKGEIFELKAELNSDKKEKKKEAVKKVIASMTVGKDVSALFPDVVNCMQTDNLELKKLVYLYLMNYAKSQPDMAIMAVNTFVKDCEDPNPLIRALAVRTMGCIRVDKITEYLCEPLRKCLKDEDPYVRKTAAVCVAKLHDINAQLVEDQGFLDTLKDLISDSNPMVVANAVAALSEIAESHPSSNLLDLNPQSINKLLTALNECTEWGQIFILDCLANYMPKDDREAQSICERVTPRLSHANSAVVLSAVKVLMKFMEMLSKDLDYYGTLLKKLAPPLVTLLSAEPELQYVALRNINLIVQKRPEILKHEMKVFFVKYNDPIYVKLEKLDIMIRLASQANIAQVLAELKEYATEVDVDFVRKAVRAIGRCAIKVEQSAERCVSTLLDLIQTKVNYVVQEAIVVIKDIFRKYPNKYESVIATLCENLDSLDEPEARAAMIWIVGEYAERIDNADELLESFLEGFHDESTQVQLQLLTAIVKLFLKKPTETQELVQQVLSLATQDSDNPDLRDRGYIYWRLLSTDPVAAKEVVLAEKPLISEETDLIEPTLLDELICYIGTLASVYHKPPSAFVEGGRGVVHKSLPPRTASSESAESPETAPTGAPPGEQPDVIPAQGDLLGDLLNLDLGPPVSGPPLATSSVQMGAVDLLGGGLDSLMGDEPEGIGGTNFVAPPTAAVPANLGAPIGSGLSDLFDLTSGVGTLSGSYVAPKAVWLPAMKAKGLEISGTFTRQVGSISMDLQLTNKALQVMTDFAIQFNRNSFGLAPATPLQVHAPLSPNQTVEISLPLSTVGSVMKMEPLNNLQVAVKNNIDVFYFSTLYPLHILFVEDGKMDRQMFLATWKDIPNENEAQFQIRDCPLNAEAASSKLQSSNIFTVAKRNVEGQDMLYQSLKLTNGIWVLAELRIQPGNPSCTDLELSLKCRAPEVSQHVYQAYETILKN

SEQ ID NO: 36497 - protein, 939 aa, Homo sapiens
MTDSKYFTTTKKGEIFELKAELNSDKKEKKKEAVKKVIASMTVGKDVSALFPDVVNCMQTDNLELKKLVYLYLMNYAKSQPDMAIMAVNTFVKDCEDPNPLIRALAVRTMGCIRVDKITEYLCEPLRKCLKDEDPYVRKTAAVCVAKLHDINAQLVEDQGFLDTLKDLISDSNPMVVANAVAALSEIAESHPSSNLLDLNPQSINKLLTALNECTEWGQIFILDCLANYMPKDDREAQSICERVTPRLSHANSAVVLSAVKVLMKFMEMLSKDLDYYGTLLKKLAPPLVTLLSAEPELQYVALRNINLIVQKRPEILKHEMKVFFVKYNDPIYVKLEKLDIMIRLASQANIAQVLAELKEYATEVDVDFVRKAVRAIGRCAIKVEQSAERCVSTLLDLIQTKVNYVVQEAIVVIKDIFRKYPNKYESVIATLCENLDSLDEPEARAAMIWIVGEYAERIDNADELLESFLEGFHDESTQVQLQLLTAIVKLFLKKPTETQELVQQVLSLATQDSDNPDLRDRGYIYWRLLSTDPVAAKEVVLAEKPLISEETDLIEPTLLDELICYIGTLASVYHKPPSAFVEGGRGVVHKSLPPRTASSESAESPETAPTGAPPGEQPDVIPAQGDLLGDLLNLDLGPPVSGPPLATSSVQMGAVDLLGGGLDSLIGGTNFVAPPTAAVPANLGAPIGSGLSDLFDLTSGVGTLSGSYVAPKAVWLPAMKAKGLEISGTFTRQVGSISMDLQLTNKALQVMTDFAIQFNRNSFGLAPATPLQVHAPLSPNQTVEISLPLSTVGSVMKMEPLNNLQVAVKNNIDVFYFSTLYPLHILFVEDGKMDRQMFLATWKDIPNENEAQFQIRDCPLNAEAASSKLQSSNIFTVAKRNVEGQDMLYQSLKLTNGIWVLAELRIQPGNPSCTLSLKCRAPEVSQHVYQAYETILKN

SEQ ID NO: 36498 - protein, 949 aa, Homo sapiens; identical to SEQ ID NO: 36496

SEQ ID NO: 36499 - protein, 939 aa, Homo sapiens; identical to SEQ ID NO: 36497

SEQ ID NO: 36500 - protein, 578 aa, Homo sapiens
MTDSKYFTTTKKGEIFELKAELNSDKKEKKKEAVKKVIASMTVGKDVSALFPDVVNCMQTDNLELKKLVYLYLMNYAKSQPDMAIMAVNTFVKDCEDPNPLIRALAVRTMGCIRVDKITEYLCEPLRKCLKDEDPYVRKTAAVCVAKLHDINAQLVEDQGFLDTLKDLISDSNPMVVANAVAALSEIAESHPSSNLLDLNPQSINKLLTALNECTEWGQIFILDCLANYMPKDDREAQSICERVTPRLSHANSAVVLSAVKVLMKFMEMLSKDLDYYGTLLKKLAPPLVTLLSAEPELQYVALRNINLIVQKRPEILKHEMKVFFVKYNDPIYVKLEKLDIMIRLASQANIAQVLAELKEYATEVDVDFVRKAVRAIGRCAIKVEQSAERCVSTLLDLIQTKVNYVVQEAIVVIKDIFRKYPNKYESVIATLCENLDSLDEPEARAAMIWIVGEYAERIDNADELLESFLEGFHDESTQVQLQLLTAIVKLFLKKPTETQELVQQVLSLATQDSDNPDLRDRGYIYWRLLSTDPVAAKEVVLAEKPLISEETDLIEPTLLDELICYIGTLASVYHKPP

SEQ ID NO: 36501 - protein, 939 aa, Homo sapiens; identical to SEQ ID NO: 36497

SEQ ID NO: 36502 - protein, 822 aa, Homo sapiens
MPAPIRLRELIRTIRTARTQAEEREMIQKECAAIRSSFREEDNTYRCRNVAKLLYMHMLGYPAHFGQLECLKLIASQKFTDKRIGYLGAMLLLDERQDVHLLMTNCIKNDLNHSTQFVQGLALCTLGCMGSSEMCRDLAGEVEKLLKTSNSYLRKKAALCAVHVIRKVPELMEMFLPATKNLLNEKNHGVLHTSVVLLTEMCERSPDMLAHFRKLVPQLVRILKNLIMSGYSPEHDVSGISDPFLQVRILRLLRILGRNDDDSSEAMNDILAQVATNTETSKNVGNAILYETVLTIMDIKSESGLRVLAINILGRFLLNNDKNIRYVALTSLLKTVQTDHNAVQRHRSTIVDCLKDLDVSIKRRAMELSFALVNGNNIRGMMKELLYFLDSCEPEFKADCASGIFLAAEKYAPSKRWHIDTIMRVLTTAGSYVRDDAVPNLIQLITNSVEMHAYTVQRLYKAILGDYSQQPLVQVAAWCIGEYGDLLVSGQCEEEEPIQVTEDEVLDILESVLISNMSTSVTRGYALTAIMKLSTRFTCTVNRIKKVVSIYGSSIDVELQQRAVEYNALFKKYDHMRSALLERMPVMEKVTTNGPTEIVQTNGETEPAPLETKPPPSGPQPTSQANDLLDLLGGNDITPVIPTAPTSKPSSAGGELLDLLGDINLTGAPAAAPAPASVPQISQPPFLLDGLSSQPLFNDIAAGIPSITAYSKNGLKIEFTFERSNTNPSVTVITIQASNSTELDMTDFVFQAAVPKTFQLQLLSPSSSIVPAFNTGTITQVIKVLNPQKQQLRMRIKLTYNHKGSAMQDLAEVNNFPPQSWQ

SEQ ID NO: 36503 - protein, 825 aa, Homo sapiens
MPAPIRLRELIRTIRTARTQAEEREMIQKECAAIRSSFREEDNTYRCRNVAKLLYMHMLGYPAHFGQLECLKLIASQKFTDKRIGYLGAMLLLDERQDVHLLMTNCIKNDLNHSTQFVQGLALCTLGCMGSSEMCRDLAGEVEKLLKTSNSYLRKKAALCAVHVIRKVPELMEMFLPATKNLLNEKNHGVLHTSVVLLTEMCERSPDMLAHFRKNEKLVPQLVRILKNLIMSGYSPEHDVSGISDPFLQVRILRLLRILGRNDDDSSEAMNDILAQVATNTETSKNVGNAILYETVLTIMDIKSESGLRVLAINILGRFLLNNDKNIRYVALTSLLKTVQTDHNAVQRHRSTIVDCLKDLDVSIKRRAMELSFALVNGNNIRGMMKELLYFLDSCEPEFKADCASGIFLAAEKYAPSKRWHIDTIMRVLTTAGSYVRDDAVPNLIQLITNSVEMHAYTVQRLYKAILGDYSQQPLVQVAAWCIGEYGDLLVSGQCEEEEPIQVTEDEVLDILESVLISNMSTSVTRGYALTAIMKLSTRFTCTVNRIKKVVSIYGSSIDVELQQRAVEYNALFKKYDHMRSALLERMPVMEKVTTNGPTEIVQTNGETEPAPLETKPPPSGPQPTSQANDLLDLLGGNDITPVIPTAPTSKPSSAGGELLDLLGDINLTGAPAAAPAPASVPQISQPPFLLDGLSSQPLFNDIAAGIPSITAYSKNGLKIEFTFERSNTNPSVTVITIQASNSTELDMTDFVFQAAVPKTFQLQLLSPSSSIVPAFNTGTITQVIKVLNPQKQQLRMRIKLTYNHKGSAMQDLAEVNNFPPQSWQ

SEQ ID NO: 36504 - protein, 825 aa, Homo sapiens
MPAPIRLRELIRTIRTARTQAEEREMIQKECAAIRSSFREEDNTYRCRNVAKLLYMHMLGYPAHFGQLECLKLIASQKFTDKRIGYLGAMLLLDERQDVHLLMTNCIKNDLNHSTQFVQGLALCTLGCMGSSEMCRDLAGEVEKLLKTSNSYLRKKAALCAVHVIRKVPELMEMFLPATKNLLNEKNHGVLHTSVVLLTEMCERSPDMLAHFRKESKLVPQLVRILKNLIMSGYSPEHDVSGISDPFLQVRILRLLRILGRNDDDSSEAMNDILAQVATNTETSKNVGNAILYETVLTIMDIKSESGLRVLAINILGRFLLNNDKNIRYVALTSLLKTVQTDHNAVQRHRSTIVDCLKDLDVSIKRRAMELSFALVNGNNIRGMMKELLYFLDSCEPEFKADCASGIFLAAEKYAPSKRWHIDTIMRVLTTAGSYVRDDAVPNLIQLITNSVEMHAYTVQRLYKAILGDYSQQPLVQVAAWCIGEYGDLLVSGQCEEEEPIQVTEDEVLDILESVLISNMSTSVTRGYALTAIMKLSTRFTCTVNRIKKVVSIYGSSIDVELQQRAVEYNALFKKYDHMRSALLERMPVMEKVTTNGPTEIVQTNGETEPAPLETKPPPSGPQPTSQANDLLDLLGGNDITPVIPTAPTSKPSSAGGELLDLLGDINLTGAPAAAPAPASVPQISQPPFLLDGLSSQPLFNDIAAGIPSITAYSKNGLKIEFTFERSNTNPSVTVITIQASNSTELDMTDFVFQAAVPKTFQLQLLSPSSSIVPAFNTGTITQVIKVLNPQKQQLRMRIKLTYNHKGSAMQDLAEVNNFPPQSWQ

SEQ ID NO: 36505 - protein, 565 aa, Homo sapiens
MFGSCCHCCRRPRSCWFHSRFRAVSGVQSQAVGVEKRRQRSWARRGREPQGLLRLLEGRPRGLGPGGSARRGVPCCGVAPPRMPAPIRLRELIRTIRTARTQAEEREMIQKECAAIRSSFREEDNTYRCRNVAKLLYMHMLGYPAHFGQLECLKLIASQKFTDKRIGYLGAMLLLDERQDVHLLMTNCIKNDLNHSTQFVQGLALCTLGCMGSSEMCRDLAGEVEKLLKTSNSYLRKKAALCAVHVIRKVPELMEMFLPATKNLLNEKNHGVLHTSVVLLTEMCERSPDMLAHFRKESKLVPQLVRILKNLIMSGYSPEHDVSGISDPFLQVRILRLLRILGRNDDDSSEAMNDILAQVATNTETSKNVGNAILYETVLTIMDIKSESGLRVLAINILGRFLLNNDKNIRYVALTSLLKTVQTDHNAVQRHRSTIVDCLKDLDVSIKRRAMELSFALVNGNNIRGMMKELLYFLDSCEPEFKADCASGIFLAAEKYAPSKRWHIDTIMRVLTTAGSYVRDDAVPNLIQLITNSVEMHAYTVQRLYKAILGDYSPTFGTSGCMVYR

SEQ ID NO: 36506 - protein, 845 aa, Homo sapiens
MEKNINLRNCQTLNTYVMLTHLRMPAPIRLRELIRTIRTARTQAEEREMIQKECAAIRSSFREEDNTYRCRNVAKLLYMHMLGYPAHFGQLECLKLIASQKFTDKRIGYLGAMLLLDERQDVHLLMTNCIKNDLNHSTQFVQGLALCTLGCMGSSEMCRDLAGEVEKLLKTSNSYLRKKAALCAVHVIRKVPELMEMFLPATKNLLNEKNHGVLHTSVVLLTEMCERSPDMLAHFRKLVPQLVRILKNLIMSGYSPEHDVSGISDPFLQVRILRLLRILGRNDDDSSEAMNDILAQVATNTETSKNVGNAILYETVLTIMDIKSESGLRVLAINILGRFLLNNDKNIRYVALTSLLKTVQTDHNAVQRHRSTIVDCLKDLDVSIKRRAMELSFALVNGNNIRGMMKELLYFLDSCEPEFKADCASGIFLAAEKYAPSKRWHIDTIMRVLTTAGSYVRDDAVPNLIQLITNSVEMHAYTVQRLYKAILGDYSQQPLVQVAAWCIGEYGDLLVSGQCEEEEPIQVTEDEVLDILESVLISNMSTSVTRGYALTAIMKLSTRFTCTVNRIKKVVSIYGSSIDVELQQRAVEYNALFKKYDHMRSALLERMPVMEKVTTNGPTEIVQTNGETEPAPLETKPPPSGPQPTSQANDLLDLLGGNDITPVIPTAPTSKPSSAGGELLDLLGDINLTGAPAAAPAPASVPQISQPPFLLDGLSSQPLFNDIAAGIPSITAYSKNGLKIEFTFERSNTNPSVTVITIQASNSTELDMTDFVFQAAVPKTFQLQLLSPSSSIVPAFNTGTITQVIKVLNPQKQQLRMRIKLTYNHKGSAMQDLAEVNNFPPQSWQ

SEQ ID NO: 36507 - protein, 176 aa, Homo sapiens
MPAPIRLRELIRTIRTARTQAEEREMIQKECAAIRSSFREEDNTYRCRNVAKLLYMHMLGYPAHFGQLECLKLIASQKFTDKRIGYLGAMLLLDERQDVHLLMTNCIKNDLNHSTQFVQGLALCTLGCMGSSEMCRDLAGEVEKLLKTSNSYLRKKEMIYKQTNVTGYILGGIPNS

SEQ ID NO: 36508 - protein, 348 aa, Homo sapiens
MKDKMCRDLAGEVEKLLKTSNSYLRKKAALCAVHVIRKVPELMEMFLPATKNLLNEKNHGVLHTSVVLLTEMCERSPDMLAHFRKLVPQLVRILKNLIMSGYSPEHDVSGISDPFLQVRILRLLRILGRNDDDSSEAMNDILAQVATNTETSKNVGNAILYETVLTIMDIKSESGLRVLAINILGRFLLNNDKNIRYVALTSLLKTVQTDHNAVQRHRSTIVDCLKDLDVSIKRRAMELSFALVNGNNIRGMMKELLYFLDSCEPEFKADCASGIFLAAVPKTFQLQLLSPSSSIVPAFNTGTITQVIKVLNPQKQQLRMRIKLTYNHKGSAMQDLAEVNNFPPQSWQ

SEQ ID NO: 36509 - protein, 423 aa, Homo sapiens
MSASAVYVLDLKGKVLICRNYRGDVDMSEVEHFMPILMEKEEEGMLSPILAHGGVRFMWIKHNNLYLVATSKKNACVSLVFSFLYKVVQVFSEYFKELEEESIRDNFVIIYELLDELMDFGYPQTTDSKILQEYITQEGHKLETGAPRPPATVTNAVSWRSEGIKYRKNEVFLDVIESVNLLVSANGNVLRSEIVGSIKMRVFLSGMPELRLGLNDKVLFDNTGRGKSKSVELEDVKFHQCVRLSRFENDRTISFIPPDGEFELMSYRLNTHVKPLIWIESVIEKHSHSRIEYMIKAKSQFKRRSTANNVEIHIPVPNDADSPKFKTTVGSVKWVPENSEIVWSIKSFPGGKEYLMRAHFGLPSVEAEDKEGKPPISVKFEIPYFTTSGIQVRYLKIIEKSGYQALPWVRYITQNGDYQLRTQ

SEQ ID NO: 36510 - protein, 370 aa, Homo sapiens
MSASAVYVLDLKGKVLICRNYRGDVDMSEVEHFMPILMEKEEEGMLSPILAHGGVRFMWIKHNNLYLVATSKKNACVSLVFSFLYKVVQVFSEYFKELEEESIRDNFVIIYELLDELMDFGYPQTTDSKILQEYITQEGHKLETGAPRPPATVTNAVSWRSEGIKYRKNEVFLDVIESVNLLVSANGNVLRSEIVGSIKMRVFLSGMPELRLGLNDKVLFDNTGRGKSKSVELEDVKFHQCVRLSRFENDRTISFIPPDGEFELMSYRLNTHVKPLIWIESVIEKHSHSRIEYMIKGGKEYLMRAHFGLPSVEAEDKEGKPPISVKFEIPYFTTSGIQVRYLKIIEKSGYQALPWVRYITQNGDYQLRTQ

SEQ ID NO: 36511 - protein, 435 aa, Homo sapiens
MSASAVYVLDLKGKVLICRNYRGDVDMSEVEHFMPILMEKEEEGMLSPILAHGGVRFMWIKHNNLYLVATSKKNACVSLVFSFLYKVVQVFSEYFKELEEESIRDNFVIIYELLDELMDFGYPQTTDSKILQEYITQEGHKLETGAPRPPATVTNAVSWRSEGIKYRKNEVFLDVIESVNLLGKYPGVGWLGHTVSANGNVLRSEIVGSIKMRVFLSGMPELRLGLNDKVLFDNTGRGKSKSVELEDVKFHQCVRLSRFENDRTISFIPPDGEFELMSYRLNTHVKPLIWIESVIEKHSHSRIEYMIKAKSQFKRRSTANNVEIHIPVPNDADSPKFKTTVGSVKWVPENSEIVWSIKSFPGGKEYLMRAHFGLPSVEAEDKEGKPPISVKFEIPYFTTSGIQVRYLKIIEKSGYQALPWVRYITQNGDYQLRTQ

SEQ ID NO: 36512 - protein, 351 aa, Homo sapiens [sequence omitted]

SEQ ID NO: 36513 - protein, 423 aa, Homo sapiens
MSASAVFILDVKGKPLISRNYKGDVAMSKIEHFMPLLVQREEEGALAPLLSHGQVHFLWIKHSNLYLVATTSKNANASLVYSFLYKTIEVFCEYFKELEEESIRDNFVIVYELLDELMDFGFPQTTDSKILQEYITQQSNKLETGKSRVPPTVTNAVSWRSEGIKYKKNEVFIDVIESVNLLVNANGSVLLSEIVGTIKLKVFLSGMPELRLGLNDRVLFELTGRSKNKSVELEDVKFHQCVRLSRFDNDRTISFIPPDGDFELMSYRLSTQVKPLIWIESVIEKFSHSRVEIMVKAKGQFKKQSVANGVEISVPVPSDADSPRFKTSVGSAKYVPERNVVIWSIKSFPGGKEYLMRAHFGLPSVEKEEVEGRPPIGVKFEIPYFTVSGIQVRYMKIIEKSGYQALPWVRYITQSGDYQLRTS

SEQ ID NO: 36514 - protein, 158 aa, Homo sapiens
MMRFMLLFSRQGKLRLQKWYLATSDKERKKMVRELMQVVLARKPKMCSFLEWRDLKVVYKRYASLYFCCAIEGQDNELITLELIHRYVELLDKYFGSVCELDIIFNFEKAYFILDEFLMGGDVQDTSKKSVLKAIEQADLLQEEDESPRSVLEEMGLA

SEQ ID NO: 36515 - protein, 158 aa, Homo sapiens; identical to SEQ ID NO: 36514

SEQ ID NO: 36516 - protein, 157 aa, Homo sapiens
MQFMLLFSRQGKLRLQKWYVPLSDKEKKKITRELVQTVLARKPKMCSFLEWRDLKIVYKRYASLYFCCAIEDQDNELITLEIIHRYVELLDKYFGSVCELDIIFNFEKAYFILDEFLLGGEVQETSKKNVLKAIEQADLLQEEAETPRSVLEEIGLT

SEQ ID NO: 36517 - protein, 153 aa, Homo sapiens
MLLFSRQGKLRLQKWYVPLSDKEKKKITRELVQTVLARKPKMCSFLEWRDLKIVYKRYASLYFCCAIEDQDNELITLEIIHRYVELLDKYFGSVCELDIIFNFEKAYFILDEFLLGGEVQETSKKNVLKAIEQADLLQESQNEEWGGLSEDIL

SEQ ID NO: 36518 - protein, 160 aa, Homo sapiens
MQFMLLFSRQGKLRLQKWYVPLSDKEKKKITRELVQTVLARKPKMCSFLEWRDLKIVYKRYASLYFCCAIEDQDNELITLEIIHRYVELLDKYFGSVCELDIIFNFEKAYFILDEFLLGGEVQETSKKNVLKAIEQADLLQEKTETMYHSKSFIGFKKAY

SEQ ID NO: 36519 - protein, 202 aa, Homo sapiens
MPAGCPPHSTTASLPQHGDRGFPFAAAAAAGQAPPRPRPAAAMQFMLLFSRQGKLRLQKWYVPLSDKEKKKITRELVQTVLARKPKMCSFLEWRDLKIVYKRYASLYFCCAIEDQDNELITLEIIHRYVELLDKYFGSVCELDIIFNFEKAYFILDEFLLGGEVQETSKKNVLKAIEQADLLQEKTETMYHSKSFIGFKKAY

SEQ ID NO: 36520 - protein, 146 aa, Homo sapiens
  VARIANT 1: note = MOD_RES - Any amino acid
XRQGKLRLQKWYVPLSDKEKKKITRELVQTVLARKPKMCSFLEWRDLKIVYKRYASLYFCCAIEDQDNELITLEIIHRYVELLDKYFGSVCELDIIFNFEKAYFILDEFLLGGEVQETSKKNVLKAIEQADLLQEPRHEYFNVPVY

SEQ ID NO: 36521 - protein, 153 aa, Homo sapiens
  VARIANT 1: note = MOD_RES - Any amino acid
XLLFSRQGKLRLQKWYVPLSDKEKKKITRELVQTVLARKPKMCSFLEWRDLKIVYKRYASLYFCCAIEDQDNELITLEIIHRYVELLDKYFGSVCELDIIFNFEKAYFILDEFLLGGEVQETSKKNVLKAIEQADLLQESQNEEWGGLSEDIL

SEQ ID NO: 36522 - protein, 195 aa, Homo sapiens
MPAGCPPHSTTASLPQHGDRGFPFAAAAAAGQAPPRPRPAAAMQFMLLFSRQGKLRLQKWYVPLSDKEKKKITRELVQTVLARKPKMCSFLEWRDLKIVYKRYASLYFCCAIEDQDNELITLEIIHRYVELLDKYFGSVCELDIIFNFEKAYFILDEFLLGGEVQETSKKNVLKAIEQADLLQEPRHEYFNVPVY

SEQ ID NO: 36523 - protein, 104 aa, Homo sapiens
MIRFILIQNRAGKTRLAKWYMQFDDDEKQKLIEEVHAVVTVRDAKHTNFVEVLNEYFHNVCELDLVFNFYKVYTVVDEMFLAGEIRETSQTKVLKQLLMLQSLE

SEQ ID NO: 36524 - protein, 955 aa, Homo sapiens
MPAVSKGDGMRGLAVFISDIRNCKSKEAEIKRINKELANIRSKFKGDKALDGYSKKKYVCKLLFIFLLGHDIDFGHMEAVNLLSSNKYTEKQIGYLFISVLVNSNSELIRLINNAIKNDLASRNPTFMCLALHCIANVGSREMGEAFAADIPRILVAGDSMDSVKQSAALCLLRLYKASPDLVPMGEWTARVVHLLNDQHMGVVTAAVSLITCLCKKNPDDFKTCVSLAVSRLSRIVSSASTDLQDYTYYFVPAPWLSVKLLRLLQCYPPPEDAAVKGRLVECLETVLNKAQEPPKSKKVQHSNAKNAILFETISLIIHYDSEPNLLVRACNQLGQFLQHRETNLRYLALESMCTLASSEFSHEAVKTHIDTVINALKTERDVSVRQRAADLLYAMCDRSNAKQIVSEMLRYLETADYAIREEIVLKVAILAEKYAVDYSWYVDTILNLIRIAGDYVSEEVWYRVLQIVTNRDDVQGYAAKTVFEALQAPACHENMVKVGGYILGEFGNLIAGDPRSSPPVQFSLLHSKFHLCSVATRALLLSTYIKFINLFPETKATIQGVLRAGSQLRNADVELQQRAVEYLTLSSVASTDVLATVLEEMPPFPERESSILAKLKRKKGPGAGSALDDGRRDPSSNDINGGMEPTPSTVSTPSPSADLLGLRAAPPPAAPPASAGAGNLLVDVFDGPAAQPSLGPTPEEAFLSPGPEDIGPPIPEADELLNKFVCKNNGVLFENQLLQIGVKSEFRQNLGRMYLFYGNKTSVQFQNFSPTVVHPGDLQTQLAVQTKRVAAQVDGGAQVQQVLNIECLRDFLTPPLLSVRFRYGGAPQALTLKLPVTINKFFQPTEMAAQDFFQRWKQLSLPQQEAQKIFKANHPMDAEVTKAKLLGFGSALLDNVDPNPENFVGAGIIQTKALQVGCLLRLEPNAQAQMYRLTLRTSKEPVSRHLCELLAQQF

SEQ ID NO: 36525 - protein, 977 aa, Homo sapiens
MPAVSKGDGMRGLAVFISDIRNCKSKEAEIKRINKELANIRSKFKGDKALDGYSKKKYVCKLLFIFLLGHDIDFGHMEAVNLLSSNKYTEKQIGYLFISVLVNSNSELIRLINNAIKNDLASRNPTFMCLALHCIANVGSREMGEAFAADIPRILVAGDSMDSVKQSAALCLLRLYKASPDLVPMGEWTARVVHLLNDQHMGVVTAAVSLITCLCKKNPDDFKTCVSLAVSRLSRIVSSASTDLQDYTYYFVPAPWLSVKLLRLLQCYPPPEDAAVKGRLVECLETVLNKAQEPPKSKKVQHSNAKNAILFETISLIIHYDSEPNLLVRACNQLGQFLQHRETNLRYLALESMCTLASSEFSHEAVKTHIDTVINALKTERDVSVRQRAADLLYAMCDRSNAKQIVSEMLRYLETADYAIREEIVLKVAILAEKYAVDYSWYVDTILNLIRIAGDYVSEEVWYRVLQIVTNRDDVQGYAAKTVFEALQAPACHENMVKVGGYILGEFGNLIAGDPRSSPPVQFSLLHSKFHLCSVATRALLLSTYIKFINLFPETKATIQGVLRAGSQLRNADVELQQRAVEYLTLSSVASTDVLATVLEEMPPFPERESSILAKLKRKKGPGAGSALDDGRRDPSSNDINGGMEPTPSTVSTPSPSADLLGLRAAPPPAAPPASAGAGNLLVDVFDGPAAQPSLGPTPEEAFLSELEPPAPESPMALLADPAPAADPGPEDIGPPIPEADELLNKFVCKNNGVLFENQLLQIGVKSEFRQNLGRMYLFYGNKTSVQFQNFSPTVVHPGDLQTQLAVQTKRVAAQVDGGAQVQQVLNIECLRDFLTPPLLSVRFRYGGAPQALTLKLPVTINKFFQPTEMAAQDFFQRWKQLSLPQQEAQKIFKANHPMDAEVTKAKLLGFGSALLDNVDPNPENFVGAGIIQTKALQVGCLLRLEPNAQAQMYRLTLRTSKEPVSRHLCELLAQQF

SEQ ID NO: 36526 - protein, 467 aa, Homo sapiens
MGLALHCIASVGSREMAEAFAGEIPKVLVAGDTMDSVKQSAALCLLRLYRTSPDLVPMGDWTSRVVHLLNDQHLGVVTAATSLITTLAQKNPEEFKTSVSLAVSRLSRIVTSASTDLQDYTYYFVPAPWLSVKLLRLLQCYPPPDPAVRGRLTECLETILNKAQEPPKSKKVQHSNAKNAVLFEAISLIIHHDSEPNLLVRACNQLGQFLQHRETNLRYLALESMCTLASSEFSHEAVKTHIETVINALKTERDVSVLPPTPPRSLWEQQCHCAWRGLSLGVWPSWWLHTWRRPGPLGGAQLTLVLLQSQLDCFPRQDFNLEFRNICICNDFWQKHVSWPDVTVLLSQLLFVKGVCYAPAVAEALDVQPGEERPAGPAGPPGLQGKVWAGGARLRGVLVSFLSEWASPGHGAGLSPSTGPVQSSLEGLWRRDASVWSGSEGAIGRMPCATCGLCLTCHLDSAPRLHV

SEQ ID NO: 36527 - protein, 940 aa, Homo sapiens
MPAVSKGDGMRGLAVFISDIRNCKSKEAEIKRINKELANIRSKFKGDKALDGYSKKKYVCKLLFIFLLGHDIDFGHMEAVNLLSSNRYTEKQIGYLFISVLVNSNSELIRLINNAIKNDLASRNPTFMGLALHCIASVGSREMAEAFAGEIPKVLVAGDTMDSVKQSAALCLLRLYRTSPDLVPMGDWTSRVVHLLNDQHLGVVTAATSLITTLAQKNPEEFKTSVSLAVSRLSRIVTSASTDLQDYTYYFVPAPWLSVKLLRLLQCYPPPEDPAVRGRLTECLETILNKAQEPPKSKKVQHSNAKNAVLFEAISLIIHHDSEPNLLVRACNQLGQFLQHRETNLRYLALESMCTLASSEFSHEAVKTHIETVINALKTERDVSVRQRAVDLLYAMCDRSNAPQIVAEMLSYLETADYSIREEIVLKVAILAEKYAVDYTWYVDTILNLIRIAGDYVSEEVWYRVIQIVINRDDVQGYAAKTVFEALQAPACHENLVKVGGYILGEFGNLIAGDPRSSPLIQFHLLHSKFHLCSVPTRALLLSTYIKFVNLFPEVKPTIQDVLRSDSQLRNADVELQQRAVEYLRLSTVASTDILATVLEEMPPFPERESSILAKLKKKKGPSTVTDLEDTKRDRSVDVNGGPEPAPASTSAVSTPSPSADLLGLGAAPPAPAGPPPSSGGSGLLVDVFSDSASVVAPLAPGSEDNFARFVCKNNGVLFENQLLQIGLKSEFRQNLGRMFIFYGNKTSTQFLNFTPTLICSDDLQPNLNLQTKPVDPTVEGGAQVQQVVNIECVSDFTEAPVLNIQFRYGGTFQNVSVQLPITLNKFFQPTEMASQDFFQRWKQLSNPQQEVQNIFKAKHPMDTEVTKAKIIGFGSALLEEVDPNPANFVGAGIIHTKTTQIGCLLRLEPNLQAQMYRLTLRTSKEAVSQRLCELLSAQF

SEQ ID NO: 36528 - protein, 353 aa, Homo sapiens
MPAVSKGDGMRGLAVFISDIRNCKSKEAEIKRINKELANIRSKFKGDKALDGYSKKKYVCKLLFIFLLGHDIDFGHMEAVNLLSSNRYTEKQIGYLFISVLVNSNSELIRLINNAIKNDLASRNPTFMGLALHCIASVGSREMAEAFAGEIPKVLVAGDTMDSVKQSAALCLLRLYRTSPDLVPMGDWTSRVVHLLNDQHLGVVTAATSLITTLAQKNPEEFKTSVSLAVSRLSRIVTSASTDLQDYTYYFVPAPWLSVKLLRLLQCYPPPDPAVRGRLTECLETILNKAQEPPKSKKVQHSNAKNAVLFEAISLIIHHDREPNLQAQMYRLTLRTSKEAVSQRLCELLSAQF

SEQ ID NO: 36529 - protein, 656 aa, Homo sapiens
MPAVSKGDGMRGLAVFISDIRNCKSKEAEIKRINKELANIRSKFKGDKALDGYSKKKYVCKLLFIFLLGHDIDFGHMEAVNLLSSNRYTEKQIGYLFISVLVNSNSELIRLINNAIKNDLASRNPTFMGLALHCIASVGSREMAEAFAGEIPKVLVAGDTMDSVKQSAALCLLRLYRTSPDLVPMGDWTSRVVHLLNDQHLGVVTAATSLITTLAQKNPEEFKTSVSLAVSRLSRIVTSASTDLQDYTYYFVPAPWLSVKLLRLLQCYPPPEDPAVRGRLTECLETILNKAQEPPKSKKVQHSNAKNAVLFEAISLIIHHDSEPNLLVRACNQLGQFLQHRETNLRYLALESMCTLASSEFSHEAVKTHIETVINALKTERDVSVRQRAVDLLYAMCDRSNAPQIVAEMLSYLETADYSIREEIVLKVAILAEKYAVDYTWYVDTILNLIRIAGDYVSEEVWYRVIQIVINRDDVQGYAAKTVFEALQAPACHENLVKVGGYILGEFGNLIAGDPRSSPLIQFHLLHSKFHLCSVPTRALLLSTYIKFVNLFPEVKPTIQDVLRSDSQLRNADVELQQRAVEYLRLSTVASTDILATVLEEMPPFPERESSILAKLKKKKGPSTVTDLEDTKRDRSVDVNGGPEPAPASTSAVLCL

SEQ ID NO: 36530 - protein, 939 aa, Homo sapiens
MPAVSKGDGMRGLAVFISDIRNCKSKEAEIKRINKELANIRSKFKGDKALDGYSKKKYVCKLLFIFLLGHDIDFGHMEAVNLLSSNRYTEKQIGYLFISVLVNSNSELIRLINNAIKNDLASRNPTFMGLALHCIASVGSREMAEAFAGEIPKVLVAGDTMDSVKQSAALCLLRLYRTSPDLVPMGDWTSRVVHLLNDQHLGVVTAATSLITTLAQKNPEEFKTSVSLAVSRLSRIVTSASTDLQDYTYYFVPAPWLSVKLLRLLQCYPPPDPAVRGRLTECLETILNKAQEPPKSKKVQHSNAKNAVLFEAISLIIHHDSEPNLLVRACNQLGQFLQHRETNLRYLALESMCTLASSEFSHEAVKTHIETVINALKTERDVSVRQRAVDLLYAMCDRSNAPQIVAEMLSYLETADYSIREEIVLKVAILAEKYAVDYTWYVDTILNLIRIAGDYVSEEVWYRVIQIVINRDDVQGYAAKTVFEALQAPACHENLVKVGGYILGEFGNLIAGDPRSSPLIQFHLLHSKFHLCSVPTRALLLSTYIKFVNLFPEVKPTIQDVLRSDSQLRNADVELQQRAVEYLRLSTVASTDILATVLEEMPPFPERESSILAKLKKKKGPSTVTDLEDTKRDRSVDVNGGPEPAPASTSAVSTPSPSADLLGLGAAPPAPAGPPPSSGGSGLLVDVFSDSASVVAPLAPGSEDNFARFVCKNNGVLFENQLLQIGLKSEFRQNLGRMFIFYGNKTSTQFLNFTPTLICSDDLQPNLNLQTKPVDPTVEGGAQVQQVVNIECVSDFTEAPVLNIQFRYGGTFQNVSVQLPITLNKFFQPTEMASQDFFQRWKQLSNPQQEVQNIFKAKHPMDTEVTKAKIIGFGSALLEEVDPNPANFVGAGIIHTKTTQIGCLLRLEPNLQAQMYRLTLRTSKEAVSQRLCELLSAQF

SEQ ID NO: 36531 - protein, 679 aa, Homo sapiens
MPAVSKGDGMRGLAVFISDIRNCKSKEAEIKRINKELANIRSKFKGDKALDGYSKKKYVCKLLFIFLLGHDIDFGHMEAVNLLSSNRYTEKQIGYLFISVLVNSNSELIRLINNAIKTERDVSVRQRAVDLLYAMCDRSNAPQIVAEMLSYLETADYSIREEIVLKVAILAEKYAVDYTWYVDTILNLIRIAGDYVSEEVWYRVIQIVINRDDVQGYAAKTVFEALQAPACHENLVKVGGYILGEFGNLIAGDPRSSPLIQFHLLHSKFHLCSVPTRALLLSTYIKFVNLFPEVKPTIQDVLRSDSQLRNADVELQQRAVEYLRLSTVASTDILATVLEEMPPFPERESSILAKLKKKKGPSTVTDLEDTKRDRSVDVNGGPEPAPASTSAVSTPSPSADLLGLGAAPPAPAGPPPSSGGSGLLVDVFSDSASVVAPLAPGSEDNFARFVCKNNGVLFENQLLQIGLKSEFRQNLGRMFIFYGNKTSTQFLNFTPTLICSDDLQPNLNLQTKPVDPTVEGGAQVQQVVNIECVSDFTEAPVLNIQFRYGGTFQNVSVQLPITLNKFFQPTEMASQDFFQRWKQLSNPQQEVQNIFKAKHPMDTEVTKAKIIGFGSALLEEVDPNPANFVGAGIIHTKTTQIGCLLRLEPNLQAQMYRLTLRTSKEAVSQRLCELLSAQF

SEQ ID NO: 36532 - protein, 676 aa, Homo sapiens
MPAVSKGDGMRGLAVFISDIRNCKSKEAEIKRINKELANIRSKFKGDKALDGYSKKKYVCKLLFIFLLGHDIDFGHMEAVNLLSSNRYTEKQIGYLFISVLVNSNSELIRLINNTERDVSVRQRAVDLLYAMCDRSNAPQIVAEMLSYLETADYSIREEIVLKVAILAEKYAVDYTWYVDTILNLIRIAGDYVSEEVWYRVIQIVINRDDVQGYAAKTVFEALQAPACHENLVKVGGYILGEFGNLIAGDPRSSPLIQFHLLHSKFHLCSVPTRALLLSTYIKFVNLFPEVKPTIQDVLRSDSQLRNADVELQQRAVEYLRLSTVASTDILATVLEEMPPFPERESSILAKLKKKKGPSTVTDLEDTKRDRSVDVNGGPEPAPASTSAVSTPSPSADLLGLGAAPPAPAGPPPSSGGSGLLVDVFSDSASVVAPLAPGSEDNFARFVCKNNGVLFENQLLQIGLKSEFRQNLGRMFIFYGNKTSTQFLNFTPTLICSDDLQPNLNLQTKPVDPTVEGGAQVQQVVNIECVSDFTEAPVLNIQFRYGGTFQNVSVQLPITLNKFFQPTEMASQDFFQRWKQLSNPQQEVQNIFKAKHPMDTEVTKAKIIGFGSALLEEVDPNPANFVGAGIIHTKTTQIGCLLRLEPNLQAQMYRLTLRTSKEAVSQRLCELLSAQF

SEQ ID NO: 36533 - protein, 937 aa, Homo sapiens
MTDSKYFTTNKKGEIFELKAELNNEKKEKRKEAVKKVIAAMTVGKDVSSLFPDVVNCMQTDNLELKKLVYLYLMNYAKSQPDMAIMAVNSFVKDCEDPNPLIRALAVRTMGCIRVDKITEYLCEPLRKCLKDEDPYVRKTAAVCVAKLHDINAQMVEDQGFLDSLRDLIADSNPMVVANAVAALSEISESHPNSNLLDLNPQNINKLLTALNECTEWGQIFILDCLSNYNPKDDREAQSICERVTPRLSHANSAVVLSAVKVLMKFLELLPKDSDYYNMLLKKLAPPLVTLLSGEPEVQYVALRNINLIVQKRPEILKQEIKVFFVKYNDPIYVKLEKLDIMIRLASQANIAQVLAELKEYATEVDVDFVRKAVRAIGRCAIKVEQSAERCVSTLLDLIQTKVNYVVQEAIVVIRDIFRKYPNKYESIIATLCENLDSLDEPDARAAMIWIVGEYAERIDNADELLESFLEGFHDESTQVQLTLLTAIVKLFLKKPSETQELVQQVLSLATQDSDNPDLRDRGYIYWRLLSTDPVTAKEVVLSEKPLISEETDLIEPTLLDELICHIGSLASVYHKPPNAFVEGSHGIHRKHLPIHHGSTDAGDSPVGTTTATNLEQPQVIPSQGDLLGDLLNLDLGPPVNVPQVSSMQMGAVDLLGGGLDSLVGQSFIPSSVPATFAPSPTPAVVSSGLNDLFELSTGIGMAPGGYVAPKAVWLPAVKAKGLEISGTFTHRQGHIYMEMNFTNKALQHMTDFAIQFNKNSFGVIPSTPLAIHTPLMPNQSIDVSLPLNTLGPVMKMEPLNNLQVAVKNNIDVFYFSCLIPLNVLFVEDGKMERQVFLATWKDIPNENELQFQIKECHLNADTVSSKLQNNNVYTIAKRNVEGQDMLYQSLKLTNGIWILAELRIQPGNPNYTLSLKCRAPEVSQYIYQVYDSILKN

SEQ ID NO: 36534 - protein, 951 aa, Homo sapiens
MTDSKYFTTNKKGEIFELKAELNNEKKEKRKEAVKKVIAAMTVGKDVSSLFPDVVNCMQTDNLELKKLVYLYLMNYAKSQPDMAIMAVNSFVKDCEDPNPLIRALAVRTMGCIRVDKITEYLCEPLRKCLKDEDPYVRKTAAVCVAKLHDINAQMVEDQGFLDSLRDLIADSNPMVVANAVAALSEISESHPNSNLLDLNPQNINKLLTALNECTEWGQIFILDCLSNYNPKDDREAQSICERVTPRLSHANSAVVLSAVKVLMKFLELLPKDSDYYNMLLKKLAPPLVTLLSGEPEVQYVALRNINLIVQKRPEILKQEIKVFFVKYNDPIYVKLEKLDIMIRLASQANIAQVLAELKEYATEVDVDFVRKAVRAIGRCAIKVEQSAERCVSTLLDLIQTKVNYVVQEAIVVIRDIFRKYPNKYESIIATLCENLDSLDEPDARAAMIWIVGEYAERIDNADELLESFLEGFHDESTQVQLTLLTAIVKLFLKKPSETQELVQQVLSLATQDSDNPDLRDRGYIYWRLLSTDPVTAKEVVLSEKPLISEETDLIEPTLLDELICHIGSLASVYHKPPNAFVEGSHGIHRKHLPIHHGSTDAGDSPVGTTTATNLEQPQVIPSQGDLLGDLLNLDLGPPVNVPQVSSMQMGAVDLLGGGLDSLLGSDLGGGIGGSPAVGQSFIPSSVPATFAPSPTPAVVSSGLNDLFELSTGIGMAPGGYVAPKAVWLPAVKAKGLEISGTFTHRQGHIYMEMNFTNKALQHMTDFAIQFNKNSFGVIPSTPLAIHTPLMPNQSIDVSLPLNTLGPVMKMEPLNNLQVAVKNNIDVFYFSCLIPLNVLFVEDGKMERQVFLATWKDIPNENELQFQIKECHLNADTVSSKLQNNNVYTIAKRNVEGQDMLYQSLKLTNGIWILAELRIQPGNPNYTLSLKCRAPEVSQYIYQVYDSILKN

SEQ ID NO: 36535 - protein, 951 aa, Homo sapiens; identical to SEQ ID NO: 36534

SEQ ID NO: 36536 - protein, 880 aa, Homo sapiens
MQTDNLELKKLVYLYLMNYAKSQPDMAIMAVNSFVKDCEDPNPLIRALAVRTMGCIRVDKITEYLCEPLRKCLKDEDPYVRKTAAVCVAKLHDINAQMVEDQGFLDSLRDLIADSNPMVVANAVAALSEISESHPNSNLLDLNPQNINKLLTALNECTEWGQIFILDCLSNYNPKDDREAQSICERVTPRLSHANSAVVLSAVKVLMKFLELLPKDSDYYNMLLKKLAPPLVTLLSGEPEVQYVALRNINLIVQKRPEILKQEIKVFFVKYNDPIYVKLEKLDIMIRLASQANIAQVLAELKEYATEVDVDFVRKAVRAIGRCAIKVEQSAERCVSTLLDLIQTKVNYVVQEAIVVIRDIFRKYPNKYESIIATLCENLDSLDEPDARAAMIWIVGEYAERIDNADELLESFLEGFHDESTQVQLTLLTAIVKLFLKKPSETQELVQQVLSLATQDSDNPDLRDRGYIYWRLLSTDPVTAKEVVLSEKPLISEETDLIEPTLLDELICHIGSLASVYHKPPNAFVEGSHGIHRKHLPIHHGSTDAGDSPVGTTTATNLEQPQVIPSQGDLLGDLLNLDLGPPVNVPQVSSMQMGAVDLLGGGLDSLVGQSFIPSSVPATFAPSPTPAVVSSGLNDLFELSTGIGMAPGGYVAPKAVWLPAVKAKGLEISGTFTHRQGHIYMEMNFTNKALQHMTDFAIQFNKNSFGVIPSTPLAIHTPLMPNQSIDVSLPLNTLGPVMKMEPLNNLQVAVKNNIDVFYFSCLIPLNVLFVEDGKMERQVFLATWKDIPNENELQFQIKECHLNADTVSSKLQNNNVYTIAKRNVEGQDMLYQSLKLTNGIWILAELRIQPGNPNYTLSLKCRAPEVSQYIYQVYDSILKN

SEQ ID NO: 36537 - protein, 688 aa, Homo sapiens
MKFLELLPKDSDYYNMLLKKLAPPLVTLLSGEPEVQYVALRNINLIVQKRPEILKQEIKVFFVKYNDPIYVKLEKLDIMIRLASQANIAQVLAELKEYATEVDVDFVRKAVRAIGRCAIKVEQSAERCVSTLLDLIQTKVNYVVQEAIVVIRDIFRKYPNKYESIIATLCENLDSLDEPDARAAMIWIVGEYAERIDNADELLESFLEGFHDESTQVQLTLLTAIVKLFLKKPSETQELVQQVLSLATQDSDNPDLRDRGYIYWRLLSTDPVTAKEVVLSEKPLISEETDLIEPTLLDELICHIGSLASVYHKPPNAFVEGSHGIHRKHLPIHHGSTDAGDSPVGTTTATNLEQPQVIPSQGDLLGDLLNLDLGPPVNVPQVSSMQMGAVDLLGGGLDSLLGSDLGGGIGGSPAVGQSFIPSSVPATFAPSPTPAVVSSGLNDLFELSTGIGMAPGGYVAPKAVWLPAVKAKGLEISGTFTHRQGHIYMEMNFTNKALQHMTDFAIQFNKNSFGVIPSTPLAIHTPLMPNQSIDVSLPLNTLGPVMKMEPLNNLQVAVKNNIDVFYFSCLIPLNVLFVEDGKMERQVFLATWKDIPNENELQFQIKECHLNADTVSSKLQNNNVYTIAKRNVEGQDMLYQSLKLTNGIWILAELRIQPGNPNYTLSLKCRAPEVSQYIYQVYDSILKN

SEQ ID NO: 36538 - protein, 435 aa, Homo sapiens
MIGGLFIYNHKGEVLISRVYRDDIGRNAVDAFRVNVIHARQQVRSPVTNIARTSFFHVKRSNIWLAAVTKQNVNAAMVFEFLYKMCDVMAAYFGKISEENIKNNFVLIYELLDEILDFGYPQNSETGALKTFITQQGIKSQHQTKEEQSQITSQVTGQIGWRREGIKYRRNELFLDVLESVNLLMSPQGQVLSAHVSGRVVMKSYLSGMPECKFGMNDKIVIEKQGKGTADETSKSGKQSIAIDDCTFHQCVRLSKFDSERSISFIPPDGEFELMRYRTTKDIILPFRVIPLVREVGRTKLEVKVVIKSNFKPSLLAQKIEVRIPTPLNTSGVQVICMKGKAKYKASENAIVWKIKRMAGMKESQISAEIELLPTNDKKKWARPPISMNFEVPFAPSGLKVRYLKVFEPKLNYSDHDVIKWVRYIGRSGIYETRC

SEQ ID NO: 36539 - protein, 433 aa, Homo sapiens
MIGGLFIYNHKGEVLISRVYRDDIGRNAVDAFRVNVIHARQQVRSPVTNIARTSFFHVKRSNIWLAAVTKQNVNAAMVFEFLYKMCDVMAAYFGKISEENIKNNFVLIYELLDEILDFGYPQNSETGALKTFITQQGIKSQTKEEQSQITSQVTGQIGWRREGIKYRRNELFLDVLESVNLLMSPQGQVLSAHVSGRVVMKSYLSGMPECKFGMNDKIVIEKQGKGTADETSKSGKQSIAIDDCTFHQCVRLSKFDSERSISFIPPDGEFELMRYRTTKDIILPFRVIPLVREVGRTKLEVKVVIKSNFKPSLLAQKIEVRIPTPLNTSGVQVICMKGKAKYKASENAIVWKIKRMAGMKESQISAEIELLPTNDKKKWARPPISMNFEVPFAPSGLKVRYLKVFEPKLNYSDHDVIKWVRYIGRSGIYETRC

SEQ ID NO: 36540 - protein, 433 aa, Homo sapiens; identical to SEQ ID NO: 36539

SEQ ID NO: 36541 - protein, 113 aa, Homo sapiens
MIGGLFIYNHKGEVLISRVYRDDIGRNAVDAFRVNVIHARQQVRSPVTNIARTSFFHVKRSNIWLAAVTKQNVNAAMVFEFLYKMCDVMAAYFGKISEENIKNNFVLIYELLD

SEQ ID NO: 36542 - protein, 420 aa, Homo sapiens
MIGGLFIYNHKGEVLISRVYRDDIGRNAVDAFRVNVIHARQQVRSPVTNIWLAAVTKQNVNAAMVFEFLYKMCDVMAAYFGKISEENIKNNFVLIYELLDEILDFGYPQNSETGALKTFITQQGIKSQTKEEQSQITSQVTGQIGWRREGIKYRRNELFLDVLESVNLLMSPQGQVLSAHVSGRVVMKSYLSGMPECKFGMNDKIVIEKQGKGTADETSKSGKQSIAIDDCTFHQCVRLSKFDSERSISFIPPDGEFELMRYRTTKDIILPFRVIPLVREVGRTKLEVKVVIKSNFKPSLLAQKIEVRIPTPLNTSGVQVICMKGKAKYKASENAIVWKIKRMAGMKESQISAEIELLPTNDKKKWARPPISMNFEVPFAPSGLKVRYLKVFEPKLNYSDHDVIKWVRYIGRSGIYETRC

SEQ ID NO: 36543 - protein, 375 aa, Homo sapiens
MIGGLFIYNHKGEVLISRVYRDDIGRNAVAAYFGKISEENIKNNFVLIYELLDEILDFGYPQNSETGALKTFITQQGIKSQHQTKEEQSQITSQVTGQIGWRREGIKYRRNELFLDVLESVNLLMSPQGQVLSAHVSGRVVMKSYLSGMPECKFGMNDKIVIEKQGKGTADETSKSGKQSIAIDDCTFHQCVRLSKFDSERSISFIPPDGEFELMRYRTTKDIILPFRVIPLVREVGRTKLEVKVVIKSNFKPSLLAQKIEVRIPTPLNTSGVQVICMKGKAKYKASENAIVWKIKRMAGMKESQISAEIELLPTNDKKKWARPPISMNFEVPFAPSGLKVRYLKVFEPKLNYSDHDVIKWVRYIGRSGIYETRC

SEQ ID NO: 36544 - protein, 142 aa, Homo sapiens
MIRFILIQNRAGKTRLAKWYMQFDDDEKQKLIEEVHAVVTVRDAKHTNFVEFRNFKIIYRRYAGLYFCICVDVNDNNLAYLEAIHNFVEVLNEYFHNVCELDLVFNFYKVYTVVDEMFLAGEIRETSQTKVLKQLLMLQSLE

SEQ ID NO: 36545 - protein, 104 aa, Homo sapiens; identical to SEQ ID NO: 36523

SEQ ID NO: 36546 - protein, 1094 aa, Homo sapiens
MSSNSFPYNEQSGGGEATELGQEATSTISPSGAFGLFSSDLKKNEDLKQMLESNKDSAKLDAMKRIVGMIAKGKNASELFPAVVKNVASKNIEIKKLVYVYLVRYAEEQQDLALLSISTFQRALKDPNQLIRASALRVLSSIRVPIIVPIMMLAIKEASADLSPYVRKNAAHAIQKLYSLDPEQKEMLIEVIEKLLKDKSTLVAGSVVMAFEEVCPDRIDLIHKNYRKLCNLLVDVEEWGQVVIIHMLTRYARTQFVSPWKEGDELEDNGKNFYESDDDQKEKTDKKKKPYTMDPDHRLLIRNTKPLLQSRNAAVVMAVAQLYWHISPKSEAGIISKSLVRLLRSNREVQYIVLQNIATMSIQRKGMFEPYLKSFYVRSTDPTMIKTLKLEILTNLANEANISTLLREFQTYVKSQDKQFAAATIQTIGRCATNILEVTDTCLNGLVCLLSNRDEIVVAESVVVIKKLLQMQPAQHGEIIKHMAKLLDSITVPVARASILWLIGENCERVPKIAPDVLRKMAKSFTSEDDLVKLQILNLGAKLYLTNSKQTKLLTQYILNLGKYDQNYDIRDRTRFIRQLIVPNVKSGALSKYAKKIFLAQKPAPLLESPFKDRDHFQLGTLSHTLNIKATGYLELSNWPEVAPDPSVRNVEVIELAKEWTPAGKAKQENSAKKFYSESEEEEDSSDSSSDSESESGSESGEQGESGEEGDSNEDSSEDSSSEQDSESGRESGLENKRTAKRNSKAKGKSDSEDGEKENEKSKTSDSSNDESSSIEDSSSDSESESEPESESESRRVTKEKEKKTKQDRTPLTKDVSLLDLDDFNPVSTPVALPTPALSPSLMADLEGLHLSTSSSVISVSTPAFVPTKTHVLLHRMSGKGLAAHYFFPRQPCIFGDKMVSIQITLNNTTDRKIENIHIGEKKLPIGMKMHVFNPIDSLEPEGSITVSMGIDFCDSTQTASFQLCTKDDCFNVNIQPPVGELLLPVAMSEKDFKKEQGVLTGMNETSAVIIAAPQNFTPSVIFQKVVNVANVGAVPSGQDNIHRFAAKTVHSGSLMLVTVELKEGSTAQLIINTEKTVIGSVLLRELKPVLSQG

SEQ ID NO: 36547 - protein, 565 aa, Homo sapiens
MSSNSFPYNEQSGGGEATELGQEATSTISPSGAFGLFSSDLKKNEDLKQMLESNKDSAIKEASADLSPYVRKNAAHAIQKLYSLDPEQKEMLIEVIEKLLKDKSTLVAGSVVMAFEEVCPDRIDLIHKNYRKLCNLLVDVEEWGQVVIIHMLTRYARTQFVSPWKEGDELEDNGKNFYESDDDQKEKTDKKKKPYTMDPDHRLLIRNTKPLLQSRNAAVVMAVAQLYWHISPKSEAGIISKSLVRLLRSNREVQYIVLQNIATMSIQRKGMFEPYLKSFYVRSTDPTMIKTLKLEILTNLANEANISTLLREFQTYVKSQDKQFAAATIQTIGRCATNILEVTDTCLNGLVCLLSNRDEIVVAESVVVIKKLLQMQPAQHGEIIKHMAKLLDSITVPVARASILWLIGENCERVPKIAPDVLRKMAKSFTSEDDLVKLQILNLGAKLYLTNSKQTKLLTQYILNLGKYDQNYDIRDRTRFIRQLIVPNVKSGALSKYAKKIFLAQKPAPLLESPFKDRDHFQLGTLSHTLNIKATGYLELSNWPEVAPDPSVRNVEVIELVVLSE

SEQ ID NO: 36548 - protein, 800 aa, Homo sapiens
MSSNSFPYNEQSGGGEATELGQEATSTISPSGAFGLFSSDLKKNEDLKQMLESNKDSAKLDAMKRIVGMIAKGKNASELFPAVVKNVASKNIEIKKLVYVYLVRYAEEQQDLALLSISTFQRALKDPNQLIRASALRVLSSIRVPIIVPIMMLAIKEASADLSPYVRKNAAHAIQKLYSLDPEQKEMLIEVIEKLLKDKSTLVAGSVVMAFEEVCPDRIDLIHKNYRKLCNLLVDVEEWGQVVIIHMLTRYARTQFVSPWKEGDELEDNGKNFYESDDDQKEKTDKKKKPYTMDPDHRLLIRNTKPLLQSRNAAVVMAVAQLYWHISPKSEAGIISKSLVRLLRSNREVQYIVLQNIATMSIQRKGMFEPYLKSFYVRSTDPTMIKTLKLEILTNLANEANISTLLREFQTYVKSQDKQFAAATIQTIGRCATNILEVTDTCLNGLVCLLSNRDEIVVAESVVVIKKLLQMQPAQHGEIIKHMAKLLDSITVPVARASILWLIGENCERVPKIAPDVLRKMAKSFTSEDDLVKLQILNLGAKLYLTNSKQTKLLTQYILNLGKYDQNYDIRDRTRFIRQLIVPNVKSGALSKYAKKIFLAQKPAPLLESPFKDRDHFQLGTLSHTLNIKATGYLELSNWPEVAPDPSVRNVEVIELAKEWTPAGKAKQENSAKKFYSESEEEEDSSDSSSDSESESGSESGEQGESGEEGDSNEDSSEDSSSEQDSESGRESGLENKRTAKRNSKAKGKSDSEDGEKENEKSKTSDSSNDESSSIEDSSSDSESESEPESESESRRVTKE

SEQ ID NO: 36549 - protein, 193 aa, Homo sapiens
MIKAILIFNNHGKPRLSKFYQPYSEDTQQQIIRETFHLVSKRDENVCNFLEGGLLIGGSDNKLIYRHYATLYFVFCVDSSESELGILDLIQVFVETLDKCFENVCELDLIFHVDKVHNILAEMVMGGMVLETNMNEIVTQIDAQNKLEKSEAGLAGAPARAVSAVKNMNLPEIPRNINIGDISIKVPNLPSFK

SEQ ID NO: 36550 - protein, 149 aa, Homo sapiens
MIKFFLMVNKQGQTRLSKYYEHVDINKRTLLETEVIKSCLSRSNEQCSFIEYKDFKLIYRQYAALFIVVGVNDTENEMAIYEFIHNFVEVLDEYFSRVSELDVSFFNTVFHSTWQMHSGPYQTRSCSVTQAGVQRCDHGSLHPGSPGLK

SEQ ID NO: 36551 - protein, 135 aa, Homo sapiens
MIKFFLMVNKQGQTRLSKYYEHVDINKRTLLETEVIKSCLSRSNEQCSFIEYKDFKLIYRQYAALFIVVGVNDTENEMAIYEFIHNFVEVLDEYFSRVEPIDELPKICSALEPQQTCFSPDSSSFKGAASTTPIY

SEQ ID NO: 36552 - protein, 739 aa, Homo sapiens
MPYLGSEDVVKELKKALCNPHIQADRLRYRNVIQRVIRYMTQGLDMSGVFMEMVKASATVDIVQKKLVYLYMCTYAPLKPDLALLAINTLCKDCSDPNPMVRGLALRSMCSLRMPGVQEYIQQPILNGLRDKASYVRRVAVLGCAKMHNLHGDSEVDGALVNELYSLLRDQDPIVVVNCLRSLEEILKQEGGVVINKPIAHHLLNRMSKLDQWGQAEVLNFLLRYQPRSEEELFDILNLLDSFLKSSSPGVVMGATKLFLILAKMFPHVQTDVLVRVKGPLLAACSSESRELCFVALCHVRQILHSLPGHFSSHYKKFFCSYSEPHYIKLQKVEVLCELVNDENVQQVLEELRGYCTDVSADFAQAAIFAIGGIARTYTDQCVQILTELLGLRQEHITTVVVQTFRDLVWLCPQCTEAVCQALPGCEENIQDSEGKQALIWLLGVHGERIPNAPYVLEDFVENVKSETFPAVKMELLTALLRLFLSRPAECQDMLGRLLYYCIEEEKDMAVRDRGLFYYRLLLVGIDEVKRILCSPKSDPTLGLLEDPAERPVNSWASDFNTLVPVYGKAHWATISKCQGAERCDPELPKTSSFAASGPLIPEENKERVQELPDSGALMLVPNRQLTADYFEKTWLSLKVAHQQVLPWRGEFHPDTLQMALQVVNIQTIAMSRAGSRPWKAYLSAQDDTGCLFLTELLLEPGNSEMQISVKQNEARTETLNSFISVLETVIGTIEEIKS

SEQ ID NO: 36553 - protein, 296 aa, Homo sapiens
MPYLGSEDVVKELKKALCNPHIQADRLRYRNVIQRVIRMPGVQEYIQQPILNGLRDKASYVRRVAVLGCAKMHNLHGDSEVDGALVNELYSLLRDQDPIVVVNCLRSLEEILKQEGGVVINKPIAHHLLNRMSKLDQWGQAEVLNFLLRYQPRSEEELFDILNLLDSFLKSSSPGVVMGATKLFLILAKMFPHVQTDVLVRVKGPLLAACSSESRELCFVALCHVRQILHSLPGHFSSHYKKFFCSYSEPHYIKLQKVEVLCELVNDENVQQVLEELRGYCTDVSADFAQAAIFAI

SEQ ID NO: 36554 - protein, 302 aa, Homo sapiens
MPYLGSEDVVKELKKALCNPHIQADRLRYRNVIQRVIRYMTQGLDMSGVFMEMVKASATVDIVQKKLVYLYMCTYAPLKPDLALLAINTLCKDCSDPNPMVRGLALRSMCSLRMSKLDQWGQAEVLNFLLRYQPRSEEELFDILNLLDSFLKSSSPGVVMGATKLFLILAKMFPHVQTDVLVRVKGPLLAACSSESRELCFVALCHVRQILHSLPGHFSSHYKKFFCSYSEPHYIKLQKVEVLCELVNDENVQQVLEELRGYCTDVSADFAQAAIFAIGRCLLLFLLENLDQPARKLWLEEP

SEQ ID NO: 36555 - protein, 571 aa, Homo sapiens
MPYLGSEDVVKELKKALCNPHIQADRLRYRNVIQRVIRMSKLDQWGQAEVLNFLLRYQPRSEEELFDILNLLDSFLKSSSPGVVMGATKLFLILAKMFPHVQTDVLVRVKGPLLAACSSESRELCFVALCHVRQILHSLPGHFSSHYKKFFCSYSEPHYIKLQKVEVLCELVNDENVQQVLEELRGYCTDVSADFAQAAIFAIGGIARTYTDQCVQILTELLGLRQEHITTVVVQTFRDLVWLCPQCTEAVCQALPGCEENIQDSEGKQALIWLLGVHGERIPNAPYVLEDFVENVKSETFPAVKMELLTALLRLFLSRPAECQDMLGRLLYYCIEEEKDMAVRDRGLFYYRLLLVGIDEVKRILCSPKSDPTLGLLEDPAERPVNSWASDFNTLVPVYGKAHWATISKCQGAERCDPELPKTSSFAASGPLIPEENKERVQELPDSGALMLVPNRQLTADYFEKTWLSLKVAHQQVLPWRGEFHPDTLQMALQVVNIQTIAMSRAGSRPWKAYLSAQDDTGCLFLTELLLEPGNSEMQISVKQNEARTETLNSFISVLETVIGTIEEIKS

SEQ ID NO: 36556 - protein, 739 aa, Homo sapiens; identical to SEQ ID NO: 36552

SEQ ID NO: 36557 - protein, 262 aa, Homo sapiens
MPYLGSEDVVKELKKALCNPHIQADRLRYRNVIQRVIRYMTQGLDMSGVFMEMVKASATVDIVQKKLVYLYMCTYAPLKPDLALLAINTLCKDCSDPNPMVRGLALRSMCSLRMPGVQEYIQQPILNGLRDKASYVRRVAVLGCAKMHNLHGDSEVDGALVNELYSLLRDQDPIVVVNCLRSLEEILKQEGGVVINKPIAHHLLNRMSKLDQWGQAEVLNFLLRYQPRSEEELFDILNLLDSFLKSSSPGVVMGATKLFLIL

SEQ ID NO: 36558 - protein, 175 aa, Homo sapiens
MPYLGSEDVVKELKKALCNPHIQADRLRYRNVIQRVIRMSKLDQWGQAEVLNFLLRYQPRSEEELFDILNLLDSFLKSSSPGVVMGATKLFLILAKMFPHVQTDVLVRVKGPLLAACSSESRELCFVALCHVRQILHSLPGHFSSHYKKFFCSYSEPHYIKLQKVEVLCELVNDE

SEQ ID NO: 36559 - protein, 1137 aa, Homo sapiens
MSDIVEKTLTALPGLFLQNQPGGGPAAAKASFSSRLGSLVRGITALTSKHEEEKLIQQELSSLKATVSAPTTTLKMMKECMVRLIYCEMLGYDASFGYIHAIKLAQQGNLLEKRVGYLAVSLFLHESHELLLLLVNTVVKDLQSTNLVEVCMALTVVSQIFPCEMIPAVLPLIEDKLQHSKEIVRRKAVLALYKFHLIAPNQVQHIHIKFRKALCDRDVGVMAASLHIYLRMIKENSSGYKDLTGSFVTILKQVVGGKLPVEFNYHSVPAPWLQIQLLRILGLLGKDDQRTSELMYDVLDESLRRAELNHNVTYAILFECVHTVYSIYPKSELLEKAAKCIGKFVLSPKINLKYLGLKALTYVIQQDPTLALQHQMTIIECLDHPDPIIKRETLELLYRITNAQNITVIVQKMLEYLHQSKEEYVIVNLVGKIAELAEKYAPDNAWFIQTMNAVFSVGGDVMHPDIPNNFLRLLAEGFDDETEDQQLRLYAVQSYLTLLDMENVFYPQRFLQVMSWVLGEYSYLLDKETPEEVIAKLYKLLMNDSVSSETKAWLIAAVTKLTSQAHSSNTVERLIHEFTISLDTCMRQHAFELKHLHENVELMKSLLPVDRSCEDLVVDASLSFLDGFVAEGLSQGAAPYKPPHQRQEEKLSQEKVLNFEPYGLSFSSSGFTGRQSPAGISLGSDVSGNSAETGLKETNSLKLEGIKKLWGKEGYLPKKESKTGDESGALPVPQESIMENVDQAITKKDQSQVLTQSKEEKEKQLLASSLFVGLGSESTINLLGKADTVSHKFRRKSKVKEAKSGETTSTHNMTCSSFSSLSNVAYEDDYYSNTLHDTGDKELKKFSLTSELLDSESLTELPLVEKFSYCSLSTPSLFANNNMEIFHPPQSTAASVAKESSLASSFLEETTEYIHSNAMEVCNNETISVSSYKIWKDDCLLMVWSVTNKSGLELKSADLEIFPAENFKVTEQPGCCLPVMEAESTKSFQYSVQIEKPFTEGNLTGFISYHMMDTHSAQLEFSVNLSLLDFIRPLKISSDDFGKLWLSFANDVKQNVKMSESQAALPSALKTLQQKLRLHIIEIIGNEGLLACQLLPSIPCLLHCRVHADVLALWFRSSCSTLPDYLLYQCQKVMEGS

SEQ ID NO: 36560 - protein, 453 aa, Homo sapiens
MISQFFILSSKGDPLIYKDFRGDSGGRDVAELFYRKLTGLPGDESPVVMHHHGRHFIHIRHSGLYLVVTTSENVSPFSLLELLSRLATLLGDYCGSLGEGTISRNVALVYELLDEVLDYGYVQTTSTEMLRNFIQTEAVVSKPFSLFDLSSVGLFGAETQQSKVAPSSAASRPVLSSRSDQSQKNEVFLDVVERLSVLIASNGSLLKVDVQGEIRLKSFLPSGSEMRIGLTEEFCVGKSELRGYGPGIRVDEVSFHSSVNLDEFESHRILRLQPPQGELTVMRYQLSDDLPSPLPFRLFPSVQWDRGSGRLQVYLKLRCDLLSKSQALNVRLHLPLPRGVVSLSQELSSPEQKAELAEGALRWDLPRVQGGSQLSGLFQMDVPGPPGPPSHGLSTSASPLGLGPASLSFELPRHTCSGLQVRFLRLAFRPCGNANPHKWVRHLSHSDAYVIRI

SEQ ID NO: 36561 - protein, 453 aa, Homo sapiens; identical to SEQ ID NO: 36560

SEQ ID NO: 36562 - protein, 159 aa, Homo sapiens
MIKFFLMVNKQGQTRLSKYYEHVDINKRTLLETEVIKSCLSRSNEQCSFIEYKDFKLIYRQYAALFIVVGVNDTENEMAIYEFIHNFVEVLDEYFSRVSELDVSFFNTVFHSTWQMHSGPYQEPIDELPKICSALEPQQTCFSPDSSSFKGAASTTPIY

SEQ ID NO: 36563 - protein, 144 aa, Homo sapiens
MIKFFLMVNKQGQTRLSKYYEHVDINKRTLLETEVIKSCLSRSNEQCSFIEYKDFKLIYRQYAALFIVVGVNDTENEMAIYEFIHNFVEVLDEYFSRVVKGHIMFNLDKVHIILDEMVLNGCIVETNRARILAPLLILDKMSES

SEQ ID NO: 36564 - protein, 144 aa, Homo sapiens
MIKFFLMVNKQGQTRLSKYYEHVDINKRTLLETEVIKSCLSRSNEQCSFIEYKDFKLIYRQYAALFIVVGVNDTENEMAIYEFIHNFVEVLDEYFSRVSELDIMFNLDKVHIILDEMVLNGCIVETNRARILAPLLILDKMSES

SEQ ID NO: 36565 - protein, 8 aa, Homo sapiens
MIKFFLMV

SEQ ID NO: 36566 - protein, 98 aa, Homo sapiens
MIKFFLMVNKQGQTRLSKYYEHVDINKRTLLETEVIKSCLSRSNEQCSFIEYKDFKLIYRQYAALFIVVGVNDTENEMAIYEFIHNFVEVLDEYFSRV

SEQ ID NO: 36567 - protein, 133 aa, Homo sapiens
MIKFFLMVNKQGQTRLSKYYEHVDINKRTLLETEVIKSCLSRSNEQCSFIEYKDFKLIYRQYAALFIVVGVNDTENEMAIYEFIHNFVEVLDEYFSRVSELDIMFNLDKVHIILDEMVLNGCIVETNRARILA

SEQ ID NO: 36568 - protein, 1536 aa, Homo sapiens
MGVVNFVFRASEDLQVLENYSDAPMTPKQILQVIEAEGLKEMSGTSPLACLNAMLHSNSRGGEGLFYKLPGRISLFTLKKDALQWSRHPATVEGEEPEDTADVESCGSNEASTVSGENDVSLDETSSNASCSTESQSRPLSNPRDSYRASSQANKQKKKTGVMLPRVVLTPLKVNGAHVESASGFSGCHADGESGSPSSSSSGSLALGSAAIRGQAEVTQDPAPLLRGFRKPATGQMKRNRGEEIDFETPGSILVNTNLRALINSRTFHALPSHFQQQLLFLLPEVDRQVGTDGLLRLSSSALNNEFFTHAAQSWRERLADGEFTHEMQVRIRQEMEKEKKVEQWKEKFFEDYYGQKLGLTKEESLQQNVGQEEAEIKSGLCVPGESVRIQRGPATRQRDGHFKKRSRPDLRTRARRNLYKKQESEQAGVAKDAKSVASDVPLYKDGEAKTDPAGLSSPHLPGTSSAAPDLEGPEFPVESVASRIQAEPDNLARASASPDRIPSLPQETVDQEPKDQKRKSFEQAASASFPEKKPRLEDRQSFRNTIESVHTEKPQPTKEEPKVPPIRIQLSRIKPPWVVKGQPTYQICPRIIPTTESSCRGWTGARTLADIKARALQVRGARGHHCHREAATTAIGGGGGPGGGGGGATDEGGGRGSSSGDGGEACGHPEPRGGPSTPGKCTSDLQRTQLLPPYPLNGEHTQAGTAMSRARREDLPSLRKEESCLLQRATVGLTDGLGDASQLPVAPTGDQPCQALPLLSSQTSVAERLVEQPQLHPDVRTECESGTTSWESDDEEQGPTVPADNGPILSLVGDDTLEKGTGQALDSHPTMKDPVNVTPSSTPESSPTDCLQNRAFDDELGLGGSCPPMRESDTRQENLKTKALVSNSSLHWIPIPSNDEVVKQPKPESREHIPSVEPQVGEEWEKAAPTPPALPGDLTAEEGLDPLDSLTSLWTVPSRGGSDSNGSYCQQVDIEKLKINGDSEALSPHGESTDTASDFEGHLTEDSSEADTREAAVTKGSSVDKDEKPNWNQSAPLSKVNGDMRLVTRTDGMVAPQSWVSRVCAVRQKIPDSLLLASTEYQPRAVCLSMPGSSVEATNPLVMQLLQGSLPLEKVLPPAHDDSMSESPQVPLTKDQSHGSLRMGSLHGLGKNSGMVDGSSPSSLRALKEPLLPDSCETGTGLARIEATQAPGAPQKNCKAVPSFDSLHPVTNPITSSRKLEEMDSKEQFSSFSCEDQKEVRAMSQDSNSNAAPGKSPGDLTTSRTPRFSSPNVISFGPEQTGRALGDQSNVTGQGKKLFGSGNVAATLQRPRPADPMPLPAEIPPVFPSGKLGPSTNSMSGGVQTPREDWAPKPHAFVGSVKNEKTFVGGPLKANAENRKATGHSPLELVGHLEGMPFVMDLPFWKLPREPGKGLSEPLEPSSLPSQLSIKQAFYGKLSKLQLSSTSFNYSSSSPTFPKGLAGSVVQLSHKANFGASHSASLSLQMFTDSSTVESISLQCACSLKAMIMCQGCGAFCHDDCIGPSKLCVLCLVVR

SEQ ID NO: 36569 - protein, 1541 aa, Homo sapiens
MKDKQKKKKERTWAEAARLVLENYSDAPMTPKQILQVIEAEGLKEMRSGTSPLACLNAMLHSNSRGGEGLFYKLPGRISLFTLKKDALQWSRHPATVEGEEPEDTADVESCGSNEASTVSGENDVSLDETSSNASCSTESQSRPLSNPRDSYRASSQANKQKKKTGVMLPRVVLTPLKVNGAHVESASGFSGCHADGESGSPSSSSSGSLALGSAAIRGQAEVTQDPAPLLRGFRKPATGQMKRNRGEEIDFETPGSILVNTNLRALINSRTFHALPSHFQQQLLFLLPEVDRQVGTDGLLRLSSSALNNEFFTHAAQSWRERLADGEFTHEMQVRIRQEMEKEKKVEQWKEKFFEDYYGQKLGLTKEESLQQNVGQEEAEIKSGLCVPGESVRIQRGPATRQRDGHFKKRSRPDLRTRARRNLYKKQESEQAGVAKDAKSVASDVPLYKDGEAKTDPAGLSSPHLPGTSSAAPDLEGPEFPVESVASRIQAEPDNLARASASPDRIPSLPQETVDQEPKDQKRKSFEQAASASFPEKKPRLEDRQSFRNTIESVHTEKPQPTKEEPKVPPIRIQLSRIKPPWVVKGQPTYQICPRIIPTTESSCRGWTGARTLADIKARALQVRGARGHHCHREAATTAIGGGGGPGGGGGGATDEGGGRGSSSGDGGEACGHPEPRGGPSTPGKCTSDLQRTQLLPPYPLNGEHTQAGTAMSRARREDLPSLRKEESCLLQRATVGLTDGLGDASQLPVAPTGDQPCQALPLLSSQTSVAERLVEQPQLHPDVRTECESGTTSWESDDEEQGPTVPADNGPILSLVGDDTLEKGTGQALDSHPTMKDPVNVTPSSTPESSPTDCLQNRAFDDELGLGGSCPPMRESDTRQENLKTKALVSNSSLHWIPIPSNDEVVKQPKPESREHIPSVEPQVGEEWEKAAPTPPALPGDLTAEEGLDPLDSLTSLWTVPSRGGSDSNGSYCQQVDIEKLKINGDSEALSPHGESTDTASDFEGHLTEDSSEADTREAAVTKGSSVDKDEKPNWNQSAPLSKVNGDMRLVTRTDGMVAPQSWVSRVCAVRQKIPDSLLLASTEYQPRAVCLSMPGSSVEATNPLVMQLLQGSLPLEKVLPPAHDDSMSESPQVPLTKDQSHGSLRMGSLHGLGKNSGMVDGSSPSSLRALKEPLLPDSCETGTGLARIEATQAPGAPQKNCKAVPSFDSLHPVTNPITSSRKLEEMDSKEQFSSFSCEDQKEVRAMSQDSNSNAAPGKSPGDLTTSRTPRFSSPNVISFGPEQTGRALGDQSNVTGQGKKLFGSGNVAATLQRPRPADPMPLPAEIPPVFPSGKLGPSTNSMSGGVQTPREDWAPKPHAFVGSVKNEKTFVGGPLKANAENRKATGHSPLELVGHLEGMPFVMDLPFWKLPREPGKGLSEPLEPSSLPSQLSIKQAFYGKLSKLQLSSTSFNYSSSSPTFPKGLAGSVVQLSHKANFGASHSASLSLQMFTDSSTVESISLQCACSLKAMIMCQGCGAFCHDDCIGPSKLCVLCLVVR

SEQ ID NO: 36570 - protein, 1541 aa, Homo sapiens; identical to SEQ ID NO: 36569

SEQ ID NO: 36571 - protein, 1462 aa, Homo sapiens
MLSFPNLNQVLENYSDAPMTPKQILQVIEAEGLKEMSSGTSPLACLNAMLHSNSRGGEGLFYKLPGRISLFTLKKDALQWSRHPATVEGEEPEDTADVESCGSNEASTVSGENDVSLDETSSNASCSTESQSRPLSNPRDSYRASSQANKQKKKTGVMLPRVVLTPLKVNGAHVESASGQMKRNRGEEIDFETPGSILVNTNLRALINSRTFHALPSHFQQQLLFLLPEVDRQVGTDGLLRLSSSALNNEFFTHAAQSWRERLADGEFTHEMQVRIRQEMEKEKKVEQWKEKFFEDYYGQKLGLTKEESLQQNVGQEEAEIKSGLCVPGESVRIQRGPATRQRDGHFKKRSRPDLRTRARRNLYKKQESEQAGVAKDAKSVASDVPLYKDGEAKTDPAGLSSPHLPGTSSAAPDLEGPEFPVESVASRIQAEPDNLARASASPDRIPSLPQETVDQEPKDQKRKSFEQAASASFPEKKPRLEDRQSFRNTIESVHTEKPQPTKEEPKVPPIRIQLSRIKPPWVVKGQPTYQICPRIIPTTESSCRGWTGARTLADIKARALQVRGARGHHCHREATDEGGGRGSSSGDGGEACGHPEPRGGPSTPGKCTSDLQRTQLLPPYPLNGEHTQAGTAMSRARREDLPSLRKEESCLLQRATVGLTDGLGDASQLPVAPTGDQPCQALPLLSSQTSVAERLVEQPQLHPDVRTECESGTTSWESDDEEQGPTVPADNGPILSLVGDDTLEKGTGQALDSHPTMKDPVNVTPSSTPESSPTDCLQNRAFDDELGLGGSCPPMRESDTRQENLKTKALVSNSSLHWIPIPSNDEVVKQPKPESREHIPSVEPQVGEEWEKAAPTPPALPGDLTAEEGLDPLDSLTSLWTVPSRGGSDSNGSYCQQVDIEKLKINGDSEALSPHGESTDTASDFEGHLTEDSSEADTREAAVTKGSSVDKDEKPNWNQSAPLSKVNGDMRLVTRTDGMVAPQSWVSRVCAVRQKIPDSLLLASTEYQPRAVCLSMPGSSVEATNPLVMQLLQGSLPLEKVLPPAHDDSMSESPQVPLTKDQSHGSLRMGSLHGLGKNSGMVDGSSPSSLRALKEPLLPDSCETGTGLARIEATQAPGAPQKNCKAVPSFDSLHPVTNPITSSRKLEEMDSKEQFSSFSCEDQKEVRAMSQDSNSNAAPGKSPGDLTTSRTPRFSSPNVISFGPEQTGRALGDQSNVTGQGKKLFGSGNVAATLQRPRPADPMPLPAEIPPVFPSGKLGPSTNSMSGGVQTPREDWAPKPHAFVGSVKNEKTFVGGPLKANAENRKATGHSPLELVGHLEGMPFVMDLPFWKLPREPGKGLSEPLEPSSLPSQLSIKQAFYGKLSKLQLSSTSFNYSSSSPTFPKGLAGSVVQLSHKANFGASHSASLSLQMFTDSSTVESISLQCACSLKAMIMCQGCGAFCHDDCIGPSKLCVLCLVVR

SEQ ID NO: 36572 - protein, 1541 aa, Homo sapiens; identical to SEQ ID NO: 36569

SEQ ID NO: 36573 - protein, 74 aa, Homo sapiens
  VARIANT 1: note = MOD_RES - Any amino acid
XWAEAARLVLENYSDAPMTPKQILQVIEAEGLKEMRSGTSPLACLNAMLHSNSRGGEGLFYKLPGRISLFTLKV

SEQ ID NO: 36574 - protein, 85 aa, Homo sapiens
MKDKQKKKKERTWAEAARLVLENYSDAPMTPKQILQVIEAEGLKEMRSGTSPLACLNAMLHSNSRGGEGLFYKLPGRISLFTLKV

SEQ ID NO: 36575 - protein, 84 aa, Homo sapiens
MKDKQKKKKERTWAEAARLVLENYSDAPMTPKQILQVIEAEGLKEMSGTSPLACLNAMLHSNSRGGEGLFYKLPGRISLFTLKR

SEQ ID NO: 36576 - protein, 918 aa, Homo sapiens
MKRTKCADIDVETPDSILVNTNLRALINKHTFSVLPGDCQQRLLLLLPEVDRQVGPDGLMKLNGSALNNEFFTSAAQGWKERLSEGEFTPEMQVRIRQEIEKEKKVEPWKEQFFESYYGQSSGLSLEDSKKLTASPSDPKVKKTPAEQPKSMPVSEASLIRIVPVVSQSECKEEALQMSSPGRKEECESQGEVQPNFSTSSEPLLSSALNTHELSSILPIKCPKDEDLLEQKPVTSAEQESEKNHLTTASNYNKSESQESLVTSPSKPKSPGVEKPIVKPTAGAGPQETNMKEPLATLVDQSPESLKRKSSLTQEEAPVSWEKRPRVTENRQHQQPFQVSPQPFLNRGDRIQVRKVPPLKIPVSRISPMPFHPSQVSPRARFPVSITSPNRTGARTLADIKAKAQLVKAQRAAAAAAAAAAAAASVGGTIPGPGPGGGQGPGEGGEGQTARGGSPGSDRVSETGKGPTLELAGTGSRGGTRELLPCGPETQPQSETKTTPSQAQPHSVSGAQLQQTPPVPPTPAVSGACTSVPSPAHIEKLDNEKLNPTRATATVASVSHPQGPSSCRQEKAPSPTGFQLEDISTSQRFMLGFAGRRTSKPAMAGHYLLNISTYGRGSESFRRTHSVNPEDRFCLSSPTEALKMGYTDCKNATGESSSSKEDDTDEESTGDEQESVTVKEEPQVSQSAGKGDTSSGPHSRETLSTSDCLASKNVKAEIPLNEQTTLSKENYLFTRGQTFDEKTLARDLIQAAQKQMAHAVRGKAIRSSPELFSSTVLPLPADSPTHQPLLLPPLQTPKLYGSPTQIGPSYRGMINVSTSSDMDHNSAVPGSQVSSNVGDVMSFSVTVTTIPASQAMNPSSHGQTIPVQAFSEENSIEGTPSKCYCRLKAMIMCKGCGAFCHDDCIGPSKLCVSCLVVR

SEQ ID NO: 36577 - protein, 1407 aa, Homo sapiens [sequence omitted]

SEQ ID NO: 36578 - protein, 918 aa, Homo sapiens; identical to SEQ ID NO: 36576

SEQ ID NO: 36579 - protein, 1435 aa, Homo sapiens
MREKGRRKKGRTWAEAAKTVLEKYPNTPMSHKEILQVIQREGLKEIRSGTSPLACLNAMLHTNSRGEEGIFYKVPGRMGVYTLKKDVPDGVKELSEGSEESSDGQSDSQSSENSSSSSDGGSNKEGKKSRWKRKVSSSSPQSGCPSPTIPAGKVISPSQKHSKKALKQALKQQQQKKQQQQCRPSISISSNQHLSLKTVKAASDSVPAKPATWEGKQSDGQTGSPQNSNSSFSSSVKVENTLLGLGKKSFQRSERLHTRQMKRTKCADIDVETPDSILVNTNLRALINKHTFSVLPGDCQQRLLLLLPEVDRQVGPDGLMKLNGSALNNEFFTSAAQGWKERLSEGEFTPEMQVRIRQEIEKEKKVEPWKEQFFESYYGQSSGLSLEDSKKLTASPSDPKVKKTPAEQPKSMPVSEASLIRIVPVVSQSECKEEALQMSSPGRKEECESQGEVQPNFSTSSEPLLSSALNTHELSSILPIKCPKDEDLLEQKPVTSAEQESEKNHLTTASNYNKSESQESLVTSPSKPKSPGVEKPIVKPTAGAGPQETNMKEPLATLVDQSPESLKRKSSLTQEEAPVSWEKRPRVTENRQHQQPFQVSPQPFLNRGDRIQVRKVPPLKIPVSRISPMPFHPSQVSPRARFPVSITSPNRTGARTLADIKAKAQLVKAQRAAAAAAAAAAAAASVGGTIPGPGPGGGQGPGEGGEGQTARGGSPGSDRVSETGKGPTLELAGTGSRGGTRELLPCGPETQPQSETKTTPSQAQPHSVSGAQLQQTPPVPPTPAVSGACTSVPSPAHIEKLDNEKLNPTRATATVASVSHPQGPSSCRQEKAPSPTGPALISGASPVHCAADGTVELKAGPSKNIPNPSASSKTDASVPVAVTPSPLTSLLTTATLEKLPVPQVSATTAPAGSAPPSSTLPAASSLKTPGTSLNMNGPTLRPTSSIPANNPLVTQLLQGKDVPMEQILPKPLTKVEMKTVPLTAKEERGMGALIATNTTENSTREEVNERQSHPATQQQLGKTLQSKQLPQVPRPLQLFSAKELRDSSIDTHQYHEGLSKATQDQILQTLIQRVRRQNLLSVVPPSQFNFAHSGFQLEDISTSQRFMLGFAGRRTSKPAMAGHYLLNISTYGRGSESFRRTHSVNPEDRFCLSSPTEALKMGYTDCKNATGESSSSKEDDTDEESTGDEQESVTVKEEPQVSQSAGKGDTSSGPHSRETLSTSDCLASKNVKAEIPLNEQTTLSKENYLFTRGQTFDEKTLARDLIQAAQKQMAHAVRGKAIRSSPELFSSTVLPLPADSPTHQPLLLPPLQTPKLYGSPTQIGPSYRGMINVSTSSDMDHNSAVPGSQVSSNVGDVMSFSVTVTTIPASQAMNPSSHGQTIPVQAFSEENSIEGTPSKCYCRLKAMIMCKGCGAFCHDDCIGPSKLCVSCLVVR

SEQ ID NO: 36580 - protein, 2248 aa, Homo sapiens
MKDKRKKKDRTWAEAARLALEKHPNSPMTAKQILEVIQKEGLKETSGTSPLACLNAMLHTNTRIGDGTFFKIPGKSGLYALKKEESSCPADGTLDLVCESELDGTDMAEANAHGEENGVCSKQVTDEASSTRDSSLTNTAVQSKLVSSFQQHTKKALKQALRQQQKRRNGVSMMVNKTVPRVVLTPLKVSDEQSDSPSGSESKNGEADSSDKEMKHGQKSPTGKQTSQHLKRLKKSGLGHLKWTKAEDIDIETPGSILVNTNLRALINKHTFASLPQHFQQYLLLLLPEVDRQMGSDGILRLSTSALNNEFFAYAAQGWKQRLAEGEFTPEMQLRIRQEIEKEKKTEPWKEKFFERFYGEKLGMSREESVKLTTGPNNAGAQSSSSCGTSGLPVSAQTALAEQQPKSMKSPASPEPGFCATLCPMVEIPPKDIMAELESEDILIPEESVIQEEIAEEVETSICECQDENHKTIPEFSEEAESLTNSHEEPQIAPPEDNLESCVMMNDVLETLPHIEVKIEGKSESPQEEMTVVIDQLEVCDSLIPSTSSMTHVSDTEHKESETAVETSTPKIKTGSSSLEGQFPNEGIAIDMELQSDPEEQLSENACISETSFSSESPEGACTSLPSPGGETQSTSEESCTPASLETTFCSEVSSTENTDKYNQRNSTDENFHASLMSEISPISTSPEISEASLMSNLPLTSEASPVSNLPLTSETSPMSDLPLTSETSSVSSMLLTSETTFVSSLPLPSETSPISNSSINERMAHQQRKSPSVSEEPLSPQKDESSATAKPLGENLTSQQKNLSNTPEPIIMSSSSIAPEAFPSEDLHNKTLSQQTCKSHVDTEKPYPASIPELASTEMIKVKNHSVLQRTEKKVLPSPLELSVFSEGTDNKGNELPSAKLQDKQYISSVDKAPFSEGSRNKTHKQGSTQSRLETSHTSKSSEPSKSPDGIRNESRDSEISKRKTAEQHSFGICKEKRARIEDDQSTRNISSSSPPEKEQPPREEPRVPPLKIQLSKIGPPFIIKSQPVSKPESRASTSTSVSGGRNTGARTLADIKARAQQARAQREAAAAAAVAAAASIVSGAMGSPGEGGKTRTLAHIKEQTKAKLFAKHQARAHLFQTSKETRLPPPLSSKEGPPNLEVSSTPETKMEGSTGVIIVNPNCRSPSNKSAHLRETTTVLQQSLNPSKLPETATDLSVHSSDENIPVSHLSEKIVSSTSSENSSVPMLFNKNSVPVSVCSTAISGAIKEHPFVSSVDKSSVLMSVDSANTTISACNISMLKTIQGTDTPCIAIIPKCIESTPISATTEGSSISSSMDDKQLLISSSSASNLVSTQYTSVPTPSIGNNLPNLSTSSVLIPPMGINNRFPSEKIAIPGSEEQATVSMGTTVRAALSCSDSVAVTDSLVAHPTVAMFTGNMLTINSYDSPPKLSAESLDKNSGPRNRADNSGKPQQPPGGFAPAAINRSIPCKVIVDHSTTLTSSLSLTVSVESSEASLDLQGRPVRTEASVQPVACPQVSVISRPEPVANEGIDHSSTFIAASAAKQDSKTLPATCTSLRELPLVPDKLNEPTAPSHNFAEQARGPAPFKSEADTTCSNQYNPSNRICWNDDGMRSTGQPLVTHSGSSKQKEYLEQSCPKAIKTEHANYLNVSELHPRNLVTNVALPVKSELHEADKGFRMDTEDFPGPELPPPAAEGASSVQQTQNMKASTSSPMEEAISLATDALKRVPGAGSSGCRLSSVEANNPLVTQLLQGNLPLEKVLPQPRLGAKLEINRLPLPLQTTSVGKTAPERNVEIPPSSPNPDGKGYLAGTLAPLQMRKRENHPKKRVARTVGEHTQVKCEPGKLLVEPDVKGVPCVISSGISQLGHSQPFKQEWLNKHSMQNRIVHSPEVKQQKRLLPSCSFQQNLFHVDKNGGFHTDAGTSHRQQFYQMPVAARGPIPTAALLQASSKTPVGCNAFAFNRHLEQKGLGEVSLSSAPHQLRLANMLSPNMPMKEGDEVGGTAHTMPNKALVHPPPPPPPPPPPPLALPPPPPPPPPLPPPLPNAEVPSDQKQPPVTMETTKRLSWPQSTGICSNIKSEPLSFEEGLSSSCELGMKQVSYDQNEMKEQLKAFALKSADFSSYLLSEPQKPFTQLAAQKMQVQQQQQLCGNYPTIHFGSTSFKRAASAIEKSIGILGSGSNPATGLSGQNAQMPVQNFADSSNADELELKCSCRLKAMIVCKGCGAFCHDDCIGPSKLCVACLVVR

SEQ ID NO: 36581 - protein, 768 aa, Homo sapiens
MNGDSRAAVVTSPPPTTAPHKERYFDRVDENNPEYLRERNMAPDLRQDFNMMEQKKRVSMILQSPAFCEELESMIQEQFKKGKNPTGLLALQQIADFMTTNVPNVYPAAPQGGMAALNMSLGMVTPVNDLRGSDSIAYDKGEKLLRCKLAAFYRLADLFGWSQLIYNHITTRVNSEQEHFLIVPFGLLYSEVTASSLVKINLQGDIVDRGSTNLGVNQAGFTLHSAIYAARPDVKCVVHIHTPAGAAVSAMKCGLLPISPEALSLGEVAYHDYHGILVDEEEKVLIQKNLGPKSKVLILRNHGLVSVGESVEEAFYYIHNLVVACEIQVRTLASAGGPDNLVLLNPEKYKAKSRSPGSPVGEGTGSPPKWQIGEQEFEALMRMLDNLGYRTGYPYRYPALREKSKKYSDVEVPASVTGYSFASDGDSGTCSPLRHSFQKQQREKTRWLNSGRGDEASEEGQNGSSPKSKTKVWTNITHDHVKPLLQSLSSGVCVPSCITNCLWTKEDGHRTSTSAVPNLFVPLNTNPKEVQEMRNKIREQNLQDIKTAGPQSQVLCGVVMDRSLVQGELVTASKAIIEKEYQPHVIVSTTGPNPFTTLTDRELEEYRREVERKQKGSEENLDEAREQKEKSPPDQPAVPHPPPSTPIKLEEDLVPEPTTGDDSDAATFKPTLPDLSPDEPSEALGFPMLEKEEEAHRPPSPTEAPTEASPEPAPDPAPVAEEAAPSAVEEGAAADPGSDGSPGKSPSKKKKKFRTPSFLKKSKKKSDS

SEQ ID NO: 36582 - protein, 662 aa, Homo sapiens
MNGDSRAAVVTSPPPTTAPHKERYFDRVDENNPEYLRERNMAPDLRQDFNMMEQKKRVSMILQSPAFCEELESMIQEQFKKGKNPTGLLALQQIADFMTTNVPNVYPAAPQGGMAALNMSLGMVTPVNDLRGSDSIAYDKGEKLLRCKLAAFYRLADLFGWSQLIYNHITTRVNSEQEHFLIVPFGLLYSEVTASSLVKINLQGDIVDRGSTNLGVNQAGFTLHSAIYAARPDVKCVVHIHTPAGAAVSAMKCGLLPISPEALSLGEVAYHDYHGILVDEEEKVLIQKNLGPKSKVLILRNHGLVSVGESVEEAFYYIHNLVVACEIQVRTLASAGGPDNLVLLNPEKYKAKSRSPGSPVGEGTGSPPKWQIGEQEFEALMRMLDNLGYRTGYPYRYPALREKSKKYSDVEVPASVTGYSFASDGDSGTCSPLRHSFQKQQREKTRWLNSGRGDEASEEGQNGSSPKSKTKWTKEDGHRTSTSAVPNLFVPLNTNPKEVQEMRNKIREQNLQDIKTAGPQSQVLCGVVMDRSLVQDAPLSDCTETIEGLELTEQTFSPAKSLSFRKGELVTASKAIIEKEYQPHVIVSTTGPNPFTTLTDRELEEYRREVERKQKGSEENLDEAREQKEKSPPDQPAVPHPPPSTPIKLEEGDGCAREYLLP

SEQ ID NO: 36583 - protein, 662 aa, Homo sapiens
MNGDSRAAVVTSPPPTTAPHKERYFDRVDENNPEYLRERNMAPDLRQDFNMMEQKKRVSMILQSPAFCEELESMIQEQFKKGKNPTGLLALQQIADFMTTNVPNVYPAAPQGGMAALNMSLGMVTPVNDLRGSDSIAYDKGEKLLRCKLAAFYRLADLFGWSQLIYNHITTRVNSEQEHFLIVPFGLLYSEVTASSLVKINLQGDIVDRGSTNLGVNQAGFTLHSAIYAARPDVKCVVHIHTPAGAAVSAMKCGLLPISPEALSLGEVAYHDYHGILVDEEEKVLIQKNLGPKSKVLILRNHGLVSVGESVEEAFYYIHNLVVACEIQVRTLASAGGPDNLVLLNPEKYKAKSRSPGSPVGEGTGSPPKWQIGEQEFEALMRMLDNLGYRTGYPYRYPALREKSKKYSDVEVPASVTGYSFASDGDSGTCSPLRHSFQKQQREKTRWLNSGRGDEASEEGQNGSSPKSKTKVWTNITHDHVKPLLQSLSSGVCVPSCITNCLWTKEDGHRTSTSAVPNLFVPLNTNPKEVQEMRNKIREQNLQDIKTAGPQSQVLCGVVMDRSLVQGELVTASKAIIEKEYQPHVIVSTTGPNPFTTLTDRELEEYRREVERKQKGSEENLDEAREQKEKSPPDQPAVPHPPPSTPIKLEEGDGCAREYLLP

SEQ ID NO: 36584 - protein, 400 aa, Homo sapiens [sequence omitted]

SEQ ID NO: 36585 - protein, 662 aa, Homo sapiens; identical to SEQ ID NO: 36583

SEQ ID NO: 36586 - protein, 737 aa, Homo sapiens
MNGDSRAAVVTSPPPTTAPHKERYFDRVDENNPEYLRERNMAPDLRQDFNMMEQKKRVSMILQSPAFCEELESMIQEQFKKGKNPTGLLALQQIADFMTTNVPNVYPAAPQGGMAALNMSLGMVTPVNDLRGSDSIAYDKGEKLLRCKLAAFYRLADLFGWSQLIYNHITTRVNSEQEHFLIVPFGLLYSEVTASSLVKINLQGDIVDRGSTNLGVNQAGFTLHSAIYAARPDVKCVVHIHTPAGAAVSAMKCGLLPISPEALSLGEVAYHDYHGILVDEEEKVLIQKNLGPKSKVLILRNHGLVSVGESVEEAFYYIHNLVVACEIQVRTLASAGGPDNLVLLNPEKYKAKSRSPGSPVGEGTGSPPKWQIGEQEFEALMRMLDNLGYRTGYPYRYPALREKSKKYSDVEVPASVTGYSFASDGDSGTCSPLRHSFQKQQREKTRWLNSGRGDEASEEGQNGSSPKSKTKWTKEDGHRTSTSAVPNLFVPLNTNPKEVQEMRNKIREQNLQDIKTAGPQSQVLCGVVMDRSLVQGELVTASKAIIEKEYQPHVIVSTTGPNPFTTLTDRELEEYRREVERKQKGSEENLDEAREQKEKSPPDQPAVPHPPPSTPIKLEEDLVPEPTTGDDSDAATFKPTLPDLSPDEPSEALGFPMLEKEEEAHRPPSPTEAPTEASPEPAPDPAPVAEEAAPSAVEEGAAADPGSDGSPGKSPSKKKKKFRTPSFLKKSKKKSDS

SEQ ID NO: 36587 - protein, 737 aa, Homo sapiens; identical to SEQ ID NO: 36586

SEQ ID NO: 36588 - protein, 137 aa, Homo sapiens
MNGDSRAAVVTSPPPTTAPHKERYFDRVDENNPEYLRERNMAPDLRQDFNMMEQKKRVSMILQSPAFCEELESMIQEQFKKGKNPTGLLALQQIADFMTTNVPNVYPAAPQGGMAALNMSLGMVTPVNDLRGSDSIA

SEQ ID NO: 36589 - protein, 632 aa, Homo sapiens
MNGDSRAAVVTSPPPTTAPHKERYFDRVDENNPEYLRERNMAPDLRQDFNMMEQKKRVSMILQSPAFCEELESMIQEQFKKGKNPTGLLALQQIADFMTTNVPNVYPAAPQGGMAALNMSLGMVTPVNDLRGSDSIAYDKGEKLLRCKLAAFYRLADLFGWSQLIYNHITTRVNSEQEHFLIVPFGLLYSEVTASSLVKINLQGDIVDRGSTNLGVNQAGFTLHSAIYAARPDVKCVVHIHTPAGAAVSAMKCGLLPISPEALSLGEVAYHDYHGILVDEEEKVLIQKNLGPKSKVLILRNHGLVSVGESVEEAFYYIHNLVVACEIQVRTLASAGGPDNLVLLNPEKYKAKSRSPGSPVGEGTGSPPKWQIGEQEFEALMRMLDNLGYRTGYPYRYPALREKSKKYSDVEVPASVTGYSFASDGDSGTCSPLRHSFQKQQREKTRWLNSGRGDEASEEGQNGSSPKSKTKWTKEDGHRTSTSAVPNLFVPLNTNPKEVQEMRNKIREQNLQDIKTAGPQSQVLCGVVMDRSLVQGELVTASKAIIEKEYQPHVIVSTTGPNPFTTLTDRELEEYRREVERKQKGSEENLDEAREQKEKSPPDQPAVPHPPPSTPIKLEEAGDGCAREYLLP

SEQ ID NO: 36590 - protein, 444 aa, Homo sapiens
  VARIANT 1: note = MOD_RES - Any amino acid
XVLILRNHGLVSVGESVEEAFYYIHNLVVACEIQVRTLASAGGPDNLVLLNPEKYKAKSRSPGSPVGEGTGSPPKWQIGEQEFEALMRMLDNLGYRTGYPYRYPALREKSKKYSDVEVPASVTGYSFASDGDSGTCSPLRHSFQKQQREKTRWLNSGRGDEASEEGQNGSSPKSKTKVWTNITHDHVKPLLQSLSSGVCVPSCITNCLWTKEDGHRTSTSAVPNLFVPLNTNPKEVQEMRNKIREQNLQDIKTAGPQSQVLCGVVMDRSLVQGELVTASKAIIEKEYQPHVIVSTTGPNPFTTLTDRELEEYRREVERKQKGSEENLDEAREQKEKSPPDQPAVPHPPPSTPIKLEEDLVPEPTTGDDSDAATFKPTLPDLSPDEPSEALGFPMLEKEEEAHRPPSPTEAPTEASPEPAPDPAPVAEEAAPSAVEEGAAADPGS

SEQ ID NO: 36591 - protein, 726 aa, Homo sapiens
MSEETVPEAASPPPPQGQPYFDRFSEDDPEYMRLRNRAADLRQDFNLMEQKKRVTMILQSPSFREELEGLIQEQMKKGNNSSNIWALRQIADFMASTSHAVFPTSSMNVSMMTPINDLHTADSLNLAKGERLMRCKISSVYRLLDLYGWAQLSDTYVTLRVSKEQDHFLISPKGVSCSEVTASSLIKVNILGEVVEKGSSCFPVDTTGFCLHSAIYAARPDVRCIIHLHTPATAAVSAMKWGLLPVSHNALLVGDMAYYDFNGEMEQEADRINLQKCLGPTCKILVLRNHGVVALGDTVEEAFYKIFHLQAACEIQVSALSSAGGVENLILLEQEKHRPHEVGSVQWAGSTFGPMQKSRLGEHEFEALMRMLDNLGYRTGYTYRHPFVQEKTKHKSEVEIPATVTAFVFEEDGAPVPALRQHAQKQQKEKTRWLNTPNTYLRVNVADEVQRSMGSPRPKTTWMKADEVEKSSSGMPIRIENPNQFVPLYTDPQEVLEMRNKIREQNRQDVKSAGPQSQLLASVIAEKSRSPSTESQLMSKGDEDTKDDSEETVPNPFSQLTDQELEEYKKEVERKKLELDGEKETAPEEPGSPAKSAPASPVQSPAKEAETKSPLVSPSKSLEEGTKKTETSKAATTEPETTQPEGVVVNGREEEQTAEEILSKGLSQMTTSADTDVDTSKDKTESVTSGPMSPEGSPSKSPSKKKKKFRTPSFLKKSKKKEKVES

SEQ ID NO: 36592 - protein, 98 aa, Homo sapiens
MSEETVPEAASPPPPQGQPYFDRFSEDDPEYMRLRNRAADLRQDFNLMEQKKRVTMILQSPSFREELEGLIQEQMKKEYKKEVERKKLELDAPGWFSS

SEQ ID NO: 36593 - protein, 587 aa, Homo sapiens
MSEETVPEAASPPPPQGQPYFDRFSEDDPEYMRLRNRAADLRQDFNLMEQKKRVTMILQSPSFREELEGLIQEQMKKGNNSSNIWALRQIADFMASTSHAVFPTSSMNVSMMTPINDLHTADSLNLAKGERLMRCKISSVYRLLDLYGWAQLSDTYVTLRVSKEQDHFLISPKGVSCSEVTASSLIKVNILGEVVEKGSSCFPVDTTGFCLHSAIYAARPDVRCIIHLHTPATAAVSAMKWGLLPVSHNALLVGDMAYYDFNGEMEQEADRINLQKCLGPTCKILVLRNHGVVALGDTVEEAFYKIFHLQAACEIQVSALSSAGGVENLILLEQEKHRPHEVGSVQWAGSTFGPMQKSRLGEHEFEALMRMLDNLGYRTGYTYRHPFVQEKTKHKSEVEIPATVTAFVFEEDGAPVPALRQHAQKQQKEKTRWLNTPNTYLRVNVADEVQRSMGSPRPKTTWMKADEVEKSSSGMPIRIENPNQFVPLYTDPQEVLEMRNKIREQNRQDVKSAGPQSQLLASVIAEKSRSPSTESQLMSKGDEDTKDDSEETVPNPFSQLTDQELEEYKKEVERKKLELDAPGWFSS

SEQ ID NO: 36594 - protein, 726 aa, Homo sapiens; identical to SEQ ID NO: 36591

SEQ ID NO: 36595 - protein, 726 aa, Homo sapiens; identical to SEQ ID NO: 36591

SEQ ID NO: 36596 - protein, 559 aa, Homo sapiens
MSEETVPEAASPPPPQGQPYFDRFSEDDPEYMRLRNRAADLRQDFNLMEQKKRVTMILQSPSFREELEGLIQEQMKKGNNSSNIWALRQIADFMASTSHAVFPTSSMNVSMMTPINDLHTADSLNLAKGERLMRCKISSVYRLLDLYGWAQLSDTYVTLRVSKEQDHFLISPKGVSCSEVTASSLIKVNILGEVVEKGSSCFPVDTTGFCLHSAIYAARPDVRCIIHLHTPATAAVSAMKWGLLPVSHNALLVGDMAYYDFNGEMEQEADRINLQKCLGPTCKILVLRNHGVVALGDTVEEAFYKIFHLQAACEIQVSALSSAGGVENLILLEQEKHRPHEVGSVQWAGSTFGPMQKSRLGEHEFEALMRMLDNLGYRTGYTYRHPFVQEKTKHKSEVEIPATVTAFVFEEDGAPVPALRQHAQKQQKEKTRWLNTPNTYLRVNVADEVQRSMGSPRPKTTWMKADEVEKSSSGMPIRIENPNQFVPLYTDPQEVLEMRNKIREQNRQDVKSAGPQSQLLASVIAEKSRSPVEQRLPLTGGETCLPSGSSVPGAGLQDP

SEQ ID NO: 36597 - protein, 226 aa, Homo sapiens
MSEETVPEAASPPPPQGQPYFDRFSEDDPEYMRLRNRAADLRQDFNLMEQKKRVTMILQSPSFREELEGLIQEQMKKGNNSSNIWALRQIADFMASTSHAVFPTSSMNVSMMTPINDLHTADSLNLAKGERLMRCKISSVYRLLDLYGWAQLSDTYVTLRVSKEQDHFLISPKGVSCSEVTASSLIKVNILGEVVEKGSSCFPVDTTGFCLHSAIYAARPDVRCII

SEQ ID NO: 36598 - protein, 143 aa, Homo sapiens
MSEETVPEAASPPPPQGQPYFDRFSEDDPEYMRLRNRAADLRQDFNLMEQKKRVTMILQSPSFREELEGLIQEQMKKGNNSSNIWALRQIADFMASTSHAVFPTSSMNVSMMTPINDLHTADSLNLAKGERLMRCKISSVYRL

SEQ ID NO: 36599 - protein, 575 aa, Homo sapiens
MPRRRVPGANCKPTGKMSEETVPEAASPPPPQGQPYFDRFSEDDPEYMRLRNRAADLRQDFNLMEQKKRVTMILQSPSFREELEGLIQEQMKKGNNSSNIWALRQIADFMASTSHAVFPTSSMNVSMMTPINDLHTADSLNLAKGERLMRCKISSVYRLLDLYGWAQLSDTYVTLRVSKEQDHFLISPKGVSCSEVTASSLIKVNILGEVVEKGSSCFPVDTTGFCLHSAIYAARPDVRCIIHLHTPATAAVSAMKWGLLPVSHNALLVGDMAYYDFNGEMEQEADRINLQKCLGPTCKILVLRNHGVVALGDTVEEAFYKIFHLQAACEIQVSALSSAGGVENLILLEQEKHRPHEVGSVQWAGSTFGPMQKSRLGEHEFEALMRMLDNLGYRTGYTYRHPFVQEKTKHKSEVEIPATVTAFVFEEDGAPVPALRQHAQKQQKEKTRWLNTPNTYLRVNVADEVQRSMGSPRPKTTWMKADEVEKSSSGMPIRIENPNQFVPLYTDPQEVLEMRNKIREQNRQDVKSAGPQSQLLASVIAEKSRSPVEQRLPLTGGETCLPSGSSVPGAGLQDP

SEQ ID NO: 36600 - protein, 17 aa, Homo sapiens
MSEETVPEAASPPPPQG

SEQ ID NO: 36601 - protein, 281 aa, Homo sapiens
MSEETVPEAASPPPPQGQPYFDRFSEDDPEYMRLRNRAADLRQDFNLMEQKKRVTMILQSPSFREELEGLIQEQMKKGNNSSNIWALRQIADFMASTSHAVFPTSSMNVSMMTPINDLHTADSLNLAKGERLMRCKISSVYRLLDLYGWAQLSDTYVTLRVSKEQDHFLISPKGVSCSEVTASSLVSEVLEMRNKIREQNRQDVKSAGPQSQLLASVIAEKSRSPSTESQLMSKGDEDTKDDSEETVPNPFSQLTDQELEEYKKEVERKKLELDAPGWFSS

SEQ ID NO: 36602 - protein, 643 aa, Homo sapiens
MSEETVPEAASPPPPQGQPYFDRFSEDDPEYMRLRNRAADLRQDFNLMEQKKRVTMILQSPSFREELEGLIQEQMKKGNNSSNIWALRQIADFMASTSHAVFPTSSMNVSMMTPINDLHTADSLNLAKGERLMRCKISSVYRLLDLYGWAQLSDTYVTLRVSKEQDHFLISPKGVSCSEVTASSLIKVNILGEVVEKGSSCFPVDTTGFCLHSAIYAARPDVRCIIHLHTPATAAVSAMKWGLLPVSHNALLVGDMAYYDFNGEMEQEADRINLQKCLGPTCKILVLRNHGVVALGDTVEEAFYKIFHLQAACEIQVSALSSAGGVENLILLEQEKHRPHEVGSVQWAGSTFGPMQKSRLGEHEFEALMRMLDNLGYRTGYTYRHPFVQEKTKHKSEVEIPATVTAFVFEEDGAPVPALRQHAQKQQKEKTRWLNTPNTYLRVNVADEVQRSMGSPRPKTTWMKADEVEKSSSGMPIRIENPNQFVPLYTDPQEVLEMRNKIREQNRQDVKSAGPQSQLLASVIAEKSRSPSTESQLMSKGDEDTKDDSEETVPNPFSQLTDQELEEYKKEVERKKLELDETGQEREPGSGPAVCEFFSVALHIWSNILERKKLPQKSLAHLQSLHLLLQCRAQRRRQRQRAL

SEQ ID NO: 36603 - protein, 674 aa, Homo sapiens
MSSDASQGVITTPPPPSMPHKERYFDRINENDPEYIRERNMSPDLRQDFNMMEQRKRVTQILQSPAFREDLECLIQEQMKKGHNPTGLLALQQIADYIMANSFSGFSSPPLSLGMVTPINDLPGADTSSYVKGEKLTRCKLASLYRLVDLFGWAHLANTYISVRISKEQDHIIIIPRGLSFSEATASNLVKVNIIGEVVDQGSTNLKIDHTGFSPHAAIYSTRPDVKCVIHIHTLATAAVSSMKCGILPISQESLLLGDVAYYDYQGSLEEQEERIQLQKVLGPSCKVLVLRNHGVVALGETLEEAFHYIFNVQLACEIQVQALAGAGGVDNLHVLDFQKYKAFTYTVAASGGGGVNMGSHQKWKVGEIEFEGLMRTLDNLGYRTGYAYRHPLIREKPRHKSDVEIPATVTAFSFEDDTVPLSPLKYMAQRQQREKTRWLNSPNTYMKVNVPEESRNGETSPRTKITWMKAEDSSKVSGGTPIKIEDPNQFVPLNTNPNEVLEKRNKIREQNRYDLKTAGPQSQLLAGIVVDKPPSTMQFEDDDHGPPAPPNPFSHLTEGELEEYKRTIERKQQGLEENHELFSKSFISMEVPVMVVNGKDDMHDVEDELAKRVSRLSTSTTIENIEITIKSPEKIEEVLSPEGSPSKSPSKKKKKFRTPSFLKKNKKKEKVEA

SEQ ID NO: 36604 - protein, 706 aa, Homo sapiens
MSSDASQGVITTPPPPSMPHKERYFDRINENDPEYIRERNMSPDLRQDFNMMEQRKRVTQILQSPAFREDLECLIQEQMKKGHNPTGLLALQQIADYIMANSFSGFSSPPLSLGMVTPINDLPGADTSSYVKGEKLTRCKLASLYRLVDLFGWAHLANTYISVRISKEQDHIIIIPRGLSFSEATASNLVKVNIIGEVVDQGSTNLKIDHTGFSPHAAIYSTRPDVKCVIHIHTLATAAVSSMKCGILPISQESLLLGDVAYYDYQGSLEEQEERIQLQKVLGPSCKVLVLRNHGVVALGETLEEAFHYIFNVQLACEIQVQALAGAGGVDNLHVLDFQKYKAFTYTVAASGGGGVNMGSHQKWKVGEIEFEGLMRTLDNLGYRTGYAYRHPLIREKPRHKSDVEIPATVTAFSFEDDTVPLSPLKYMAQRQQREKTRWLNSPNTYMKVNVPEESRNGETSPRTKITWMKAEDSSKVSGGTPIKIEDPNQFVPLNTNPNEVLEKRNKIREQNRYDLKTAGPQSQLLAGIVVDKPPSTMQFEDDDHGPPAPPNPFSHLTEGELEEYKRTIERKQQGLEDAEQELLSDDASSVSQIQSQTQSPQNVPEKLEENHELFSKSFISMEVPVMVVNGKDDMHDVEDELAKRVSRLSTSTTIENIEITIKSPEKIEEVLSPEGSPSKSPSKKKKKFRTPSFLKKNKKKEKVEA

SEQ ID NO: 36605 - protein, 674 aa, Homo sapiens; identical to SEQ ID NO: 36603

SEQ ID NO: 36606 - protein, 180 aa, Homo sapiens
MADSELQLVEQRIRSFPDFPTPGVVFRDISPVLKDPASFRAAIGLLARHLKATHGGRIDYIAGLDSRGFLFGPSLAQELGLGCVLIRKRGKLPGPTLWASYSLEYGKAELEIQKDALEPGQRVVVVDDLLATGGTMNAACELLGRLQAEVLECVSLVELTSLKGREKLAPVPFFSLLQYE

SEQ ID NO: 36607 - protein, 134 aa, Homo sapiens
MADSELQLVEQRIRSFPDFPTPGVVFRDISPVLKDPASFRAAIGLLARHLKATHGGRIDYIAGLDSRGFLFGPSLAQELGLGCVLIRKRGKLPGPTLWASYSLEYGKAELEIQKDALEPGQRVVVVDDLLATGV

SEQ ID NO: 36608 - protein, 2303 aa, Homo sapiens
MASSVAPYEQLVRQVEALKAENSHLRQELRDNSSHLSKLETETSGMKEVLKHLQGKLEQEARVLVSSGQTEVLEQLKALQMDITSLYNLKFQPPTLGPEPAARTPEGSPVHGSGPSKDSFGELSRATIRLLEELDRERCFLLNEIEKEEKEKLWYYSQLQGLSKRLDELPHVETQFSMQMDLIRQQLEFEAQHIRSLMEERFGTSDEMVQRAQIRASRLEQIDKELLEAQDRVQQTEPQALLAVKSVPVDEDPETEVPTHPEDGTPQPGNSKVEVVFWLLSMLATRDQEDTARTLLAMSSSPESCVAMRRSGCLPLLLQILHGTEAAAGGRAGAPGAPGAKDARMRANAALHNIVFSQPDQGLARKEMRVLHVLEQIRAYCETCWDWLQARDGGPEGGGAGSAPIPIEPQICQATCAVMKLSFDEEYRRAMNELGGLQAVAELLQVDYEMHKMTRDPLNLALRRYAGMTLTNLTFGDVANKATLCARRGCMEAIVAQLASDSEELHQVVSSILRNLSWRADINSKKVLREAGSVTALVQCVLRATKESTLKSVLSALWNLSAHSTENKAAICQVDGALGFLVSTLTYKCQSNSLAIIESGGGILRNVSSLVATREDYRQVLRDHNCLQTLLQHLTSHSLTIVSNACGTLWNLSARSARDQELLWDLGAVGMLRNLVHSKHKMIAMGSAAALRNLLAHRPAKHQAAATAVSPGSCVPSLYVRKQRALEAELDARHLAQALEHLEKQGPPAAEAATKKPLPPLRHLDGLAQDYASDSGCFDDDDAPSSLAAAAATGEPASPAALSLFLGSPFLQGQALARTPPTRRGGKEAEKDTSGEAAVAAKAKAKLALAVARIDQLVEDISALHTSSDDSFSLSSGDPGQEAPREGRAQSCSPCRGPEGGRREAGSRAHPLLRLKAAHASLSNDSLNSGSASDGYCPREHMLPCPLAALASRREDPRCGQPRPSRLDLDLPGCQAEPPAREATSADARVRTIKLSPTYQHVPLLEGASRAGAEPLAGPGISPGARKQAWLPADHLSKVPEKLAAAPLSVASKALQKLAAQEGPLSLSRCSSLSSLSSAGRPGPSEGGDLDDSDSSLEGLEEAGPSEAELDSTWRAPGATSLPVAIPAPRRNRGRGLGVEDATPSSSSENYVQETPLVLSRCSSVSSLGSFESPSIASSIPSEPCSGQGSGTISPSELPDSPGQTMPPSRSKTPPLAPAPQGPPEATQFSLQWESYVKRFLDIADCRERCRLPSELDAGSVRFTVEKPDENFSCASSLSALALHEHYVQQDVELRLLPSACPERGGGAGGAGLHFAGHRRREEGPAPTGSRPRGAADQELELLRECLGAAVPARLRKVASALVPGRRALPVPVYMLVPAPAPAQEDDSCTDSAEGTPVNFSSAASLSDETLQGPPRDQPGGPAGRQRPTGRPTSARQAMGHRHKAGGAGRSAEQSRGAGKNRAGLELPLGRPPSAPADKDGSKPGRTRGDGALQSLCLTTPTEEAVYCFYGNDSDEEPPAAAPTPTHRRTSAIPRAFTRERPQGRKEAPAPSKAAPAAPPPARTQPSLIADETPPCYSLSSSASSLSEPEPSEPPAVHPRGREPAVTKDPGPGGGRDSSPSPRAAEELLQRCISSALPRRRPPVSGLRRRKPRATRLDERPAEGSRERGEEAAGSDRASDLDSVEWRAIQEGANSIVTWLHQAAAATREASSESDSILSFVSGLSVGSTLQPPKHRKGRQAEGEMGSARRPEKRGAASVKTSGSPRSPAGPEKPRGTQKTTPGVPAVLRGRTVIYVPSPAPRAQPKGTPGPRATPRKVAPPCLAQPAAPAKVPSPGQQRSRSLHRPAKTSELATLSQPPRSATPPARLAKTPSSSSSQTSPASQPLPRKRPPVTQAAGALPGPGASPVPKTPARTLLAKQHKTQRSPVRIPFMQRPARRGPPPLARAVPEPGPRGRAGTEAGPGARGGRLGLVRVASALSSGSESSDRSGFRRQLTFIKESPGLRRRRSELSSAESAASAPQGASPRRGRPALPAVFLCSSRCEELRAAPRQGPAPARQRPPAARPSPGERPARRTTSESPSRLPVRAPAARPETVKRYASLPHISVARRPDGAVPAAPASADAARRSSDGEPRPLPRVAAPGTTWRRIRDEDVPHILRSTLPATALPLRGSTPEDAPAGPPPRKTSDAVVQTEEVAAPKTNSSTSPSLETREPPGAPAGGQLSLLGSDVDGPSLAKAPISAPFVHEGLGVAVGGFPASRHGSPSRSARVPPFNYVPSPMVVAATTDSAAEKAPATASATLLE

SEQ ID NO: 36609 - protein, 2029 aa, Homo sapiens
MASSVAPYEQLVRQVEALKAENSHLRQELRDNSSHLSKLETETSGMKEVLKHLQGKLEQEARVLVSSGQTEVLEQLKALQMDITSLYNLKFQPPTLGPEPAARTPEGSPVHGSGPSKDSFGELSRATIRLLEELDRERCFLLNEIEKEEKEKLWYYSQLQGLSKRLDELPHVDYEMHKMTRDPLNLALRRYAGMTLTNLTFGDVANKATLCARRGCMEAIVAQLASDSEELHQVVSSILRNLSWRADINSKKVLREAGSVTALVQCVLRATKESTLKSVLSALWNLSAHSTENKAAICQVDGALGFLVSTLTYKCQSNSLAIIESGGGILRNVSSLVATREDYRQVLRDHNCLQTLLQHLTSHSLTIVSNACGTLWNLSARSARDQELLWDLGAVGMLRNLVHSKHKMIAMGSAAALRNLLAHRPAKHQAAATAVSPGSCVPSLYVRKQRALEAELDARHLAQALEHLEKQGPPAAEAATKKPLPPLRHLDGLAQDYASDSGCFDDDDAPSSLAAAAATGEPASPAALSLFLGSPFLQGQALARTPPTRRGGKEAEKDTSGEAAVAAKAKAKLALAVARIDQLVEDISALHTSSDDSFSLSSGDPGQEAPREGRAQSCSPCRGPEGGRREAGSRAHPLLRLKAAHASLSNDSLNSGSASDGYCPREHMLPCPLAALASRREDPRCGQPRPSRLDLDLPGCQAEPPAREATSADARVRTIKLSPTYQHVPLLEGASRAGAEPLAGPGISPGARKQAWLPADHLSKVPEKLAAAPLSVASKALQKLAAQEGPLSLSRCSSLSSLSSAGRPGPSEGGDLDDSDSSLEGLEEAGPSEAELDSTWRAPGATSLPVAIPAPRRNRGRGLGVEDATPSSSSENYVQETPLVLSRCSSVSSLGSFESPSIASSIPSEPCSGQGSGTISPSELPDSPGQTMPPSRSKTPPLAPAPQGPPEATQFSLQWESYVKRFLDIADCRERCRLPSELDAGSVRFTVEKPDENFSCASSLSALALHEHYVQQDVELRLLPSACPERGGGAGGAGLHFAGHRRREEGPAPTGSRPRGAADQELELLRECLGAAVPARLRKVASALVPGRRALPVPVYMLVPAPAPAQEDDSCTDSAEGTPVNFSSAASLSDETLQGPPRDQPGGPAGRQRPTGRPTSARQAMGHRHKAGGAGRSAEQSRGAGKNRAGLELPLGRPPSAPADKDGSKPGRTRGDGALQSLCLTTPTEEAVYCFYGNDSDEEPPAAAPTPTHRRTSAIPRAFTRERPQGRKEAPAPSKAAPAAPPPARTQPSLIADETPPCYSLSSSASSLSEPEPSEPPAVHPRGREPAVTKDPGPGGGRDSSPSPRAAEELLQRCISSALPRRRPPVSGLRRRKPRATRLDERPAEGSRERGEEAAGSDRASDLDSVEWRAIQEGANSIVTWLHQAAAATREASSESDSILSFVSGLSVGSTLQPPKHRKGRQAEGEMGSARRPEKRGAASVKTSGSPRSPAGPEKPRGTQKTTPGVPAVLRGRTVIYVPSPAPRAQPKGTPGPRATPRKVAPPCLAQPAAPAKVPSPGQQRSRSLHRPAKTSELATLSQPPRSATPPARLAKTPSSSSSQTSPASQPLPRKRPPVTQAAGALPGPGASPVPKTPARTLLAKQHKTQRSPVRIPFMQRPARRGPPPLARAVPEPGPRGRAGTEAGPGARGGRLGLVRVASALSSGSESSDRSGFRRQLTFIKESPGLRRRRSELSSAESAASAPQGASPRRGRPALPAVFLCSSRCEELRAAPRQGPAPARQRPPAARPSPGERPARRTTSESPSRLPVRAPAARPETVKRYASLPHISVARRPDGAVPAAPASADAARRSSDGEPRPLPRVAAPGTTWRRIRDEDVPHILRSTLPATALPLRGSTPEDAPAGPPPRKTSDAVVQTEEVAAPKTNSSTSPSLETREPPGAPAGGQLSLLGSDVDGPSLAKAPISAPFVHEGLGVAVGGFPASRHGSPSRSARVPPFNYVPSPMVVAATTDSAAEKAPATASATLLE

SEQ ID NO: 36610 - protein, 2303 aa, Homo sapiens; identical to SEQ ID NO: 36608

SEQ ID NO: 36611 - protein, 514 aa, Homo sapiens
MSWPRRLLLRYLFPALLLHGLGEGSALLHPDSRSHPRSLEKSAWRAFKESQCHHMLKHLHNGARITVQMPPTIEGHWVSTGCEVRSGPEFITRSYRFYHNNTFKAYQFYYGSNRCTNPTYTLIIRGKIRLRQASWIIRGGTEADYQLHNVQVICHTEAVAEKLGQQVNRTCPGFLADGGPWVQDVAYDLWREENGCECTKAVNFAMHELQLIRVEKQYLHHNLDHLVEELFLGDIHTDATQRMFYRPSSYQPPLQNAKNHDHACIACRIIYRSDEHHPPILPPKADLTIGLHGEWVSQRCEVRPEVLFLTRHFIFHDNNNTWEGHYYHYSDPVCKHPTFSIYARGRYSRGVLSSRVMGGTEFVFKVNHMKVTPMDAATASLLNVFNGNECGAEGSWQVGIQQDVTHTNGCVALGIKLPHTEYEIFKMEQDARGRYLLFNGQRPSDGSSPDRPEKRATSYQMPLVQCASSSPRAEDLAEDSGSSLYGRAPGRHTWSLLLAALACLVPLLHWNIRR

SEQ ID NO: 36612 - protein, 565 aa, Homo sapiens
MKRRCSCGGGGGHCSSERRRTRPEAEGRARAQLPGHQIGARRAGGPRAGLEMSWPRRLLLRYLFPALLLHGLGEGSALLHPDSRSHPRSLEKSAWRAFKESQCHHMLKHLHNGARITVQMPPTIEGHWVSTGCEVRSGPEFITRSYRFYHNNTFKAYQFYYGSNRCTNPTYTLIIRGKIRLRQASWIIRGGTEADYQLHNVQVICHTEAVAEKLGQQVNRTCPGFLADGGPWVQDVAYDLWREENGCECTKAVNFAMHELQLIRVEKQYLHHNLDHLVEELFLGDIHTDATQRMFYRPSSYQPPLQNAKNHDHACIACRIIYRSDEHHPPILPPKADLTIGLHGEWVSQRCEVRPEVLFLTRHFIFHDNNNTWEGHYYHYSDPVCKHPTFSIYARGRYSRGVLSSRVMGGTEFVFKVNHMKVTPMDAATASLLNVFNGNECGAEGSWQVGIQQDVTHTNGCVALGIKLPHTEYEIFKMEQDARGRYLLFNGQRPSDGSSPDRPEKRATSYQMPLVQCASSSPRAEDLAEDSGSSLYGRAPGRHTWSLLLAALACLVPLLHWNIRR

SEQ ID NO: 36613 - protein, 326 aa, Homo sapiens
MPPSISAFQAAYIGIEVLIALVSVPGNVLVIWAVKVNQALRDATFCFIVSLAVADVAVGALVIPLAILINIGPQTYFHTCLMVACPVLILTQSSILALLAIAVDRYLRVKIPLRYKMVVTPRRAAVAIAGCWILSFVVGLTPMFGWNNLSAVERAWAANGSMGEPVIKCEFEKVISMEYMVYFNFFVWVLPPLLLMVLIYLEVFYLIRKQLNKKVSASSGDPQKYYGKELKIAKSLALILFLFALSWLPLHILNCITLFCPSCHKPSILTYIAIFLTHGNSAMNPIVYAFRIQKFRVTFLKIWNDHFRCQPAPPIDEDLPEERPDD

SEQ ID NO: 36614 - protein, 326 aa, Homo sapiens; identical to SEQ ID NO: 36613

SEQ ID NO: 36615 - protein, 125 aa, Homo sapiens
MPPSISAFQAAYIGIEVLIALVSVPGNVLVIWAVKVNQALRDATFCFIVSLAVADVAVGALVIPLAILINIGPQTYFHTCLMVACPVLILTQSSILALLAIAVDRYLRVKIPLRRISQCMASTKS

SEQ ID NO: 36616 - protein, 326 aa, Homo sapiens; identical to SEQ ID NO: 36613

SEQ ID NO: 36617 - protein, 412 aa, Homo sapiens
MPIMGSSVYITVELAIAVLAILGNVLVCWAVWLNSNLQNVTNYFVVSLAAADIAVGVLAIPFAITISTGFCAACHGCLFIACFVLVLTQSSIFSLLAIAIDRYIAIRIPLRYNGLVTGTRAKGIIAICWVLSFAIGLTPMLGWNNCGQPKEGKNHSQGCGEGQVACLFEDVVPMNYMVYFNFFACVLVPLLLMLGVYLRIFLAARRQLKQMESQPLPGERARSTLQKEVHAAKSLAIIVGLFALCWLPLHIINCFTFFCPDCSHAPLWLMYLAIVLSHTNSVVNPFIYAYRIREFRQTFRKIIRSHVLRQQEPFKAAGTSARVLAAHGSDGEQVSLRLNGHPPGVWANGSAPHPERRPNGYALGLVSGGSAQESQGNTGLPDVELLSHELKGVCPEPPGLDDPLAQDGAGVS

SEQ ID NO: 36618 - protein, 412 aa, Homo sapiens; identical to SEQ ID NO: 36617

SEQ ID NO: 36619 - protein, 88 aa, Homo sapiens
MPIMGSSVYITVELAIAVLAILGNVLVCWAVWLNSNLQNVTNYFVVSLAAADIAVGVLAIPFAITISTGFCAACHGCLFIACFVLVLT

SEQ ID NO: 36620 - protein, 64 aa, Homo sapiens
MPIMGSSVYITVELAIAVLAILGNVLVCWAVWLNSNLQNVTNYFVVSLAAADIAVGVLAIPFAI

SEQ ID NO: 36621 - protein, 76 aa, Homo sapiens
MPIMGSSVYITVELAIAVLAILGNVLVCWAVWLNSNLQNVTNYFVVSLAAADIAVGVLAIPFAITISTGFCAACHG

SEQ ID NO: 36622 - protein, 365 aa, Homo sapiens
MPIMGSSVYITVELAIAVLAILGNVLVCWAVWLNSNLQNVTNYFVVSLAAADIAVGVLAIPFAITISTGFCAACHGCLFIACFVLVLTQSSIFSLLAIAIDRYIAIRIPLRYNGLVTGTRAKGIIAICWVLSFAIGLTPMLGWNNCGQPKEGKNHSQGCGEGQVACLFEDVVPMNYMVYFNFFACVLVPLLLMLGVYLRIFLAARRQLKQMESQPLPGERARSTLQKEVHAAKSLAIIVGLFALCWLPLHIINCFTFFCPDCSHAPLWLMYLAIVLSHTNSVVNPFIYAYRIREFRQTFRKIIRSHVLRQQEPFKAAGTSARVLAAHGSDGEQVSLRLNGHPPGVWANGSAPHPERRPNGYALGL

SEQ ID NO: 36623 - protein, 412 aa, Homo sapiens; identical to SEQ ID NO: 36617

SEQ ID NO: 36624 - protein, 332 aa, Homo sapiens
MLLETQDALYVALELVIAALSVAGNVLVCAAVGTANTLQTPTNYFLVSLAAADVAVGLFAIPFAITISLGFCTDFYGCLFLACFVLVLTQSSIFSLLAVAVDRYLAICVPLRYKSLVTGTRARGVIAVLWVLAFGIGLTPFLGWNSKDSATNNCTEPWDGTTNESCCLVKCLFENVVPMSYMVYFNFFGCVLPPLLIMLVIYIKIFLVACRQLQRTELMDHSRTTLQREIHAAKSLAMIVGIFALCWLPVHAVNCVTLFQPAQGKNKPKWAMNMAILLSHANSVVNPIVYAYRNRDFRYTFHKIISRYLLCQADVKSGNGQAGVQPALGVGL

SEQ ID NO: 36625 - protein, 318 aa, Homo sapiens
MPNNSTALSLANVTYITMEIFIGLCAIVGNVLVICVVKLNPSLQTTTFYFIVSLALADIAVGVLVMPLAIVVSLGITIHFYSCLFMTCLLLIFTHASIMSLLAIAVDRYLRVKLTVRYKRVTTHRRIWLALGLCWLVSFLVGLTPMFGWNMKLTSEYHRNVTFLSCQFVSVMRMDYMVYFSFLTWIFIPLVVMCAIYLDIFYIIRNKLSLNLSNSKETGAFYGREFKTAKSLFLVLFLFALSWLPLSIINCIIYFNGEVPQLVLYMGILLSHANSMMNPIVYAYKIKKFKETYLLILKACVVCHPSDSLDTSIEKNSE

SEQ ID NO: 36626 - protein, 178 aa, Homo sapiens
MEGSPAGPIEQKEARWESSWEEQPDWTLGCLSPESHTNHVALRDTGNQLIVTMSCLTKEDTGWYWCGIQRDFARDDMDFTELIVTDDKGTLANDFWSGKDLSGNKTRSCKAPKVVRKADRSRTSILIICILITGLGIISVISHLTKRRRSQRNRRVGNTLKPFSRVLTPKEMAPTEQM

SEQ ID NO: 36627 - protein, 347 aa, Homo sapiens
MPNNSTALSLANVTYITMEIFIGLCAIVGNVLVICVVKLNPSLQTTTFYFIVSLALADIAVGVLVMPLAIVVSLGITIHFYSCLFMTCLLLIFTHASIMSLLAIAVDRYLRVKLTVRFRIPGLPGCILSFQLKVCFLPVMWLFILLSLALISDAMVMDEKVKRSFVLDTASAICNYNAHYKNHPKYWCRGYFRDYCNIIAFSPNSTNHVALRDTGNQLIVTMSCLTKEDTGWYWCGIQRDFARDDMDFTELIVTDDKGTLANDFWSGKDLSGNKTRSCKAPKVVRKADRSRTSILIICILITGLGIISVISHLTKRRRSQRNRRVGNTLKPFSRVLTPKEMAPTEQM

SEQ ID NO: 36628 - protein, 266 aa, Homo sapiens
MEGSPAGPIEQKEARWESSWEEQPDWTLGCLSPESQFRIPGLPGCILSFQLKVCFLPVMWLFILLSLALISDAMVMDEKVKRSFVLDTASAICNYNAHYKNHPKYWCRGYFRDYCNIIAFSPNSTNHVALRDTGNQLIVTMSCLTKEDTGWYWCGIQRDFARDDMDFTELIVTDDKGTLANDFWSGKDLSGNKTRSCKAPKVVRKADRSRTSILIICILITGLGIISVISHLTKRRRSQRNRRVGNTLKPFSRVLTPKEMAPTEQM

SEQ ID NO: 36629 - protein, 207 aa, Homo sapiens
  VARIANT 1: note = MOD_RES - Any amino acid
XPQALQGPPSSNDAMVMDEKVKRSFVLDTASAICNYNAHYKNHPKYWCRGYFRDYCNIIAFSPNSTNHVALRDTGNQLIVTMSCLTKEDTGWYWCGIQRDFARDDMDFTELIVTDDKGTLANDFWSGKDLSGNKTRSCKAPKVVRKADRSRTSILIICILITGLGIISVISHLTKRRRSQRNRRVGNTLKPFSRVLTPKEMAPTEQM

SEQ ID NO: 36630 - protein, 115 aa, Homo sapiens
  VARIANT 1: note = MOD_RES - Any amino acid
XPSSHVALHSTLLGSHFSTNHVALRDTGNQLIVTMSCLTKEDTGWYWCGIQRDFARDDMDFTELIVTDDKGTLANDFWSGKDLSGNKTRSCKAPKVVRKADRSRTSILIICILIT

SEQ ID NO: 36631 - protein, 172 aa, Homo sapiens
GPIEQKEARWESSWEEQPDWTLGCLSPESHTNHVALRDTGNQLIVTMSCLTKEDTGWYWCGIQRDFARDDMDFTELIVTDDKGTLANDFWSGKDLSGNKTRSCKAPKVVRKADRSRTSILIICILITGLGIISVISHLTKRRRSQRNRRVGNTLKPFSRVLTPKEMAPTEQM

SEQ ID NO: 36632 - protein, 363 aa, Homo sapiens
MAQTPAFDKPKVELHVHLDGSIKPETILYYGRRRGIALPANTAEGLLNVIGMDKPLTLPDFLAKFDYYMPAIAGCREAIKRIAYEFVEMKAKEGVVYVEVRYSPHLLANSKVEPIPWNQAEGDLTPDEVVALVGQGLQEGERDFGVKARSILCCMRHQPNWSPKVVELCKKYQQQTVVAIDLAGDETIPGSSLLPGHVQAYQEAVKSGIHRTVHAGEVGSAEVVKEAVDILKTERLGHGYHTLEDQALYNRLRQENMHFEICPWSSYLTGAWKPDTEHAVIRLKNDQANYSLNTDDPLIFKSTLDTDYQMTKRDMGFTEEEFKRLNINAAKSSFLPEDEKRELLDLLYKAYGMPPSASAGQNL

SEQ ID NO: 36633 - protein, 576 aa, Homo sapiens
MASNNHWFQSSQVPSFAQMLKKNLPVQPATKTITTPTGWSSESYGLSKMASKVTQVTGNFPEPLLSKNLSSISNPVLPPKKIPKEFIMKYKRGEINPVSALHQFAQMQRVQLDLKETVTTGNVMGPYFAFCAVVDGIQYKTGLGQNKKESRSNAAKLALDELLQLDEPEPRILETSGPPPFPAEPVVLSELAYVSKVHYEGRHIQYAKISQIVKERFNQLISNRSEYLKYSSSLAAFIIERAGQHEVVAIGTGEYNYSQDIKPDGRVLHDTHAVVTARRSLLRYFYRQLLLFYSKNPAMMEKSIFCTEPTSNLLTLKQNINICLYMNQLPKGSAQIKSQLRLNPHSISAFEANEELCLHVAVEGKIYLTVYCPKDGVNRISSMSSSDKLTRWEVLGVQGALLSHFIQPVYISSILIGDGNCSDTRGLEIAIKQRVDDALTSKLPMFYLVNRPHISLVPSAYPLQMNLEYKFLSLNWAQGDVSLEIVDGLSGKITESSPFKSGMSMASRLCKAAMLSRFNLLAKEAKKELLEAGTYHAAKCMSASYQEAKCKLKSYLQQHGYGSWIVKSPCIEQFNM

SEQ ID NO: 36634 - protein, 565 aa, Homo sapiens
MASNNHWFQSSQVPSFAQMLKKNLPVQPATKTITTPTGWSSESYGLSKMASKVTQVTGNFPEPLLSKNLSSISNPVLPPKKIPKEFIMKYKRGEINPVSALHQFAQMQRVQLDLKETVTTGNVMGPYFAFCAVVDGIQYKTGLGQNKKESRSNAAKLALDELLQLDEPEPRILETSGPPPFPAEPVVLSELAYVSKVHYEGRHIQYAKISQIVKERFNQLISNRSEYLKYSSSLAAFIIERAGQHEVVAIGTGEYNYSQDIKPDGRVLHDTHAVVTARRSLLSKNPAMMEKSIFCTEPTSNLLTLKQNINICLYMNQLPKGSAQIKSQLRLNPHSISAFEANEELCLHVAVEGKIYLTVYCPKDGVNRISSMSSSDKLTRWEVLGVQGALLSHFIQPVYISSILIGDGNCSDTRGLEIAIKQRVDDALTSKLPMFYLVNRPHISLVPSAYPLQMNLEYKFLSLNWAQGDVSLEIVDGLSGKITESSPFKSGMSMASRLCKAAMLSRFNLLAKEAKKELLEAGTYHAAKCMSASYQEAKCKLKSYLQQHGYGSWIVKSPCIEQFNM

SEQ ID NO: 36635 - protein, 241 aa, Homo sapiens
MASNNHWFQSSQVPSFAQMLKKNLPVQPATKTITTPTGWSSESYGLSKMASKVTQVTGNFPEPLLSKNLSSISNPVLPPKKIPKEFIMKYKRGEINPVSALHQFAQMQRVQLDLKETVTTGNVMGPYFAFCAVVDGIQYKTGLGQNKKESRSNAAKLALDELLQLDEPEPRILETSGPPPFPAEPVVLSELAYVSKVHYEGRHIQYAKISQIVKERFNQLISNRSEYLKYSSSLAAFIIER

SEQ ID NO: 36636 - protein, 156 aa, Homo sapiens
MASNNHWFQSSQVPSFAQMLKKNLPVQPATKTITTPTGWSSESYGLSKMASKVTQVTGNFPEPLLSKNLSSISNPVLPPKKIPKEFIMKYKRGEINPVSALHQFAQMQRVQLDLKETVTTGNVMGPYFAFCAVVDGIQYKTGLGQNKKESRSNAAK

SEQ ID NO: 36637 - protein, 558 aa, Homo sapiens
MLKKNLPVQPATKTITTPTGWSSESYGLSKMASKVTQVTGNFPEPLLSKNLSSISNPVLPPKKIPKEFIMKYKRGEINPVSALHQFAQMQRVQLDLKETVTTGNVMGPYFAFCAVVDGIQYKTGLGQNKKESRSNAAKLALDELLQLDEPEPRILETSGPPPFPAEPVVLSELAYVSKVHYEGRHIQYAKISQIVKERFNQLISNRSEYLKYSSSLAAFIIERAGQHEVVAIGTGEYNYSQDIKPDGRVLHDTHAVVTARRSLLRYFYRQLLLFYSKNPAMMEKSIFCTEPTSNLLTLKQNINICLYMNQLPKGSAQIKSQLRLNPHSISAFEANEELCLHVAVEGKIYLTVYCPKDGVNRISSMSSSDKLTRWEVLGVQGALLSHFIQPVYISSILIGDGNCSDTRGLEIAIKQRVDDALTSKLPMFYLVNRPHISLVPSAYPLQMNLEYKFLSLNWAQGDVSLEIVDGLSGKITESSPFKSGMSMASRLCKAAMLSRFNLLAKEAKKELLEAGTYHAAKCMSASYQEAKCKLKSYLQQHGYGSWIVKSPCIEQFNM

SEQ ID NO: 36638 - protein, 1269 aa, Homo sapiens
MMSPICDQTIDSRLKVEKATWWGRVGGGSRPHWQSPGVRPCPEEVQDPGYSLSGYYTHPFQGYEHRQLRYQQPGPGSSPSSFLLKQIEFLKGQLPEAPVIGKQTPSLPPSLPGLRPRFPVLLASSTRGRQVDIRGVPRGVHLRSQGLQRGFQHPSPRGRSLPQRGVDCLSSHFQELSIYQDQEQRILKFLEELGEGKATTAHDLSGKLGTPKKEINRVLYSLAKKGKLQKEAGTPPLWKIAVSTQAWNQHSGVVRPDGHSQGAPNSDPSLEPEDRNSTSVSEDLLEPFIAVSAQAWNQHSGVVRPDSHSQGSPNSDPGLEPEDSNSTSALEDPLEFLDMAEIKEKICDYLFNVSDSSALNLAKNIGLTKARDINAVLIDMERQGDVYRQGTTPPIWHLTDKKRERMQIKRNTNSVPETAPAAIPETKRNAEFLTCNIPTSNASNNMVTTEKVENGQEPVIKLENRQEARPEPARLKPPVHYNGPSKAGYVDFENGQWATDDIPDDLNSIRAAPGEFRAIMEMPSFYSHGLPRCSPYKKLTECQLKNPISGLLEYAQFASQTCEFNMIEQSGPPHEPRFKFQVVINGREFPPAEAGSKKVAKQDAAMKAMTILLEEAKAKDSGKSEESSHYSTEKESEKTAESQTPTPSATSFFSGKSPVTTLLECMHKLGNSCEFRLLSKEGPAHEPKFQYCVAVGAQTFPSVSAPSKKVAKQMAAEEAMKALHGEATNSMASDNQPEGMISESLDNLESMMPNKVRKIGELVRYLNTNPVGGLLEYARSHGFAAEFKLVDQSGPPHEPKFVYQAKVGGRWFPAVCAHSKKQGKQEAADAALRVLIGENEKAERMGFTEVTPVTGASLRRTMLLLSRSPEAQPKTLPLTGSTFHDQIAMLSHRCFNTLTNSFQPSLLGRKILAAIIMKKDSEDMGVVVSLGTGNRCVKGDSLSLKGETVNDCHAEIISRRGFIRFLYSELMKYNSQTAKDSIFEPAKGGEKLQIKKTVSFHLYISTAPCGDGALFDKSCSDRAMESTESRHYPVFENPKQGKLRTKVENGEGTIPVESSDIVPTWDGIRLGERLRTMSCSDKILRWNVLGLQGALLTHFLQPIYLKSVTLGYLFSQGHLTRAICCRVTRDGSAFEDGLRHPFIVNHPKVGRVSIYDSKRQSGKTKETSVNWCLADGYDLEILDGTRGTVDGPRNELSRVSKKNIFLLFKKLCSFRYRRDLLRLSYGEAKKAARDYETAKNYFKKGLKDMGYGNWISKPQEEKNFYLCPV

SEQ ID NO: 36639 - protein, 52 aa, Homo sapiens
MANEHTLIHPASIEDPLEARPMSDEDPEDEDALPARWKKEMGRKRKRTIATL

SEQ ID NO: 36640 - protein, 701 aa, Homo sapiens
MDIEDEENMSSSSTDVKENRNLDNVSPKDGSTPGPGEGSQLSNGGGGGPGRKRPLEEGSNGHSKYRLKKRRKTPGPVLPKNALMQLNEIKPGLQYTLLSQTGPVHAPLFVMSVEVNGQVFEGSGPTKKKAKLHAAEKALRSFVQFPNASEAHLAMGRTLSVNTDFTSDQADFPDTLFNGFETPDKAEPPFYVGSNGDDSFSSSGDLSLSASPVPASLAQPPLPVLPPFPPPSGKNPVMILNELRPGLKYDFLSESGESHAKSFVMSVVVDGQFFEGSGRNKKLAKARAAQSALAAIFNLHLDQTPSRQPIPSEGLQLHLPQVLADAVSRLVLGKFGDLTDNFSSPHARRKVLAGVVMTTGTDVKDAKVISVSTGTKCINGEYMSDRGLALNDCHAEIISRRSLLRFLYTQLELYLNNKDDQKRSIFQKSERGGFRLKENVQFHLYISTSPCGDARIFSPHEPILEEPADRHPNRKARGQLRTKIESGEGTIPVRSNASIQTWDGVLQGERLLTMSCSDKIARWNVVGIQGSLLSIFVEPIYFSSIILGSLYHGDHLSRAMYQRISNIEDLPPLYTLNKPLLSGISNAEARQPGKAPNFSVNWTVGDSAIEVINATTGKDELGRASRLCKHALYCRWMRVHGKVPSHLLRSKITKPNVYHESKLAAKEYQAAKARLFTAFIKAGLGAWVEKPTEQDQFSLTP

SEQ ID NO: 36641 - protein, 741 aa, Homo sapiens
MDIEDEENMSSSSTDVKENRNLDNVSPKDGSTPGPGEGSQLSNGGGGGPGRKRPLEEGSNGHSKYRLKKRRKTPGPVLPKNALMQLNEIKPGLQYTLLSQTGPVHAPLFVMSVEVNGQVFEGSGPTKKKAKLHAAEKALRSFVQFPNASEAHLAMGRTLSVNTDFTSDQADFPDTLFNGFETPDKAEPPFYVGSNGDDSFSSSGDLSLSASPVPASLAQPPLPVLPPFPPPSGKNPVMILNELRPGLKYDFLSESGESHAKSFVMSVVVDGQFFEGSGRNKKLAKARAAQSALAAIFNLHLDQTPSRQPIPSEGLQLHLPQVLADAVSRLVLGKFGDLTDNFSSPHARRKVLAGVVMTTGTDVKDAKVISVSTGTKCINGEYMSDRGLALNDCHAEIISRRSLLRFLYTQLELYLNNKDDQKRSIFQKSERGGFRLKENVQFHLYISTSPCGDARIFSPHEPILEGSRSYTQAGVQWCNHGSLQPRPPGLLSDPSTSTFQGAGTTEPADRHPNRKARGQLRTKIESGEGTIPVRSNASIQTWDGVLQGERLLTMSCSDKIARWNVVGIQGSLLSIFVEPIYFSSIILGSLYHGDHLSRAMYQRISNIEDLPPLYTLNKPLLSGISNAEARQPGKAPNFSVNWTVGDSAIEVINATTGKDELGRASRLCKHALYCRWMRVHGKVPSHLLRSKITKPNVYHESKLAAKEYQAAKARLFTAFIKAGLGAWVEKPTEQDQFSLTP

SEQ ID NO: 36642 - protein, 714 aa, Homo sapiens
MDIEDEENMSSSSTDVKENRNLDNVSPKDGSTPGPGEGSQLSNGGGGGPGRKRPLEEGSNGHSKYRLKKRRKTPGPVLPKNALMQLNEIKPGLQYTLLSQTGPVHAPLFVMSVEVNGQVFEGSGPTKKKAKLHAAEKALRSFVQFPNASEAHLAMGRTLSVNTDFTSDQADFPDTLFNGFETPDKAEPPFYVGSNGDDSFSSSGDLSLSASPVPASLAQPPLPVLPPFPPPSGKNPVMILNELRPGLKYDFLSESGESHAKSFVMSVVVDGQFFEGSGRNKKLAKARAAQSALAAIFNLHLDQTPSRQPIPSEGLQLHLPQVLADAVSRLVLGKFGDLTDNFSSPHARRKVLAGVVMTTGTDVKDAKVISVSTGTKCINGEYMSDRGLALNDCHAEIISRRSLLRFLYTQLELYLNNKDDQKRSIFQKSERGGFRLKENVQFHLYISTSPCGDARIFSPHEPILEGSRSYTQAGVQWCNHGSLQPRPPGLLSDPSTSTFQGAGTTEPADRHPNRKARGQLRTKIESGEGTIPVRSNASIQTWDGVLQGERLLTMSCSDKIARWNVVGIQGSLLSIFVEPIYFSSIILGSLYHGDHLSRAMYQRISNIEDLPPLYTLNKPLLSGISNAEARQPGKAPNFSVNWTVGDSAIEVINATTGKDELGRASRLCKHALYCRWMRVHGKVPSHLLRSKITKPNVYHESKLAAKEYQAAKVH

SEQ ID NO: 36643 - protein, 12 aa, Homo sapiens
MDIEDEENMSFS

SEQ ID NO: 36644 - protein, 141 aa, Homo sapiens
MDIEDEENMSSSSTDVKENRNLDNVSPKDGSTPGPGEGSQLSNGGGGGPGRKRPLEEGSNGHSKYRLKKRRKTPGPVLPKNALMQLNEIKPGLQYTLLSQTGPVHAPLFVMSVEVNGQVFEGSGPTKKKAKLHAAEKALRS

SEQ ID NO: 36645 - protein, 741 aa, Homo sapiens; identical to SEQ ID NO: 36641

SEQ ID NO: 36646 - protein, 741 aa, Homo sapiens; identical to SEQ ID NO: 36641

SEQ ID NO: 36647 - protein, 698 aa, Homo sapiens
MDIEDEENMSSSSTDVKENRNLDNVSPKDGSTPGPGEGSQLSNGGGGGPGRKRPLEEGSNGHSKYRLKKRRKTPGPVLPKNALMQLNEIKPGLQYTLLSQTGPVHAPLFVMSVEVNGQVFEGSGPTKKKAKLHAAEKALRSFVQFPNASEAHLAMGRTLSVNTDFTSDQADFPDTLFNGFETPDKAEPPFYVGSNGDDSFSSSGDLSLSASPVPASLAQPPLPVLPPFPPPSGKNPVMILNELRPGLKYDFLSESGESHAKSFVMSVVVDGQFFEGSGRNKKLAKARAAQSALAAIFNLHLDQTPSRQPIPSEGLQLHLPQVLADAVSRLVLGKFGDLTDNFSSPHARRKVLAGVVMTTGTDVKDAKVISVSTGTKCINGEYMSDRGLALNDCHAEIISRRSLLRFLYTQLELYLNNKDDQKRSIFQKSERGGFRLKENVQFHLYISTSPCGDARIFSPHEPILEGSRSYTQAGVQWCNHGSLQPRPPGLLSDPSTSTFQGAGTTEPADRHPNRKARGQLRTKIESGEGTIPVRSNASIQTWDGVLQGERLLTMSCSDKIARWNVVGIQGSLLSIFVEPIYFSSIILGSLYHGDHLSRAMYQRISNIEDLPPLYTLNKPLLSGISNAEARQPGKAPNFSVNWTVGDSAIEVINATTGKDELGRASRLCKHALYCRWACARQGSLPLTTLQDYQAQRVP

SEQ ID NO: 36648 - protein, 141 aa, Homo sapiens
MSHRMEGVGQLPASYRHNRPLLSGVSDAEARQPGKSPPFSMNWVVGSADLEIINATTGRRSCGGPSRLCKHVLSARWARLYGRLSTRTPSPGDTPSMYCEAKLGAHTYQSVKQQLFKAFQKAGLGTWVRKPPEQQQFLLTL

SEQ ID NO: 36649 - protein, 248 aa, Homo sapiens
MGLWSPVPGNSVPRAPVMAGLGLGHSQGAPQGPHDGKTDRSSGPGRRRTERTRLPGLLGGAPLTAGSPHRWNVLGLQGALLSHFVEPVYLQSIVVGSLHHTGHLARVMSHRMEGVGQLPASYRHNRPLLSGVSDAEARQPGKSPPFSMNWVVGSADLEIINATTGRRSCGGPSRLCKHVLSARWARLYGRLSTRTPSPGDTPSMYCEAKLGAHTYQSVKQQLFKAFQKAGLGTWVRKPPEQQQFLLTL

SEQ ID NO: 36650 - protein, 739 aa, Homo sapiens
MASVLGSGRGSGGLSSQLKCKSKRRRRRRSKRKDKVSILSTFLAPFKHLSPGITNTEDDDTLSTSSAEVKENRNVGNLAARPPPSGDRARGGAPGAKRKRPLEEGNGGHLCKLQLVWKKLSWSVAPKNALVQLHELRPGLQYRTVSQTGPVHAPVFAVAVEVNGLTFEGTGPTKKKAKMRAAELALRSFVQFPNACQAHLAMGGGPGPGTDFTSDQADFPDTLFQEFEPPAPRPGLAGGRPGDAALLSAAYGRRRLLCRALDLVGPTPATPAAPGERNPVVLLNRLRAGLRYVCLAEPAERRARSFVMAVSVDGRTFEGSGRSKKLARGQAAQAALQELFDIQMPGHAPGRARRTPMPQEFADSISQLVTQKFREVTTDLTPMHARHKALAGIVMTKGLDARQAQVVALSSGTKCISGEHLSDQGLVVNDCHAEVVARRAFLHFLYTQLELHLSKRREDSERSIFVRLKEGGYRLRENILFHLYVSTSPCGDARLHSPYEITTDLHSSKHLVRKFRGHLRTKIESGEGTVPVRGPSAVQTWDGVLLGEQLITMSCTDKIARWNVLGLQGALLSHFVEPVYLQSIVVGSLHHTGHLARVMSHRMEGVGQLPASYRHNRPLLSGVSDAEARQPGKSPPFSMNWVVGSADLEIINATTGRRSCGGPSRLCKHVLSARWARLYGRLSTRTPSPGDTPSMYCEAKLGAHTYQSVKQQLFKAFQKAGLGTWVRKPPEQQQFLLTL

SEQ ID NO: 36651 - protein, 502 aa, Homo sapiens
MWTADEIAQLCYEHYGIRLPKKGKPEPNHEWTLLAAVVKIQSPADKACDTPDKPVQVTKEVVSMGTGTKCIGQSKMRKNGDILNDSHAEVIARRSFQRYLLHQLQLAATLKEDSIFVPGTQKGVWKLRRDLIFVFFSSHTPCGDASIIPMLEFEDQPCCPVFRNWAHNSSVEASSNLEAPGNERKCEDPDSPVTKKMRLEPGTAAREVTNGAAHHQSFGKQKSGPISPGIHSCDLTVEGLATVTRIAPGSAKVIDVYRTGAKCVPGEAGDSGKPGAAFHQVGLLRVKPGRGDRTRSMSCSDKMARWNVLGCQGALLMHLLEEPIYLSAVVIGKCPYSQEAMQRALIGRCQNVSALPKGFGVQELKILQSDLLFEQSRSAVQAKRADSPGRLVPCGAAISWSAVPEQPLDVTANGFPQGTTKKTIGSLQARSQISKVELFRSFQKLLSRIARDKWPHSLRVQKLDTYQEYKEAASSYQEAWSTLRKQVFGSWIRNPPDYHQFK

SEQ ID NO: 36652 - protein, 473 aa, Homo sapiens
MWTLLAAVVKIQSPADKACDTPDKPVQVTKEVVSMGTGTKCIGQSKMRKNGDILNDSHAEVIARRSFQRYLLHQLQLAATLKEDSIFVPGTQKGVWKLRRDLIFVFFSSHTPCGDASIIPMLEFEDQPCCPVFRNWAHNSSVEASSNLEAPGNERKCEDPDSPVTKKMRLEPGTAAREVTNGAAHHQSFGKQKSGPISPGIHSCDLTVEGLATVTRIAPGSAKVIDVYRTGAKCVPGEAGDSGKPGAAFHQVGLLRVKPGRGDRTRSMSCSDKMARWNVLGCQGALLMHLLEEPIYLSAVVIGKCPYSQEAMQRALIGRCQNVSALPKGFGVQELKILQSDLLFEQSRSAVQAKRADSPGRLVPCGAAISWSAVPEQPLDVTANGFPQGTTKKTIGSLQARSQISKVELFRSFQKLLSRIARDKWPHSLRVQKLDTYQEYKEAASSYQEAWSTLRKQVFGSWIRNPPDYHQFK

SEQ ID NO: 36653 - protein, 362 aa, Homo sapiens
MAAAEEEPKPKKLKVEAPQALRENILFGMGNPLLDISAVVDKDFLDKYSLKPNDQILAEDKHKELFDELVKKFKVEYHAGGSTQNSIKVAQWMIQQPHKAATFFGCIGIDKFGEILKRKAAEAHVDAHYYEQNEQPTGTCAACITGDNRSLIANLAAANCYKKEKHLDLEKNWMLVEKARVCYIAGFFLTVSPESVLKVAHHASENNRIFTLNLSAPFISQFYKESLMKVMPYVDILFGNETEAATFAREQGFETKDIKEIAKKTQALPKMNSKRQRIVIFTQGRDDTIMATESEVTAFAVLDQDQKEIIDTNGAGDAFVGGFLSQLVSDKPLTECIRAGHYAASIIIRRTGCTFPEKPDFH

SEQ ID NO: 36654 - protein, 345 aa, Homo sapiens
MTSVRENILFGMGNPLLDISAVVDKDFLDKYSLKPNDQILAEDKHKELFDELVKKFKVEYHAGGSTQNSIKVAQWMIQQPHKAATFFGCIGIDKFGEILKRKAAEAHVDAHYYEQNEQPTGTCAACITGDNRSLIANLAAANCYKKEKHLDLEKNWMLVEKARVCYIAGFFLTVSPESVLKVAHHASENNRIFTLNLSAPFISQFYKESLMKVMPYVDILFGNETEAATFAREQGFETKDIKEIAKKTQALPKMNSKRQRIVIFTQGRDDTIMATESEVTAFAVLDQDQKEIIDTNGAGDAFVGGFLSQLVSDKPLTECIRAGHYAASIIIRRTGCTFPEKPDFH

SEQ ID NO: 36655 - protein, 305 aa, Homo sapiens
MAAAEEEPKPKKLKVEAPQALRENILFGMGNPLLDISAVVDKDFLDKYSLKPNDQILAEDKHKELFDELVKKFKVEYHAGGSTQNSIKVAQWMIQQPHKAATFFGCIGIDKFGEILKRKAAEAHVDAHYYEQNEQPTGTCAACITGDNRSLIANLAAANCYKKEKHLDLEKNWMLVEKARVCYIAEAATFAREQGFETKDIKEIAKKTQALPKMNSKRQRIVIFTQGRDDTIMATESEVTAFAVLDQDQKEIIDTNGAGDAFVGGFLSQLVSDKPLTECIRAGHYAASIIIRRTGCTFPEKPDFH

SEQ ID NO: 36656 - protein, 327 aa, Homo sapiens
MTSVRENILFGMGNPLLDISAVVDKDFLDKFDELVKKFKVEYHAGGSTQNSIKVAQWMIQQPHKAATFFGCIGIDKFGEILKRKAAEAHVDAHYYEQNEQPTGTCAACITGDNRSLIANLAAANCYKKEKHLDLEKNWMLVEKARVCYIAGFFLTVSPESVLKVAHHASENNRIFTLNLSAPFISQFYKESLMKVMPYVDILFGNETEAATFAREQGFETKDIKEIAKKTQALPKMNSKRQRIVIFTQGRDDTIMATESEVTAFAVLDQDQKEIIDTNGAGDAFVGGFLSQLVSDKPLTECIRAGHYAASIIIRRTGCTFPEKPDFH

SEQ ID NO: 36657 - protein, 747 aa, Homo sapiens
MPLFKLPAEEKQIDDAMRNFAEKVFASEVKDEGGRQEISPFDVDEICPISHHEMQAHIFHLETLSTSTEARRKKRFQGRKTVNLSIPLSETSSTKLSHIDEYISSSPTYQTVPDFQRVQITGDYASGVTVEDFEIVCKGLYRALCIREKYMQKSFQRFPKTPSKYLRNIDGEAWVANESFYPVFTPPVKKGEDPFRTDNLPENLGYHLKMKDGVVYVYPNEAAVSKDEPKPLPYPNLDTFLDDMNFLLALIAQGPVKTYTHRRLKFLSSKFQVHQMLNEMDELKELKNNPHRDFYNCRKVDTHIHAAACMNQKHLLRFIKKSYQIDADRVVYSTKEKNLTLKELFAKLKMHPYDLTVDSLDVHAGRQTFQRFDKFNDKYNPVGASELRDLYLKTDNYINGEYFATIIKEVGADLVEAKYQHAEPRLSIYGRSPDEWSKLSSWFVCNRIHCPNMTWMIQVPRIYDVFRSKNFLPHFGKMLENIFMPVFEATINPQADPELSVFLKHITGFDSVDDESKHSGHMFSSKSPKPQEWTLEKNPSYTYYAYYMYANIMVLNSLRKERGMNTFLFRPHCGEAGALTHLMTAFMIADDISHGLNLKKSPVLQYLFFLAQIPIAMSPLSNNSLFLEYAKNPFLDFLQKGLMISLSTDDPMQFHFTKEPLMEEYAIAAQVFKLSTCDMCEVARNSVLQCGISHEEKVKFLGDNYLEEGPAGNDIRRTNVAQIRMAYRYETWCYELNLIAEGLKSTE

SEQ ID NO: 36658 - protein, 780 aa, Homo sapiens
MNVRIFYSVSQSPHSLLSLLFYCAILESRISATMPLFKLPAEEKQIDDAMRNFAEKVFASEVKDEGGRQEISPFDVDEICPISHHEMQAHIFHLETLSTSTEARRKKRFQGRKTVNLSIPLSETSSTKLSHIDEYISSSPTYQTVPDFQRVQITGDYASGVTVEDFEIVCKGLYRALCIREKYMQKSFQRFPKTPSKYLRNIDGEAWVANESFYPVFTPPVKKGEDPFRTDNLPENLGYHLKMKDGVVYVYPNEAAVSKDEPKPLPYPNLDTFLDDMNFLLALIAQGPVKTYTHRRLKFLSSKFQVHQMLNEMDELKELKNNPHRDFYNCRKVDTHIHAAACMNQKHLLRFIKKSYQIDADRVVYSTKEKNLTLKELFAKLKMHPYDLTVDSLDVHAGRQTFQRFDKFNDKYNPVGASELRDLYLKTDNYINGEYFATIIKEVGADLVEAKYQHAEPRLSIYGRSPDEWSKLSSWFVCNRIHCPNMTWMIQVPRIYDVFRSKNFLPHFGKMLENIFMPVFEATINPQADPELSVFLKHITGFDSVDDESKHSGHMFSSKSPKPQEWTLEKNPSYTYYAYYMYANIMVLNSLRKERGMNTFLFRPHCGEAGALTHLMTAFMIADDISHGLNLKKSPVLQYLFFLAQIPIAMSPLSNNSLFLEYAKNPFLDFLQKGLMISLSTDDPMQFHFTKEPLMEEYAIAAQVFKLSTCDMCEVARNSVLQCGISHEEKVKFLGDNYLEEGPAGNDIRRTNVAQIRMAYRYETWCYELNLIAEGLKSTE

SEQ ID NO: 36659 - protein, 776 aa, Homo sapiens
MNVRIFYSVSQSPHSLLSLLFYCAILESRISATMPLFKLPEIDDAMRNFAEKVFASEVKDEGGRQEISPFDVDEICPISHHEMQAHIFHLETLSTSTEARRKKRFQGRKTVNLSIPLSETSSTKLSHIDEYISSSPTYQTVPDFQRVQITGDYASGVTVEDFEIVCKGLYRALCIREKYMQKSFQRFPKTPSKYLRNIDGEAWVANESFYPVFTPPVKKGEDPFRTDNLPENLGYHLKMKDGVVYVYPNEAAVSKDEPKPLPYPNLDTFLDDMNFLLALIAQGPVKTYTHRRLKFLSSKFQVHQMLNEMDELKELKNNPHRDFYNCRKVDTHIHAAACMNQKHLLRFIKKSYQIDADRVVYSTKEKNLTLKELFAKLKMHPYDLTVDSLDVHAGRQTFQRFDKFNDKYNPVGASELRDLYLKTDNYINGEYFATIIKEVGADLVEAKYQHAEPRLSIYGRSPDEWSKLSSWFVCNRIHCPNMTWMIQVPRIYDVFRSKNFLPHFGKMLENIFMPVFEATINPQADPELSVFLKHITGFDSVDDESKHSGHMFSSKSPKPQEWTLEKNPSYTYYAYYMYANIMVLNSLRKERGMNTFLFRPHCGEAGALTHLMTAFMIADDISHGLNLKKSPVLQYLFFLAQIPIAMSPLSNNSLFLEYAKNPFLDFLQKGLMISLSTDDPMQFHFTKEPLMEEYAIAAQVFKLSTCDMCEVARNSVLQCGISHEEKVKFLGDNYLEEGPAGNDIRRTNVAQIRMAYRYETWCYELNLIAEGLKSTE

SEQ ID NO: 36660 - protein, 879 aa, Homo sapiens
MRNRGQGLFRLRSRCFLHQSLPLGAGRRKGLDVAEPGPSRCRSDSPAVAAVVPAMASYPSGSGKPKAKYPFKKRASLQASTAAPEARGGLGAPPLQSARSLPGPAPCLKHFPLDLRTSMDGKCKEIAEELFTRSLAESELRSAPYEFPEESPIEQLEERRQRLERQISQDVKLEPDILLRAKQDFLKTDSDSDLQLYKEQGEGQGDRSLRERDVLEREFQRVTISGEEKCGVPFTDLLDAAKSVVRALFIREKYMALSLQSFCPTTRRYLQQLAEKPLETRTYEQGPDTPVSADAPVHPPALEQHPYEHCEPSTMPGDLGLGLRMVRGVVHVYTRREPDEHCSEVELPYPDLQEFVADVNVLMALIINGPIKSFCYRRLQYLSSKFQMHVLLNEMKELAAQKKVPHRDFYNIRKVDTHIHASSCMNQKHLLRFIKRAMKRHLEEIVHVEQGREQTLREVFESMNLTAYDLSVDTLDVHADRNTFHRFDKFNAKYNPIGESVLREIFIKTDNRVSGKYFAHIIKEVMSDLEESKYQNAELRLSIYGRSRDEWDKLARWAVMHRVHSPNVRWLVQVPRLFDVYRTKGQLANFQEMLENIFLPLFEATVHPASHPELHLFLEHVDGFDSVDDESKPENHVFNLESPLPEAWVEEDNPPYAYYLYYTFANMAMLNHLRRQRGFHTFVLRPHCGEAGPIHHLVSAFMLAENISHGLLLRKAPVLQYLYYLAQIGIAMSPLSNNSLFLSYHRNPLPEYLSRGLMVSLSTDDPLQFHFTKEPLMEEYSIATQVWKLSSCDMCELARNSVLMSGFSHKVKSHWLGPNYTKEGPEGNDIRRTNVPDIRVGYRYETLCQELALITQAVQSEMLETIPEEAGITMSPGPQ

SEQ ID NO: 36661 - protein, 798 aa, Homo sapiens
MASEARGGLGAPPLQSARSLPGPAPCLKHFPLDLRTSMDGKCKEIAEELFTRSLAESELRSAPYEFPEESPIEQLEERRQRLERQISQDVKLEPDILLRAKQDFLKTDSDSDLQLYKEQGEGQGDRSLRERDVLEREFQRVTISGEEKCGVPFTDLLDAAKSVVRALFIREKYMALSLQSFCPTTRRYLQQLAEKPLETRTYEQGPDTPVSADAPVHPPALEQHPYEHCEPSTMPGDLGLGLRMVRGVVHVYTRREPDEHCSEVELPYPDLQEFVADVNVLMALIINGPIKSFCYRRLQYLSSKFQMHVLLNEMKELAAQKKVPHRDFYNIRKVDTHIHASSCMNQKHLLRFIKRAMKRHLEEIVHVEQGREQTLREVFESMNLTAYDLSVDTLDVHADRNTFHRFDKFNAKYNPIGESVLREIFIKTDNRVSGKYFAHIIKEVMSDLEESKYQNAELRLSIYGRSRDEWDKLARWAVMHRVHSPNVRWLVQVPRLFDVYRTKGQLANFQEMLENIFLPLFEATVHPASHPELHLFLEHVDGFDSVDDESKPENHVFNLESPLPEAWVEEDNPPYAYYLYYTFANMAMLNHLRRQRGFHTFVLRPHCGEAGPIHHLVSAFMLAENISHGLLLRKAPVLQYLYYLAQIGIAMSPLSNNSLFLSYHRNPLPEYLSRGLMVSLSTDDPLQFHFTKEPLMEEYSIATQVWKLSSCDMCELARNSVLMSGFSHKVKSHWLGPNYTKEGPEGNDIRRTNVPDIRVGYRYETLCQELALITQAVQSEMLETIPEEAGITMSPGPQ

SEQ ID NO: 36662 - protein, 804 aa, Homo sapiens
MWQSQAPAGAAQTPPLSPPWSQPWHPIHLALASPRPNIPLRSGPACRPPLQLQELFTRSLAESELRSAPYEFPEESPIEQLEERRQRLERQISQDVKLEPDILLRAKQDFLKTDSDSDLQLYKEQGEGQGDRSLRERDVLEREFQRVTISGEEKCGVPFTDLLDAAKSVVRALFIREKYMALSLQSFCPTTRRYLQQLAEKPLETRTYEQGPDTPVSADAPVHPPALEQHPYEHCEPSTMPGDLGLGLRMVRGVVHVYTRREPDEHCSEVELPYPDLQEFVADVNVLMALIINGPIKSFCYRRLQYLSSKFQMHVLLNEMKELAAQKKVPHRDFYNIRKVDTHIHASSCMNQKHLLRFIKRAMKRHLEEIVHVEQGREQTLREVFESMNLTAYDLSVDTLDVHADRNTFHRFDKFNAKYNPIGESVLREIFIKTDNRVSGKYFAHIIKEVMSDLEESKYQNAELRLSIYGRSRDEWDKLARWAVMHRVHSPNVRWLVQVPRLFDVYRTKGQLANFQEMLENIFLPLFEATVHPASHPELHLFLEHVDGFDSVDDESKPENHVFNLESPLPEAWVEEDNPPYAYYLYYTFANMAMLNHLRRQRGFHTFVLRPHCGEAGPIHHLVSAFMLAENISHGLLLRKAPVLQYLYYLAQIGIAMSPLSNNSLFLSYHRNPLPEYLSRGLMVSLSTDDPLQFHFTKEPLMEEYSIATQVWKLSSCDMCELARNSVLMSGFSHKVKSHWLGPNYTKEGPEGNDIRRTNVPDIRVGYRYETLCQELALITQAVQSEMLETIPEEAGITMSPGPQ

SEQ ID NO: 36663 - protein, 760 aa, Homo sapiens
MLTFLPSPQELFTRSLAESELRSAPYEFPEESPIEQLEERRQRLERQISQDVKLEPDILLRAKQDFLKTDSDSDLQLYKEQGEGQGDRSLRERDVLEREFQRVTISGEEKCGVPFTDLLDAAKSVVRALFIREKYMALSLQSFCPTTRRYLQQLAEKPLETRTYEQGPDTPVSADAPVHPPALEQHPYEHCEPSTMPGDLGLGLRMVRGVVHVYTRREPDEHCSEVELPYPDLQEFVADVNVLMALIINGPIKSFCYRRLQYLSSKFQMHVLLNEMKELAAQKKVPHRDFYNIRKVDTHIHASSCMNQKHLLRFIKRAMKRHLEEIVHVEQGREQTLREVFESMNLTAYDLSVDTLDVHADRNTFHRFDKFNAKYNPIGESVLREIFIKTDNRVSGKYFAHIIKEVMSDLEESKYQNAELRLSIYGRSRDEWDKLARWAVMHRVHSPNVRWLVQVPRLFDVYRTKGQLANFQEMLENIFLPLFEATVHPASHPELHLFLEHVDGFDSVDDESKPENHVFNLESPLPEAWVEEDNPPYAYYLYYTFANMAMLNHLRRQRGFHTFVLRPHCGEAGPIHHLVSAFMLAENISHGLLLRKAPVLQYLYYLAQIGIAMSPLSNNSLFLSYHRNPLPEYLSRGLMVSLSTDDPLQFHFTKEPLMEEYSIATQVWKLSSCDMCELARNSVLMSGFSHKVKSHWLGPNYTKEGPEGNDIRRTNVPDIRVGYRYETLCQELALITQAVQSEMLETIPEEAGITMSPGPQ

SEQ ID NO: 36664 - skipped

SEQ ID NO: 36665 - protein, 879 aa, Homo sapiens; identical to SEQ ID NO: 36660

SEQ ID NO: 36666 - protein, 103 aa, Homo sapiens
MASEARGGLGAPPLQSARSLPGPAPCLKHFPLDLRTSMDGKCKEIAEELFTRSLAESELRSAPYEFPEESPIEQLEERRQRLERQISQDVKLEPDILLRAKQD

SEQ ID NO: 36667 - protein, 767 aa, Homo sapiens
MPRQFPKLNISEVDEQVRLLAEKVFAKVLREEDSKDALSLFTVPEDCPIGQKEAKERELQKELAEQKSVETAKRKKSFKMIRSQSLSLQMPPQQDWKGPPAASPAMSPTTPVVTGATSLPTPAPYAMPEFQRVTISGDYCAGITLEDYEQAAKSLAKALMIREKYARLAYHRFPRITSQYLGHPRADTAPPEEGLPDFHPPPLPQEDPYCLDDAPPNLDYLVHMQGGILFVYDNKKMLEHQEPHSLPYPDLETYTVDMSHILALITDGPTKTYCHRRLNFLESKFSLHEMLNEMSEFKELKSNPHRDFYNVRKVDTHIHAAACMNQKHLLRFIKHTYQTEPDRTVAEKRGRKITLRQVFDGLHMDPYDLTVDSLDVHAGRQTFHRFDKFNSKYNPVGASELRDLYLKTENYLGGEYFARMVKEVARELEESKYQYSEPRLSIYGRSPEEWPNLAYWFIQHKVYSPNMRWIIQVPRIYDIFRSKKLLPNFGKMLENIFLPLFKATINPQDHRELHLFLKYVTGFDSVDDESKHSDHMFSDKSPNPDVWTSEQNPPYSYYLYYMYANIMVLNNLRRERGLSTFLFRPHCGEAGSITHLVSAFLTADNISHGLLLKKSPVLQYLYYLAQIPIAMSPLSNNSLFLEYSKNPLREFLHKGLHVSLSTDDPMQFHYTKEALMEEYAIAAQVWKLSTCDLCEIARNSVLQSGLSHQEKQKFLGQNYYKEGPEGNDIRKTNVAQIRMAFRYETLCNELSFLSDAMKSEEITALTN

SEQ ID NO: 36668 - protein, 776 aa, Homo sapiens
MALSSEPAEMPRQFPKLNISEVDEQVRLLAEKVFAKVLREEDSKDALSLFTVPEDCPIGQKEAKERELQKELAEQKSVETAKRKKSFKMIRSQSLSLQMPPQQDWKGPPAASPAMSPTTPVVTGATSLPTPAPYAMPEFQRVTISGDYCAGITLEDYEQAAKSLAKALMIREKYARLAYHRFPRITSQYLGHPRADTAPPEEGLPDFHPPPLPQEDPYCLDDAPPNLDYLVHMQGGILFVYDNKKMLEHQEPHSLPYPDLETYTVDMSHILALITDGPTKTYCHRRLNFLESKFSLHEMLNEMSEFKELKSNPHRDFYNVRKVDTHIHAAACMNQKHLLRFIKHTYQTEPDRTVAEKRGRKITLRQVFDGLHMDPYDLTVDSLDVHAGRQTFHRFDKFNSKYNPVGASELRDLYLKTENYLGGEYFARMVKEVARELEESKYQYSEPRLSIYGRSPEEWPNLAYWFIQHKVYSPNMRWIIQVPRIYDIFRSKKLLPNFGKMLENIFLPLFKATINPQDHRELHLFLKYVTGFDSVDDESKHSDHMFSDKSPNPDVWTSEQNPPYSYYLYYMYANIMVLNNLRRERGLSTFLFRPHCGEAGSITHLVSAFLTADNISHGLLLKKSPVLQYLYYLAQIPIAMSPLSNNSLFLEYSKNPLREFLHKGLHVSLSTDDPMQFHYTKEALMEEYAIAAQVWKLSTCDLCEIARNSVLQSGLSHQEKQKFLGQNYYKEGPEGNDIRKTNVAQIRMAFRYETLCNELSFLSDAMKSEEITALTN

SEQ ID NO: 36669 - protein, 608 aa, Homo sapiens
MIREKYARLAYHRFPRITSQYLGHPRADTAPPEEGLPDFHPPPLPQEDPYCLDDAPPNLDYLVHMQGGILFVYDNKKMLEHQEPHSLPYPDLETYTVDMSHILALITDGPTKTYCHRRLNFLESKFSLHEMLNEMSEFKELKSNPHRDFYNVRKVDTHIHAAACMNQKHLLRFIKHTYQTEPDRTVAEKRGRKITLRQVFDGLHMDPYDLTVDSLDVHAGRQTFHRFDKFNSKYNPVGASELRDLYLKTENYLGGEYFARMVKEVARELEESKYQYSEPRLSIYGRSPEEWPNLAYWFIQHKVYSPNMRWIIQVPRIYDIFRSKKLLPNFGKMLENIFLPLFKATINPQDHRELHLFLKYVTGFDSVDDESKHSDHMFSDKSPNPDVWTSEQNPPYSYYLYYMYANIMVLNNLRRERGLSTFLFRPHCGEAGSITHLVSAFLTADNISHGLLLKKSPVLQYLYYLAQIPIAMSPLSNNSLFLEYSKNPLREFLHKGLHVSLSTDDPMQFHYTKEALMEEYAIAAQVWKLSTCDLCEIARNSVLQSGLSHQEKQKFLGQNYYKEGPEGNDIRKTNVAQIRMAFRYETLCNELSFLSDAMKSEEITALTN

SEQ ID NO: 36670 - protein, 267 aa, Homo sapiens
MPRQFPKLNISEVDEQVRLLAEKVFAKVLREEDSKDALSLFTVPEDCPIGQKEAKERELQKELAEQKSVETAKRKKSFKMIRSQSLSLQMPPQQDWKGPPAASPAMSPTTPVVTGATSLPTPAPYAMPEFQRVTISGDYCAGITLEDYEQAAKSLAKALMIREKYARLAYHRFPRITSQYLGHPRADTAPPEEGLPDFHPPPLPQEDPYCLDDAPPNLDYLVHMQGGILFVYDNKKMLEHQEPHSLPYPDLETYTVDMSHILALITD

SEQ ID NO: 36671 - protein, 774 aa, Homo sapiens
MEPGSAEMPRQFPKLNISEVDEQVRLLAEKVFAKVLREEDSKDALSLFTVPEDCPIGQKEAKERELQKELAEQKSVETAKRKKSFKMIRSQSLSLQMPPQQDWKGPPAASPAMSPTTPVVTGATSLPTPAPYAMPEFQRVTISGDYCAGITLEDYEQAAKSLAKALMIREKYARLAYHRFPRITSQYLGHPRADTAPPEEGLPDFHPPPLPQEDPYCLDDAPPNLDYLVHMQGGILFVYDNKKMLEHQEPHSLPYPDLETYTVDMSHILALITDGPTKTYCHRRLNFLESKFSLHEMLNEMSEFKELKSNPHRDFYNVRKVDTHIHAAACMNQKHLLRFIKHTYQTEPDRTVAEKRGRKITLRQVFDGLHMDPYDLTVDSLDVHAGRQTFHRFDKFNSKYNPVGASELRDLYLKTENYLGGEYFARMVKEVARELEESKYQYSEPRLSIYGRSPEEWPNLAYWFIQHKVYSPNMRWIIQVPRIYDIFRSKKLLPNFGKMLENIFLPLFKATINPQDHRELHLFLKYVTGFDSVDDESKHSDHMFSDKSPNPDVWTSEQNPPYSYYLYYMYANIMVLNNLRRERGLSTFLFRPHCGEAGSITHLVSAFLTADNISHGLLLKKSPVLQYLYYLAQIPIAMSPLSNNSLFLEYSKNPLREFLHKGLHVSLSTDDPMQFHYTKEALMEEYAIAAQVWKLSTCDLCEIARNSVLQSGLSHQEKQKFLGQNYYKEGPEGNDIRKTNVAQIRMAFRYETLCNELSFLSDAMKSEEITALTN

SEQ ID NO: 36672 - protein, 767 aa, Homo sapiens; identical to SEQ ID NO: 36667

SEQ ID NO: 36673 - protein, 111 aa, Homo sapiens
MPRQFPKLNISEVDEQVRLLAEKVFAKVLREEDSKDALSLFTVPEDCPIGQKEAKERELQKELAEQKSVETAKRKKSFKMIRSQSLSLQMPPQQDWKGPPAASPAMSPTTP

SEQ ID NO: 36674 - protein, 432 aa, Homo sapiens
MSDKLPYKVADIGLAAWGRKALDIAENEMPGLMRMRERYSASKPLKGARIAGCLHMTVETAVLIETLVTLGAEVQWSSCNIFSTQDHAAAAIAKAGIPVYAWKGETDEEYLWCIEQTLYFKDGPLNMILDDGGDLTNLIHTKYPQLLPGIRGISEETTTGVHNLYKMMANGILKVPAINVNDSVTKSKFDNLYGCRESLIDGIKRATDVMIAGKVAVVAGYGDVGKGCAQALRGFGARVIITEIDPINALQAAMEGYEVTTMDEACQEGNIFVTTTGCIDIILGRHFEQMKDDAIVCNIGHFDVEIDVKWLNENAVEKVNIKPQVDRYRLKNGRRIILLAEGRLVNLGCAMGHPSFVMSNSFTNQVMAQIELWTHPDKYPVGVHFLPKKLDEAVAEAHLGKLNVKLTKLTEKQAQYLGMSCDGPFKPDHYRY

SEQ ID NO: 36675 - protein, 404 aa, Homo sapiens
MPGLMRMRERYSASKPLKGARIAGCLHMTVETAVLIETLVTLGAEVQWSSCNIFSTQDHAAAAIAKAGIPVYAWKGETDEEYLWCIEQTLYFKDGPLNMILDDGGDLTNLIHTKYPQLLPGIRGISEETTTGVHNLYKMMANGILKVPAINVNDSVTKSKFDNLYGCRESLIDGIKRATDVMIAGKVAVVAGYGDVGKGCAQALRGFGARVIITEIDPINALQAAMEGYEVTTMDEACQEGNIFVTTTGCIDIILGRHFEQMKDDAIVCNIGHFDVEIDVKWLNENAVEKVNIKPQVDRYRLKNGRRIILLAEGRLVNLGCAMGHPSFVMSNSFTNQVMAQIELWTHPDKYPVGVHFLPKKLDEAVAEAHLGKLNVKLTKLTEKQAQYLGMSCDGPFKPDHYRY

SEQ ID NO: 36676 - protein, 265 aa, Homo sapiens
MFVSKRRFILKTCGTTLLLKALVPLLKLARDYSGFDSIQSFFYSRKNFMKPSHQGYPHRNFQEEIEFLNAIFPNGAAYCMGRMNSDCWYLYTLDFPESRVISQPDQTLEILMSELDPAVMDQFYMKDGVTAKDVTRESGIRDLIPGSVIDATMFNPCGYSMNGMKSDGTYWTIHITPEPEFSYVSFETNLSQTSYDDLIRKVVEVFKPGKFVTTLFVNQSSKCRTVLASPQKIEGFKRLDCQSAMFNDYNFVFTSFAKKQQQQQS

SEQ ID NO: 36677 - protein, 305 aa, Homo sapiens
MEAAHFFEGTEKLLEVWFSRQQPDANQGSGDLRTIPSESSMFVSKRRFILKTCGTTLLLKALVPLLKLARDYSGFDSIQSFFYSRKNFMKPSHQGYPHRNFQEEIEFLNAIFPNGAAYCMGRMNSDCWYLYTLDFPESRVISQPDQTLEILMSELDPAVMDQFYMKDGVTAKDVTRESGIRDLIPGSVIDATMFNPCGYSMNGMKSDGTYWTIHITPEPEFSYVSFETNLSQTSYDDLIRKVVEVFKPGKFVTTLFVNQSSKCRTVLASPQKIEGFKRLDCQSAMFNDYNFVFTSFAKKQQQQQS

SEQ ID NO: 36678 - protein, 186 aa, Homo sapiens
MGRMNSDCWYLYTLDFPESRVISQPDQTLEILMSELDPAVMDQFYMKDGVTAKDVTRESGIRDLIPGSVIDATMFNPCGYSMNGMKSDGTYWTIHITPEPEFSYVSFETNLSQTSYDDLIRKVVEVFKPGKFVTTLFVNQSSKCRTVLASPQKIEGFKRLDCQSAMFNDYNFVFTSFAKKQQQQQS

SEQ ID NO: 36679 - protein, 334 aa, Homo sapiens
MEAAHFFEGTEKLLEVWFSRQQPDANQGSGDLRTIPRSEWDILLKDVQCSIISVTKTDKQEAYVLSESSMFVSKRRFILKTCGTTLLLKALVPLLKLARDYSGFDSIQSFFYSRKNFMKPSHQGYPHRNFQEEIEFLNAIFPNGAAYCMGRMNSDCWYLYTLDFPESRVISQPDQTLEILMSELDPAVMDQFYMKDGVTAKDVTRESGIRDLIPGSVIDATMFNPCGYSMNGMKSDGTYWTIHITPEPEFSYVSFETNLSQTSYDDLIRKVVEVFKPGKFVTTLFVNQSSKCRTVLASPQKIEGFKRLDCQSAMFNDYNFVFTSFAKKQQQQQS

SEQ ID NO: 36680 - protein, 214 aa, Homo sapiens
MEAAHFFEGTEKLLEVWFSRQQPDANQGSGDLRTIPRYLYTLDFPESRVISQPDQTLEILMSELDPAVMDQFYMKDGVTAKDVTRESGIRDLIPGSVIDATMFNPCGYSMNGMKSDGTYWTIHITPEPEFSYVSFETNLSQTSYDDLIRKVVEVFKPGKFVTTLFVNQSSKCRTVLASPQKIEGFKRLDCQSAMFNDYNFVFTSFAKKQQQQQS

SEQ ID NO: 36681 - protein, 1119 aa, Homo sapiens
MAGAPRGGGGGGGGAGEPGGAERAAGTSRRRGLRACDEEFACPELEALFRGYTLRLEQAATLKALAVLSLLAGALALAELLGAPGPAPGLAKGSHPVHCVLFLALLVVTNVRSLQVPQLQQVGQLALLFSLTFALLCCPFALGGPARGSAGAAGGPATAEQGVWQLLLVTFVSYALLPVRSLLAIGFGLVVAASHLLVTATLVPAKRPRLWRTLGANALLFVGVNMYGVFVRILTERSQRKAFLQARSCIEDRLRLEDENEKQERLLMSLLPRNVAMEMKEDFLKPPERIFHKIYIQRHDNVSILFADIVGFTGLASQCTAQELVKLLNELFGKFDELATENHCRRIKILGDCYYCVSGLTQPKTDHAHCCVEMGLDMIDTITSVAEATEVDLNMRVGLHTGRVLCGVLGLRKWQYDVWSNDVTLANVMEAAGLPGKVHITKTTLACLNGDYEVEPGYGHERNSFLKTHNIETFFIVPSHRRKIFPGLILSDIKPAKRMKFKTVCYLLVQLMHCRKMFKAEIPFSNVMTCEDDDKRRALRTASEKLRNRSSFSTNVVYTTPGTRVNRYISRLLEARQTELEMADLNFFTLKYKHVEREQKYHQLQDEYFTSAVVLTLILAALFGLVYLLIFPQSVVVLLLLVFCICFLVACVLYLHITRVQCFPGCLTIQIRTVLCIFIVVLIYSVAQGCVVGCLPWAWSSKPNSSLVVLSSGGQRTALPTLPCESTHHALLCCLVGTLPLAIFFRVSSLPKMILLSGLTTSYILVLELSGYTRTGGGAVSGRSYEPIVAILLFSCALALHARQVDIRLRLDYLWAAQAEEEREDMEKVKLDNRRILFNLLPAHVAQHFLMSNPRNMDLYYQSYSQVGVMFASIPNFNDFYIELDGNNMGVECLRLLNEIIADFDELMEKDFYKDIEKIKTIGSTYMAAVGLAPTSGTKAKKSISSHLSTLADFAIEMFDVLDEINYQSYNDFVLRVGINVGPVVAGVIGARRPQYDIWGNTVNVASRMDSTGVQGRIQVTEEVHRLLRRCPYHFVCRGKVSVKGKGEMLTYFLEGRTDGNGSQIRSLGLDRKMCPFGRAGLQGRRPPVCPMPGVSVRAGLPPHSPGQYLPSAAAGKEA

SEQ ID NO: 36682 - protein, 1057 aa, Homo sapiens
MAGAPRGGGGGGGGAGEPGGAERAAGTSRRRGLRACDEEFACPELEALFRGYTLRLEQAATLKALAVLSLLAGALALAELLGAPGPAPGLAKGSHPVHCVLFLALLVVTNVRSLQVPQLQQVGQLALLFSLTFALLCCPFALGGPARGSAGAAGGPATAEQGVWQLLLVTFVSYALLPVRSLLAIGFGLVVAASHLLVTATLVPAKRPRLWRTLGANALLFVGVNMYGVFVRILTERSQRKAFLQARSCIEDRLRLEDENEKQERLLMSLLPRNVAMEMKEDFLKPPERIFHKIYIQRHDNVSILFADIVGFTGLASQCTAQELVKLLNELFGKFDELATENHCRRIKILGDCYYCVSGLTQPKTDHAHCCVEMGLDMIDTITSVAEATEVDLNMRVGLHTGRVLCGVLGLRKWQYDVWSNDVTLANVMEAAGLPGKVHITKTTLACLNGDYEVEPGYGHERNSFLKTHNIETFFIVPSHRRKIFPGLILSDIKPAKRMKFKTVCYLLVQLMHCRKMFKAEIPFSNVMTCEDDDKRRALRTASEKLRNRSSFSTNVVYTTPGTRVNRYISRLLEARQTELEMADLNFFTLKYKHVEREQKYHQLQDEYFTSAVVLTLILAALFGLVYLLIFPQSVVVLLLLVFCICFLVACVLYLHITRVQCFPGCLTIQIRTVLCIFIVVLIYSVAQGCVVGCLPWAWSSKPNSSLVVLSSGGQRTALPTLPCESTHHALLCCLVGTLPLAIFFRVSSLPKMILLSGLTTSYILVLELSGYTRTGGGAVSGRSYEPIVAILLFSCALALHARQVDIRLRLDYLWAAQAEEEREDMEKVKLDNRRILFNLLPAHVAQHFLMSNPRNMDLYYQSYSQVGVMFASIPNFNDFYIELDGNNMGVECLRLLNEIIADFDELMEKDFYKDIEKIKTIGSTYMAAVGLAPTSGTKAKKSISSHLSTLADFAIEMFDVLDEINYQSYNDFVLRVGINVGPVVAGVIGARRPQYDIWGNTVNVASRMDSTGVQGRIQVTEEVHRLLRRCPPLCVPRQSQCQGQRRDVDILSRRQD

SEQ ID NO: 36683 - protein, 1091 aa, Homo sapiens
MWQEAMRRRRYLRDRSEEAAGGGDGLPRSRDWLYESYYCMSQQHPLIVFLLLIVMGSCLALLAVFFALGLEVEDHVAFLITVPTALAIFFAIFILVCIESVFKKLLRLFSLVIWICLVAMGYLFMCFGGTVSPWDQVSFFLFIIFVVYTMLPFNMRDAIIASVLTSSSHTIVLSVCLSATPGGKEHLVWQILANVIIFICGNLAGAYHKHLMELALQQTYQDTCNCIKSRIKLEFEKRQQERLLLSLLPAHIAMEMKAEIIQRLQGPKAGQMENTNNFHNLYVKRHTNVSILYADIVGFTRLASDCSPGELVHMLNELFGKFDQIAKENECMRIKILGDCYYCVSGLPISLPNHAKNCVKMGLDMCEAIKKVRDATGVDINMRVGVHSGNVLCGVIGLQKWQYDVWSHDVTLANHMEAGGVPGRVHISSVTLEHLNGAYKVEEGDGDIRDPYLKQHLVKTYFVINPKGERRSPQHLFRPRHTLDGAKMRASVRMTRYLESWGAAKPFAHLHHRDSMTTENGKISTTDVPMGQHNFQNRTLRTKSQKKRFEEELNERMIQAIDGINAQKQWLKSEDIQRISLLFYNKVLEKEYRATALPAFKYYVTCACLIFFCIFIVQILVLPKTSVLGISFGAAFLLLAFILFVCFAGQLLQCSKKASPLLMWLLKSSGIIANRPWPRISLTIITTAIILMMAVFNMFFLSDSEETIPPTANTTNTSFSASNNQVAILRAQNLFFLPYFIYSCILGLISCSVFLRVNYELKMLIMMVALVGYNTILLHTHAHVLGDYSQVLFERPGIWKDLKTMGSVSLSIFFITLLVLGRQNEYYCRLDFLWKNKFKKEREEIETMENLNRVLLENVLPAHVAEHFLARSLKNEELYHQSYDCVCVMFASIPDFKEFYTESDVNKEGLECLRLLNEIIADFDDLLSKPKFSGVEKIKTIGSTYMAATGLSAVPSQEHSQEPERQYMHIGTMVEFAFALVGKLDAINKHSFNDFKLRVGINHGPVIAGVIGAQKPQYDIWGNTVNVASRMDSTGVLDKIQVTEETSLVLQTLGYTCTCRGIINVKGKGDLKTYFVNTEMSRSLSQSNVAS

SEQ ID NO: 36684 - protein, 203 aa, Homo sapiens
MENLNRVLLENVLPAHVAEHFLARSLKNEELYHQSYDCVCVMFASIPDFKEFYTESDVNKEGLECLRLLNEIIADFDDLLSKPKFSGVEKIKTIGSTYMAATGLSAVPSQEHSQEPERQYMHIGTMVEFAFALVGKLDAINKHSFNDFKLRVGVTEETSLVLQTLGYTCTCRGIINVKGKGDLKTYFVNTEMSRSLSQSNVAS

SEQ ID NO: 36685 - protein, 911 aa, Homo sapiens
MDLRWARDLHLREASRSVAFTTLRLGAVTTGLLTFREPGDKEKSGKGLGKRWRIQREESQERLLLSLLPAHIAMEMKAEIIQRLQGPKAGQMENTNNFHNLYVKRHTNVSILYADIVGFTRLASDCSPGELVHMLNELFGKFDQIAKENECMRIKILGDCYYCVSGLPISLPNHAKNCVKMGLDMCEAIKKVRDATGVDINMRVGVHSGNVLCGVIGLQKWQYDVWSHDVTLANHMEAGGVPGRVHISSVTLEHLNGAYKVEEGDGDIRDPYLKQHLVKTYFVINPKGERRSPQHLFRPRHTLDGAKMRASVRMTRYLESWGAAKPFAHLHHRDSMTTENGKISTTDVPMGQHNFQNRTLRTKSQKKRFEEELNERMIQAIDGINAQKQWLKSEDIQRISLLFYNKVLEKEYRATALPAFKYYVTCACLIFFCIFIVQILVLPKTSVLGISFGAAFLLLAFILFVCFAGQLLQCSKKASPLLMWLLKSSGIIANRPWPRISLTIITTAIILMMAVFNMFFLSDSEETIPPTANTTNTSFSASNNQVAILRAQNLFFLPYFIYSCILGLISCSVFLRVNYELKMLIMMVALVGYNTILLHTHAHVLGDYSQVLFERPGIWKDLKTMGSVSLSIFFITLLVLGRQNEYYCRLDFLWKNKFKKEREEIETMENLNRVLLENVLPAHVAEHFLARSLKNEELYHQSYDCVCVMFASIPDFKEFYTESDVNKEGLECLRLLNEIIADFDDLLSKPKFSGVEKIKTIGSTYMAATGLSAVPSQEHSQEPERQYMHIGTMVEFAFALVGKLDAINKHSFNDFKLRVGINHGPVIAGVIGAQKPQYDIWGNTVNVASRMDSTGVLDKIQVTEETSLVLQTLGYTCTCRGIINVKGKGDLKTYFVNTEMSRSLSQSNVAS

SEQ ID NO: 36686 - protein, 924 aa, Homo sapiens
MLPFNMRDAIIASVLTSSSHTIVLSVCLSATPGGKEHLVWQILANVIIFICGNLAGAYHKHLMELALQQTYQDTCNCIKSRIKLEFEKRQQERLLLSLLPAHIAMEMKAEIIQRLQGPKAGQMENTNNFHNLYVKRHTNVSILYADIVGFTRLASDCSPGELVHMLNELFGKFDQIAKENECMRIKILGDCYYCVSGLPISLPNHAKNCVKMGLDMCEAIKKVRDATGVDINMRVGVHSGNVLCGVIGLQKWQYDVWSHDVTLANHMEAGGVPGRVHISSVTLEHLNGAYKVEEGDGDIRDPYLKQHLVKTYFVINPKGERRSPQHLFRPRHTLDGAKPFAHLHHRDSMTTENGKISTTDVPMGQHNFQNRTLRTKSQKKRFEEELNERMIQAIDGINAQKQWLKSEDIQRISLLFYNKVLEKEYRATALPAFKYYVTCACLIFFCIFIVQILVLPKTSVLGISFGAAFLLLAFILFVCFAGQLLQCSKKASPLLMWLLKSSGIIANRPWPRISLTIITTAIILMMAVFNMFFLSDSEETIPPTANTTNTSFSASNNQVAILRAQNLFFLPYFIYSCILGLISCSVFLRVNYELKMLIMMVALVGYNTILLHTHAHVLGDYSQVLFERPGIWKDLKTMGSVSLSIFFITLLVLGRQNEYYCRLDFLWKNKFKKEREEIETMENLNRVLLENVLPAHVAEHFLARSLKNEELYHQSYDCVCVMFASIPDFKEFYTESDVNKEGLECLRLLNEIIADFDDLLSKPKFSGVEKIKTIGSTYMAATGLSAVPSQEHSQEPERQYMHIGTMVEFAFALVGKLDAINKHSFNDFKLRVGINHGPVIAGVIGAQKPQYDIWGNTVNVASRMDSTGVLDKIQVTEETSLVLQTLGYTCTCRGIINVKGKGDLKTYFVNTEMSRSLSQSNVAS

SEQ ID NO: 36687 - protein, 1144 aa, Homo sapiens
MPRNQGFSEPEYSAEYSAEYSVSLPSDPDRGVGRTHEISVRNSGSCLCLPRFMRLTFVPESLENLYQTYFKRQRHETLLVLVVFAALFDCYVVVMCAVVFSSDKLASLAVAGIGLVLDIILFVLCKKGLLPDRVTRRVLPYVLWLLITAQIFSYLGLNFARAHAASDTVGWQVFFVFSFFITLPLSLSPIVIISVVSCVVHTLVLGVTVAQQQQEELKGMQLLREILANVFLYLCAIAVGIMSYYMADRKHRKAFLEARQSLEVKMNLEEQSQQQENLMLSILPKHVADEMLKDMKKDESQKDQQQFNTMYMYRHENVSILFADIVGFTQLSSACSAQELVKLLNELFARFDKLAAKYHQLRIKILGDCYYCICGLPDYREDHAVCSILMGLAMVEAISYVREKTKTGVDMRVGVHTGTVLGGVLGQKRWQYDVWSTDVTVANKMEAGGIPGRVHISQSTMDCLKGEFDVEPGDGGSRCDYLEEKGIETYLIIASKPEVKKTATQNGLNGSALPNGAPASSKSSSPALIETKEPNGSAHSSGSTSEKPEEQDAQADNPSFPNPRRRLRLQDLADRVVDASEDEHELNQLLNEALLERESAQVVKKRNTFLLSMRFMDPEMETRYSVEKEKQSGAAFSCSCVVLLCTALVEILIDPWLMTNYVTFMVGEILLLILTICSLAAIFPRAFPKKLVAFSTWIDRTRWARNTWAMLAIFILVMANVVDMLSCLQYYTGPSNATAGMETEGSCLENPKYYNYVAVLSLIATIMLVQVSHMVKLTLMLLVAGAVATINLYAWRPVFDEYDHKRFREHDLPMVALEQMQGFNPGLNGTDRLPLVPSKYSMTVMVFLMMLSFYYFSRHVEKLARTLFLWKIEVHDQKERVYEMRRWNEALVTNMLPEHVARHFLGSKKRDEELYSQTYDEIGVMFASLPNFADFYTEESINNGGIECLRFLNEIISDFDSLLDNPKFRVITKIKTIGSTYMAASGVTPDVNTNGFASSNKEDKSERERWQHLADLADFALAMKDTLTNINNQSFNNFMLRIGMNKGGVLAGVIGARKPHYDIWGNTVNVASRMESTGVMGNIQVVEETQVILREYGFRFVRRGPIFVKGKGELLTFFLKGRDKLATFPNGPSVTLPHQVVDNS

SEQ ID NO: 36688 - protein, 1119 aa, Homo sapiens
MPRNQGFSEPEYSAEYSAEYSVSLPRFMRLTFVPESLENLYQTYFKRQRHETLLVLVVFAALFDCYVVVMCAVVFSSDKLASLAVAGIGLVLDIILFVLCKKGLLPDRVTRRVLPYVLWLLITAQIFSYLGLNFARAHAASDTVGWQVFFVFSFFITLPLSLSPIVIISVVSCVVHTLVLGVTVAQQQQEELKGMQLLREILANVFLYLCAIAVGIMSYYMADRKHRKAFLEARQSLEVKMNLEEQSQQQENLMLSILPKHVADEMLKDMKKDESQKDQQQFNTMYMYRHENVSILFADIVGFTQLSSACSAQELVKLLNELFARFDKLAAKYHQLRIKILGDCYYCICGLPDYREDHAVCSILMGLAMVEAISYVREKTKTGVDMRVGVHTGTVLGGVLGQKRWQYDVWSTDVTVANKMEAGGIPGRVHISQSTMDCLKGEFDVEPGDGGSRCDYLEEKGIETYLIIASKPEVKKTATQNGLNGSALPNGAPASSKSSSPALIETKEPNGSAHSSGSTSEKPEEQDAQADNPSFPNPRRRLRLQDLADRVVDASEDEHELNQLLNEALLERESAQVVKKRNTFLLSMRFMDPEMETRYSVEKEKQSGAAFSCSCVVLLCTALVEILIDPWLMTNYVTFMVGEILLLILTICSLAAIFPRAFPKKLVAFSTWIDRTRWARNTWAMLAIFILVMANVVDMLSCLQYYTGPSNATAGMETEGSCLENPKYYNYVAVLSLIATIMLVQVSHMVKLTLMLLVAGAVATINLYAWRPVFDEYDHKRFREHDLPMVALEQMQGFNPGLNGTDRLPLVPSKYSMTVMVFLMMLSFYYFSRHVEKLARTLFLWKIEVHDQKERVYEMRRWNEALVTNMLPEHVARHFLGSKKRDEELYSQTYDEIGVMFASLPNFADFYTEESINNGGIECLRFLNEIISDFDSLLDNPKFRVITKIKTIGSTYMAASGVTPDVNTNGFASSNKEDKSERERWQHLADLADFALAMKDTLTNINNQSFNNFMLRIGMNKGGVLAGVIGARKPHYDIWGNTVNVASRMESTGVMGNIQVVEETQVILREYGFRFVRRGPIFVKGKGELLTFFLKGRDKLATFPNGPSVTLPHQVVDNS

SEQ ID NO: 36689 - protein, 112 aa, Homo sapiens
MPRNQGFSEPEYSAEYSAEYSVSLPSDPDRGVGRTHEISVRNSGSCLCLPRFMRLTFVPESLENLYQTYFKRQRHETLLVLVVFAALFDCYVVVMCAVVFSSDKLASLAVAG

SEQ ID NO: 36690 - protein, 1077 aa, Homo sapiens
MARLFSPRPPPSEDLFYETYYSLSQQYPLLLLLLGIVLCALAALLAVAWASGRELTSDPSFLTTVLCALGGFSLLLGLASREQRLQRWTRPLSGLVWVALLALGHAFLFTGGVVSAWDQVSYFLFVIFTAYAMLPLGMRDAAVAGLASSLSHLLVLGLYLGPQPDSRPALLPQLAANAVLFLCGNVAGVYHKALMERALRATFREALSSLHSRRRLDTEKKHQEHLLLSILPAYLAREMKAEIMARLQAGQGSRPESTNNFHSLYVKRHQGVSVLYADIVGFTRLASECSPKELVLMLNELFGKFDQIAKEHECMRIKILGDCYYCVSGLPLSLPDHAINCVRMGLDMCRAIRKLRAATGVDINMRVGVHSGSVLCGVIGLQKWQYDVWSHDVTLANHMEAGGVPGRVHITGATLALLAGAYAVEDAGMEHRDPYLRELGEPTYLVIDPRAEEEDEKGTAGGLLSSLEGLKMRPSLLMTRYLESWGAAKPFAHLSHGDSPVSTSTPLPEKTLASFSTQWSLDRSRTPRGLDDELDTGDAKFFQVIEQLNSQKQWKQSKDFNPLTLYFREKEMEKEYRLSAIPAFKYYEACTFLVFLSNFIIQMLVTNRPPALAITYSITFLLFLLILFVCFSEDLMRCVLKGPKMLHWLPALSGLVATRPGLRIALGTATILLVFAMAITSLFFFPTSSDCPFQAPNVSSMISNLSWELPGSLPLISVPYSMHCCTLGFLSCSLFLHMSFELKLLLLLLWLAASCSLFLHSHAWLSECLIVRLYLGPLDSRPGVLKEPKLMGAISFFIFFFTLLVLARQNEYYCRLDFLWKKKLRQEREETETMENLTRLLLENVLPAHVAPQFIGQNRRNEDLYHQSYECVCVLFASVPDFKEFYSESNINHEGLECLRLLNEIIADFDELLSKPKFSGVEKIKTIGSTYMAATGLNATSGQDAQQDAERSCSHLGTMVEFAVALGSKLDVINKHSFNNFRLRVGLNHGPVVAGVIGAQKPQYDIWGNTVNVASRMESTGVLGKIQVTEETAWALQSLGYTCYSRGVIKVKGKGQLCTYFLNTDLTRTGPPSATLG

SEQ ID NO: 36691 - protein, 419 aa, Homo sapiens
MSRGTRESACCMLTSWASRGWPASVPLRSWCSCSMSSLASSTRLPRKLRAATGVDINMRVGVHSGSVLCGVIGLQKWQYDVWSHDVTLANHMEAGGVPGRVHITGATLALLAGAYAVEDAGMEHRDPYLRELGEPTYLVIDPRAEEEDEKGTAGGLLSSLEGLKMRPSLLMTRYLESWGAAKPFAHLSHGDSPVSTSTPLPEKTLASFSTQWSLDRSRTPRGLDDELDTGDAKFFQVIEQLNSQKQWKQSKDFNPLTLYFREKEMEKEYRLSAIPAFKYYEACTFLVFLSNFIIQMLVTNRPPALAITYSITFLLFLLILFVCFSEDLMRCVLKGPKMLHWLPALSGLVATRPGLRIALGTATILLVFAMAITSLFFFPTSSDCPFQAPNVSSMISNLSWELPGSLPLISVPVSVPTCP

SEQ ID NO: 36692 - protein, 1077 aa, Homo sapiens; identical to SEQ ID NO: 36690

SEQ ID NO: 36693 - protein, 1077 aa, Homo sapiens; identical to SEQ ID NO: 36690

SEQ ID NO: 36694 - protein, 115 aa, Homo sapiens
MARLFSPRPPPSEDLFYETYYSLSQQYPLLLLLLGIVLCALAALLAVAWASGRELTSDPSFLTTVLCALGGFSLLLGLASREQRLQRWTRPLSGLVWVALLALGHAFLFTGGVVS

SEQ ID NO: 36695 - protein, 911 aa, Homo sapiens
MKSQKEGCCSRGDLSIQTGPGGEWAPRRLVSNVLIFSCTNIVGVCTHYPAEVSQRQAFQETRECIQARLHSQRENQQQERLLLSVLPRHVAMEMKADINAKQEDMMFHKIYIQKHDNVSILFADIEGFTSLASQCTAQELVMTLNELFARFDKLAAENHCLRIKILGDCYYCVSGLPEARADHAHCCVEMGMDMIEAISLVREVTGVNVNMRVGIHSGRVHCGVLGLRKWQFDVWSNDVTLANHMEAGGKAGRIHITKATLNYLNGDYEVEPGCGGERNAYLKEHSIETFLILRCTQKRKEEKAMIAKMNRQRTNSIGHNPPHWGAERPFYNHLGGNQVSKEMKRMGFEDPKDKNAQESANPEDEVDEFLGRAIDARSIDRLRSEHVRKFLLTFREPDLEKKYSKQVDDRFGAYVACASLVFLFICFVQITIVPHSIFMLSFYLTCSLLLTLVVFVSVIYSCVKLFPSPLQTLSRKIVRSKMNSTLVGVFTITLVFLAAFVNMFTCNSRDLLGCLAQEHNISASQVNACHVAESAVNYSLGDEQGFCGSPWPNCNFPEYFTYSVLLSLLACSVFLQISCIGKLVLMLAIELIYVLIVEVPGVTLFDNADLLVTANAIDFFNNGTSQCPEHATKVALKVVTPIIISVFVLALYLHAQQVESTARLDFLWKLQATEEKEEMEELQAYNRRLLHNILPKDVAAHFLARERRNDELYYQSCECVAVMFASIANFSEFYVELEANNEGVECLRLLNEIIADFDEIISEDRFRQLEKIKTIGSTYMAASGLNDSTYDKVGKTHIKALADFAMKLMDQMKYINEHSFNNFQMKIGLNIGPVVAGVIGARKPQYDIWGNTVNVASRMDSTGVPDRIQVTTDMYQVLAANTYQLECRGVVKVKGKGEMMTYFLNGGPPLS

SEQ ID NO: 36696 - protein, 1261 aa, Homo sapiens
MSGSKSVSPPGYAAQKTAAPAPRGGPEHRSAWGEADSRANGYPHAPGGSARGSTKKPGGAVTPQQQQRLASRWRSDDDDDPPLSGDDPLAGGFGFSFRSKSAWQERGGDDCGRGSRRQRRGAASGGSTRAPPAGGGGGSAAAAASAGGTEVRPRSVEVGLEERRGKGRAADELEAGAVEGGEGSGDGGSSADSGSGAGPGAVLSLGACCLALLQIFRSKKFPSDKLERLYQRYFFRLNQSSLTMLMAVLVLVCLVMLAFHAARPPLQLPYLAVLAAAVGVILIMAVLCNRAAFHQDHMGLACYALIAVVLAVQVVGLLLPQPRSASEGIWWTVFFIYTIYTLLPVRMRAAVLSGVLLSALHLAIALRTNAQDQFLLKQLVSNVLIFSCTNIVGVCTHYPAEVSQRQAFQETRECIQARLHSQRENQQQERLLLSVLPRHVAMEMKADINAKQEDMMFHKIYIQKHDNVSILFADIEGFTSLASQCTAQELVMTLNELFARFDKLAAENHCLRIKILGDCYYCVSGLPEARADHAHCCVEMGMDMIEAISLVREVTGVNVNMRVGIHSGRVHCGVLGLRKWQFDVWSNDVTLANHMEAGGKAGRIHITKATLNYLNGDYEVEPGCGGERNAYLKEHSIETFLILRCTQKRKEEKAMIAKMNRQRTNSIGHNPPHWGAERPFYNHLGGNQVSKEMKRMGFEDPKDKNAQESANPEDEVDEFLGRAIDARSIDRLRSEHVRKFLLTFREPDLEKKYSKQVDDRFGAYVACASLVFLFICFVQITIVPHSIFMLSFYLTCSLLLTLVVFVSVIYSCVKLFPSPLQTLSRKIVRSKMNSTLVGVFTITLVFLAAFVNMFTCNSRDLLGCLAQEHNISASQVNACHVAESAVNYSLGDEQGFCGSPWPNCNFPEYFTYSVLLSLLACSVFLQISCIGKLVLMLAIELIYVLIVEVPGVTLFDNADLLVTANAIDFFNNGTSQCPEHATKVALKVVTPIIISVFVLALYLHAQQVESTARLDFLWKLQATEEKEEMEELQAYNRRLLHNILPKDVAAHFLARERRNDELYYQSCECVAVMFASIANFSEFYVELEANNEGVECLRLLNEIIADFDEIISEDRFRQLEKIKTIGSTYMAASGLNDSTYDKVGKTHIKALADFAMKLMDQMKYINEHSFNNFQMKIGLNIGPVVAGVIGARKPQYDIWGNTVNVASRMDSTGVPDRIQVTTDMYQVLAANTYQLECRGVVKVKGKGEMMTYFLNGGPPLS

SEQ ID NO: 36697 - protein, 919 aa, Homo sapiens
MAPSRFRTQLELVSNVLIFSCTNIVGVCTHYPAEVSQRQAFQETRECIQARLHSQRENQQQERLLLSVLPRHVAMEMKADINAKQEDMMFHKIYIQKHDNVSILFADIEGFTSLASQCTAQELVMTLNELFARFDKLAAENHCLRIKILGDCYYCVSGLPEARADHAHCCVEMGMDMIEAISLVREVTGVNVNMRVGIHSGRVHCGVLGLRKWQFDVWSNDVTLANHMEAGGKAGRIHITKATLNYLNGDYEVEPGCGGERNAYLKEHSIETFLILRCTQKRKEEKAMIAKMNRQRTNSIGHNPPHWGAERPFYNHLGGNQVSKEMKRMGFEDPKDKNAQESANPEDEVDEFLGRAIDARSIDRLRSEHVRKFLLTFREPDLEKKYSKQVDDRFGAYVACASLVFLFICFVQITIVPHSIFMLSFYLTCSLLLTLVVFVSVIYSCVKLFPSPLQTLSRKIVRSKMNSTLVGVFTITLVFLAAFVNMFTCNSRDLLGCLAQEHNISASQVNACHVAESAVNYSLGDEQGFCGSPWPNCNFPEYFTYSVLLSLLACSVFLQISCIGKLVLMLAIELIYVLIVEVPGVTLFDNADLLVTANAIDFFNNGTSQWSLCENLRHRRMEAGTYFPSGVKEQSPEHATKVALKVVTPIIISVFVLALYLHAQQVESTARLDFLWKLQATEEKEEMEELQAYNRRLLHNILPKDVAAHFLARERRNDELYYQSCECVAVMFASIANFSEFYVELEANNEGVECLRLLNEIIADFDEIISEDRFRQLEKIKTIGSTYMAASGLNDSTYDKVGKTHIKALADFAMKLMDQMKYINEHSFNNFQMKIGLNIGPVVAGVIGARKPQYDIWGNTVNVASRMDSTGVPDRIQVTTDMYQVLAANTYQLECRGVVKVKGKGEMMTYFLNGGPPLS

SEQ ID NO: 36698 - protein, 1168 aa, Homo sapiens
MSWFSGLLVPKVDERKTAWGERNGQKRSRRRGTRAGGFCTPRYMSCLRDAEPPSPTPAGPPRCPWQDDAFIRRGGPGKGKELGLRAVALGFEDTEVTTTAGGTAEVAPDAVPRSGRSCWRRLVQVFQSKQFRSAKLERLYQRYFFQMNQSSLTLLMAVLVLLTAVLLAFHAAPARPQPAYVALLACAAALFVGLMVVCNRHSFRQDSMWVVSYVVLGILAAVQVGGALAADPRSPSAGLWCPVFFVYIAYTLLPIRMRAAVLSGLGLSTLHLILAWQLNRGDAFLWKQLGANVLLFLCTNVIGICTHYPAEVSQRQAFQETRGYIQARLHLQHENRQQERLLLSVLPQHVAMEMKEDINTKKEDMMFHKIYIQKHDNVSILFADIEGFTSLASQCTAQELVMTLNELFARFDKLAAENHCLRIKILGDCYYCVSGLPEARADHAHCCVEMGVDMIEAISLVREVTGVNVNMRVGIHSGRVHCGVLGLRKWQFDVWSNDVTLANHMEAGGRAGRIHITRATLQYLNGDYEVEPGRGGERNAYLKEQHIETFLILGASQKRKEEKAMLAKLQRTRANSMEGLMPRWVPDRAFSRTKDSKAFRQMGIDDSSKDNRGTQDALNPEDEVDEFLSRAIDARSIDQLRKDHVRRFLLTFQREDLEKKYSRKVDPRFGAYVACALLVFCFICFIQLLIFPHSTLMLGIYASIFLLLLITVLICAVYSCGSLFPKALQRLSRSIVRSRAHSTAVGIFSVLLVFTSAIANMFTCNHTPIRSCAARMLNLTPADITACHLQQLNYSLGLDAPLCEGTMPTCSFPEYFIGNMLLSLLASSVFLHISSIGKLAMIFVLGLIYLVLLLLGPPATIFDNYDLLLGVHGLASSNETFDGLDCPAAGRVALKYMTPVILLVFALALYLHAQQVESTARLDFLWKLQATGEKEEMEELQAYNRRLLHNILPKDVAAHFLARERRNDELYYQSCECVAVMFASIANFSEFYVELEANNEGVECLRLLNEIIADFDEIISEERFRQLEKIKTIGSTYMAASGLNASTYDQVGRSHITALADYAMRLMEQMKHINEHSFNNFQMKIGLNMGPVVAGVIGARKPQYDIWGNTVNVSSRMDSTGVPDRIQVTTDLYQVLAAKGYQLECRGVVKVKGKGEMTTYFLNGGPSS

SEQ ID NO: 36699 - protein, 1115 aa, Homo sapiens
MSWFSGLLVPKVDERKTAWGERNGQKRSRRRGTRAGGFCTPRYMSCLRDAEPPSPTPAGPPRCPWQDDAFIRRGGPGKGKELGLRAVALGFEDTEVTTTAGGTAEVAPDAVPRSGRSCWRRLVQVFQSKQFRSAKLERLYQRYFFQMNQSSLTLLMAVLVLLTAVLLAFHAAPARPQPAYVALLACAAALFVGLMVVCNRHSFRQDSMWVVSYVVLGILAAVQVGGALAADPRSPSAGLWCPVFFVYIAYTLLPIRMRAAVLSGLGLSTLHLILAWQLNRGDAFLWKQLGANVLLFLCTNVIGICTHYPAEVSQRQAFQETRGYIQARLHLQHENRQQERLLLSVLPQHVAMEMKEDINTKKEDMMFHKIYIQKHDNVSILFADIEGFTSLASQCTAQELVMTLNELFARFDKLAAENHCLRIKILGDCYYCVSGLPEARADHAHCCVEMGVDMIEAISLVREVTGVNVNMRVGIHSGRVHCGVLGLRKWQFDVWSNDVTLANHMEAGGRAGRIHITRATLQYLNGDYEVEPGRGGERNAYLKEQHIETFLILGASQKRKEEKAMLAKLQRTRANSMEGLMPRWVPDRAFSRTKDSKAFRQMGIDDSSKDNRGTQDALNPEDEVDEFLSRAIDARSIDQLRKDHVRRFLLTFQREDLEKKYSRKVDPRFGAYVACALLVFCFICFIQLLIFPHSTLMLGIYASIFLLLLITVLICAVYSCGSLFPKALQRLSRSIVRSRAHSTAVGIFSVLLVFTSAIANMYFIGNMLLSLLASSVFLHISSIGKLAMIFVLGLIYLVLLLLGPPATIFDNYDLLLGVHGLASSNETFDGLDCPAAGRVALKYMTPVILLVFALALYLHAQQVESTARLDFLWKLQATGEKEEMEELQAYNRRLLHNILPKDVAAHFLARERRNDELYYQSCECVAVMFASIANFSEFYVELEANNEGVECLRLLNEIIADFDEIISEERFRQLEKIKTIGSTYMAASGLNASTYDQVGRSHITALADYAMRLMEQMKHINEHSFNNFQMKIGLNMGPVVAGVIGARKPQYDIWGNTVNVSSRMDSTGVPDRIQVTTDLYQVLAAKGYQLECRGVVKVKGKGEMTTYFLNGGPSS

SEQ ID NO: 36700 - protein, 1115 aa, Homo sapiens; identical to SEQ ID NO: 36699

SEQ ID NO: 36701 - protein, 1080 aa, Homo sapiens
MPAKGRYFLNEGEEGPDQDALYEKYQLTSQHGPLLLTLLLVAATACVALIIIAFSQGDPSRHQAILGMAFLVLAVFAALSVLMYVECLLRRWLRALALLTWACLVALGYVLVFDAWTKAACAWEQVPFFLFIVFVVYTLLPFSMRGAVAVGAVSTASHLLVLGSLMGGFTTPSVRVGLQLLANAVIFLCGNLTGAFHKHQMQDASRDLFTYTVKCIQIRRKLRIEKRQQENLLLSVLPAHISMGMKLAIIERLKEHGDRRCMPDNNFHSLYVKRHQNVSILYADIVGFTQLASDCSPKELVVVLNELFGKFDQIAKANECMRIKILGDCYYCVSGLPVSLPTHARNCVKMGLDMCQAIKQVREATGVDINMRVGIHSGNVLCGVIGLRKWQYDVWSHDVSLANRMEAAGVPGRVHITEATLKHLDKAYEVEDGHGQQRDPYLKEMNIRTYLVIDPRSQQPPPPSQHLPRPKGDAALKMRASVRMTRYLESWGAARPFAHLNHRESVSSGETHVPNGRRPKSVPQRHRRTPDRSMSPKGRSEDDSYDDEMLSAIEGLSSTRPCCSKSDDFYTFGSIFLEKGFEREYRLAPIPRARHDFACASLIFVCILLVHVLLMPRTAALGVSFGLVACVLGLVLGLCFATKFSRCCPARGTLCTISERVETQPLLRLTLAVLTIGSLLTVAIINLPLMPFQVPELPVGNETGLLAASSKTRALCEPLPYYTCSCVLGFIACSVFLRMSLEPKVVLLTVALVAYLVLFNLSPCWQWDCCGQGLGNLTKPNGTTSGTPSCSWKDLKTMTNFYLVLFYITLLTLSRQIDYYCRLDCLWKKKFKKEHEEFETMENVNRLLLENVLPAHVAAHFIGDKLNEDWYHQSYDCVCVMFASVPDFKVFYTECDVNKEGLECLRLLNEIIADFDELLLKPKFSGVEKIKTIGSTYMAAAGLSVASGHENQELERQHAHIGVMVEFSIALMSKLDGINRHSFNSFRLRVGINHGPVIAGVIGARKPQYDIWGNTVNVASRMESTGELGKIQVTEETCTILQGLGYSCECRGLINVKGKGELRTYFVCTDTAKFQGLGLN

SEQ ID NO: 36702 - protein, 1080 aa, Homo sapiens; identical to SEQ ID NO: 36701

SEQ ID NO: 36703 - protein, 433 aa, Homo sapiens
MPAKGRYFLNEGEEGPDQDALYEKYQLTSQHGPLLLTLLLVAATACVALIIIAFSQGDPSRHQAILGMAFLVLAVFAALSVLMYVECLLRRWLRALALLTWACLVALGYVLVFDAWTKAACAWEQVPFFLFIVFVVYTLLPFSMRGAVAVGAVSTASHLLVLGSLMGGFTTPSVRVGLQLLANAVIFLCGNLTGAFHKHQMQDASRDLFTYTVKCIQIRRKLRIEKRQQENLLLSVLPAHISMGMKLAIIERLKEHGDRRCMPDNNFHSLYVKRHQNVSILYADIVGFTQLASDCSPKELVVVLNELFGKFDQIAKANECMRIKILGDCYYCVSGLPVSLPTHARNCVKMGLDMCQAIKQVREATGVDINMRVGIHSGNVLCGVIGLRKWQYDVWSHDVSLANRMEAAGVPGRVHITEATLKHLDKALLLQVR

SEQ ID NO: 36704 - protein, 734 aa, Homo sapiens
MPAKGRYFLNEGEEGPDQDALYEKYQLTSQHGPLLLTLLLVAATACVALIIIAFSQGDPSRHQAILGMAFLVLAVFAALSVLMYVECLLRRWLRALALLTWACLVALGYVLVFDAWTKAACAWEQVPFFLFIVFVVYTLLPFSMRGAVAVGAVSTASHLLVLGSLMGGFTTPSVRVGLQLLANAVIFLCGNLTGAFHKHQMQDASRDLFTYTVKCIQIRRKLRIEKRQQENLLLSVLPAHISMGMKLAIIERLKEHGDRRCMPDNNFHSLYVKRHQNVSILYADIVGFTQLASDCSPKELVVVLNELFGKFDQIAKANECMRIKILGDCYYCVSGLPVSLPTHARNCVKMGLDMCQAIKQVREATGVDINMRVGIHSGNVLCGVIGLRKWQYDVWSHDVSLANRMEAAGVPGRVHITEATLKHLDKAYEVEDGHGQQRDPYLKEMNIRTYLVIDPRSQQPPPPSQHLPRPKGDAALKMRASVRMTRYLESWGAARPFAHLNHRESVSSGETHVPNGRRPKSVPQRHRRTPDRSMSPKGRSEDDSYDDEMLSAIEGLSSTRPCCSKSDDFYTFGSIFLEKGFEREYRLAPIPRARHDFACASLIFVCILLVHVLLMPRTAALGVSFGLVACVLGLVLGLCFATKFSRCCPARGTLCTISERVETQPLLRLTLAVLTIGSLLTVAIINLPLMPFQVPELPVGNETGLLAASSKTRALCEPLPHLHTVFSRLNELTS

SEQ ID NO: 36705 - protein, 1251 aa, Homo sapiens
MELSDVRCLTGSEELYTIHPTPPAGDGRSASRPQRLLWQTAVRHITEQRFIHGHRGGSGSGSGGSGKASDPAGGGPNHHAPQLSGDSALPLYSLGPGERAHSTCGTKVFPERSGSGSASGSGGGGDLGFLHLDCAPSNSDFFLNGGYSYRGVIFPTLRNSFKSRDLERLYQRYFLGQRRKSEVVMNVLDVLTKLTLLVLHLSLASAPMDPLKGILLGFFTGIEVVICALVVVRKDTTSHTYLQYSGVVTWVAMTTQILAAGLGYGLLGDGIGYVLFTLFATYSMLPLPLTWAILAGLGTSLLQVILQVVIPRLAVISINQVVAQAVLFMCMNTAGIFISYLSDRAQRQAFLETRRCVEARLRLETENQRQERLVLSVLPRFVVLEMINDMTNVEDEHLQHQFHRIYIHRYENVSILFADVKGFTNLSTTLSAQELVRMLNELFARFDRLAHEHHCLRIKILGDCYYCVSGLPEPRQDHAHCCVEMGLSMIKTIRYVRSRTKHDVDMRIGIHSGSVLCGVLGLRKWQFDVWSWDVDIANKLESGGIPGRIHISKATLDCLNGDYNVEEGHGKERNEFLRKHNIETYLIKQPEDSLLSLPEDIVKESVSSSDRRNSGATFTEGSWSPELPFDNIVGKQNTLAALTRNSINLLPNHLAQALHVQSGPEEINKRIEHTIDLRSGDKLRREHIKPFSLMFKDSSLEHKYSQMRDEVFKSNLVCAFIVLLFITAIQSLLPSSRVMPMTIQFSILIMLHSALVLITTAEDYKCLPLILRKTCCWINETYLARNVIIFASILINFLGAILNILWCDFDKSIPLKNLTFNSSAVFTDICSYPEYFVFTGVLAMVTCAVFLRLNSVLKLAVLLIMIAIYALLTETVYAGLFLRYDNLNHSGEDFLGTKEVSLLLMAMFLLAVFYHGQQLEYTARLDFLWRVQAKEEINEMKELREHNENMLRNILPSHVARHFLEKDRDNEELYSQSYDAVGVMFASIPGFADFYSQTEMNNQGVECLRLLNEIIADFDELLGEDRFQDIEKIKTIGSTYMAVSGLSPEKQQCEDKWGHLCALADFSLALTESIQEINKHSFNNFELRIGISHGSVVAGVIGAKKPQYDIWGKTVNLASRMDSTGVSGRIQVPEETYLILKDQGFAFDYRGEIYVKGISEQEGKIKTYFLLGRVQPNPFILPPRRLPGQYSLAAVVLGLVQSLNRQRQKQLLNENNNTGIIKGHYNRRTLLSPSGTEPGAQAEGTDKSDLP

SEQ ID NO: 36706 - protein, 1353 aa, Homo sapiens
MASPPHQQLLHHHSTEVSCDSSGDSNSVRVKINPKQLSSNSHPKHCKYSISSSCSSSGDSGGVPRRVGGGGRLRRQKKLPQLFERASSRWWDPKFDSVNLEEACLERCFPQTQRRFRYALFYIGFACLLWSIYFAVHMRSRLIVMVAPALCFLLVCVGFFLFTFTKLYARHYAWTSLALTLLVFALTLAAQFQVLTPVSGRGDSSNLTATARPTDTCLSQVGSFSMCIEVLFLLYTVMHLPLYLSLCLGVAYSVLFETFGYHFRDEACFPSPGAGALHWELLSRGLLHGCIHAIGVHLFVMSQVRSRSTFLKVGQSIMHGKDLEVEKALKERMIHSVMPRIIADDLMKQGDEESENSVKRHATSSPKNRKKKSSIQKAPIAFRPFKMQQIEEVSILFADIVGFTKMSANKSAHALVGLLNDLFGRFDRLCEETKCEKISTLGDCYYCVAGCPEPRADHAYCCIEMGLGMIKAIEQFCQEKKEMVNMRVGVHTGTVLCGILGMRRFKFDVWSNDVNLANLMEQLGVAGKVHISEATAKYLDDRYEMEDGKVIERLGQSVVADQLKGLKTYLISGQRAKESRCSCAEALLSGFEVIDGSQVSSGPRGQGTASSGNVSDLAQTVKTFDNLKTCPSCGITFAPKSEAGAEGGAPQNGCQDEHKNSTKASGGPNPKTQNGLLSPPQEEKLTNSQTSLCEILQEKGRWAGVSLDQSALLPLRFKNIREKTDAHFVDVIKEDSLMKDYFFKPPINQFSLNFLDQELERSYRTSYQEEVIKNSPVKTFASPTFSSLLDVFLSTTVFLTLSTTCFLKYEAATVPPPPAALAVFSAALLLEVLSLAVSIRMVFFLEDVMACTKRLLEWIAGWLPRHCIGAILVSLPALAVYSHVTSEYETNIHFPVFTGSAALIAVVHYCNFCQLSSWMRSSLATVVGAGPLLLLYVSLCPDSSVLTSPLDAVQNFSSERNPCNSSVPRDLRRPASLIGQEVVLVFFLLLLLVWFLNREFEVSYRLHYHGDVEADLHRTKIQSMRDQADWLLRNIIPYHVAEQLKVSQTYSKNHDSGGVIFASIVNFSEFYEENYEGGKECYRVLNELIGDFDELLSKPDYSSIEKIKTIGATYMAASGLNTAQAQDGSHPQEHLQILFEFAKEMMRVVDDFNNNMLWFNFKLRVGFNHGPLTAGVIGTTKLLYDIWGDTVNIASRMDTTGVECRIQVSEESYRVLSKMGYDFDYRGTVNVKGKGQMKTYLYPKCTDHRVIPQHQLSISPDIRVQVDGSIGRSPTDEIANLVPSVQYVDKTSLGSDSSTQAKDAHLSPKRPWKEPVKAEERGRFGKAIEKDDCDETGIEEANELTKLNVSKSV

SEQ ID NO: 36707 - protein, 176 aa, Homo sapiens
MTMCSGARLALLVYGIIMHSSVYSSPAAAGLRFPGIRPEEEAYGEDGNPLPDFDGSEPPGAGSPASAPRAAAAWYRPAGRRDVAHGILNEAYRKVLDQLSAGKHLQSLVARGVGGSLGGGAGDDAEPLSKRHSDGIFTDSYSRYRKQMAVKKYLAAVLGKRYKQRVKNKGRRIAYL

SEQ ID NO: 36708 - protein, 176 aa, Homo sapiens; identical to SEQ ID NO: 36707

SEQ ID NO: 36709 - protein, 315 aa, Homo sapiens
MLTKRALQKPCSDRFLRTAQINRSRRPVTSVTSGSSSRSRASPHRPLFLSSASLSAPPSLRVTLPPGSARLQTFEQNTSLGKRVPQLLLLLPLVPAASAQTPTPDGDASRVVTPAQELEEALCPPSYLAALLAAGGVEGMTMCSGARLALLVYGIIMHSSVYSSPAAAGLRFPGIRPEEEAYGEDGNPLPDFDGSEPPGAGSPASAPRAAAAWYRPAGRRDVAHGILNEAYRKVLDQLSAGKHLQSLVARGVGGSLGGGAGDDAEPLSKRHSDGIFTDSYSRYRKQMAVKKYLAAVLGKRYKQRVKNKGRRIAYL

SEQ ID NO: 36710 - protein, 176 aa, Homo sapiens; identical to SEQ ID NO: 36707

SEQ ID NO: 36711 - protein, 468 aa, Homo sapiens
MAGVVHVSLAALLLLPMAPAMHSDCIFKKEQAMCLEKIQRANELMGFNDSSPGCPGMWDNITCWKPAHVGEMVLVSCPELFRIFNPDQVWETETIGESDFGDSNSLDLSDMGVVSRNCTEDGWSEPFPHYFDACGFDEYESETGDQDYYYLSVKALYTVGYSTSLVTLTTAMVILCRFRKLHCTRNFIHMNLFVSFMLRAISVFIKDWILYAEQDSNHCFISTVECKAVMVFFHYCVVSNYFWLFIEGLYLFTLLVETFFPERRYFYWYTIIGWGTPTVCVTVWATLRLYFDDTGCWDMNDSTALWWVIKGPVVGSIMVNFVLFIGIIVILVQKLQSPDMGGNESSIYLRLARSTLLLIPLFGIHYTVFAFSPENVSKRERLVFELGLGSFQGFVVAVLYCFLNGEVQAEIKRKWRSWKVNRYFAVDFKHRHPSLASSGVNGGTQLSILSKSSSQIRMSGLPADNLAT

SEQ ID NO: 36712 - protein, 197 aa, Homo sapiens
MVFFHYCVVSNYFWLFIEGLYLFTLLVETFFPERRYFYWYTIIGWGTPTVCVTVWATLRLYFDDTGCWDMNDSTALWWVIKGPVVGSIMVNFVLFIGIIVILVQKLQSPDMGGNESSIYLTNLSPRVPKKAREDPLPVPSDQHSLPFLSCVQKCYCKPQRAQQHSCKMSELSTITLRLARSTLLLIPLFGIHYTVFA

SEQ ID NO: 36713 - protein, 496 aa, Homo sapiens
MAGVVHVSLAALLLLPMAPAMHSDCIFKKEQAMCLEKIQRANELMGFNDSSPGCPGMWDNITCWKPAHVGEMVLVSCPELFRIFNPDQVWETETIGESDFGDSNSLDLSDMGVVSRNCTEDGWSEPFPHYFDACGFDEYESETGDQDYYYLSVKALYTVGYSTSLVTLTTAMVILCRFRKLHCTRNFIHMNLFVSFMLRAISVFIKDWILYAEQDSNHCFISTVECKAVMVFFHYCVVSNYFWLFIEGLYLFTLLVETFFPERRYFYWYTIIGWGTPTVCVTVWATLRLYFDDTGCWDMNDSTALWWVIKGPVVGSIMVNFVLFIGIIVILVQKLQSPDMGGNESSIYFSCVQKCYCKPQRAQQHSCKMSELSTITLRLARSTLLLIPLFGIHYTVFAFSPENVSKRERLVFELGLGSFQGFVVAVLYCFLNGEVQAEIKRKWRSWKVNRYFAVDFKHRHPSLASSGVNGGTQLSILSKSSSQIRMSGLPADNLAT

SEQ ID NO: 36714 - protein, 524 aa, Homo sapiens
MAGVVHVSLAALLLLPMAPAMHSDCIFKKEQAMCLEKIQRANELMGFNDSSPGCPGMWDNITCWKPAHVGEMVLVSCPELFRIFNPDQVWETETIGESDFGDSNSLDLSDMGVVSRNCTEDGWSEPFPHYFDACGFDEYESETGDQDYYYLSVKALYTVGYSTSLVTLTTAMVILCRFRKLHCTRNFIHMNLFVSFMLRAISVFIKDWILYAEQDSNHCFISTVECKAVMVFFHYCVVSNYFWLFIEGLYLFTLLVETFFPERRYFYWYTIIGWGTPTVCVTVWATLRLYFDDTGCWDMNDSTALWWVIKGPVVGSIMVNFVLFIGIIVILVQKLQSPDMGGNESSIYLTNLSPRVPKKAREDPLPVPSDQHSLPFLSCVQKCYCKPQRAQQHSCKMSELSTITLRLARSTLLLIPLFGIHYTVFAFSPENVSKRERLVFELGLGSFQGFVVAVLYCFLNGEVQAEIKRKWRSWKVNRYFAVDFKHRHPSLASSGVNGGTQLSILSKSSSQIRMSGLPADNLAT

SEQ ID NO: 36715 - protein, 74 aa, Homo sapiens
MAGVVHVSLAALLLLPMAPAMHSDCIFKKEQAMCLEKIQRANELMGFNDSSPGCPGMWDNITCWKPAHVGEMVL

SEQ ID NO: 36716 - protein, 148 aa, Homo sapiens
  VARIANT 1: note = MOD_RES - Any amino acid
XATLRLYFDDTGCWDMNDSTALWWVIKGPVVGSIMVNFVLFIGIIVILVQKLQSPDMGGNESSIYLTNLSPRVPKKAREDPLPVPSDQHSLPFLRLARSTLLLIPLFGIHYTVFAFSPENVSKRERLVFELGLGSFQGFVVAVLYCFL

SEQ ID NO: 36717 - protein, 447 aa, Homo sapiens
MAGVVHVSLAALLLLPMAPAMHSDCIFKKEQAMCLEKIQRANELMGFNDSSPGCPGMWDNITCWKPAHVGEMVLVSCPELFRIFNPDQDMGVVSRNCTEDGWSEPFPHYFDACGFDEYESETGDQDYYYLSVKALYTVGYSTSLVTLTTAMVILCRFRKLHCTRNFIHMNLFVSFMLRAISVFIKDWILYAEQDSNHCFISTVECKAVMVFFHYCVVSNYFWLFIEGLYLFTLLVETFFPERRYFYWYTIIGWGTPTVCVTVWATLRLYFDDTGCWDMNDSTALWWVIKGPVVGSIMVNFVLFIGIIVILVQKLQSPDMGGNESSIYLRLARSTLLLIPLFGIHYTVFAFSPENVSKRERLVFELGLGSFQGFVVAVLYCFLNGEVQAEIKRKWRSWKVNRYFAVDFKHRHPSLASSGVNGGTQLSILSKSSSQIRMSGLPADNLAT

SEQ ID NO: 36718 - protein, 210 aa, Homo sapiens
MGCCSSSDPRREDDLRAREKLKKTKIIFVVGGPGSGKGTQCEKIVQKYGYTHLSTGDLLRSEVSSGSARGKKLSEIMEKGQLVPLETVLDMLRDAMVAKVNTSKGFLIDGYPREVQQGEEFERRIGQPTLLLYVDAGPETMTQRLLKRGETSGRVDDNEETIKKRLETYYKATEPVIAFYEKRGIVRKVNAEGSVDSVFSQVCTHLDALK

SEQ ID NO: 36719 - protein, 194 aa, Homo sapiens
MEEKLKKTKIIFVVGGPGSGKGTQCEKIVQKYGYTHLSTGDLLRSEVSSGSARGKKLSEIMEKGQLVPLETVLDMLRDAMVAKVNTSKGFLIDGYPREVQQGEEFERRIGQPTLLLYVDAGPETMTQRLLKRGETSGRVDDNEETIKKRLETYYKATEPVIAFYEKRGIVRKVNAEGSVDSVFSQVCTHLDALK

SEQ ID NO: 36720 - protein, 194 aa, Homo sapiens; identical to SEQ ID NO: 36719

SEQ ID NO: 36721 - protein, 239 aa, Homo sapiens
MAPSVPAAEPEYPKGIRAVLLGPPGAGKGTQAPRLAENFCVCHLATGDMLRAMVASGSELGKKLKATMDAGKLVSDEMVVELIEKNLETPLCKNGFLLDGFPRTVRQAEMLDDLMEKRKEKLDSVIEFSIPDSLLIRRITGRLIHPKSGRSYHEEFNPPKEPMKDDITGEPLIRRSDDNEKALKIRLQAYHTQTTPLIEYYRKRGIHSAIDASQTPDVVFASILAAFSKATCKDLVMFI

SEQ ID NO: 36722 - protein, 232 aa, Homo sapiens
MAPSVPAAEPEYPKGIRAVLLGPPGAGKGTQAPRLAENFCVCHLATGDMLRAMVASGSELGKKLKATMDAGKLVSDEMVVELIEKNLETPLCKNGFLLDGFPRTVRQAEMLDDLMEKRKEKLDSVIEFSIPDSLLIRRITGRLIHPKSGRSYHEEFNPPKEPMKDDITGEPLIRRSDDNEKALKIRLQAYHTQTTPLIEYYRKRGIHSAIDASQTPDVVFASILAAFSKATS

SEQ ID NO: 36723 - protein, 202 aa, Homo sapiens
MAPSVPAAEPEYPKGIRAVLLGPPGAGKGTQAPRLAENFCVCHLATGDMLRAMVASGSELGKKLKATMDAGKLVSDEMVVELIEKNLETPLCKNGFLLDGFPRTVRQAEMLDDLMEKRKEKLDSVIEFSIPDSLLIRRITGRLIHPKSGRSYHEEFNPPKEPMKDDITGEPLIRRSVIGQAKRSFLRLAKISFDVLIKKALA

SEQ ID NO: 36724 - protein, 157 aa, Homo sapiens
MTRLALHELKNLTQYSWLLDGFPRTLPQAEALDRAYQIDTVINLNVPFEVIKQRLTARWIHPASGRVYNIEFNPPKTVGIDDLTGEPLIQREDDKPETVIKRLKAYEDQTKPVLEYYQKKGVLETFSGTETNKIWPYVYAFLQTKVPQRSQKASVTP

SEQ ID NO: 36725 - protein, 227 aa, Homo sapiens
MGASARLLRAVIMGAPGSGKGTVSSRITTHFELKHLSSGDLLRDNMLRGTEIGVLAKAFIDQGKLIPDDVMTRLALHELKNLTQYSWLLDGFPRTLPQAEALDRAYQIDTVINLNVPFEVIKQRLTARWIHPASGRVYNIEFNPPKTVGIDDLTGEPLIQREDDKPETVIKRLKAYEDQTKPVLEYYQKKGVLETFSGTETNKIWPYVYAFLQTKVPQRSQKASVTP

SEQ ID NO: 36726 - protein, 187 aa, Homo sapiens
MGASARLLRAVIMGAPGSGKGTVSSRITTHFELKHLSSGDLLRDNMLRGTGFPRTLPQAEALDRAYQIDTVINLNVPFEVIKQRLTARWIHPASGRVYNIEFNPPKTVGIDDLTGEPLIQREDDKPETVIKRLKAYEDQTKPVLEYYQKKGVLETFSGTETNKIWPYVYAFLQTKVPQRSQKASVTP

SEQ ID NO: 36727 - protein, 157 aa, Homo sapiens; identical to SEQ ID NO: 36724

SEQ ID NO: 36728 - protein, 536 aa, Homo sapiens
MCSKPEDPVEYLESCLQKVKELGGCDKVKWDTFVSQEKKTLPPLNGGQSRRSFLRNVMPENSNFPYRRYDRLPPIHQFSIESDTDLSETAELIEEYEVFDPTRPRPKIILVIGGPGSGKGTQSLKIAERYGFQYISVGELLRKKIHSTSSNRKWSLIAKIITTGELAPQETTITEIKQKLMQIPDEEGIVIDGFPRDVAQALSFEDQICTPDLVVFLACANQRLKERLLKRAEQQGRPDDNVKATQRRLMNFKQNAAPLVKYFQEKGLIMTFDADRDEDEVFYDISMAVDNKLFPNKEAAAGSSDLDPSMILDTGEIIDTGSDYEDQGDDQLNVFGEDTMGGFMEDLRKCKIIFIIGGPGSGKGTQCEKLVEKYGFTHLSTGELLREELASESERSKLIRDIMERGDLVPSGIVLELLKEAMVASLGDTRGFLIDGYPREVKQGEEFGRRIGDPQLVICMDCSADTMTNRLLQRSRSSLPVDDTTKTIAKRLEAYYRASIPVIAYYETKTQLHKINAEGTPEDVFLQLCTAIDSIF

SEQ ID NO: 36729 - protein, 562 aa, Homo sapiens
MNTNDAKEYLARREIPQLFESLLNGLMCSKPEDPVEYLESCLQKVKELGGCDKVKWDTFVSQEKKTLPPLNGGQSRRSFLRNVMPENSNFPYRRYDRLPPIHQFSIESDTDLSETAELIEEYEVFDPTRPRPKIILVIGGPGSGKGTQSLKIAERYGFQYISVGELLRKKIHSTSSNRKWSLIAKIITTGELAPQETTITEIKQKLMQIPDEEGIVIDGFPRDVAQALSFEDQICTPDLVVFLACANQRLKERLLKRAEQQGRPDDNVKATQRRLMNFKQNAAPLVKYFQEKGLIMTFDADRDEDEVFYDISMAVDNKLFPNKEAAAGSSDLDPSMILDTGEIIDTGSDYEDQGDDQLNVFGEDTMGGFMEDLRKCKIIFIIGGPGSGKGTQCEKLVEKYGFTHLSTGELLREELASESERSKLIRDIMERGDLVPSGIVLELLKEAMVASLGDTRGFLIDGYPREVKQGEEFGRRIGDPQLVICMDCSADTMTNRLLQRSRSSLPVDDTTKTIAKRLEAYYRASIPVIAYYETKTQLHKINAEGTPEDVFLQLCTAIDSIF

SEQ ID NO: 36730 - protein, 176 aa, Homo sapiens
MCSKPEDPVEYLESCLQKVKELGGCDKVKWDTFVSQEKKTLPPLNGGQSRRSFLRNVMPENSNFPYRRYDRLPPIHQFSIESDTDLSETAELIEEYEVFDPTRPRPKIILVIGGPGSGKGTQSLKIAERYGFQYISVGELLRKKIHSTSSNRKWSLIAKIITTGELAPQETTITEI

SEQ ID NO: 36731 - protein, 484 aa, Homo sapiens
MAAGGDHGSPDSYRSPLASRYASPEMCFVFSDRYKFRTWRQLWLWLAEAEQTLGLPITDEQIQEMKSNLENIDFKMAAEEEKRLRHDVMAHVHTFGHCCPKAAGIIHLGATSCYVGDNTDLIILRNALDLLLPKLARVISRLADFAKERASLPTLGFTHFQPAQLTTVGKRCCLWIQDLCMDLQNLKRVRDDLRFRGVKGTTGTQASFLQLFEGDDHKVEQLDKMVTEKAGFKRAFIITGQTYTRKVDIEVLSVLASLGASVHKICTDIRLLANLKEMEEPFEKQQIGSSAMPYKRNPMRSERCCSLARHLMTLVMDPLQTASVQWFERTLDDSANRRICLAEAFLTADTILNTLQNISEGLVVYPKVIERRIRQELPFMATENIIMAMVKAGGSRQDCHEKIRVLSQQAASVVKQEGGDNDLIERIQVDAYFSPIHSQLDHLLDPSSFTGRASQQVQRFLEEEVYPLLKPYESVMKVKAELCL

SEQ ID NO: 36732 - protein, 425 aa, Homo sapiens
MAAGGDHGSPDSYRSPLASRYASPEMCFVFSDRYKFRTWRQLWLWLAEAEQTLGLPITDEQIQEMKSNLENIDFKMAAEEEKRLRHDVMAHVHTFGHCCPKAAGIIHLGATSCYVGDNTDLIILRNALDLLLPKLARVISRLADFAKERASLPTLGFTHFQPAQLTTVGKRCCLWIQDLCMDLQNLKRVRDDLRFRGVKGTTGTQASFLQLFEGDDHKVEQLDKMVTEKAGFKRAFIITGQTYTRKVDIEVLSVLASLGASVHKICTDIRLLANLKEMEEPFEKQQIGSSAMPYKRNPMRSERCCSLARHLMTLVMDPLQTASVQWFERTLDDSANRRICLAEAFLTADTILNTLQNISEGLVVYPKVIERRIRQELPFMATENIIMAMVKAGGSRQVQRFLEEEVYPLLKPYESVMKVKAELCL

SEQ ID NO: 36733 - protein, 498 aa, Homo sapiens
MAAGGDHGSPDSYRSPLASRYASPEMCFVFSDRYKFRTWRQLWLWLAEAEQTLGLPITDEQIQEMKSNLENIDFKMAAEEEKRLRHDVMAHVHTFGHCCPKAAGIIHLGATSCYVGDNTSLILSRGVIKAYCNLRLPGSDSSPVSVSQLARVISRLADFAKERASLPTLGFTHFQPAQLTTVGKRCCLWIQDLCMDLQNLKRVRDDLRFRGVKGTTGTQASFLQLFEGDDHKVEQLDKMVTEKAGFKRAFIITGQTYTRKVDIEVLSVLASLGASVHKICTDIRLLANLKEMEEPFEKQQIGSSAMPYKRNPMRSERCCSLARHLMTLVMDPLQTASVQWFERTLDDSANRRICLAEAFLTADTILNTLQNISEGLVVYPKVIERRIRQELPFMATENIIMAMVKAGGSRQDCHEKIRVLSQQAASVVKQEGGDNDLIERIQVDAYFSPIHSQLDHLLDPSSFTGRASQQVQRFLEEEVYPLLKPYESVMKVKAELCL

SEQ ID NO: 36734 - protein, 304 aa, Homo sapiens
MDLQNLKRVRDDLRFRGVKGTTGTQASFLQLFEGDDHKVEQLDKMVTEKAGFKRAFIITGQTYTRKVDIEVLSVLASLGASVHKICTDIRLLANLKEMEEPFEKQQIGSSAMPYKRNPMRSERCCSLARHLMTLVMDPLQTASVQWFERTLDDSANRRICLAEAFLTADTILNTLQNISEGLVVYPKVIERRIRQELPFMATENIIMAMVKAGGSRQDCHEKIRVLSQQAASVVKQEGGDNDLIERIQVDAYFSPIHSQLDHLLDPSSFTGRASQQVQRFLEEEVYPLLKPYESVMKVKAELCL

SEQ ID NO: 36735 - protein, 127 aa, Homo sapiens
MAAGGDHGSPDSYRSPLASRYASPEMCFVFSDRYKFRTWRQLWLWLAEAEQTLGLPITDEQIQEMKSNLENIDFKMAAEEEKRLRHDVMAHVHTFGHCCPKAAGIIHLGATSCYVGDNTVGACVVYT

SEQ ID NO: 36736 - protein, 456 aa, Homo sapiens
MAFAETYPAASSLPNGDCGRPRARPGGNRVTVVLGAQWGDEGKGKVVDLLAQDADIVCRCQGGNNAGHTVVVDSVEYDFHLLPSGIINPNVTAFIGNGVVIHLPGLFEEAEKNVQKGKGLEGWEKRLIISDRAHIVFDFHQAADGIQEQQRQEQAGKNLGTTKKGIGPVYSSKAARSGLRMCDLVSDFDGFSERFKVLANQYKSIYPTLEIDIEGELQKLKGYMEKIKPMVRDGVYFLYEALHGPPKKILVEGANAALLDIDFGTYPFVTSSNCTVGGVCTGLGMPPQNVGEVYGVVKAYTTRVGIGAFPTEQDNEIGELLQTRGREFGVTTGRKRRCGWLDLVLLKYAHMINGFTALALTKLDILDMFTEIKVGVAYKLDGEIIPHIPANQEVLNKVEVQYKTLPGWNTDISNARAFKELPVNAQNYVRFIEDELQIPVKWIGVGKSRESMIQLF

SEQ ID NO: 36737 - protein, 435 aa, Homo sapiens
MAFAETYPAASSLPNGDCDEGKGKVVDLLAQDADIVCRCQGGNNAGHTVVVDSVEYDFHLLPSGIINPNVTAFIGNGVVIHLPGLFEEAEKNVQKGKGLEGWEKRLIISDRAHIVFDFHQAADGIQEQQRQEQAGKNLGTTKKGIGPVYSSKAARSGLRMCDLVSDFDGFSERFKVLANQYKSIYPTLEIDIEGELQKLKGYMEKIKPMVRDGVYFLYEALHGPPKKILVEGANAALLDIDFGTYPFVTSSNCTVGGVCTGLGMPPQNVGEVYGVVKAYTTRVGIGAFPTEQDNEIGELLQTRGREFGVTTGRKRRCGWLDLVLLKYAHMINGFTALALTKLDILDMFTEIKVGVAYKLDGEIIPHIPANQEVLNKVEVQYKTLPGWNTDISNARAFKELPVNAQNYVRFIEDELQIPVKWIGVGKSRESMIQLF

SEQ ID NO: 36738 - protein, 411 aa, Homo sapiens
MWIQQLLGLSSMSIRWPGRPLGSHAWILIAMFQLAVDLPACEALGPGPEFWLLPRSPPRPPRLWSFRSGQPARVPAPVWSPRPPRVERIHGQMQMPRARRAHRPRDQAAALVPKAGLAKPPAAAKSSPSLASSSSSSSSAVAGGAPEQQALLRRGKRHLQGDGLSSFDSRGSRPTTETEFIAWGPTGDEEALESNTFPGVYGPTTVSILQTRKTTVAATTTTTTTATPMTLQTKGFTESLDPRRRIPGGVSTTEPSTSPSNNGEVTQPPRILGEASGLAVHQIITITVSLIMVIAALITTLVLKNCCAQSGNTRRNSHQRKTNQQEESCQNLTDFPSARVPSSLDIFTAYNETLQCSHECVRASVPVYTDETLHSTTGEYKSTFNGNRPSSSDRHLIPVAFVSEKWFEISC

SEQ ID NO: 36739 - protein, 411 aa, Homo sapiens; identical to SEQ ID NO: 36738

SEQ ID NO: 36740 - protein, 384 aa, Homo sapiens
MVSGDYSLGLNDLNVSPPELTVHVGDSALMGCVFQSTEDKCIFKIDWTLSPGEHAKDEYVLYYYSNLSVPIGRFQNRVHLMGDILCNDGSLLLQDVQEADQGTYICEIRLKGESQVFKKAVVLHVLPEEPKELMVHVGGLIQMGCVFQSTEVKHVTKVEWIFSGRRAKEEIVFRYYHKLRMSVEYSQSWGHFQNRVNLVGDIFRNDGSIMLQGVRESDGGNYTCSIHLGNLVFKKTIVLHVSPEEPRTLVTPAALRPLVLGGNQLVIIVGIVCATILLLPVLILIVKKTCGNKSSVNSTVLVKNTKKTNPEIKEKPCHFERCEGEKHIYSPIIVREVIEEEEPSEKSEATYMTMHPVWPSLRSDRNNSLEKKSGGGMPKTQQAF

SEQ ID NO: 36741 - protein, 394 aa, Homo sapiens
MFCPLKLILLPVLLDYSLGLNDLNVSPPELTVHVGDSALMGCVFQSTEDKCIFKIDWTLSPGEHAKDEYVLYYYSNLSVPIGRFQNRVHLMGDILCNDGSLLLQDVQEADQGTYICEIRLKGESQVFKKAVVLHVLPEEPKELMVHVGGLIQMGCVFQSTEVKHVTKVEWIFSGRRAKEEIVFRYYHKLRMSVEYSQSWGHFQNRVNLVGDIFRNDGSIMLQGVRESDGGNYTCSIHLGNLVFKKTIVLHVSPEEPRTLVTPAALRPLVLGGNQLVIIVGIVCATILLLPVLILIVKKTCGNKSSVNSTVLVKNTKKTNPEIKEKPCHFERCEGEKHIYSPIIVREVIEEEEPSEKSEATYMTMHPVWPSLRSDRNNSLEKKSGGGMPKTQQAF

SEQ ID NO: 36742 - protein, 155 aa, Homo sapiens
MFCPLKLILLPVLLDYSLGLNDLNVSPPELTVHVGDSALMGCVFQSTEDKCIFKIDWTLSPGEHAKDEYVLYYYSNLSVPIGRFQNRVHLMGDILCNDGSLLLQDVQEADQGTYICEIRLKGESQVFKKAVVLHVLPEEPKELMVHVGGLIQMGC

SEQ ID NO: 36743 - protein, 220 aa, Homo sapiens
MGCVFQSTEDKCIFKIDWTLSPGEHAKDEYVLYYYSNLSVPIGRFQNRVHLMGDILCNDGSLLLQDVQEADQGTYICEIRLKGESQVFKKAVVLHVLPEEPKELMVHVGGLIQMGCVFQSTEVKHVTKVEWIFSGRRAKEEIVFRYYHKLRMSVEYSQSWGHFQNRVNLVGDIFRNDGSIMLQGVRESDGGNYTCSIHLGNLVFKKTIVLHVSPEEPRKW

SEQ ID NO: 36744 - protein, 375 aa, Homo sapiens
MSSHKGSVVAQGNGAPASNREADTVELAELGPLLEEKGKRVIANPPKAEEEQTCPVPQEEEEEVRVLTLPLQAHHAMEKMEEFVYKVWEGRWRVIPYDVLPDWLKDNDYLLHGHRPPMPSFRACFKSIFRIHTETGNIWTHLLGFVLFLFLGILTMLRPNMYFMAPLQEKVVFGMFFLGAVLCLSFSWLFHTVYCHSEKVSRTFSKLDYSGIALLIMGSFVPWLYYSFYCSPQPRLIYLSIVCVLGISAIIVAQWDRFATPKHRQTRAGVFLGLGLSGVVPTMHFTIAEGFVKATTVGQMGWFFLMAVMYITGAGLYAARIPERFFPGKFDIWFQSHQIFHVLVVAAAFVHFYGVSNLQEFRYGLEGGCTDDTLL

SEQ ID NO: 36745 - protein, 171 aa, Homo sapiens
MSSHKGSVVAQGNGAPASNREADTVELAELGPLLEEKGKRVIANPPKAEEEQTCPVPQEEEEEVRVLTLPLQAHHAMEKMEEFVYKVWEGRWRVIPYDVLPDWLKDNDYLLHGHRPPMPSFRACFKSIFRIHTETGNIWTHLLATAHLPLHRLCPGHFCHHCGAVGPVCHS

SEQ ID NO: 36746 - protein, 266 aa, Homo sapiens
MSSHKGSVVAQGNGAPASNREADTVELAELGPLLEEKGKRVIANPPKAEEEQTCPVPQEEEEEVRVLTLPLQAHHAMEKMEEFVYKVWEGRWRVIPYDVLPDWLKDNDYLLHGHRPPMPSFRACFKSIFRIHTETGNIWTHLLGFVLFLFLGILTMLRPNMYFMAPLQEKVVFGMFFLGAVLCLSFSWLFHTVYCHSEKVSRTFSKLDYSGIALLIMGSFVPWLYYSFYCSPQPRLIYLSIVCVLGISAIIVAQWDRFATPKHRQT

SEQ ID NO: 36747 - protein, 205 aa, Homo sapiens
MSSHKGSVVAQGNGAPASNREADTVELAELGPLLEEKGKRVIANPPKAEEEQTCPVPQEEEEEVRVLTLPLQAHHAMEKMEEFVYKVWEGRWRVIPYDVLPDWLKDNDYLLHGHRPPMPSFRACFKSIFRIHTETGNIWTHLLGFVLFLFLGILTMLRPNMYFMAPLQEKVVFGMFFLGAVLCLSFSWLFHTVYCHSEKVSRTFS

SEQ ID NO: 36748 - protein, 375 aa, Homo sapiens; identical to SEQ ID NO: 36744

SEQ ID NO: 36749 - protein, 386 aa, Homo sapiens
MNEPTENRLGCSRTPEPDIRLRKGHQLDGTRRGDNDSHQGDLEPILEASVLSSHHKKSSEEHEYSDEAPQEDEGFMGMSPLLQAHHAMEKMEEFVCKVWEGRWRVIPHDVLPDWLKDNDFLLHGHRPPMPSFRACFKSIFRIHTETGNIWTHLLGCVFFLCLGIFYMFRPNISFVAPLQEKVVFGLFFLGAILCLSFSWLFHTVYCHSEGVSRLFSKLDYSGIALLIMGSFVPWLYYSFYCNPQPCFIYLIVICVLGIAAIIVSQWDMFATPQYRGVRAGVFLGLGLSGIIPTLHYVISEGFLKAATIGQIGWLMLMASLYITGAALYAARIPERFFPGKCDIWFHSHQLFHIFVVAGAFVHFHGVSNLQEFRFMIGGGCSEEDAL

SEQ ID NO: 36750 - protein, 244 aa, Homo sapiens
MLLLGAVLLLLALPGHDQETTTQGPGVLLPLPKGACTGWMAGIPGHPGHNGAPGRDGRDGTPGEKGEKGDPGLIGPKGDIGETGVPGAEGPRGFPGIQGRKGEPGEGAYVYRSAFSVGLETYVTIPNMPIRFTKIFYNQQNHYDGSTGKFHCNIPGLYYFAYHITVYMKDVKVSLFKKDKAMLFTYDQYQENNVDQASGSVLLHLEVGDQVWLQVYGEGERNGLYADNDNDSTFTGFLLYHDTN

SEQ ID NO: 36751 - protein, 244 aa, Homo sapiens; identical to SEQ ID NO: 36750

SEQ ID NO: 36752 - protein, 244 aa, Homo sapiens; identical to SEQ ID NO: 36750

SEQ ID NO: 36753 - protein, 496 aa, Homo sapiens
MALWRGSAYAGFLALAVGCVFLLEPELPGSALRSLWSSLCLGPAPAPPGPVSPEGRLAAAWDALIVRPVRRWRRVAVGVNACVDVVLSGVKLLQALGLSPGNGKDHSILHSRNDLEEAFIHFMGKGAAAERFFSDKETFHDIAQVASEFPGAQHYVGGNAALIGQKFAANSDLKVLLCGPVGPKLHELLDDNVFVPPESLQEVDEFHLILEYQAGEEWGQLKAPHANRFIFSHDLSNGAMNMLEVFVSSLEEFQPDLVVLSGLHMMEGQSKELQRKRLLEVVTSISDIPTGIPVHLELASMTNRELMSSIVHQVFPAVTSLGLNEQELLFLTQSASGPHSSLSSWNGVPDVGMVSDILFWILKEHGRSKSRASDLTRIHFHTLVYHILATVDGHWANQLAAVAAGARVAGTQACATETIDTSRVSLRAPQEFMTSHSEAGSRIVLNPNKPVVEWHREGISFHFTPVLVCKDPIRTVGLGDAISAEGLFYSEVHPHY

SEQ ID NO: 36754 - protein, 346 aa, Homo sapiens
MGKGAAAERFFSDKETFHDIAQVASEFPGAQHYVGGNAALIGQKFAANSDLKVLLCGPVGPKLHELLDDNVFVPPESLQEVDEFHLILEYQAGEEWGQLKAPHANRFIFSHDLSNGAMNMLEVFVSSLEEFQPDLVVLSGLHMMEGQSKELQRKRLLEVVTSISDIPTGIPVHLELASMTNRELMSSIVHQQVFPAVTSLGLNEQELLFLTQSASGPHSSLSSWNGVPDVGMVSDILFWILKEHGRSKSRASDLTRIHFHTLVYHILATVDGHWANQLAAVASSCGWDTGLRHRNHRHQPSVSEGTPRVHDFPFGGRLQDCIKPKQASSRMAQRGNILPLHTSIGV

SEQ ID NO: 36755 - protein, 416 aa, Homo sapiens
MALWRGSAYAGFLALGLSPGNGKDHSILHSRNDLEEAFIHFMGKGAAAERFFSDKETFHDIAQVASEFPGAQHYVGGNAALIGQKFAANSDLKVLLCGPVGPKLHELLDDNVFVPPESLQEVDEFHLILEYQAGEEWGQLKAPHANRFIFSHDLSNGAMNMLEVFVSSLEEFQPDLVVLSGLHMMEGQSKELQRKRLLEVVTSISDIPTGIPVHLELASMTNRELMSSIVHQQVFPAVTSLGLNEQELLFLTQSASGPHSSLSSWNGVPDVGMVSDILFWILKEHGRSKSRASDLTRIHFHTLVYHILATVDGHWANQLAAVAAGARVAGTQACATETIDTSRVSLRAPQEFMTSHSEAGSRIVLNPNKPVVEWHREGISFHFTPVLVCKDPIRTVGLGDAISAEGLFYSEVHPHY

SEQ ID NO: 36756 - protein, 222 aa, Homo sapiens
MAASCRVVTSISDIPTGIPVHLELASMTNRELMSSIVHQVFPAVTSLGLNEQELLFLTQSASGPHSSLSSWNGVPDVGMVSDILFWILKEHGRSKSRASDLTRIHFHTLVYHILATVDGHWANQLAAVAAGARVAGTQACATETIDTSRVSLRAPQEFMTSHSEAGSRIVLNPNKPVVEWHREGISFHFTPVLVCKDPIRTVGLGDAISAEGLFYSEVHPHY

SEQ ID NO: 36757 - protein, 181 aa, Homo sapiens
MGNIFANLFKGLFGKKEMRILMVGLDAAGKTTILYKLKLGEIVTTIPTIGFNVETVEYKNISFTVWDVGGQDKIRPLWRHYFQNTQGLIFVVDSNDRERVNEAREELMRMLAEDELRDAVLLVFANKQDLPNAMNAAEITDKLGLHSLRHRNWYIQATCATSGDGLYEGLDWLSNQLRNQK

SEQ ID NO: 36758 - protein, 181 aa, Homo sapiens; identical to SEQ ID NO: 36757

SEQ ID NO: 36759 - protein, 181 aa, Homo sapiens; identical to SEQ ID NO: 36757

SEQ ID NO: 36760 - protein, 172 aa, Homo sapiens
MGNIFANLFKGLFGKKEMRILMVGLDAAGKTTILYKLKLGEIVTTIPTIGFNVETVEYKNISFTVWDVGGQDKIRPLWRHYFQNTQGLIFVVDSNDRERVNEAQDELRDAVLLVFANKQDLPNAMNAAEITDKLGLHSLRHRNWYIQATCATSGDGLYEGLDWLSNQLRNQK

SEQ ID NO: 36761 - protein, 181 aa, Homo sapiens
MGNIFGNLLKSLIGKKEMRILMVGLDAAGKTTILYKLKLGEIVTTIPTIGFNVETVEYKNISFTVWDVGGQDKIRPLWRHYFQNTQGLIFVVDSNDRERVNEAREELMRMLAEDELRDAVLLVFANKQDLPNAMNAAEITDKLGLHSLRHRNWYIQATCATSGDGLYEGLDWLANQLKNKK

SEQ ID NO: 36762 - protein, 144 aa, Homo sapiens
MGNIFGNLLKSLIGKKEMRILMVGLDAAGKTTILYKLKLGEIVTTIPTIGLIFVVDSNDRERVNEAREELMRMLAEDELRDAVLLVFANKQDLPNAMNAAEITDKLGLHSLRHRNWYIQATCATSGDGLYEGLDWLANQLKNKK

SEQ ID NO: 36763 - protein, 50 aa, Homo sapiens
MGNIFGNLLKSLIGKKEMRILMVGLDAAGKTTILYKLKLGEIVTTIPTIG

SEQ ID NO: 36764 - protein, 102 aa, Homo sapiens
MGNIFGNLLKSLIGKKEMRILMVGLDAAGKTTILYKLKLGEIVTTIPTIGFNVETVEYKNISFTVWDVGGQDKIRPLWRHYFQNTQGLIFVVDSNDRERVNE

SEQ ID NO: 36765 - protein, 181 aa, Homo sapiens; identical to SEQ ID NO: 36761

SEQ ID NO: 36766 - protein, 40 aa, Homo sapiens
MGNIFGNLLKSLIGKKEMRILMVGLDAAGKTTILYKLKLG

SEQ ID NO: 36767 - protein, 180 aa, Homo sapiens
MGLTISSLFSRLFGKKQMRILMVGLDAAGKTTILYKLKLGEIVTTIPTIGFNVETVEYKNICFTVWDVGGQDRIRPLWKHYFQNTQGLIFVVDSNDRERIQEVADELQKMLLVDELRDAVLLLFANKQDLPNAMAISEMTDKLGLQSLRNRTWYVQATCATQGTGLYEGLDWLSNELSKR

SEQ ID NO: 36768 - protein, 127 aa, Homo sapiens
MGLTISSLFSRLFGKKQMRILMVGLDAAGKTTILYKLKLGEIVTTIPTIGFNVETVEYKNICFTVWDVGGQDRIRPLWKHYFQNTQGLIFVVDSNDRERIQEVADELQKMLLVDELRDAVLLLFANK

SEQ ID NO: 36769 - protein, 22 aa, Homo sapiens
MGLTISSLFSRLFGKKQMRILM

SEQ ID NO: 36770 - protein, 180 aa, Homo sapiens
MGLTVSALFSRIFGKKQMRILMVGLDAAGKTTILYKLKLGEIVTTIPTIGFNVETVEYKNICFTVWDVGGQDKIRPLWRHYFQNTQGLIFVVDSNDRERVQESADELQKMLQEDELRDAVLLVFANKQDMPNAMPVSELTDKLGLQHLRSRTWYVQATCATQGTGLYDGLDWLSHELSKR

SEQ ID NO: 36771 - protein, 414 aa, Homo sapiens
MASPRTRKVLKEVRVQDENNVCFECGAFNPQWVSVTYGIWICLECSGRHRGLGVHLSFVRSVTMDKWKDIELEKMKAGGNAKFREFLESQEDYDPCWSLQEKYNSRAAALFRDKVVALAEGREWSLESSPAQNWTPPQPRTLPSMVHRVSGQPQSVTASSDKAFEDWLNDDLGSYQGAQGNRYVGFGNTPPPQKKEDDFLNNAMSSLYSGWSSFTTGASRFASAAKEGATKFGSQASQKFWGHKQQPEPASELGHSLNENVLKPAQEKVKEGKIFDDVSSGVSQLASKGVGSKGWRDVTTFFSGKAEGPLDSPSEGHSYQNSGLDHFQNSNIDQSFWETFGSAEPTKTRKSPSSDSWTCADTSTERRSSDSWEVWGSASTNRNSNSDGGEGGEGTKKAVPPAVPTDDGWDNQNW

SEQ ID NO: 36772 - protein, 403 aa, Homo sapiens
MASPRTRKVLKEVRVQDENNVCFECGAFNPQWVSVTYGIWICLECSGRHRGLGVHLSFVRSVTMDKWKDIELEKMKAGGNAKFREFLESQEDYDPCWSLQEKYNSRAAALFRDKVVALAEGREWSLESSPAQNWTPPQPRTLPSMVHRVSGQPQSVTASSDKAFEDWLNDDLGSYQGAQGNRYVGFGNTPPPQKKEDDFLNNAMSSLYSGWSSFTTGASRFASAAKEGATKFGSQASQKASELGHSLNENVLKPAQEKVKEGKIFDDVSSGVSQLASKCQRRLCCHQSHCSAGHLGRAFCPVSWHEALCGQTGREEQASLLPPKHVVGALEVCARGCPRCHVPHTPGTAAEWPGRLCLSRESVVRDGGTSPPFFRGKQRAPWTAPRRATVIRTAVWTTSKTAT

SEQ ID NO: 36773 - protein, 406 aa, Homo sapiens
MASPRTRKVLKEVRVQDENNVCFECGAFNPQWVSVTYGIWICLECSGRHRGLGVHLSFVRSVTMDKWKDIELEKMKAGGNAKFREFLESQEDYDPCWSLQEKYNSRAAALFRDKVVALAEGREWSLESSPAQNWTPPQPRTLPSMVHRVSGQPQSVTASSDKAFEDWLNDDLGSYQGAQGNRYVGFGNTPPPQKKEDDFLNNAMSSLYSGWSSFTTGASRFASAAKEGATKFGSQASQKASELGHSLNENVLKPAQEKVKEGKIFDDVSSGVSQLASKVQGVGSKGWRDVTTFFSGKAEGPLDSPSEGHSYQNSGLDHFQNSNIDQSFWETFGSAEPTKTRKSPSSDSWTCADTSTERRSSDSWEVWGSASTNRNSNSDGGEGGEGTKKAVPPAVPTDDGWDNQNW

SEQ ID NO: 36774 - protein, 293 aa, Homo sapiens
MLSSESSWSLRRITILAGPCRRSTTAEPRPSLGIRVSGQPQSVTASSDKAFEDWLNDDLGSYQGAQGNRYVGFGNTPPPQKKEDDFLNNAMSSLYSGWSSFTTGASRFASAAKEGATKFGSQASQKASELGHSLNENVLKPAQEKVKEGKIFDDVSSGVSQLASKVQGVGSKGWRDVTTFFSGKAEGPLDSPSEGHSYQNSGLDHFQNSNIDQSFWETFGSAEPTKTRKSPSSDSWTCADTSTERRSSDSWEVWGSASTNRNSNSDGGEGGEGTKKAVPPAVPTDDGWDNQNW

SEQ ID NO: 36775 - protein, 361 aa, Homo sapiens
MRTTFVRSVTMDKWKDIELEKMKAGGNAKFREFLESQEDYDPCWSLQEKYNSRAAALFRDKVVALAEGREWSLESSPAQNWTPPQPRTLPSMVHRVSGQPQSVTASSDKAFEDWLNDDLGSYQGAQGNRYVGFGNTPPPQKKEDDFLNNAMSSLYSGWSSFTTGASRFASAAKEGATKFGSQASQKFWGHKQQPEPASELGHSLNENVLKPAQEKVKEGKIFDDVSSGVSQLASKGVGSKGWRDVTTFFSGKAEGPLDSPSEGHSYQNSGLDHFQNSNIDQSFWETFGSAEPTKTRKSPSSDSWTCADTSTERRSSDSWEVWGSASTNRNSNSDGGEGGEGTKKAVPPAVPTDDGWDNQNW

SEQ ID NO: 36776 - protein, 261 aa, Homo sapiens
MASPRTRKVLKEVRVQDENNVCFECGAFNPQWVSVTYGIWICLECSGRHRGLGVHLSFVRSVTMDKWKDIELEKMKAGGNAKFREFLESQEDYDPCWSLQEKYNSRAAALFRDKVVALAEGREWSLESSPAQNWTPPQPRTLPSMVHRVSGQPQSVTASSDKAFEDWLNDDLGSYQGAQGNRYVGFGNTPPPQKKEDDFLNNAMSSLYSGWSSFTTGASRFASAAKEGATKFGSQASQKASELGHSLNENVLKPAQEKVKE

SEQ ID NO: 36777 - protein, 79 aa, Homo sapiens
MASPRTRKVLKEVRVQDENNVCFECGAFNPQWVSVTYGIWICLECSGRHRGLGVHLSFVRSVTMDKWKDIELEKMKAGG

SEQ ID NO: 36778 - protein, 122 aa, Homo sapiens
MASPRTRKVLKEVRVQDENNVCFECGAFNPQWVSVTYGIWICLECSGRHRGLGVHLSFVRSVTMDKWKDIELEKMKAGGNAKFREFLESQEDYDPCWSLQEKYNSRAAALFRDKVVALAEGR

SEQ ID NO: 36779 - protein, 252 aa, Homo sapiens
MVASMRLAYQELQIDRKKEEKKLQNLEGKKREQAERLGMGLVSRSSVSHSVLSEMQVIEQETPVSAKSSRSQLDLFDDVGTFASGPPKYKDNPFSLGESFGSRWDTDAAWGMDRVEEKEPEVTISSIRPISERATNRREVESRSSGLESSEARQKFAGAKAISSDMFFGREVDAEYEARSRLQQLSGSSAISSSDLFGDMDGAHGAGSVSLGNVLPTADIAQFKQGVKSVAGKMAVLANGVMNSLQDRYGSY

SEQ ID NO: 36780 - protein, 414 aa, Homo sapiens
MQVGGNANATAFFRQHGCTANDANTKYNSRAAQMYREKIRQLGSAALARHGTDPPAWDAPATEPSGTQQPAPSTESSGLAQPEHGPNTDLLGTSPKASLELKSSIIGKKKPAAAKKGLGAKKGLGAQKVSSQSFSEIERQAQVAEKLREQQAADAKKQAEESMVASMRLAYQELQIDRKKEEKKLQNLEGKKREQAERLGMGLVSRSSVSHSVLSEMQVIEQETPVSAKSSRSQLDLFDDVGTFASGPPKYKDNPFSLGESFGSRWDTDAAWGMDRVEEKEPEVTISSIRPISERATNRREVESRSSGLESSEARQKFAGAKAISSDMFFGREVDAEYEARSRLQQLSGSSAISSSDLFGDMDGAHGAGSVSLGNVLPTADIAQFKQGVKSVAGKMAVLANGVMNSLQDRYGSY

SEQ ID NO: 36781 - protein, 385 aa, Homo sapiens
MAAEPNKTEIQTLFKRLRAVPTNKACFDCGAKNPSWASITYGVFLCIDCSGVHRSLGVHLSFIRSTELDSNWNWFQLRCMQVGGNANALGAKKGLGAQKVSSQSFSEIERQAQVAEKLREQQAADAKKQAEESMVASMRLAYQELQIDRKKEEKKLQNLEGKKREQAERLGMGLVSRSSVSHSVLSEMQVIEQETPVSAKSSRSQLDLFDDVGTFASGPPKYKDNPFSLGESFGSRWDTDAAWGMDRVEEKEPEVTISSIRPISERATNRREVESRSSGLESSEARQKFAGAKAISSDMFFGREVDAEYEARSRLQQLSGSSAISSSDLFGDMDGAHGAGSVSLGNVLPTADIAQFKQGVKSVAGKMAVLANGVMNSLQDRYGSY

SEQ ID NO: 36782 - protein, 521 aa, Homo sapiens
MAAEPNKTEIQTLFKRLRAVPTNKACFDCGAKNPSWASITYGVFLCIDCSGVHRSLGVHLSFIRSTELDSNWNWFQLRCMQVGGNANATAFFRQHGCTANDANTKYNSRAAQMYREKIRQLGSAALARHGTDLWIDNMSSAVPNHSPEKKDSDFFTEHTQPPAWDAPATEPSGTQQPAPSTESSGLAQPEHGPNTDLLGTSPKASLELKSSIIGKKKPAAAKKGLGAKKGLGAQKVSSQSFSEIERQAQVAEKLREQQAADAKKQAEESMVASMRLAYQELQIDRKKEEKKLQNLEGKKREQAERLGMGLVSRSSVSHSVLSEMQVIEQETPVSAKSSRSQLDLFDDVGTFASGPPKYKDNPFSLGESFGSRWDTDAAWGMDRVEEKEPEVTISSIRPISERATNRREVESRSSGLESSEARQKFAGAKAISSDMFFGREVDAEYEARSRLQQLSGSSAISSSDLFGDMDGAHGAGSVSLGNVLPTADIAQFKQGVKSVAGKMAVLANGVMNSLQDRYGSY

SEQ ID NO: 36783 - protein, 516 aa, Homo sapiens
MGDPSKQDILTIFKRLRSVPTNKVCFDCGAKNPSWASITYGVFLCIDCSGSHRSLGVHLSFIRSTELDSNWSWFQLRCMQVGGNASASSFFHQHGCSTNDTNAKYNSRAAQLYREKIKSLASQATRKHGTDLWLDSCVVPPLSPPPKEEDFFASHVSPEVSDTAWASAIAEPSSLTSRPVETTLENNEGGQEQGPSVEGLNVPTKATLEVSSIIKKKPNQAKKGLGAKKGSLGAQKLANTCFNEIEKQAQAADKMKEQEDLAKVVSKEESIVSSLRLAYKDLEIQMKKDEKMNISGKKNVDSDRLGMGFGNCRSVISHSVTSDMQTIEQESPIMAKPRKKYNDDSDDSYFTSSSSYFDEPVELRSSSFSSWDDSSDSYWKKETSKDTETVLKTTGYSDRPTARRKPDYEPVENTDEAQKKFGNVKAISSDMYFGRQSQADYETRARLERLSASSSISSADLFEEPRKQPAGNYSLSSVLPNAPDMAQFKQGVRSVAGKLSVFANGVVTSIQDRYGS

SEQ ID NO: 36784 - protein, 444 aa, Homo sapiens
MGDPSKQDILTIFKRLRSVPTNKVCFDCGAKNPSWASITYGVFLCIDCSGSHRSLGVHLSFIRSTELDSNWSWFQLRCMQVGGNASAVSDTAWASAIAEPSSLTSRPVETTLENNEGGQEQGPSVEGLNVPTKATLEVSSIIKKKPNQAKKGLGAKKGSLGAQKLANTCFNEIEKQAQAADKMKEQEDLAKVVSKEESIVSSLRLAYKDLEIQMKKDEKMNISGKKNVDSDRLGMGFGNCRSVISHSVTSDMQTIEQESPIMAKPRKKYNDDSDDSYFTSSSSYFDEPVELRSSSFSSWDDSSDSYWKKETSKDTETVLKTTGYSDRPTARRKPDYEPVENTDEAQKKFGNVKAISSDMYFGRQSQADYETRARLERLSASSSISSADLFEEPRKQPAGNYSLSSVLPNAPDMAQFKQGVRSVAGKLSVFANGVVTSIQDRYGS

SEQ ID NO: 36785 - protein, 472 aa, Homo sapiens
MGDPSKQDILTIFKRLRSVPTNKVCFDCGAKNPSWASITYGVFLCIDCSGSHRSLGVHLSFIRSTELDSNWSWFQLRCMQVGGNASALWLDSCVVPPLSPPPKEEDFFASHVSPEVSDTAWASAIAEPSSLTSRPVETTLENNEGGQEQGPSVEGLNVPTKATLEVSSIIKKKPNQAKKGLGAKKGSLGAQKLANTCFNEIEKQAQAADKMKEQEDLAKVVSKEESIVSSLRLAYKDLEIQMKKDEKMNISGKKNVDSDRLGMGFGNCRSVISHSVTSDMQTIEQESPIMAKPRKKYNDDSDDSYFTSSSSYFDEPVELRSSSFSSWDDSSDSYWKKETSKDTETVLKTTGYSDRPTARRKPDYEPVENTDEAQKKFGNVKAISSDMYFGRQSQADYETRARLERLSASSSISSADLFEEPRKQPAGNYSLSSVLPNAPDMAQFKQGVRSVAGKLSVFANGVVTSIQDRYGS

SEQ ID NO: 36786 - protein, 273 aa, Homo sapiens
  VARIANT 1: note = MOD_RES - Any amino acid
XLALFQVSDTAWASAIAEPSSLTSRPVETTLENNEGGQEQGPSVEGLNVPTKATLEVSSIIKKKPNQAKKGLGAKKGSLGAQKLANTCFNEIEKQAQAADKMKEQEDLAKVVSKEESIVSSLRLAYKDLEIQMKKDEKMNISGKKNVDSDRLGMGFGNCRSVISHSVTSDMQTIEQESPIMAKPRKKYNDDSDDSYFTSSSRPTARRKPDYEPVENTDEAQKKFGNVKAISSDMYFGRQSQADYETRARLERLSASSSISSADLFEEPRKQPA

SEQ ID NO: 36787 - protein, 152 aa, Homo sapiens
MGDPSKQDILTIFKRLRSVPTNKVCFDCGAKNPSWASITYGVFLCIDCSGSHRSLGVHLSFIRSTELDSNWSWFQLRCMQVGGNASAVSDTAWASAIAEPSSLTSRPVETTLENNEGGQEQGPSVEGLNVPTKATLEVSSIIKKKPNQAKKG

SEQ ID NO: 36788 - protein, 1849 aa, Homo sapiens
MYEGKKTKNMFLTRALEKILADKEVKKAHHSQLRKACEVALEEIKAETEKQSPPHGEAKAGSSTLPPVKSKTNFIEADKYFLPFELACQSKCPRIVSTSLDCLQKLIAYGHLTGNAPDSTTPGKKLIDRIIETICGCFQGPQTDEGVQLQIIKALLTAVTSQHIEIHEGTVLQAVRTCYNIYLASKNLINQTTAKATLTQMLNVIFARMENQALQEAKQMEKERHRQHHHLLQSPVSHHEPESPQLRYLPPQTVDHISQEHEGDLDLHTNDVDKSLQDDTEPENGSDISSAENEQTEADQATAAETLSKNEVLYDGENHDCEEKPQDIVQNIVEEMVNIVVGDMGEGTTINASADGNIGTIEDGSDSENIQANGIPGTPISVAYTPSLPDDRLSVSSNDTQESGNSSGPSPGAKFSHILQKDAFLVFRSLCKLSMKPLSDGPPDPKSHELRSKILSLQLLLSILQNAGPIFRTNEMFINAIKQYLCVALSKNGVSSVPEVFELSLSIFLTLLSNFKTHLKMQIEVFFKEIFLYILETSTSSFDHKWMVIQTLTRICADAQSVVDIYVNYDCDLNAANIFERLVNDLSKIAQGRGSQELGMSNVQELSLRKKGLECLVSILKCMVEWSKDQYVNPNSQTTLGQEKPSEQEMSEIKHPETINRYGSLNSLESTSSSGIGSYSTQMSGTDNPEQFEVLKQQKEIIEQGIDLFNKKPKRGIQYLQEQGMLGTTPEDIAQFLHQEERLDSTQVGEFLGDNDKFNKEVMYAYVDQHDFSGKDFVSALRMFLEGFRLPGEAQKIDRLMEKFAARYLECNQGQTLFASADTAYVLAYSIIMLTTDLHSPQVKNKMTKEQYIKMNRGINDSKDLPEEYLSAIYNEIAGKKISMKETKELTIPTKSSKQNVASEKQRRLLYNLEMEQMAKTAKALMEAVSHVQAPFTSATHLEHVRPMFKLAWTPFLAAFSVGLQDCDDTEVASLCLEGIRCAIRIACIFSIQLERDAYVQALARFTLLTVSSGITEMKQKNIDTIKTLITVAHTDGNYLGNSWHEILKCISQLELAQLIGTGVKPRYISGTVRGREGSLTGTKDQAPDEFVGLGLVGGNVDWKQIASIQESIGETSSQSVVVAVDRIFTGSTRLDGNAIVDFVRWLCAVSMDELLSTTHPRMFSLQKIVEISYYNMGRIRLQWSRIWEVIGDHFNKVGCNPNEDVAIFAVDSLRQLSMKFLEKGELANFRFQKDFLRPFEHIMKRNRSPTIRDMVVRCIAQMVNSQAANIRSGWKNIFSVFHLAASDQDESIVELAFQTTGHIVTLVFEKHFPATIDSFQDAVKCLSEFACNAAFPDTSMEAIRLIRHCAKYVSDRPQAFKEYTSDDMNVAPEDRVWVRGWFPILFELSCIINRCKLDVRTRGLTVMFEIMKTYGHTYEKHWWQDLFRIVFRIFDNMKLPEQQTEKAEWMTTTCNHALYAICDVFTQYLEVLSDVLLDDIFAQLYWCVQQDNEQLARSGTNCLENVVILNGEKFTLEIWDKTCNCTLDIFKTTIPHALLTWRPNSGETAPPPPSPVSEKPLDTISQKSVDIHDSIQPRSVDNRPQAPLVSASAVNEEVSKIKSTAKFPEQKLFAALLIKCVVQLELIQTIDNIVFFPATSKKEDAENLAAAQRDAVDFDVRVDTQDQGMYRFLTSQQLFKLLDCLLESHRFAKAFNSNNEQRTALWKAGFKGKSKPNLLKQETSSLACGLRILFRMYMDESRVSAWEEVQQRLLNVCSEALSYFLTLTSESHREAWTNLLLLFLTKVLKISDNRFKAHASFYYPLLCEIMQFDLIPELRAVLRRFFLRIGVVFQISQPPEQELGINKQ

SEQ ID NO: 36789 - protein, 1785 aa, Homo sapiens
MQESQTKSMFVSRALEKILADKEVKRPQHSQLRRACQVALDEIKAEIEKQRLGTAAPPKANFIEADKYFLPFELACQSKSPRVVSTSLDCLQKLIAYGHITGNAPDSGAPGKRLIDRIVETICSCFQGPQTDEGVQLQIIKALLTAVTSPHIEIHEGTILQTVRTCYNIYLASKNLINQTTAKATLTQMLNVIFTRMENQVLQEARELEKPIQSKPQSPVIQAAAVSPKFVRLKHSQAQSKPTTPEKTDLTNGEHARSDSGKVSTENGDAPRERGSSLSGTDDGAQEVVKDILEDVVTSAIKEAAEKHGLTEPERVLGELECQECAIPPGVDENSQTNGIADDRQSLSSADNLESDAQGHQVAARFSHVLQKDAFLVFRSLCKLSMKPLGEGPPDPKSHELRSKVVSLQLLLSVLQNAGPVFRTHEMFINAIKQYLCVALSKNGVSSVPDVFELSLAIFLTLLSNFKMHLKMQIEVFFKEIFLNILETSTSSFEHRWMVIQTLTRICADAQCVVDIYVNYDCDLNAANIFERLVNDLSKIAQGRSGHELGMTPLQELSLRKKGLECLVSILKCMVEWSKDLYVNPNHQTSLGQERLTDQEIGDGKGLDMARRCSVTSMESTVSSGTQTTVQDDPEQFEVIKQQKEIIEHGIELFNKKPKRGIQFLQEQGMLGTSVEDIAQFLHQEERLDSTQVGDFLGDSARFNKEVMYAYVDQLDFCEKEFVSALRTFLEGFRLPGEAQKIDRLMEKFAARYIECNQGQTLFASADTAYVLAYSIIMLTTDLHSPQVKNKMTKEQYIKMNRGINDSKDLPEEYLSSIYEEIEGKKIAMKETKELTIATKSTKQNVASEKQRRLLYNLEMEQMAKTAKALMEAVSHAKAPFTSATHLDHVRPMFKLVWTPLLAAYSIGLQNCDDTEVASLCLEGIRCAIRIACIFGMQLERDAYVQALARFSLLTASSSITEMKQKNIDTIKTLITVAHTDGNYLGNSWHEILKCISQLELAQLIGTGVKTRYLSGSGREREGSLKGHTLAGEEFMGLGLGNLVSGGVDKRQMASFQESVGETSSQSVVVAVDRIFTGSTRLDGNAIVDFVRWLCAVSMDELASPHHPRMFSLQKIVEISYYNMNRIRLQWSRIWHVIGDHFNKVGCNPNEDVAIFAVDSLRQLSMKFLEKGELANFRFQKDFLRPFEHIMKKNRSPTIRDMAIRCIAQMVNSQAANIRSGWKNIFAVFHQAASDHDGNIVELAFQTTCHIVTTIFQHHFPAAIDSFQDAVKCLSEFACNAAFPDTSMEAIRLIRFCGKYVSERPRVLQEYTSDDMNVAPGDRVWVRGWFPILFELSCIINRCKLDVRTRGLTVMFEIMKSYGHTFEKHWWQDLFRIVFRIFDNMKLPEQLSEKSEWMTTTCNHALYAICDVFTQFYEALNEVLLSDVFAQLQWCVKQDNEQLARSGTNCLENLVISNGEKFSPEVWDETCNCMLDIFKTTIPHVLLTWRPVGMEEDSSEKHLDVDLDRQSLSSIDKNPSERGQSQLSNPTDDSWKGRPYANQKLFASLLIKCVVQLELIQTIDNIVFYPATSKKEDAEHMVAAQQDTLDADIHIETEDQGMYKYMSSQHLFKLLDCLQESHSFSKAFNSNYEQRTVLWRAGFKGKSKPNLLKQETSSLACCLRILFRMYVDENRRDSWEEIQQRLLTVCSEALAYFITVNSESHREAWTSLLLLLLTKTLKINDEKFKAHASMYYPYLCEIMQFDLIPELRAVLRKFFLRIGVVYKIWIPEEPSQVPAALSPVW

SEQ ID NO: 36790 - protein, 832 aa, Homo sapiens
MQESQTKSMFVSRALEKILADKEVKRPQHSQLRRACQVALDEIKAEIEKQRLGTAAPPKANFIEADKYFLPFELACQSKSPRVVSTSLDCLQKLIAYGHITGNAPDSGAPGKRLIDRIVETICSCFQGPQTDEGVQLQIIKALLTAVTSPHIEIHEGTILQTVRTCYNIYLASKNLINQTTAKATLTQMLNVIFTRMENQVLQEARELEKPIQSKPQSPVIQAAAVSPKFVRLKHSQAQSKPTTPEKTDLTNGEHARSDSGKVSTENGDAPRERGSSLSGTDDGAQEVVKDILEDVVTSAIKEAAEKHGLTEPERVLGELECQECAIPPGVDENSQTNGIADDRQSLSSADNLESDAQGHQVAARFSHVLQKDAFLVFRSLCKLSMKPLGEGPPDPKSHELRSKVVSLQLLLSVLQNAGPVFRTHEMFINAIKQYLCVALSKNGVSSVPDVFELSLAIFLTLLSNFKMHLKMQIEVFFKEIFLNILETSTSSFEHRWMVIQTLTRICADAQCVVDIYVNYDCDLNAANIFERLVNDLSKIAQGRSGHELGMTPLQELSLRKKGLECLVSILKCMVEWSKDLYVNPNHQTSLGQERLTDQEIGDGKGLDMARRCSVTSMESTVSSGTQTTVQDDPEQFEVIKQQKEIIEHGIELFNKKPKRGIQFLQEQGMLGTSVEDIAQFLHQEERLDSTQVGDFLGDSARFNKEVMYAYVDQLDFCEKEFVSALRTFLEGFRLPGEAQKIDRLMEKFAARYIECNQGQTLFASADTAYVLAYSIIMLTTDLHSPQVKNKMTKEQYIKMNRGINDSKDLPEEYLSSIYEEIEGKKIAIKKN

SEQ ID NO: 36791 - protein, 196 aa, Homo sapiens
MGSVNSRGHKAEAQVVMMGLDSAGKTTLLYKLKGHQLVETLPTVGFNVEPLKAPGHVSLTLWDVGGQAPLRASWKDYLEGTDILVYVLDSTDEARLPESAAELTEVLNDPNMAGVPFLVLANKQEAPDALPLLKIRNRLSLERFQDHCWELRGCSALTGEGLPEALQSLWSLLKSRSCMCLQARAHGAERGDSKRS

SEQ ID NO: 36792 - protein, 321 aa, Homo sapiens
MFSLMASCCGWFKRWREPVRLANKQDKEGALGEADVIECLSLEKLVNEHKCLCQIEPCSAISGYGKKIDKSIKKGLYWLLHVIARDFDALNERIQKETTEQRALEEQEKQERAERVRKLREERKQNEQEQAELDGTSGLAELDPEPTNPFQPIASVIIENEGKLEREKKNQKMEKDSDGCHLKHKMEHEQIETQGQVNHNGQKNNEFGLVENYKEALTQQLKNEDETDRPSLESANGKKKTKKLRMKRNHRVEPLNIDDCAPESPTPPPPPPPVGWGTPKVTRLPKLEPLGETHHNDFYRKPLPPLAVPQRPNSDAHDVIS

SEQ ID NO: 36793 - protein, 428 aa, Homo sapiens
MFSLMASCCGWFKRWREPVRKVTLLMVGLDNAGKTATAKGIQGEYPEDVAPTVGFSKINLRQGKFEVTIFDLGGGIRIRGIWKNYYAESYGVIFVVDSSDEERMEETKEAMSEMLRHPRISGKPILVLANKQDKEGALGEADVIECLSLEKLVNEHKCLCQIEPCSAISGYGKKIDKSIKKGLYWLLHVIARDFDALNERIQKETTEQRALEEQEKQERAERVRKLREERKQNEQEQAELDGTSGLAELDPEPTNPFQPIASVIIENEGKLEREKKNQKMEKDSDGCHLKHKMEHEQIETQGQVNHNGQKNNEFGLVENYKEALTQQLKNEDETDRPSLESANGKKKTKKLRMKRNHRVEPLNIDDCAPESPTPPPPPPPVGWGTPKVTRLPKLEPLGETHHNDFYRKPLPPLAVPQRPNSDAHDVIS

SEQ ID NO: 36794 - protein, 428 aa, Homo sapiens; identical to SEQ ID NO: 36793

SEQ ID NO: 36795 - protein, 325 aa, Homo sapiens
MEETKEAMSEMLRHPRISGKPILVLANKQDKEGALGEADVIECLSLEKLVNEHKCLCQIEPCSAISGYGKKIDKSIKKGLYWLLHVIARDFDALNERIQKETTEQRALEEQEKQERAERVRKLREERKQNEQEQAELDGTSGLAELDPEPTNPFQPIASVIIENEGKLEREKKNQKMEKDSDGCHLKHKMEHEQIETQGQVNHNGQKNNEFGLVENYKEALTQQLKNEDETDRPSLESANGKKKTKKLRMKRNHRVEPLNIDDCAPESPTPPPPPPPVGWGTPKVTRLPKLEPLGETHHNDFYRKPLPPLAVPQRPNSDAHDVIS

SEQ ID NO: 36796 - protein, 149 aa, Homo sapiens
MEKDSDGCHLKHKMEHEQIETQGQVNHNGQKNNEFGLVENYKEALTQQLKNEDETDRPSLESANGKKKTKKLRMKRNHRVEPLNIDDCAPESPTPPPPPPPVGWGTPKVTRLPKLEPLGETHHNDFYRKPLPPLAVPQRPNSDAHDVIS

SEQ ID NO: 36797 - protein, 192 aa, Homo sapiens
MGSLGSKNPQTKQAQVLLLGLDSAGKSTLLYKLKLAKDITTIPTIGFNVEMIELERNLSLTVWDVGGQEKMRTVWGCYCENTDGLVYVVDSTDKQRLEESQRQFEHILKNEHIKNVPVVLLANKQDMPGALTAEDITRMFKVKKLCSDRNWYVQPCCALTGEGLAQGFRKLTGFVKSHMKSRGDTLAFFKQN

SEQ ID NO: 36798 - protein, 184 aa, Homo sapiens
MGLLTILKKMKQKERELRLLMLGLDNAGKTTILKKFNGEDIDTISPTLGFNIKTLEHRGFKLNIWDVGGQKSLRSYWRNYFESTDGLIWVVDSADRQRMQDCQRELQSLLVEERLAGATLLIFANKQDLPGALSSNAIREVLELDSIRSHHWCIQGCSAVTGENLLPGIDWLLDDISSRIFTAD

SEQ ID NO: 36799 - protein, 184 aa, Homo sapiens; identical to SEQ ID NO: 36798

SEQ ID NO: 36800 - protein, 157 aa, Homo sapiens
MGLLTILKKMKQKERELRLLMLGLDNAGKTTILKKFNGEDIDTISPTLGFNIKTLEHRGFKLNIWDVGGQKSLRSYWRNYFESTDGLIWVVDSADRQRMQDCQRELQSLLVEEVLELDSIRSHHWCIQGCSAVTGENLLPGIDWLLDDISSRIFTAD

SEQ ID NO: 36801 - protein, 182 aa, Homo sapiens
MGLLSILRKLKSAPDQEVRILLLGLDNAGKTTLLKQLASEDISHITPTQGFNIKSVQSQGFKLNVWDIGGQRKIRPYWKNYFENTDILIYVIDSADRKRFEETGQELAELLEEEKLSCVPVLIFANKQDLLTAAPASEIAEGLNLHTIRDRVWQIQSCSALTGEGVQDGMNWVCKNVNAKKK

SEQ ID NO: 36802 - protein, 201 aa, Homo sapiens
MGNHLTEMAPTASSFLPHFQALHVVVIGLDSAGKTSLLYRLKFKEFVQSVPTKGFNTEKIRVPLGGSRGITFQVWDVGGQEKLRPLWRSYTRRTDGLVFVVDAAEAERLEEAKVELHRISRASDNQGVPVLVLANKQDQPGALSAAEVEKRLAVRELAAATLTHVQGCSAVDGLGLQQGLERLYEMILKRKKAARGGKKRR

SEQ ID NO: 36803 - protein, 186 aa, Homo sapiens
MGLLDRLSVLLGLKKKEVHVLCLGLDNSGKTTIINKLKPSNAQSQNILPTIGFSIEKFKSSSLSFTVFDMSGQGRYRNLWEHYYKEGQAIIFVIDSSDRLRMVVAKEELDTLLNHPDIKHRRIPILFFANKMDLRDAVTSVKVSQLLCLENIKDKPWHICASDAIKGEGLQEGVDWLQDQIQTVKT

SEQ ID NO: 36804 - protein, 186 aa, Homo sapiens; identical to SEQ ID NO: 36803

SEQ ID NO: 36805 - protein, 121 aa, Homo sapiens
MGLLDRLSVLLGLKKKEVHVLCLGLDNSGKTTIINKLKPSNAQSQNILPTIGFSIEKFKSSSLSFTVFDMSGQGRYRNLWEHYYKEGQAIIFVIDSSDRLRMVVAKEELDTLLNHPDIKHR

SEQ ID NO: 36806 - protein, 186 aa, Homo sapiens; identical to SEQ ID NO: 36803

SEQ ID NO: 36807 - protein, 186 aa, Homo sapiens; identical to SEQ ID NO: 36803

SEQ ID NO: 36808 - protein, 187 aa, Homo sapiens
LRPTWKALSHPAWPEEKNKQILVLGLDGAGKTSVLHSLASNRVQHSVAPTQGFHAVCINTEDSQMEFLEIGGSKPFRSYWEMYLSKGLLLIFVVDSADHSRLPEAKKYLHQLIAANPVLPLVVFANKQDLEAAYHITDIHEALALSEVGNDRKMFLFGTYLTKNGSEIPSTMQDAKDLIAQLAADVQ

SEQ ID NO: 36809 - protein, 360 aa, Homo sapiens
MERAGPAGEEGGAREGRLLPRAPGAWVLRACAERAALEVGAASADTGVRGCGARGPAPLLASAGGGRARDGTWGVRTKGSGAALPSRPASRAAPRPEASSPPLPLEKARGGLSGPQGGRARGAMAHVGSRKRSRSRSRSRGRGSEKRKKKSRKDTSRNCSASTSQGRKASTAPGAEASPSPCITERSKQKARRRTRSSSSSSSSSSSSSSSSSSSSSSSSSDGRKKRGKYKDKRRKKKKKRKKLKKKGKEKAEAQQVEALPGPSLDQWHRSAGEEEDGPVLTDEQKSRIQAMKPMTKEEWDARQSIIRKVVDPETGRTRLIKGDGEVLEEIVTKERHREINKQATRGDCLAFQMRAGLLP

SEQ ID NO: 36810 - protein, 338 aa, Homo sapiens
MERAGPAGEEGGAREGRLLPRAPGAWVLRACAERAALEVGAASADTGVRGCGARGPAPLLASAGGGRARDGTWGVRTKGSGAALPSRPASRAAPRPEASSPPLPLEKARGGLSGPQGGRARGAMAHVGSRKRSRSRSRSRGRGSEKRKKKSRKDTSRNCSASTSQERSKQKARRRTRSSSSSSSSSSSSSSSSSSSSSSSSSDGRKKRGKYKDKRRKKKKKRKKLKKKGKEKAEAQQVEALPGPSLDQWHRSAGEEEDGPVLTDEQKSRIQAMKPMTKEEWDARQSIIRKVVDPETGRTRLIKGDGEVLEEIVTKERHREINKVGVAPLPAIRPQLCL

SEQ ID NO: 36811 - protein, 352 aa, Homo sapiens [sequence omitted]

SEQ ID NO: 36812 - protein, 341 aa, Homo sapiens
MERAGPAGEEGGAREGRLLPRAPGAWVLRACAERAALEVGAASADTGVRGCGARGPAPLLASAGGGRARDGTWGVRTKGSGAALPSRPASRAAPRPEASSPPLPLEKARGGLSGPQGGRARGAMAHVGSRKRSRSRSRSRGRGSEKRKKKSRKDTSRNCSASTSQERSKQKARRRTRSSSSSSSSSSSSSSSSSSSSSSSSSDGRKKRGKYKDKRRKKKKKRKKLKKKGKEKAEAQQVEALPGPSLDQWHRSAGEEEDGPVLTDEQKSRIQAMKPMTKEEWDARQSIIRKVVDPETGRTRLIKGDGEVLEEIVTKERHREINKQATRGDCLAFQMRAGLLP

SEQ ID NO: 36813 - protein, 188 aa, Homo sapiens
MDVNIAPLRAWDDFFPGSDRFARPDFRDISKWNNRVVSNLLYYQTNYLVVAAMMISIVGFLSPFNMILGGIVVVLVFTGFVWAAHNKDVLRRMKKRYPTTFVMVVMLASYFLISMFGGVMVFVFGITFPLLLMFIHASLRLRNLKNKLENKMEGIGLKRTPMGIVLDALEQQEEGINRLTDYISKVKE

SEQ ID NO: 36814 - protein, 136 aa, Homo sapiens
MDVNIAPLRAWDDFFPGSDRFARPDFRDISKWNNRVVSNLLYYQTNYLVVAAMMISIVGFLSPFNMILGGIVVVLVFTGFVWAAHDVRYGGHVGELFPYLHVWRSHGLCVWHYFSFAVDVYPCIVETSEPQEQTGE

SEQ ID NO: 36815 - protein, 272 aa, Homo sapiens
MVRCYVEIVEKLPERRPDPATIEGCAQLKPNNYLLAWHTPFNEKGSGFGAATKAMCIGLRYWKPERLETLIEVSVECGRMTHNHPTGFLGSLCTALFVSFAAQGKPLVQWGRDMLRAVPLAEEYCRKTIRHTAEYQEHWFYFEAKWQFYLEERKISKDSENKAIFPDNYDAEEREKTYRKWSSEGRGGRRGHDAPMIAYDALLAAGNSWTELCHRAMFHGGESAATGTIAGCLFGLLYGLDLVPKGLYQDLEDKEKLEDLGAALYRLSTEEK

SEQ ID NO: 36816 - protein, 354 aa, Homo sapiens
MEKFKAAMLLGSVGDALGYRNVCKENSTVGMKIQEELQRSGGLDHLVLSPGEWPVSDNTIMHIATAEALTTDYWCLDDLYREMVRCYVEIVEKLPERRPDPATIEGCAQLKPNNYLLAWHTPFNEKGSGFGAATKAMCIGLRYWKPERLETLIEVSVECGRMTHNHPTGFLGSLCTALFVSFAAQGKPLVQWGRDMLRAVPLAEEYCRKTIRHTAEYQEHWFYFEAKWQFYLEERKISKDSENKAIFPDNYDAEEREKTYRKWSSEGRGGRRGHDAPMIAYDALLAAGNSWTELCHRAMFHGGESAATGTIAGCLFGLLYGLDLVPKGLYQDLEDKEKLEDLGAALYRLSTEEK

SEQ ID NO: 36817 - protein, 176 aa, Homo sapiens
MVRCYVEIVEKLPERRPDPATIEGCAQLKPNNYLLAWHTPFNEKGSGFGAATKAMCIGLRYWKPERLETLIEVSVECGRMTHNHPTGFLGSLCTALFVSFAAQGKPLVQWGRDMLRAVPLAEEYCRKTIRHTAEYQEHWFYFEAKWQFYLEERKISKDSENKAIFPDNYDAEEREK

SEQ ID NO: 36818 - protein, 363 aa, Homo sapiens
MAAAAMAAAAGGGAGAARSLSRFRGCLAGALLGDCVGSFYEAHDTVDLTSVLRHVQSLEPDPGTPGSERTEALYYTDDTAMARALVQSLLAKEAFDEVDMAHRFAQEYKKDPDRGYGAGVVTVFKKLLNPKCRDVFEPARAQFNGKGSYGNGGAMRVAGISLAYSSVQDVQKFARLSAQLTHASSLGYNGAILQALAVHLALQGESSSEHFLKQLLGHMEDLEGDAQSVLDARELGMEERPYSSRLKKIGELLDQASVTREEVVSELGNGIAAFESVPTAIYCFLRCMEPDPEIPSAFNSLQRTLIYSISLGGDTDTIATMAGAIAGAYYGMDQVPESWQQSCEGYEETDILAQSLHRVFQKS

SEQ ID NO: 36819 - protein, 283 aa, Homo sapiens
MARALVQSLLAKEAFDEVDMAHRFAQEYKKDPDRGYGAGVVTVFKKLLNPKCRDVFEPARAQFNGKGSYGNGGAMRVAGISLAYSSVQDVQKFARLSAQLTHASSLGYNGAILQALAVHLALQGESSSEHFLKQLLGHMEDLEGDAQSVLDARELGMEERPYSSRLKKIGELLDQASVTREEVVSELGNGIAAFESVPTAIYCFLRCMEPDPEIPSAFNSLQRTLIYSISLGGDTDTIATMAGAIAGAYYGMDQVPESWQQSCEGYEETDILAQSLHRVFQKS

SEQ ID NO: 36820 - protein, 209 aa, Homo sapiens
MRVAGISLAYSSVQDVQKFARLSAQLTHASSLGYNGAILQALAVHLALQGESSSEHFLKQLLGHMEDLEGDAQSVLDARELGMEERPYSSRLKKIGELLDQASVTREEVVSELGNGIAAFESVPTAIYCFLRCMEPDPEIPSAFNSLQRTLIYSISLGGDTDTIATMAGAIAGAYYGMDQVPESWQQSCEGYEETDILAQSLHRVFQKS

SEQ ID NO: 36821 - protein, 327 aa, Homo sapiens
MQMPAMMSLLLVSVGLMEALQAQSHPITRRDLFSQEIQLDMALASFDDQYAGCAAAMTAALPDLNHTEFQANQVYADSWTLASSQWQERQARWPEWSLSPTRPSPPPLGFRDEHGVALLAYTANSPLHKEFNAAVREAGRSRAHYLHHFSFKTLHFLLTEALQLLGSGQRPPRCHQVFRGVHGLRFRPAGPRATVRLGGFASASLKHVAAQQFGEDTFFGIWTCLGAPIKGYSFFPGEEEVLIPPFETFQVINASRLAQGPARIYLRALGKHSTYNCEYIKDKKCKSGPCHLDNSAMGQSPLSAVWSLLLLLWFLVVRAFPDGPGLL

SEQ ID NO: 36822 - protein, 367 aa, Homo sapiens
MKTGHFEIVTMLLATMILVDIFQVKAEVLDMADNAFDDEYLKCTDRMEIKYVPQLLKEEKASHQQLDTVWENAKAKWAARKTQIFLPMNFKDNHGIALMAYISEAQEQTPFYHLFSEAVKMAGQSREDYIYGFQFKAFHFYLTRALQLLRKPCEASSKTVVYRTSQGTSFTFGGLNQARFGHFTLAYSAKPQAANDQLTVLSIYTCLGVDIENFLDKESERITLIPLNEVFQVSQEGAGNNLILQSINKTCSHYECAFLGGLKTENCIENLEYFQPIYVYNPGEKNQKLEDHSEKNWKLEDHGEKNQKLEDHGVKILEPTQIPAPGPVPVPGPKSHPSASSGKLLLPQFGMVIILISVSAINLFVAL

SEQ ID NO: 36823 - protein, 378 aa, Homo sapiens
MKTGHFEIVTMLLATMILVDIFQVKAEVLDMADNAFDDEYLKCTDRMEIKYVPQLLKEEKASHQQLDTVWENAKAKWAARKTQIFLPMNFKDNHGIALMAYISEAQEQTPFYHLFSEAVKMAGQSREDYIYGFQFKAFHFYLTRALQLLRKPCEASSKTVVYRTSQGTSFTFGGLNQARFGHFTLAYSAKPQAANDQLTVLSIYTCLGVDIENFLDKESERITLIPLNEVFQVSQEGAGNNLILQSINKTCSHYECAFLGGLKTENCIENLEYFQPIYVYNPGEKNQKLEDHSEKNWKLEDHGEKNQKLEDHGVKILEPTQIPEDKSQGNINNPTPGPVPVPGPKSHPSASSGKLLLPQFGMVIILISVSAINLFVAL

SEQ ID NO: 36824 - protein, 389 aa, Homo sapiens
MKTGHFEIVTMLLATMILVDIFQVKAEVLDMADNAFDDEYLKCTDRMEIKYVPQLLKEEKASHQQLDTVWENAKAKWAARKTQIFLPMNFKDNHGIALMAYISEAQEQTPFYHLFSEAVKMAGQSREDYIYGFQFKAFHFYLTRALQLLRKPCEASSKTVVYRTSQGTSFTFGGLNQARFGHFTLAYSAKPQAANDQLTVLSIYTCLGVDIENFLDKESERITLIPLNEVFQVSQEGAGNNLILQSINKTCSHYECAFLGGLKTENCIENLEYFQPIYVYNPGEKNQKLEDHSEKNWKLEDHGEKNQKLEDHGVKILEPTQIPGMKIPEPFPLPEDKSQGNINNPTPGPVPVPGPKSHPSASSGKLLLPQFGMVIILISVSAINLFVAL

SEQ ID NO: 36825 - protein, 129 aa, Homo sapiens
MKTGHFEIVTMLLATMILVDIFQVKAEVLDMADNAFDDEYLKCTDRMEIKYVPQLLKEEKASHQQLDTVWENAKAKWAARKTQIFLPMNFKDNHGIALMAYISEAQEQTPFYHLFSEAVKMAGQSREDY

SEQ ID NO: 36826 - protein, 175 aa, Homo sapiens
MKTGHFEIVTMLLATMILVDIFQVKAEVLDMADNAFDDEYLKCTDRMEIKYVPQLLKEEKASHQQLDTVWENAKAKWAARKTQIFLPMNFKDNHGIALMAYISEAQEQTPFYHLFSEAVKMAGQSREDYIYGFQFKAFHFYLTRALQLLRKPCEASSKTVVYRTSQGTSFTFGGL

SEQ ID NO: 36827 - protein, 202 aa, Homo sapiens
MKTGHFEIVTMLLATMILVDIFQVKAEVLDMADNAFDDEYLKCTDRMEIKYVPQLLKEEKASHQQLDTVWENAKAKWAARKTQIFLPMNFKDNHGIALMAYISEAQEQTPFYHLFSEAVKMAGQSREDYIYGFQFKAFHFYLTRALQLLRKPCEASSKTVVYRTSQGTSFTFGGLNQARFGHFTLAYSAKPQAANDQLTVLS

SEQ ID NO: 36828 - protein, 107 aa, Homo sapiens
MKTGHFEIVTMLLATMILVDIFQVKAEVLDMADNAFDDEYLKCTDRMEIKYVPQLLKEEKASHQQLDTVWENAKAKWAARKTQIFLPMNFKDNHGIALMAYISEAQE

SEQ ID NO: 36829 - protein, 314 aa, Homo sapiens
MGPLINRCKKILLPTTVPPATMRIWLLGGLLPFLLLLSGLQRPTEGSEVAIKIDFDFAPGSFDDQYQGCSKQVMEKLTQGDYFTKDIEAQKNYFRMWQKAHLAWLNQGKVLPQNMTTTHAVAILFYTLNSNVHSDFTRAMASVARTPQQYERSFHFKYLHYYLTSAIQLLRKDSIMENGTLCYEVHYRTKDVHFNAYTGATIRFGQFLSTSLLKEEAQEFGNQTLFTIFTCLGAPVQYFSLKKEVLIPPYELFKVINMSYHPRGDWLQLRSTGNLSTYNCQLLKASSKKCIPDPIAIASLSFLTSVIIFSKSRV

SEQ ID NO: 36830 - protein, 58 aa, Homo sapiens
MGPLINRCKKILLPTTVPPATMRIWLLGGLLPFLLLLSGLQRPTEGSELPARNASLIL

SEQ ID NO: 36831 - protein, 291 aa, Homo sapiens
MALAALMIALGSLGLHTWQAQAVPILPLGLAPDTFDDTYVGCAEEMEEKAAPLLKEEMAHHALLRESWEAAQETWEDKRRGLTLPPGFKAQNGIAIMVYTNSSNTLYWELNQAVRTGGGSRELYMRHFPFKALHFYLIRALQLLRGSGGCSRGPGEVVFRGVGSLRFEPKRLGDSVRLGQFASSSLDKAVAHRFGNATLFSLTTCFGAPIQAFSVFPKEREVLIPPHEVFLVTRFSQDGAQSLVTLWSYNQTCSHFNCAYLGGEKRRGCVSAPGALGTGDLHMTKRHLQQP

SEQ ID NO: 36832 - protein, 239 aa, Homo sapiens
MALAALMIALGSLGLHTWQAQAVPILPLGLAPDTFDDTYVGCAEEMEEKAAPLLKEEMAHHALLRESWEAAQETWEDKRRGLTLPPGFKAQNGIAIMVYTNSSNTLYWELNQAVRTGGGSRELYMRHFPFKALHFYLIRALQLLRGSGGCSRGPGEVVFRGVGSLRFEPKRLGDSVRLGQFASSSLDKAVAHRFGEKRRGCVSAPGVQLGSQSEGASSLPPWKTLLLAPGEFQLSGVGP

SEQ ID NO: 36833 - protein, 291 aa, Homo sapiens; identical to SEQ ID NO: 36831

SEQ ID NO: 36834 - protein, 466 aa, Homo sapiens
MVFLSGNASDSSNCTQPPAPVNISKAILLGVILGGLILFGVLGNILVILSVACHRHLHSVTHYYIVNLAVADLLLTSTVLPFSAIFEVLGYWAFGRVFCNIWAAVDVLCCTASIMGLCIISIDRYIGVSYPLRYPTIVTQRRGLMALLCVWALSLVISIGPLFGWRQPAPEDETICQINEEPGYVLFSALGSFYLPLAIILVMYCRVYVVAKRESRGLKSGLKTDKSDSEQVTLRIHRKNAPAGGSGMASAKTKTHFSVRLLKFSREKKAAKTLGIVVGCFVLCWLPFFLVMPIGSFFPDFKPSETVFKIVFWLGYLNSCINPIIYPCSSQEFKKAFQNVLRIQCLCRKQSSKHALGYTLHPPSQAVEGQHKDMVRIPVGSRETFYRISKTDGVCEWKFFSSMPRGSARITVSKDQSSCTTARVRSKSFLQVCCCVGPSTPSLDKNHQVPTIKVHTISLSENGEEV

SEQ ID NO: 36835 - protein, 455 aa, Homo sapiens
MVFLSGNASDSSNCTQPPAPVNISKAILLGVILGGLILFGVLGNILVILSVACHRHLHSVTHYYIVNLAVADLLLTSTVLPFSAIFEVLGYWAFGRVFCNIWAAVDVLCCTASIMGLCIISIDRYIGVSYPLRYPTIVTQRRGLMALLCVWALSLVISIGPLFGWRQPAPEDETICQINEEPGYVLFSALGSFYLPLAIILVMYCRVYVVAKRESRGLKSGLKTDKSDSEQVTLRIHRKNAPAGGSGMASAKTKTHFSVRLLKFSREKKAAKTLGIVVGCFVLCWLPFFLVMPIGSFFPDFKPSETVFKIVFWLGYLNSCINPIIYPCSSQEFKKAFQNVLRIQCLCRKQSSKHALGYTLHPPSQAVEGQHKDMVRIPVGSRETFYRISKTDGVCEWKFFSSMPRGSARITVSKDQSSCTTARRGMDCRYFTKNCREHIKHVNFMMPPWRKGSEC

SEQ ID NO: 36836 - protein, 324 aa, Homo sapiens
MVFLSGNASDSSNCTQPPAPVNISKAILLGVILGGLILFGVLGNILVILSVACHRHLHSVTHYYIVNLAVADLLLTSTVLPFSAIFEVLGYWAFGRVFCNIWAAVDVLCCTASIMGLCIISIDRYIGVSYPLRYPTIVTQRRGLMALLCVWALSLVISIGPLFGWRQPAPEDETICQINEEPGYVLFSALGSFYLPLAIILVMYCRVYVVAKRESRGLKSGLKTDKSDSEQVTLRIHRKNAPAGGSGMASAKTKTHFSVRLLKFSREKKAAKTLGIVVGCFVLCWLPFFLVMPIGTYILKYDVLFWRKGLSVCTRLRERKEIKN

SEQ ID NO: 36837 - protein, 342 aa, Homo sapiens
MVFLSGNASDSSNCTQPPAPVNISKAILLGVILGGLILFGVLGNILVILSVACHRHLHSVTHYYIVNLAVADLLLTSTVLPFSAIFEVLGYWAFGRVFCNIWAAVDVLCCTASIMGLCIISIDRYIGVSYPLRYPTIVTQRRGLMALLCVWALSLVISIGPLFGWRQPAPEDETICQINEEPGYVLFSALGSFYLPLAIILVMYCRVYVVAKRESRGLKSGLKTDKSDSEQVTLRIHRKNAPAGGSGMASAKTKTHFSVRLLKFSREKKAAKTLGIVVGCFVLCWLPFFLVMPIDEETEAQEGKNDSPSFKQPVHHAAVLGLEVMEKENLEGVSRKDTCGVW

SEQ ID NO: 36838 - protein, 466 aa, Homo sapiens; identical to SEQ ID NO: 36834

SEQ ID NO: 36839 - protein, 372 aa, Homo sapiens
MVFLSGNASDSSNCTQPPAPVNISKAILLGVILGGLILFGVLGNILVILSVACHRHLHSVTHYYIVNLAVADLLLTSTVLPFSAIFEVLGYWAFGRVFCNIWAAVDVLCCTASIMGLCIISIDRYIGVSYPLRYPTIVTQRRGLMALLCVWALSLVISIGPLFGWRQPAPEDETICQINEEPGYVLFSALGSFYLPLAIILVMYCRVYVVAKRESRGLKSGLKTDKSDSEQVTLRIHRKNAPAGGSGMASAKTKTHFSVRLLKFSREKKAAKTLGIVVGCFVLCWLPFFLVMPIGTHTHDMKPASRPRLLSLLPKEGEHETHHWSCDPLSLESTPGAQEPCLTLGFTSLSSIHLTKAQIQHVTVTDTGKTVT

SEQ ID NO: 36840 - protein, 429 aa, Homo sapiens
MVFLSGNASDSSNCTQPPAPVNISKAILLGVILGGLILFGVLGNILVILSVACHRHLHSVTHYYIVNLAVADLLLTSTVLPFSAIFEVLGYWAFGRVFCNIWAAVDVLCCTASIMGLCIISIDRYIGVSYPLRYPTIVTQRRGLMALLCVWALSLVISIGPLFGWRQPAPEDETICQINEEPGYVLFSALGSFYLPLAIILVMYCRVYVVAKRESRGLKSGLKTDKSDSEQVTLRIHRKNAPAGGSGMASAKTKTHFSVRLLKFSREKKAAKTLGIVVGCFVLCWLPFFLVMPIGSFFPDFKPSETVFKIVFWLGYLNSCINPIIYPCSSQEFKKAFQNVLRIQCLCRKQSSKHALGYTLHPPSQAVEGQHKDMVRIPVGSRETFYRISKTDGVCEWKFFSSMPRGSARITVSKDQSSCTTARGHTPMT

SEQ ID NO: 36841 - protein, 475 aa, Homo sapiens
MVFLSGNASDSSNCTQPPAPVNISKAILLGVILGGLILFGVLGNILVILSVACHRHLHSVTHYYIVNLAVADLLLTSTVLPFSAIFEVLGYWAFGRVFCNIWAAVDVLCCTASIMGLCIISIDRYIGVSYPLRYPTIVTQRRGLMALLCVWALSLVISIGPLFGWRQPAPEDETICQINEEPGYVLFSALGSFYLPLAIILVMYCRVYVVAKRESRGLKSGLKTDKSDSEQVTLRIHRKNAPAGGSGMASAKTKTHFSVRLLKFSREKKAAKTLGIVVGCFVLCWLPFFLVMPIGSFFPDFKPSETVFKIVFWLGYLNSCINPIIYPCSSQEFKKAFQNVLRIQCLCRKQSSKHALGYTLHPPSQAVEGQHKDMVRIPVGSRETFYRISKTDGVCEWKFFSSMPRGSARITVSKDQSSCTTARTKSRSVTRLECSGMILAHCNLRLPGSRDSPASASQAAGTTGMCHQADATRPS

SEQ ID NO: 36842 - protein, 370 aa, Homo sapiens
MVFLSGNASDSSNCTQPPAPVNISKAILLGVILGGLILFGVLGNILVILSVACHRHLHSVTHYYIVNLAVADLLLTSTVLPFSAIFEVLGYWAFGRVFCNIWAAVDVLCCTASIMGLCIISIDRYIGVSYPLRYPTIVTQRRGLMALLCVWALSLVISIGPLFGWRQPAPEDETICQINEEPGYVLFSALGSFYLPLAIILVMYCRVYVVAKRESRGLKSGLKTDKSDSEQVTLRIHRKNAPAGGSGMASAKTKTHFSVRLLKFSREKKAAKTLGIVVGCFVLCWLPFFLVMPIDEVSLCHQAGVQWHDLGSLQPPPPGFKRFSCLSLPSSWDYRDVPPGRRHQAQLIFVFLVETGFHHVGQDDLDLLTS

SEQ ID NO: 36843 - protein, 427 aa, Homo sapiens
MVFLSGNASDSSNCTQPPAPVNISKAILLGVILGGLILFGVLGNILVILSVACHRHLHSVTHYYIVNLAVADLLLTSTVLPFSAIFEVLGYWAFGRVFCNIWAAVDVLCCTASIMGLCIISIDRYIGVSYPLRYPTIVTQRRGLMALLCVWALSLVISIGPLFGWRQPAPEDETICQINEEPGYVLFSALGSFYLPLAIILVMYCRVYVVAKRESRGLKSGLKTDKSDSEQVTLRIHRKNAPAGGSGMASAKTKTHFSVRLLKFSREKKAAKTLGIVVGCFVLCWLPFFLVMPIGSFFPDFKPSETVFKIVFWLGYLNSCINPIIYPCSSQEFKKAFQNVLRIQCLCRKQSSKHALGYTLHPPSQAVEGQHKDMVRIPVGSRETFYRISKTDGVCEWKFFSSMPRGSARITVSKDQSSCTTARSSGF

SEQ ID NO: 36844 - protein, 520 aa, Homo sapiens
MNPDLDTGHNTSAPAHWGELKNANFTGPNQTSSNSTLPQLDITRAISVGLVLGAFILFAIVGNILVILSVACNRHLRTPTNYFIVNLAMADLLLSFTVLPFSAALEVLGYWVLGRIFCDIWAAVDVLCCTASILSLCAISIDRYIGVRYSLQYPTLVTRRKAILALLSVWVLSTVISIGPLLGWKEPAPNDDKECGVTEEPFYALFSSLGSFYIPLAVILVMYCRVYIVAKRTTKNLEAGVMKEMSNSKELTLRIHSKNFHEDTLSSTKAKGHNPRSSIAVKLFKFSREKKAAKTLGIVVGMFILCWLPFFIALPLGSLFSTLKPPDAVFKVVFWLGYFNSCLNPIIYPCSSKEFKRAFVRILGCQCRGRGRRRRRRRRRLGGCAYTYRPWTRGGSLERSQSRKDSLDDSGSCLSGSQRTLPSASPSPGYLGRGAPPPVELCAFPEWKAPGALLSLPAPEPPGRRGRHDSGPLFTFKLLTEPESPGTDGGASNGGCEAAADVANGQPGFKSNMPLAPGQF

SEQ ID NO: 36845 - protein, 572 aa, Homo sapiens
MTFRDLLSVSFEGPRPDSSAGGSSAGGGGGSAGGAAPSEGPAVGGVPGGAGGGGGVVGAGSGEDNRSSAGEPGSAGAGGDVNGTAAVGGLVVSAQGVGVGVFLAAFILMAVAGNLLVILSVACNRHLQTVTNYFIVNLAVADLLLSATVLPFSATMEVLGFWAFGRAFCDVWAAVDVLCCTASILSLCTISVDRYVGVRHSLKYPAIMTERKAAAILALLWVVALVVSVGPLLGWKEPVPPDERFCGITEEAGYAVFSSVCSFYLPMAVIVVMYCRVYVVARSTTRSLEAGVKRERGKASEVVLRIHCRGAATGADGAHGMRSAKGHTFRSSLSVRLLKFSREKKAAKTLAIVVGVFVLCWFPFFFVLPLGSLFPQLKPSEGVFKVIFWLGYFNSCVNPLIYPCSSREFKRAFLRLLRCQCRRRRRRRPLWRVYGHHWRASTSGLRQDCAPSSGDAPPGAPLALTALPDPDPEPPGTPEMQAPVASRRKPPSAFREWRLLGPFRRPTTQLRAKVSSLSHKIRAGGAQRAEAACAQRSEVEAVSLGVPHEVAEGATCQAYELADYSNLRETDI

SEQ ID NO: 36846 - protein, 447 aa, Homo sapiens
MDHQDPYSVQATAAIAAAITFLILFTIFGNALVILAVLTSRSLRAPQNLFLVSLAAADILVATLIIPFSLANELLGYWYFRRTWCEVYLALDVLFCTSSIVHLCAISLDRYWAVSRALEYNSKRTPRRIKCIILTVWLIAAVISLPPLIYKGDQGPQPRGRPQCKLNQEAWYILASSIGSFFAPCLIMILVYLRIYLIAKRSNRRGPRAKGGPGQGESKQPRPDHGGALASAKLPALASVASAREVNGHSKSTGEKEEGETPEDTGTRALPPSWAALPNSGQGQKEGVCGASPEDEAEEEEEEEEECEPQAVPVSPASACSPPLQQPQGSRVLATLRGQVLLGRGVGAIGGQWWRRRAQLTREKRFTFVLAVVIGVFVLCWFPFFFSYSLGAICPKHCKVPHGLFQFFFWIGYCNSSLNPVIYTIFNQDFRRAFRRILCRPWTQTAW

SEQ ID NO: 36847 - protein, 462 aa, Homo sapiens
MASPALAAALAVAAAAGPNASGAGERGSGGVANASGASWGPPRGQYSAGAVAGLAAVVGFLIVFTVVGNVLVVIAVLTSRALRAPQNLFLVSLASADILVATLVMPFSLANELMAYWYFGQVWCGVYLALDVLFCTSSIVHLCAISLDRYWSVTQAVEYNLKRTPRRVKATIVAVWLISAVISFPPLVSLYRQPDGAAYPQCGLNDETWYILSSCIGSFFAPCLIMGLVYARIYRVAKLRTRTLSEKRAPVGPDGASPTTENGLGAAAGAGENGHCAPPPADVEPDESSAAAERRRRRGALRRGGRRRAGAEGGAGGADGQGAGPGAAESGALTASRSPGPGGRLSRASSRSVEFFLSRRRRARSSVCRRKVAQAREKRFTFVLAVVMGVFVLCWFPFFFSYSLYGICREACQVPGPLFKFFFWIGYCNSSLNPVIYTVFNQDFRRSFKHILFRRRRRGFRQ

SEQ ID NO: 36848 - protein, 689 aa, Homo sapiens
MADLEAVLADVSYLMAMEKSKATPAARASKKILLPEPSIRSVMQKYLEDRGEVTFEKIFSQKLGYLLFRDFCLNHLEEARPLVEFYEEIKKYEKLETEEERVARSREIFDSYIMKELLACSHPFSKSATEHVQGHLGKKQVPPDLFQPYIEEICQNLRGDVFQKFIESDKFTRFCQWKNVELNIHLTMNDFSVHRIIGRGGFGEVYGCRKADTGKMYAMKCLDKKRIKMKQGETLALNERIMLSLVSTGDCPFIVCMSYAFHTPDKLSFILDLMNGGDLHYHLSQHGVFSEADMRFYAAEIILGLEHMHNRFVVYRDLKPANILLDEHGHVRISDLGLACDFSKKKPHASVGTHGYMAPEVLQKGVAYDSSADWFSLGCMLFKLLRGHSPFRQHKTKDKHEIDRMTLTMAVELPDSFSPELRSLLEGLLQRDVNRRLGCLGRGAQEVKESPFFRSLDWQMVFLQKYPPPLIPPRGEVNAADAFDIGSFDEEDTKGIKLLDSDQELYRNFPLTISERWQQEVAETVFDTINAETDRLEARKKAKNKQLGHEEDYALGKDCIMHGYMSKMGNPFLTQWQRRYFYLFPNRLEWRGEGEAPQSLLTMEEIQSVEETQIKERKCLLLKIRGGKQFILQCDSDPELVQWKKELRDAYREAQQLVQRVPKMKNKPRSPVVELSKVPLVQRGSANGL

SEQ ID NO: 36849 - protein, 688 aa, Homo sapiens
MADLEAVLADVSYLMAMEKSKATPAARASKRIVLPEPSIRSVMQKYLAERNEITFDKIFNQKIGFLLFKDFCLNEINEAVPQVKFYEEIKEYEKLDNEEDRLCRSRQIYDAYIMKELLSCSHPFSKQAVEHVQSHLSKKQVTSTLFQPYIEEICESLRGDIFQKFMESDKFTRFCQWKNVELNIHLTMNEFSVHRIIGRGGFGEVYGCRKADTGKMYAMKCLDKKRIKMKQGETLALNERIMLSLVSTGDCPFIVCMTYAFHTPDKLCFILDLMNGGDLHYHLSQHGVFSEKEMRFYATEIILGLEHMHNRFVVYRDLKPANILLDEHGHARISDLGLACDFSKKKPHASVGTHGYMAPEVLQKGTAYDSSADWFSLGCMLFKLLRGHSPFRQHKTKDKHEIDRMTLTVNVELPDTFSPELKSLLEGLLQRDVSKRLGCHGGGSQEVKEHSFFKGVDWQHVYLQKYPPPLIPPRGEVNAADAFDIGSFDEEDTKGIKLLDCDQELYKNFPLVISERWQQEVTETVYEAVNADTDKIEARKRAKNKQLGHEEDYALGKDCIMHGYMLKLGNPFLTQWQRRYFYLFPNRLEWRGEGESRQNLLTMEQILSVEETQIKDKKCILFRIKGGKQFVLQCESDPEFVQWKKELNETFKEAQRLLRRAPKFLNKPRSGTVELPKPSLCHRNSNGL

SEQ ID NO: 36850 - protein, 387 aa, Homo sapiens
MADLEAVLADVSYLMAMEKSKATPAARASKRIVLPEPSIRSVMQKYLAERNEITFDKIFNQKIGFLLFKDFCLNEINEAVPQVKFYEEIKEYEKLDNEEDRLCRSRQIYDAYIMKELLSCSHPFSKQAVEHVQSHLSKKQVTSTLFQPYIEEICESLRGDIFQKFMESDKFTRFCQWKNVELNIHLTMNEFSVHRIIGRGGFGEVYGCRKADTGKMYAMKCLDKKRIKMKQGETLALNERIMLSLVSTGDCPFIVCMTYAFHTPDKLCFILDLMNGGDLHYHLSQHGVFSEKEMRFYATEIILGLEHMHNRFVVYRDLKPANILLDEHGHARISDLGLACDFSKKKPHASVGTHGYMAPEVLQKGTAYDSSADWFSLGCMLFKLLRG

SEQ ID NO: 36851 - protein, 477 aa, Homo sapiens
MGAGVLVLGASEPGNLSSAAPLPDGAATAARLLVPASPPASLLPPASESPEPLSQQWTAGMGLLMALIVLLIVAGNVLVIVAIAKTPRLQTLTNLFIMSLASADLVMGLLVVPFGATIVVWGRWEYGSFFCELWTSVDVLCVTASIETLCVIALDRYLAITSPFRYQSLLTRARARGLVCTVWAISALVSFLPILMHWWRAESDEARRCYNDPKCCDFVTNRAYAIASSVVSFYVPLCIMAFVYLRVFREAQKQVKKIDSCERRFLGGPARPPSPSPSPVPAPAPPPGPPRPAAAAATAPLANGRAGKRRPSRLVALREQKALKTLGIIMGVFTLCWLPFFLANVVKAFHRELVPDRLFVFFNWLGYANSAFNPIIYCRSPDFRKAFQGLLCCARRAARRRHATHGDRPRASGCLARPGPPPSPGAASDDDDDDVVGATPPARLLEPWAGCNGGAAADSDSSLDEPCRPGFASESKV

SEQ ID NO: 36852 - protein, 413 aa, Homo sapiens [sequence omitted]

SEQ ID NO: 36853 - protein, 408 aa, Homo sapiens
MAPWPHENSSLAPWPDLPTLAPNTANTSGLPGVPWEAALAGALLALAVLATVGGNLLVIVAIAWTPRLQTMTNVFVTSLAAADLVMGLLVVPPAATLALTGHWPLGATGCELWTSVDVLCVTASIETLCALAVDRYLAVTNPLRYGALVTKRCARTAVVLVWVVSAAVSFAPIMSQWWRVGADAEAQRCHSNPRCCAFASNMPYVLLSSSVSFYLPLLVMLFVYARVFVVATRQLRLLRGELGRFPPEESPPAPSRSLAPAPVGTCAPPEGVPACGRRPARLLPLREHRALCTLGLIMGTFTLCWLPFFLANVLRALGGPSLVPGPAFLALNWLGYANSAFNPLIYCRSPDFRSAFRRLLCRCGRRLPPEPCAAARPALFPSGVPAARSSPAQPRLCQRLDGASWGVS

SEQ ID NO: 36854 - protein, 347 aa, Homo sapiens
MAAGTAVGAWVLVLSLWGAVVGAQNITARIGEPLVLKCKGAPKKPPQRLEWKLNTGRTEAWKVLSPQGGGPWDSVARVLPNGSLFLPAVGIQDEGIFRCQAMNRNGKETKSNYRVRVYQIPGKPEIVDSASELTAGVPNKVGTCVSEGSYPAGTLSWHLDGKPLVPNEKGVSVKEQTRRHPETGLFTLQSELMVTPARGGDPRPTFSCSFSPGLPRHRALRTAPIQPRVWEPVPLEEVQLVVEPEGGAVAPGGTVTLTCEVPAQPSPQIHWMKDGVPLPLPPSPVLILPEIGPQDQGTYSCVATHSSHGPQESRAVSISIIEPGEEGPTAGEGFDKVREAEDSPQHM

SEQ ID NO: 36855 - protein, 233 aa, Homo sapiens
MAAGTAVGAWVLVLSLWGAVVGAQNITARIGEPLVLKCKGAPKKPPQRLEWKLNTGRTEAWKVLSPQGGGPWDSVARVLPNGSLFLPAVGIQDEGIFRCQAMNRNGKETKSNYRVRVYQIPGKPEIVDSASELTAGVPNKVVEESRRSRKRPCEQEVGTCVSEGSYPAGTLSWHLDGKPLVPNEKGVSVKEQTRRHPETGLFTLQSELMVTPARGGDPRPTFSCSFSPGLPRH

SEQ ID NO: 36856 - protein, 133 aa, Homo sapiens
MKDGVPLPLPPSPVLILPEIGPQDQGTYSCVATHSSHGPQESRAVSISIIEPGEEGPTAGSVGGSGLGTLALALGILGGLGTAALLIGVILWQRRQRRGEERKAPENQEEEEERAELNQSEEPEAGESSTGGP

SEQ ID NO: 36857 - protein, 121 aa, Homo sapiens
MAAGTAVGAWVLVLSLWGAVVGAQNITARIGEPLVLKCKGAPKKPPQRLEWKLNTGRTEAWKVLSPQGGGPWDSVARVLPNGSLFLPAVGIQDEGIFRCQAMNRNGKETKSNWWWSQKVEQ

SEQ ID NO: 36858 - protein, 342 aa, Homo sapiens
MAAGTAVGAWVLVLSLWGAVVGAQNITARIGEPLVLKCKGAPKKPPQRLEWKLGGGPWDSVARVLPNGSLFLPAVGIQDEGIFRCQAMNRNGKETKSNYRVRVYQIPGKPEIVDSASELTAGVPNKVGTCVSEGSYPAGTLSWHLDGKPLVPNEKGVSVKEQTRRHPETGLFTLQSELMVTPARGGDPRPTFSCSFSPGLPRHRALRTAPIQPRVWEPVPLEEVQLVVEPEGGAVAPGGTVTLTCEVPAQPSPQIHWMKDVSDLERGAGRTRRGGANCRLCGRIRAGNSSPGPGDPGRPGDSRPAHWGHLVAKAATPRRGEEGPRKPGGRGGACRTESVGGT

SEQ ID NO: 36859 - protein, 294 aa, Homo sapiens
MNRNGKETKSNYRVRVYQIPGKPEIVDSASELTAGVPNKVGTCVSEGSYPAGTLSWHLDGKPLVPNEKGVSVKEQTRRHPETGLFTLQSELMVTPARGGDPRPTFSCSFSPGLPRHRALRTAPIQPRVWEPVPLEEVQLVVEPEGGAVAPGGTVTLTCEVPAQPSPQIHWMKDGVPLPLPPSPVLILPEIGPQDQGTYSCVATHSSHGPQESRAVSISIIGSVGGSGLGTLALALGILGGLGTAALLIGVILWQRRQRRGEERKAPENQEEEEERAELNQSEEPEAGESSTGGP

SEQ ID NO: 36860 - protein, 435 aa, Homo sapiens
MGAGERVQAPPRAEATAGRGADRARTLEGSRMAAGTAVGAWVLVLSLWGAVVGAQNITARIGEPLVLKCKGAPKKPPQRLEWKLNTGRTEAWKVLSPQGGGPWDSVARVLPNGSLFLPAVGIQDEGIFRCQAMNRNGKETKSNYRVRVYQIPGKPEIVDSASELTAGVPNKVGTCVSEGSYPAGTLSWHLDGKPLVPNEKGVSVKEQTRRHPETGLFTLQSELMVTPARGGDPRPTFSCSFSPGLPRHRALRTAPIQPRVWEPVPLEEVQLVVEPEGGAVAPGGTVTLTCEVPAQPSPQIHWMKDGVPLPLPPSPVLILPEIGPQDQGTYSCVATHSSHGPQESRAVSISIIEPGEEGPTAGSVGGSGLGTLALALGILGGLGTAALLIGVILWQRRQRRGEERKAPENQEEEEERAELNQSEEPEAGESSTGGP

SEQ ID NO: 36861 - protein, 404 aa, Homo sapiens
MAAGTAVGAWVLVLSLWGAVVGAQNITARIGEPLVLKCKGAPKKPPQRLEWKLNTGRTEAWKVLSPQGGGPWDSVARVLPNGSLFLPAVGIQDEGIFRCQAMNRNGKETKSNYRVRVYQIPGKPEIVDSASELTAGVPNKVGTCVSEGSYPAGTLSWHLDGKPLVPNEKGVSVKEQTRRHPETGLFTLQSELMVTPARGGDPRPTFSCSFSPGLPRHRALRTAPIQPRVWEPVPLEEVQLVVEPEGGAVAPGGTVTLTCEVPAQPSPQIHWMKDGVPLPLPPSPVLILPEIGPQDQGTYSCVATHSSHGPQESRAVSISIIEPGEEGPTAGSVGGSGLGTLALALGILGGLGTAALLIGVILWQRRQRRGEERKAPENQEEEEERAELNQSEEPEAGESSTGGP

SEQ ID NO: 36862 - protein, 347 aa, Homo sapiens; identical to SEQ ID NO: 36854

SEQ ID NO: 36863 - protein, 342 aa, Homo sapiens; identical to SEQ ID NO: 36858

SEQ ID NO: 36864 - protein, 342 aa, Homo sapiens; identical to SEQ ID NO: 36858

SEQ ID NO: 36865 - protein, 233 aa, Homo sapiens
MAAGTAVGAWVLVLSLWGAVVGAQNITARIGEPLVLKCKGAPKKPPQRLEWKLNTGRTEAWKVLSPQGGGPWDSVARVLPNSSLFLPAVGIQDEGIFRCQAMNRNGKETKSNYRVRVYQIPGKPEIVDSASELTAGVPNKVVEESRRSRKRPCEQEVGTCVSEGSYPAGTLSWHLDGKPLVPNEKGVSVKEQTRRHPETGLFTLQSELMVTPARGGDPRPTFSCSFSPGLPRH

SEQ ID NO: 36866 - protein, 234 aa, Homo sapiens
MAAGTAVGAWVLVLSLWGAVVGAQNITARIGEPLVLKCKGAPKKPPQRLEWKLNTGRTEAWKVLSPQGGGPWDSVARVLPNGSLFLPAVGIQDEGIFRCQAMNRNGKETKSNYRSLRTFTITASDWIFPPSEIPGKPEIVDSASELTAGVPNKVGTCVSEGSYPAGTLSWHLDGKPLVPNEKGVSVKEQTRRHPETGLFTLQSELMVTPARGGDPRPTFSCSFSPGLPRHRALR

SEQ ID NO: 36867 - protein, 234 aa, Homo sapiens; identical to SEQ ID NO: 36866

SEQ ID NO: 36868 - protein, 233 aa, Homo sapiens; identical to SEQ ID NO: 36855

SEQ ID NO: 36869 - protein, 404 aa, Homo sapiens [sequence omitted]

SEQ ID NO: 36870 - protein, 347 aa, Homo sapiens; identical to SEQ ID NO: 36854

SEQ ID NO: 36871 - protein, 233 aa, Homo sapiens; identical to SEQ ID NO: 36855

SEQ ID NO: 36872 - protein, 404 aa, Homo sapiens; identical to SEQ ID NO: 36861

SEQ ID NO: 36873 - protein, 234 aa, Homo sapiens
MAAGTAVGAWVLVLSLWGAVVGAQNITARIGEPLVLKCKGAPKKPPQRLEWKLNTGRTEAWKVLSPQGGGPWDSVARVLPNSSLFLPAVGIQDEGIFRCQAMNRNGKETKSNYRSLRTFTITASDWIFPPSEIPGKPEIVDSASELTAGVPNKVGTCVSEGSYPAGTLSWHLDGKPLVPNEKGVSVKEQTRRHPETGLFTLQSELMVTPARGGDPRPTFSCSFSPGLPRHRALR

SEQ ID NO: 36874 - protein, 363 aa, Homo sapiens
MAAGTAVGAWVLVLSLWGAVVGAQNITARIGEPLVLKCKGAPKKPPQRLEWKLNTGRTEAWKVLSPQGGGPWDSVARVLPNGSLFLPAVGIQDEGIFRCQAMNRNGKETKSNYRVRVYQIPGKPEIVDSASELTAGVPNKVVEESRRSRKRPCEQEVGTCVSEGSYPAGTLSWHLDGKPLVPNEKGVSVKEQTRRHPETGLFTLQSELMVTPARGGDPRPTFSCSFSPGLPRHRALRTAPIQPRVWEPVPLEEVQLVVEPEGGAVAPGGTVTLTCEVPAQPSPQIHWMKDGVPLPLPPSPVLILPEIGPQDQGTYSCVATHSSHGPQESRAVSISIIEPGEEGPTAGEGFDKVREAEDSPQHM

SEQ ID NO: 36875 - protein, 342 aa, Homo sapiens; identical to SEQ ID NO: 36858

SEQ ID NO: 36876 - protein, 233 aa, Homo sapiens; identical to SEQ ID NO: 36855

SEQ ID NO: 36877 - protein, 342 aa, Homo sapiens; identical to SEQ ID NO: 36858

SEQ ID NO: 36878 - protein, 234 aa, Homo sapiens; identical to SEQ ID NO: 36866

SEQ ID NO: 36879 - protein, 404 aa, Homo sapiens; identical to SEQ ID NO: 36861

SEQ ID NO: 36880 - protein, 342 aa, Homo sapiens
MAAGTAVGAWVLVLSLWGAVVGAQNITARIGEPLVLKCKGAPKKPPQRLEWKLGGGPWDSVARVLPNSSLFLPAVGIQDEGIFRCQAMNRNGKETKSNYRVRVYQIPGKPEIVDSASELTAGVPNKVGTCVSEGSYPAGTLSWHLDGKPLVPNEKGVSVKEQTRRHPETGLFTLQSELMVTPARGGDPRPTFSCSFSPGLPRHRALRTAPIQPRVWEPVPLEEVQLVVEPEGGAVAPGGTVTLTCEVPAQPSPQIHWMKDVSDLERGAGRTRRGGANCRLCGRIRAGNSSPGPGDPGRPGDSRPAHWGHLVAKAATPRRGEEGPRKPGGRGGACRTESVGGT

SEQ ID NO: 36881 - protein, 347 aa, Homo sapiens; identical to SEQ ID NO: 36854

SEQ ID NO: 36882 - protein, 234 aa, Homo sapiens; identical to SEQ ID NO: 36866

SEQ ID NO: 36883 - protein, 404 aa, Homo sapiens; identical to SEQ ID NO: 36861

SEQ ID NO: 36884 - protein, 347 aa, Homo sapiens
MAAGTAVGAWVLVLSLWGAVVGAQNITARIGEPLVLKCKGAPKKPPQRLEWKLNTGRTEAWKVLSPQGGGPWDSVARVLPNSSLFLPAVGIQDEGIFRCQAMNRNGKETKSNYRVRVYQIPGKPEIVDSASELTAGVPNKVGTCVSEGSYPAGTLSWHLDGKPLVPNEKGVSVKEQTRRHPETGLFTLQSELMVTPARGGDPRPTFSCSFSPGLPRHRALRTAPIQPRVWEPVPLEEVQLVVEPEGGAVAPGGTVTLTCEVPAQPSPQIHWMKDGVPLPLPPSPVLILPEIGPQDQGTYSCVATHSSHGPQESRAVSISIIEPGEEGPTAGEGFDKVREAEDSPQHM

SEQ ID NO: 36885 - protein, 233 aa, Homo sapiens; identical to SEQ ID NO: 36855

SEQ ID NO: 36886 - protein, 347 aa, Homo sapiens; identical to SEQ ID NO: 36854

SEQ ID NO: 36887 - protein, 234 aa, Homo sapiens; identical to SEQ ID NO: 36866

SEQ ID NO: 36888 - protein, 404 aa, Homo sapiens; identical to SEQ ID NO: 36861

SEQ ID NO: 36889 - protein, 128 aa, Homo sapiens
MAAGTAVGAWVLVLSLWGAVVGAQNITARIGEPLVLKCKGAPKKPPQRLEWKLNTGRTEAWKVLSPQGGGPWDSVARVLPNGSLFLPAVGIQDEGIFRCQAMNRNGKETKSNYRVRVYQFENLHNYSL

SEQ ID NO: 36890 - protein, 153 aa, Homo sapiens
MAAGTAVGAWVLVLSLWGAVVGAQNITARIGEPLVLKCKGAPKKPPQRLEWKLNTGRTEAWKVLSPQGGGPWDSVARVLPNGSLFLPAVGIQDEGILGGLGTAALLIGVILWQRRQRRGEERKAPENQEEEEERAELNQSEEPEAGESSTGGP

SEQ ID NO: 36891 - protein, 294 aa, Homo sapiens; identical to SEQ ID NO: 36859

SEQ ID NO: 36892 - protein, 294 aa, Homo sapiens; identical to SEQ ID NO: 36859

SEQ ID NO: 36893 - protein, 121 aa, Homo sapiens; identical to SEQ ID NO: 36857

SEQ ID NO: 36894 - protein, 435 aa, Homo sapiens; identical to SEQ ID NO: 36860

SEQ ID NO: 36895 - protein, 363 aa, Homo sapiens; identical to SEQ ID NO: 36874

SEQ ID NO: 36896 - protein, 133 aa, Homo sapiens; identical to SEQ ID NO: 36856

SEQ ID NO: 36897 - protein, 128 aa, Homo sapiens
MAAGTAVGAWVLVLSLWGAVVGAQNITARIGEPLVLKCKGAPKKPPQRLEWKLNTGRTEAWKVLSPQGGGPWDSVARVLPNSSLFLPAVGIQDEGIFRCQAMNRNGKETKSNYRVRVYQFENLHNYSL

SEQ ID NO: 36898 - protein, 153 aa, Homo sapiens; identical to SEQ ID NO: 36890

SEQ ID NO: 36899 - protein, 435 aa, Homo sapiens; identical to SEQ ID NO: 36860

SEQ ID NO: 36900 - protein, 121 aa, Homo sapiens; identical to SEQ ID NO: 36857

SEQ ID NO: 36901 - protein, 128 aa, Homo sapiens; identical to SEQ ID NO: 36889

SEQ ID NO: 36902 - protein, 294 aa, Homo sapiens; identical to SEQ ID NO: 36859

SEQ ID NO: 36903 - protein, 121 aa, Homo sapiens
MAAGTAVGAWVLVLSLWGAVVGAQNITARIGEPLVLKCKGAPKKPPQRLEWKLNTGRTEAWKVLSPQGGGPWDSVARVLPNSSLFLPAVGIQDEGIFRCQAMNRNGKETKSNWWWSQKVEQ

SEQ ID NO: 36904 - protein, 153 aa, Homo sapiens; identical to SEQ ID NO: 36890

SEQ ID NO: 36905 - protein, 435 aa, Homo sapiens; identical to SEQ ID NO: 36860

SEQ ID NO: 36906 - protein, 121 aa, Homo sapiens; identical to SEQ ID NO: 36857

SEQ ID NO: 36907 - protein, 133 aa, Homo sapiens; identical to SEQ ID NO: 36856

SEQ ID NO: 36908 - protein, 294 aa, Homo sapiens; identical to SEQ ID NO: 36859

SEQ ID NO: 36909 - protein, 133 aa, Homo sapiens; identical to SEQ ID NO: 36856

SEQ ID NO: 36910 - protein, 363 aa, Homo sapiens; identical to SEQ ID NO: 36874

SEQ ID NO: 36911 - protein, 435 aa, Homo sapiens
MGAGERVQAPPRAEATAGRGADRARTLEGSRMAAGTAVGAWVLVLSLWGAVVGAQNITARIGEPLVLKCKGAPKKPPQRLEWKLNTGRTEAWKVLSPQGGGPWDSVARVLPNSSLFLPAVGIQDEGIFRCQAMNRNGKETKSNYRVRVYQIPGKPEIVDSASELTAGVPNKVGTCVSEGSYPAGTLSWHLDGKPLVPNEKGVSVKEQTRRHPETGLFTLQSELMVTPARGGDPRPTFSCSFSPGLPRHRALRTAPIQPRVWEPVPLEEVQLVVEPEGGAVAPGGTVTLTCEVPAQPSPQIHWMKDGVPLPLPPSPVLILPEIGPQDQGTYSCVATHSSHGPQESRAVSISIIEPGEEGPTAGSVGGSGLGTLALALGILGGLGTAALLIGVILWQRRQRRGEERKAPENQEEEEERAELNQSEEPEAGESSTGGP

SEQ ID NO: 36912 - protein, 128 aa, Homo sapiens; identical to SEQ ID NO: 36889

SEQ ID NO: 36913 - protein, 153 aa, Homo sapiens; identical to SEQ ID NO: 36890

SEQ ID NO: 36914 - protein, 363 aa, Homo sapiens; identical to SEQ ID NO: 36874

SEQ ID NO: 36915 - protein, 121 aa, Homo sapiens; identical to SEQ ID NO: 36857

SEQ ID NO: 36916 - protein, 133 aa, Homo sapiens; identical to SEQ ID NO: 36856

SEQ ID NO: 36917 - protein, 128 aa, Homo sapiens; identical to SEQ ID NO: 36889

SEQ ID NO: 36918 - protein, 363 aa, Homo sapiens; identical to SEQ ID NO: 36874

SEQ ID NO: 36919 - protein, 435 aa, Homo sapiens; identical to SEQ ID NO: 36860

SEQ ID NO: 36920 - protein, 153 aa, Homo sapiens
MAAGTAVGAWVLVLSLWGAVVGAQNITARIGEPLVLKCKGAPKKPPQRLEWKLNTGRTEAWKVLSPQGGGPWDSVARVLPNSSLFLPAVGIQDEGILGGLGTAALLIGVILWQRRQRRGEERKAPENQEEEEERAELNQSEEPEAGESSTGGP

SEQ ID NO: 36921 - protein, 133 aa, Homo sapiens; identical to SEQ ID NO: 36856

SEQ ID NO: 36922 - protein, 294 aa, Homo sapiens; identical to SEQ ID NO: 36859

SEQ ID NO: 36923 - protein, 363 aa, Homo sapiens
MAAGTAVGAWVLVLSLWGAVVGAQNITARIGEPLVLKCKGAPKKPPQRLEWKLNTGRTEAWKVLSPQGGGPWDSVARVLPNSSLFLPAVGIQDEGIFRCQAMNRNGKETKSNYRVRVYQIPGKPEIVDSASELTAGVPNKVVEESRRSRKRPCEQEVGTCVSEGSYPAGTLSWHLDGKPLVPNEKGVSVKEQTRRHPETGLFTLQSELMVTPARGGDPRPTFSCSFSPGLPRHRALRTAPIQPRVWEPVPLEEVQLVVEPEGGAVAPGGTVTLTCEVPAQPSPQIHWMKDGVPLPLPPSPVLILPEIGPQDQGTYSCVATHSSHGPQESRAVSISIIEPGEEGPTAGEGFDKVREAEDSPQHM

SEQ ID NO: 36924 - protein, 153 aa, Homo sapiens; identical to SEQ ID NO: 36890

SEQ ID NO: 36925 - protein, 128 aa, Homo sapiens; identical to SEQ ID NO: 36889

SEQ ID NO: 36926 - protein, 819 aa, Homo sapiens
MPLTSAFRAVDNDPGIIVWRIEKMELALVPVSAHGNFYEGDCYVILSTRRVASLLSQDIHFWIGKDSSQDEQSCAAIYTTQLDDYLGGSPVQHREVQYHESDTFRGYFKQGIIYKQGGVASGMKHVETNTYDVKRLLHVKGKRNIRATEVEMSWDSFNRGDVFLLDLGKVIIQWNGPESNSGERLKAMLLAKDIRDRERGGRAKIGVIEGDKEAASPELMKVLQDTLGRRSIIKPTVPDEIIDQKQKSTIMLYHISDSAGQLAVTEVATRPLVQDLLNHDDCYILDQSGTKIYVWKGKGATKAEKQAAMSKALGFIKMKSYPSSTNVETVNDGAESAMFKQLFQKWSVKDQTMGLGKTFSIGKIAKVFQDKFDVTLLHTKPEVAAQERMVDDGNGKVEVWRIENLELVPVEYQWYGFFYGGDCYLVLYTYEVNGKPHHILYIWQGRHASQDELAASAYQAVEVDRQFDGAAVQVRVRMGTEPRHFMAIFKGKLVIFEGGTSRKGNAEPDPPVRLFQIHGNDKSNTKAVEVPAFASSLNSNDVFLLRTQAEHYLWYGKGSSGDERAMAKELASLLCDGSENTVAEGQEPAEFWDLLGGKTPYANDKRLQQEILDVQSRLFECSNKTGQFVVTEITDFTQDDLNPTDVMLLDTWDQVFLWIGAEANATEKESALATAQQYLHTHPSGRDPDTPILIIKQGFEPPIFTGWFLAWDPNIWSAGKTYEQLKEELGDAAAIMRITADMKNATLSLNSNDSEPKYYPIAVLLKNQNQELPEDVNPAKKENYLSEQDFVSVFGITRGQFAALPGWKQLQMKKEKGLF

SEQ ID NO: 36927 - protein, 812 aa, Homo sapiens
MSSTGHPGSYKIWGEKMELALVPVSAHGNFYEGDCYVILSTRRVASLLSQDIHFWIGKDSSQDEQSCAAIYTTQLDDYLGGSPVQHREVQYHESDTFRGYFKQGIIYKQGGVASGMKHVETNTYDVKRLLHVKGKRNIRATEVEMSWDSFNRGDVFLLDLGKVIIQWNGPESNSGERLKAMLLAKDIRDRERGGRAKIGVIEGDKEAASPELMKVLQDTLGRRSIIKPTVPDEIIDQKQKSTIMLYHISDSAGQLAVTEVATRPLVQDLLNHDDCYILDQSGTKIYVWKGKGATKAEKQAAMSKALGFIKMKSYPSSTNVETVNDGAESAMFKQLFQKWSVKDQTMGLGKTFSIGKIAKVFQDKFDVTLLHTKPEVAAQERMVDDGNGKVEVWRIENLELVPVEYQWYGFFYGGDCYLVLYTYEVNGKPHHILYIWQGRHASQDELAASAYQAVEVDRQFDGAAVQVRVRMGTEPRHFMAIFKGKLVIFEGGTSRKGNAEPDPPVRLFQIHGNDKSNTKAVEVPAFASSLNSNDVFLLRTQAEHYLWYGKGSSGDERAMAKELASLLCDGSENTVAEGQEPAEFWDLLGGKTPYANDKRLQQEILDVQSRLFECSNKTGQFVVTEITDFTQDDLNPTDVMLLDTWDQVFLWIGAEANATEKESALATAQQYLHTHPSGRDPDTPILIIKQGFEPPIFTGWFLAWDPNIWSAGKTYEQLKEELGDAAAIMRITADMKNATLSLNSNDSEPKYYPIAVLLKNQNQELPEDVNPAKKENYLSEQDFVSVFGITRGQFAALPGWKQLQMKKEKGLF

SEQ ID NO: 36928 - protein, 157 aa, Homo sapiens
MPLTSAFRAVDNDPGIIVWRIEKMELALVPVSAHGNFYEGDCYVILSTRRVASLLSQDIHFWIGKDSSQDEQSCAAIYTTQLDDYLGGSPVQHREVQYHESDTFRGYFKQGIIYKQGGVASGMKHVETNTYDVKRLLHVKGKRNIRATEVEMSWDSF

SEQ ID NO: 36929 - protein, 952 aa, Homo sapiens
MKFKRRHQAFPSFFKMKVSLPSDPSCVEEILRESQHLTPGFTLQKWNDPTTRASTKSVSFKSMLEDDLKLSSDEDDLEPVKTLTTQCTATELYQAVEKAKPRNNPVNPPLATPQPPPAVQASGGSGSSSESESSSESDSDTESSTTDSESNEAPRVATPEPEPPSTNKWQLDKWLNKVTSQNKSFICGQNETPMETISLPPPIIQPMEVQMKVKTNASQVPAEPKERPLLSLIREKARPRPTQKIPETKALKHKLSTTSETVSQRTIGKKQPKKVEKNTSTDEFTWPKPNITSSTPKEKESVELHDPPRGRNKATAHKPAPRKEPRPNIPLAPEKKKYRGPGKIVPKSREFIETDSSTSDSNTDQEETLQIKVLPPCIISGGNTAKSKEICGASLTLSTLMSSSGSNNNLSISNEEPTFSPIPVMQTEILSPLRDHENLKNLWVKIDLDLLSRVPGHSSLHAAPAKPDHKETATKPKRQTAVTAVEKPAPKGKRKHKPIEVAEKIPEKKQRLEEATTICLLPPCISPAPPHKPPNTRENNSSRRANRRKEEKLFPPPLSPLPEDPPRRRNVSGNNGPFGQDKNIAMTGQITSTKPKRTEGKFCATFKGISVNEGDTPKKASSATITVTNTAIATATVTATAIVTTTVTATATATATTTTTTTTISTITSTITTGLMDSSHLEMTSWAALPLLSSSSTNVRRPKLTFDDSVHNADYYMQEAKKLKHKADALFEKFGKAVNYADAALSFTECGNAMERDPLEAKSPYTMYSETVELLRYAMRLKNFASPLASDGDKKLAVLCYRCLSLLYLRMFKLKKDHAMKYSRSLMEYFKQNASKVAQIPSPWVSNGKNTPSPVSLNNVSPINAMGNCNNGPVTIPQRIHHMAASHVNITSNVLRGYEHWDMADKLTRENKEFFGDLDTLMGPLTQHSSMTNLVRYVRQGLCWLRIDAHLL

SEQ ID NO: 36930 - protein, 1278 aa, Homo sapiens
MDLFDFFRDWDLEQQCHYEQDRSALKKREWERRNQEVQQEDDLFSSGFDLFGEPYKTNKGDALANRVQNTLGNYDEMKNLLTNHSNQNHLVGIPKNSVPQNPNNKNEPSFFPEQKNRIIPPHQDNTHPSAPMPPPSVVILNSTLIHSNRKSKPEWSRDSHNPSTVLASQASGQPNKMQTLTQDQSQAKLEDFFVYPAEQPQIGEVEESNPSAKEDSNPNSSGEDAFKEIFQSNSPEESEFAVQAPGSPLVASSLLAPSSGLSVQNFPPGLYCKTSMGQQKPTAYVRPMDGQDQAPDISPTLKPSIEFENSFGNLSFGTLLDGKPSAASSKTKLPKFTILQTSEVSLPSDPSCVEEILRESQHLTPGFTLQKWNDPTTRASTKSVSFKSMLEDDLKLSSDEDDLEPVKTLTTQCTATELYQAVEKAKPRNNPVNPPLATPQPPPAVQASGGSGSSSESESSSESDSDTESSTTDSESNEAPRVATPEPEPPSTNKWQLDKWLNKVTSQNKSFICGQNETPMETISLPPPIIQPMEVQMKVKTNASQVPAEPKERPLLSLIREKARPRPTQKIPETKALKHKLSTTSETVSQRTIGKKQPKKVEKNTSTDEFTWPKPNITSSTPKEKESVELHDPPRGRNKATAHKPAPRKEPRPNIPLAPEKKKYRGPGKIVPKSREFIETDSSTSDSNTDQEETLQIKVLPPCIISGGNTAKSKEICGASLTLSTLMSSSGSNNNLSISNEEPTFSPIPVMQTEILSPLRDHENLKNLWVKIDLDLLSRVPGHSSLHAAPAKPDHKETATKPKRQTAVTAVEKPAPKGKRKHKPIEVAEKIPEKKQRLEEATTICLLPPCISPAPPHKPPNTRENNSSRRANRRKEEKLFPPPLSPLPEDPPRRRNVSGNNGPFGQDKNIAMTGQITSTKPKRTEGKFCATFKGISVNEGDTPKKASSATITVTNTAIATATVTATAIVTTTVTATATATATTTTTTTTISTITSTITTGLMDSSHLEMTSWAALPLLSSSSTNVRRPKLTFDDSVHNADYYMQEAKKLKHKADALFEKFGKAVNYADAALSFTECGNAMERDPLEAKSPYTMYSETVELLRYAMRLKNFASPLASDGDKKLAVLCYRCLSLLYLRMFKLKKDHAMKYSRSLMEYFKQNASKVAQIPSPWVSNGKNTPSPVSLNNVSPINAMGNCNNGPVTIPQRIHHMAASHVNITSNVLRGYEHWDMADKLTRENKEFFGDLDTLMGPLTQHSSMTNLVRYVRQGLCWLRIDAHLL

SEQ ID NO: 36931 - protein, 1276 aa, Homo sapiens
MDLFDFFRDWDLEQQCHYEQDRSALKKREWERRNQEVQQEDDLFSSGFDLFGEPYKTNKGDALANRVQNTLGNYDEMKNLLTNHSNQNHLVGIPKNSVPQNPNNKNEPSFFPEQKNRIIPPHQDNTHPSAPMPPPSVVILNSTLIHSNRKSKPEWSRDSHNPSTVLASQASGQPNKMQTLTQDQSQAKLEDFFVYPAEQPQIGEVEESNPSAKEDSNPNSSGEDAFKEIFQSNSPEESEFAVQAPGSPLVASSLLAPSSGLSVQNFPPGLYCKTSMGQQKPTAYVRPMDGQDQAPDISPTLKPSIEFENSFGNLSFGTLLDGKPSAASSKTKLPKFTILQTSEVSLPSDPSCVEEILRESQHLTPGFTLQKWNDPTTRASTKSVSFKSMLEDDLKLSSDEDDLEPVKTLTTQCTATELYQAVEKAKPRNNPVNPPLATPQPPPAVQASGGSGSSSESESSSESDSDTESSTTDSESNEAPRVATPEPEPPSTNKWQLDKWLNKVTSQNKSFICGQNETPMETISLPPPIIQPMEVQMKVKTNASQVPAEPKERPLLSLIREKARPRPTQKIPETKALKHKLSTTSETVSQRTIGKKQPKKVEKNTSTDEFTWPKPNITSSTPKEKESVELHDPPRGRNKATAHKPAPRKEPRPNIPLAPEKKKYRGPGKIVPKSREFIETDSSTSDSNTDQEETLQIKVLPPCIISGGNTAKSKEICGASLTLSTLMSSSGSNNNLSISNEEPTFSPIPVMQTEILSPLRDHENLKNLWVKIDLDLLSRVPGHSSLHAAPAKPDHKETATKPKRQTAVTAVEKPAPKGKRKHKPIEVAEKIPEKKQRLEEATTICLLPPCISPAPPHKPPNTRENNSSRRANRRKEEKLFPPPLSPLPEDPPRRRNVSGNNGPFGQDKNIAMTGQITSTKPKRTEGKFCATFKGISEGDTPKKASSATITVTNTAIATATVTATAIVTTTVTATATATATTTTTTTTISTITSTITTGLMDSSHLEMTSWAALPLLSSSSTNVRRPKLTFDDSVHNADYYMQEAKKLKHKADALFEKFGKAVNYADAALSFTECGNAMERDPLEAKSPYTMYSETVELLRYAMRLKNFASPLASDGDKKLAVLCYRCLSLLYLRMFKLKKDHAMKYSRSLMEYFKQNASKVAQIPSPWVSNGKNTPSPVSLNNVSPINAMGNCNNGPVTIPQRIHHMAASHVNITSNVLRGYEHWDMADKLTRENKEFFGDLDTLMGPLTQHSSMTNLVRYVRQGLCWLRIDAHLL

SEQ ID NO: 36932 - protein, 427 aa, Homo sapiens
MDLFDFFRDWDLEQQCHYEQDRSALKKREWERRNQEVQQEDDLFSSGFDLFGEPYKTNKGDALANRVQNTLGNYDEMKNLLTNHSNQNHLVGIPKNSVPQNPNNKNEPSFFPEQKNRIIPPHQDNTHPSAPMPPPSVVILNSTLIHSNRKSKPEWSRDSHNPSTVLASQASGQPNKMQTLTQDQSQAKLEDFFVYPAEQPQIGEVEESNPSAKEDSNPNSSGEDAFKEIFQSNSPEESEFAVQAPGSPLVASSLLAPSSGLSVQNFPPGLYCKTSMGQQKPTAYVRPMDGQDQAPDISPTLKPSIEFENSFGNLSFGTLLDGKPSAASSKTKLPKFTILQTSEVSLPSDPSCVEEILRESQHLTPGFTLQKWNDPTTRASTKMLEDDLKLSSDEDDLEPVKTLTTQCTATELYQAVEKAKPRNNPVK

SEQ ID NO: 36933 - protein, 1311 aa, Homo sapiens
MDLFDFFRDWDLEQQCHYEQDRSALKKREWERRNQEVQQEDDLFSSGFDLFGEPYKVAEYTNKGDALANRVQNTLGNYDEMKNLLTNHSNQNHLVGIPKNSVPQNPNNKNEPSFFPEQKNRIIPPHQDNTHPSAPMPPPSVVILNSTLIHSNRKSKPEWSRDSHNPSTVLASQASGQPNKMQTLTQDQSQAKLEDFFVYPAEQPQIGEVEESNPSAKEDSNPNSSGEDAFKEIFQSNSPEESEFAVQAPGSPLVASSLLAPSSGLSVQNFPPGLYCKTSMGQQKPTAYVRPMDGQDQAPDISPTLKPSIEFENSFGNLSFGTLLDGKPSAASSKTKLPKFTILQTSEVSLPSDPSCVEEILREMTHSWPTPLTSMHTAGHSEQSTFSIPGQESQHLTPGFTLQKWNDPTTRASTKSVSFKSMLEDDLKLSSDEDDLEPVKTLTTQCTATELYQAVEKAKPRNNPVNPPLATPQPPPAVQASGGSGSSSESESSSESDSDTESSTTDSESNEAPRVATPEPEPPSTNKWQLDKWLNKVTSQNKSFICGQNETPMETISLPPPIIQPMEVQMKVKTNASQVPAEPKERPLLSLIREKARPRPTQKIPETKALKHKLSTTSETVSQRTIGKKQPKKVEKNTSTDEFTWPKPNITSSTPKEKESVELHDPPRGRNKATAHKPAPRKEPRPNIPLAPEKKKYRGPGKIVPKSREFIETDSSTSDSNTDQEETLQIKVLPPCIISGGNTAKSKEICGASLTLSTLMSSSGSNNNLSISNEEPTFSPIPVMQTEILSPLRDHENLKNLWVKIDLDLLSRVPGHSSLHAAPAKPDHKETATKPKRQTAVTAVEKPAPKGKRKHKPIEVAEKIPEKKQRLEEATTICLLPPCISPAPPHKPPNTRENNSSRRANRRKEEKLFPPPLSPLPEDPPRRRNVSGNNGPFGQDKNIAMTGQITSTKPKRTEGKFCATFKGISVNEGDTPKKASSATITVTNTAIATATVTATAIVTTTVTATATATATTTTTTTTISTITSTITTGLMDSSHLEMTSWAALPLLSSSSTNVRRPKLTFDDSVHNADYYMQEAKKLKHKADALFEKFGKAVNYADAALSFTECGNAMERDPLEAKSPYTMYSETVELLRYAMRLKNFASPLASDGDKKLAVLCYRCLSLLYLRMFKLKKDHAMKYSRSLMEYFKQNASKVAQIPSPWVSNGKNTPSPVSLNNVSPINAMGNCNNGPVTIPQRIHHMAASHVNITSNVLRGYEHWDMADKLTRENKEFFGDLDTLMGPLTQHSSMTNLVRYVRQGLCWLRIDAHLL

SEQ ID NO: 36934 - protein, 599 aa, Homo sapiens
MKLLKLTGFIFFLFFLTESLTLPTQPRDIENFNSTQKFIEDNIEYITIIAFAQYVQEATFEEMEKLVKDMVEYKDRCMADKTLPECSKLPNNVLQEKICAMEGLPQKHNFSHCCSKVDAQRRLCFFYNKKSDVGFLPPFPTLDPEEKCQAYESNRESLLNHFLYEVARRNPFVFAPTLLTVAVHFEEVAKSCCEEQNKVNCLQTRAIPVTQYLKAFSSYQKHVCGALLKFGTKVVHFIYIAILSQKFPKIEFKELISLVEDVSSNYDGCCEGDVVQCIRDTSKVMNHICSKQDSISSKIKECCEKKIPERGQCIINSNKDDRPKDLSLREGKFTDSENVCQERDADPDTFFAKFTFEYSRRHPDLSIPELLRIVQIYKDLLRNCCNTENPPGCYRYAEDKFNETTEKSLKMVQQECKHFQNLGKDGLKYHYLIRLTKIAPQLSTEELVSLGEKMVTAFTTCCTLSEEFACVDNLADLVFGELCGVNENRTINPAVDHCCKTNFAFRRPCFESLKADKTYVPPPFSQDLFTFHADMCQSQNEELQRKTDRFLVNLVKLKHELTDEELQSLFTNFANVVDKCCKAESPEVCFNEESPKIGN

SEQ ID NO: 36935 - protein, 797 aa, Homo sapiens
MAHRCLRLWGRGGCWPRGLQQLLVPGGVGPGEQPCLRTLYRFVTTQARASRNSLLTDIIAAYQRFCSRPPKGFEKYFPNGKNGKKASEPKEVMGEKKESKPAATTRSSGGGGGGGGKRGGKKDDSHWWSRFQKGDIPWDDKDFRMFFLWTALFWGGVMFYLLLKRSGREITWKDFVNNYLSKGVVDRLEVVNKRFVRVTFTPGKTPVDGQYVWFNIGSVDTFERNLETLQQELGIEGENRVPVVYIAESDGSFLLSMLPTVLIIAFLLYTIRRGPAGIGRTGRGMGGLFSVGETTAKVLKDEIDVKFKDVAGCEEAKLEIMEFVNFLKNPKQYQDLGAKIPKGAILTGPPGTGKTLLAKATAGEANVPFITVSGSEFLEMFVGVGPARVRDLFALARKNAPCILFIDEIDAVGRKRGRGNFGGQSEQENTLNQLLVEMDGFNTTTNVVILAGTNRPDILDPALLRPGRFDRQIFIGPPDIKGRASIFKVHLRPLKLDSTLEKDKLARKLASLTPGFSGADVANVCNEAALIAARHLSDSINQKHFEQAIERVIGGLEKKTQVLQPEEKKTVAYHEAGHAVAGWYLEHADPLLKVSIIPRGKGLGYAQYLPKEQYLYTKEQLLDRMCMTLGGRVSEEIFFGRITTGAQDDLRKVTQSAYAQIVQFGMNEKVGQISFDLPRQGDMVLEKPYSEATARLIDDEVRILINDAYKRTVALLTEKKADVEKVALLLLEKEVLDKNDMVELLGPRPFAEKSTYEEFVEGTGSLDEDTSLPEGLKDWNKEREKEKEEPPGEKVAN

SEQ ID NO: 36936 - protein, 812 aa, Homo sapiens
GAGGRRRRVESLGSSVSRRRASLPGGLSPSRARFPRPPVVACPRLREQPCLRTLYRFVTTQARASRNSLLTDIIAAYQRFCSRPPKGFEKYFPNGKNGKKASEPKEVMGEKKESKPAATTRSSGGGGGGGGKRGGKKDDSHWWSRFQKGDIPWDDKDFRMFFLWTALFWGGVMFYLLLKRSGREITWKDFVNNYLSKGVVDRLEVVNKRFVRVTFTPGKTPVDGQYVWFNIGSVDTFERNLETLQQELGIEGENRVPVVYIAESDGSFLLSMLPTVLIIAFLLYTIRRGPAGIGRTGRGMGGLFSVGETTAKVLKDEIDVKFKDVAGCEEAKLEIMEFVNFLKNPKQYQDLGAKIPKGAILTGPPGTGKTLLAKATAGEANVPFITVSGSEFLEMFVGVGPARVRDLFALARKNAPCILFIDEIDAVGRKRGRGNFGGQSEQENTLNQLLVEMDGFNTTTNVVILAGTNRPDILDPALLRPGRFDRQIFIGPPDIKGRASIFKVHLRPLKLDSTLEKDKLARKLASLTPGFSGADVANVCNEAALIAARHLSDSINQKHFEQAIERVIGGLEKKTQVLQPEEKKTVAYHEAGHAVAGWYLEHADPLLKVSIIPRGKGLGYAQYLPKEQYLYTKEQLLDRMCMTLGGRVSEEIFFGRITTGAQDDLRKVTQSAYAQIVQFGMNEKVGQISFDLPRQGDMVLEKPYSEATARLIDDEVRILINDAYKRTVALLTEKKADVEKVALLLLEKEVLDKNDMVELLGPRPFAEKSTYEEFVEGTGSLDEDTSLPEGLKDWNKEREKEKEEPPGEKVAN

SEQ ID NO: 36937 - protein, 2416 aa, Homo sapiens
MTTLLWVFVTLRVITAAVTVETSDHDNSLSVSIPQPSPLRVLLGTSLTIPCYFIDPMHPVTTAPSTAPLAPRIKWSRVSKEKEVVLLVATEGRVRVNSAYQDKVSLPNYPAIPSDATLEVQSLRSNDSGVYRCEVMHGIEDSEATLEVVVKGIVFHYRAISTRYTLDFDRAQRACLQNSAIIATPEQLQAAYEDGFHQCDAGWLADQTVRYPIHTPREGCYGDKDEFPGVRTYGIRDTNETYDVYCFAEEMEGEVFYATSPEKFTFQEAANECRRLGARLATTGQLYLAWQAGMDMCSAGWLADRSVRYPISKARPNCGGNLLGVRTVYVHANQTGYPDPSSRYDAICYTGEDFVDIPENFFGVGGEEDITVQTVTWPDMELPLPRNITEGEARGSVILTVKPIFEVSPSPLEPEEPFTFAPEIGATAFAEVENETGEATRPWGFPTPGLGPATAFTSEDLVVQVTAVPGQPHLPGGVVFHYRPGPTRYSLTFEEAQQACLRTGAVIASPEQLQAAYEAGYEQCDAGWLRDQTVRYPIVSPRTPCVGDKDSSPGVRTYGVRPSTETYDVYCFVDRLEGEVFFATRLEQFTFQEALEFCESHNATLATTGQLYAAWSRGLDKCYAGWLADGSLRYPIVTPRPACGGDKPGVRTVYLYPNQTGLPDPLSRHHAFCFRGISAVPSPGEEEGGTPTSPSGVEEWIVTQVVPGVAAVPVEEETTAVPSGETTAILEFTTEPENQTEWEPAYTPVGTSPLPGILPTWPPTGAATEESTEGPSATEVPSASEEPSPSEVPFPSEEPSPSEEPFPSVRPFPSVELFPSEEPFPSKEPSPSEEPSASEEPYTPSPPVPSWTELPSSGEESGAPDVSGDFTGSGDVSGHLDFSGQLSGDRASGLPSGDLDSSGLTSTVGSGLPVESGLPSGDEERIEWPSTPTVGELPSGAEILEGSASGVGDLSGLPSGEVLETSASGVGDLSGLPSGEVLETTAPGVEDISGLPSGEVLETTAPGVEDISGLPSGEVLETTAPGVEDISGLPSGEVLETTAPGVEDISGLPSGEVLETTAPGVEDISGLPSGEVLETAAPGVEDISGLPSGEVLETAAPGVEDISGLPSGEVLETAAPGVEDISGLPSGEVLETAAPGVEDISGLPSGEVLETAAPGVEDISGLPSGEVLETAAPGVEDISGLPSGEVLETAAPGVEDISGLPSGEVLETAAPGVEDISGLPSGEVLETAAPGVEDISGLPSGEVLETAAPGVEDISGLPSGEVLETAAPGVEDISGLPSGEVLETTAPGVEEISGLPSGEVLETTAPGVDEISGLPSGEVLETTAPGVEEISGLPSGEVLETSTSAVGDLSGLPSGGEVLEISVSGVEDISGLPSGEVVETSASGIEDVSELPSGEGLETSASGVEDLSRLPSGEEVLEISASGFGDLSGLPSGGEGLETSASEVGTDLSGLPSGREGLETSASGAEDLSGLPSGKEDLVGSASGDLDLGKLPSGTLGSGQAPETSGLPSGFSGEYSGVDLGSGPPSGLPDFSGLPSGFPTVSLVDSTLVEVVTASTASELEGRGTIGISGAGEISGLPSSELDISGRASGLPSGTELSGQASGSPDVSGEIPGLFGVSGQPSGFPDTSGETSGVTELSGLSSGQPGISGEASGVLYGTSQPFGITDLSGETSGVPDLSGQPSGLPGFSGATSGVPDLVSGTTSGSGESSGITFVDTSLVEVAPTTFKEEEGLGSVELSGLPSGEADLSGKSGMVDVSGQFSGTVDSSGFTSQTPEFSGLPSGIAEVSGESSRAEIGSSLPSGAYYGSGTPSSFPTVSLVDRTLVESVTQAPTAQEAGEGPSGILELSGAHSGAPDMSGEHSGFLDLSGLQSGLIEPSGEPPGTPYFSGDFASTTNVSGESSVAMGTSGEASGLPEVTLITSEFVEGVTEPTISQELGQRPPVTHTPQLFESSGKVSTAGDISGATPVLPGSGVEVSSVPESSSETSAYPEAGFGASAAPEASREDSGSPDLSETTSAFHEANLERSSGLGVSGSTLTFQEGEASAAPEVSGESTTTSDVGTEAPGLPSATPTASGDRTEISGDLSGHTSQLGVVISTSIPESEWTQQTQRPAETHLEIESSSLLYSGEETHTVETATSPTDASIPASPEWKRESESTAAAPARSCAEEPCGAGTCKETEGHVICLCPPGYTGEHCNIDQEVCEEGWNKYQGHCYRHFPDRETWVDAERRCREQQSHLSSIVTPEEQEFVNNNAQDYQWIGLNDRTIEGDFRWSDGHPMQFENWRPNQPDNFFAAGEDCVVMIWHEKGEWNDVPCNYHLPFTCKKGTVACGEPPVVEHARTFGQKKDRYEINSLVRYQCTEGFVQRHMPTIRCQPSGHWEEPQITCTDPTTYKRRLQKRSSRHPRRSRPSTAH

SEQ ID NO: 36938 - protein, 2431 aa, Homo sapiens
MTTLLWVFVTLRVITAAVTVETSDHDNSLSVSIPQPSPLRVLLGTSLTIPCYFIDPMHPVTTAPSTAPLAPRIKWSRVSKEKEVVLLVATEGRVRVNSAYQDKVSLPNYPAIPSDATLEVQSLRSNDSGVYRCEVMHGIEDSEATLEVVVKGIVFHYRAISTRYTLDFDRAQRACLQNSAIIATPEQLQAAYEDGFHQCDAGWLADQTVRYPIHTPREGCYGDKDEFPGVRTYGIRDTNETYDVYCFAEEMEGEVFYATSPEKFTFQEAANECRRLGARLATTGQLYLAWQAGMDMCSAGWLADRSVRYPISKARPNCGGNLLGVRTVYVHANQTGYPDPSSRYDAICYTGEDFVDIPENFFGVGGEEDITVQTVTWPDMELPLPRNITEGEARGSVILTVKPIFEVSPSPLEPEEPFTFAPEIGATAFAEVENETGEATRPWGFPTPGLGPATAFTSEDLVVQVTAVPGQPHLPGGVVFHYRPGPTRYSLTFEEAQQACLRTGAVIASPEQLQAAYEAGYEQCDAGWLRDQTVRYPIVSPRTPCVGDKDSSPGVRTYGVRPSTETYDVYCFVDRLEGEVFFATRLEQFTFQEALEFCESHNATLATTGQLYAAWSRGLDKCYAGWLADGSLRYPIVTPRPACGGDKPGVRTVYLYPNQTGLPDPLSRHHAFCFRGISAVPSPGEEEGGTPTSPSGVEEWIVTQVVPGVAAVPVEEETTAVPSGETTAILEFTTEPENQTEWEPAYTPVGTSPLPGILPTWPPTGAATEESTEGPSATEVPSASEEPSPSEVPFPSEEPSPSEEPFPSVRPFPSVELFPSEEPFPSKEPSPSEEPSASEEPYTPSPPVPSWTELPSSGEESGAPDVSGDFTGSGDVSGHLDFSGQLSGDRASGLPSGDLDSSGLTSTVGSGLPVESGLPSGDEERIEWPSTPTVGELPSGAEILEGSASGVGDLSGLPSGEVLETSASGVGDLSGLPSGEVLETTAPGVEDISGLPSGEVLETTAPGVEDISGLPSGEVLETTAPGVEDISGLPSGEVLETTAPGVEDISGLPSGEVLETTAPGVEDISGLPSGEVLETTAPGVEDISGLPSGEVLETAAPGVEDISGLPSGEVLETAAPGVEDISGLPSGEVLETAAPGVEDISGLPSGEVLETAAPGVEDISGLPSGEVLETAAPGVEDISGLPSGEVLETAAPGVEDISGLPSGEVLETAAPGVEDISGLPSGEVLETAAPGVEDISGLPSGEVLETAAPGVEDISGLPSGEVLETAAPGVEDISGLPSGEVLETAAPGVEDISGLPSGEVLETAAPGVEDISGLPSGEVLETAAPGVEDISGLPSGEVLETAAPGVEDISGLPSGEVLETAAPGVEDISGLPSGEVLETAAPGVEDISGLPSGEVLETTAPGVEEISGLPSGEVLETTAPGVDEISGLPSGEVLETTAPGVEEISGLPSGEVLETSTSAVGDLSGLPSGGEVLEISVSGVEDISGLPSGEVVETSASGIEDVSELPSGEGLETSASGVEDLSRLPSGEEVLEISASGFGDLSGLPSGGEGLETSASEVGTDLSGLPSGREGLETSASGAEDLSGLPSGKEDLVGSASGDLDLGKLPSGTLGSGQAPETSGLPSGFSGEYSGVDLGSGPPSGLPDFSGLPSGFPTVSLVDSTLVEVVTASTASELEGRGTIGISGAGEISGLPSSELDISGRASGLPSGTELSGQASGSPDVSGEIPGLFGVSGQPSGFPDTSGETSGVTELSGLSSGQPGISGEASGVLYGTSQPFGITDLSGETSGVPDLSGQPSGLPGFSGATSGVPDLVSGTTSGSGESSGITFVDTSLVEVAPTTFKEEEGLGSVELSGLPSGEADLSGKSGMVDVSGQFSGTVDSSGFTSQTPEFSGLPSGIAEVSGESSRAEIGSSLPSGAYYGSGTPSSFPTVSLVDRTLVESVTQAPTAQEAGEGPSGILELSGAHSGAPDMSGEHSGFLDLSGLQSGLIEPSGEPPGTPYFSGDFASTTNVSGESSVAMGTSGEASGLPEVTLITSEFVEGVTEPTISQELGQRPPVTHTPQLFESSGKVSTAGDISGATPVLPGSGVEVSSVPESSSETSAYPEAGFGASAAPEASREDSGSPDLSETTSAFHEANLERSSGLGVSGSTLTFQEGEASAAPEVSGESTTTSDVGTEAPGLPSATPTASGDRTEISGDLSGHTSQLGVVISTSIPESEWTQQTQRPAETHLEIESSSLLYSGEETHTVETATSPTDASIPASPEWKRESESTAADQEVCEEGWNKYQGHCYRHFPDRETWVDAERRCREQQSHLSSIVTPEEQEFVNNNAQDYQWIGLNDRTIEGDFRWSDGHPMQFENWRPNQPDNFFAAGEDCVVMIWHEKGEWNDVPCNYHLPFTCKKGTATTYKRRLQKRSSRHPRRSRPSTAH

SEQ ID NO: 36939 - protein, 2530 aa, Homo sapiens
MTTLLWVFVTLRVITAAVTVETSDHDNSLSVSIPQPSPLRVLLGTSLTIPCYFIDPMHPVTTAPSTAPLAPRIKWSRVSKEKEVVLLVATEGRVRVNSAYQDKVSLPNYPAIPSDATLEVQSLRSNDSGVYRCEVMHGIEDSEATLEVVVKGIVFHYRAISTRYTLDFDRAQRACLQNSAIIATPEQLQAAYEDGFHQCDAGWLADQTVRYPIHTPREGCYGDKDEFPGVRTYGIRDTNETYDVYCFAEEMEGEVFYATSPEKFTFQEAANECRRLGARLATTGQLYLAWQAGMDMCSAGWLADRSVRYPISKARPNCGGNLLGVRTVYVHANQTGYPDPSSRYDAICYTGEDFVDIPENFFGVGGEEDITVQTVTWPDMELPLPRNITEGEARGSVILTVKPIFEVSPSPLEPEEPFTFAPEIGATAFAEVENETGEATRPWGFPTPGLGPATAFTSEDLVVQVTAVPGQPHLPGGVVFHYRPGPTRYSLTFEEAQQACLRTGAVIASPEQLQAAYEAGYEQCDAGWLRDQTVRYPIVSPRTPCVGDKDSSPGVRTYGVRPSTETYDVYCFVDRLEGEVFFATRLEQFTFQEALEFCESHNATLATTGQLYAAWSRGLDKCYAGWLADGSLRYPIVTPRPACGGDKPGVRTVYLYPNQTGLPDPLSRHHAFCFRGISAVPSPGEEEGGTPTSPSGVEEWIVTQVVPGVAAVPVEEETTAVPSGETTAILEFTTEPENQTEWEPAYTPVGTSPLPGILPTWPPTGAATEESTEGPSATEVPSASEEPSPSEVPFPSEEPSPSEEPFPSVRPFPSVELFPSEEPFPSKEPSPSEEPSASEEPYTPSPPVPSWTELPSSGEESGAPDVSGDFTGSGDVSGHLDFSGQLSGDRASGLPSGDLDSSGLTSTVGSGLPVESGLPSGDEERIEWPSTPTVGELPSGAEILEGSASGVGDLSGLPSGEVLETSASGVGDLSGLPSGEVLETTAPGVEDISGLPSGEVLETTAPGVEDISGLPSGEVLETTAPGVEDISGLPSGEVLETTAPGVEDISGLPSGEVLETTAPGVEDISGLPSGEVLETTAPGVEDISGLPSGEVLETAAPGVEDISGLPSGEVLETAAPGVEDISGLPSGEVLETAAPGVEDISGLPSGEVLETAAPGVEDISGLPSGEVLETAAPGVEDISGLPSGEVLETAAPGVEDISGLPSGEVLETAAPGVEDISGLPSGEVLETAAPGVEDISGLPSGEVLETAAPGVEDISGLPSGEVLETAAPGVEDISGLPSGEVLETAAPGVEDISGLPSGEVLETAAPGVEDISGLPSGEVLETAAPGVEDISGLPSGEVLETAAPGVEDISGLPSGEVLETAAPGVEDISGLPSGEVLETAAPGVEDISGLPSGEVLETTAPGVEEISGLPSGEVLETTAPGVDEISGLPSGEVLETTAPGVEEISGLPSGEVLETSTSAVGDLSGLPSGGEVLEISVSGVEDISGLPSGEVVETSASGIEDVSELPSGEGLETSASGVEDLSRLPSGEEVLEISASGFGDLSGLPSGGEGLETSASEVGTDLSGLPSGREGLETSASGAEDLSGLPSGKEDLVGSASGDLDLGKLPSGTLGSGQAPETSGLPSGFSGEYSGVDLGSGPPSGLPDFSGLPSGFPTVSLVDSTLVEVVTASTASELEGRGTIGISGAGEISGLPSSELDISGRASGLPSGTELSGQASGSPDVSGEIPGLFGVSGQPSGFPDTSGETSGVTELSGLSSGQPGISGEASGVLYGTSQPFGITDLSGETSGVPDLSGQPSGLPGFSGATSGVPDLVSGTTSGSGESSGITFVDTSLVEVAPTTFKEEEGLGSVELSGLPSGEADLSGKSGMVDVSGQFSGTVDSSGFTSQTPEFSGLPSGIAEVSGESSRAEIGSSLPSGAYYGSGTPSSFPTVSLVDRTLVESVTQAPTAQEAGEGPSGILELSGAHSGAPDMSGEHSGFLDLSGLQSGLIEPSGEPPGTPYFSGDFASTTNVSGESSVAMGTSGEASGLPEVTLITSEFVEGVTEPTISQELGQRPPVTHTPQLFESSGKVSTAGDISGATPVLPGSGVEVSSVPESSSETSAYPEAGFGASAAPEASREDSGSPDLSETTSAFHEANLERSSGLGVSGSTLTFQEGEASAAPEVSGESTTTSDVGTEAPGLPSATPTASGDRTEISGDLSGHTSQLGVVISTSIPESEWTQQTQRPAETHLEIESSSLLYSGEETHTVETATSPTDASIPASPEWKRESESTAAAPARSCAEEPCGAGTCKETEGHVICLCPPGYTGEHCNIDQEVCEEGWNKYQGHCYRHFPDRETWVDAERRCREQQSHLSSIVTPEEQEFVNNNAQDYQWIGLNDRTIEGDFRWSDGHPMQFENWRPNQPDNFFAAGEDCVVMIWHEKGEWNDVPCNYHLPFTCKKGTVACGEPPVVEHARTFGQKKDRYEINSLVRYQCTEGFVQRHMPTIRCQPSGHWEEPQITCTDPTTYKRRLQKRSSRHPRRSRPSTAH

SEQ ID NO: 36940 - protein, 2492 aa, Homo sapiens
MTTLLWVFVTLRVITAAVTVETSDHDNSLSVSIPQPSPLRVLLGTSLTIPCYFIDPMHPVTTAPSTAPLAPRIKWSRVSKEKEVVLLVATEGRVRVNSAYQDKVSLPNYPAIPSDATLEVQSLRSNDSGVYRCEVMHGIEDSEATLEVVVKGIVFHYRAISTRYTLDFDRAQRACLQNSAIIATPEQLQAAYEDGFHQCDAGWLADQTVRYPIHTPREGCYGDKDEFPGVRTYGIRDTNETYDVYCFAEEMEGEVFYATSPEKFTFQEAANECRRLGARLATTGQLYLAWQAGMDMCSAGWLADRSVRYPISKARPNCGGNLLGVRTVYVHANQTGYPDPSSRYDAICYTGEDFVDIPENFFGVGGEEDITVQTVTWPDMELPLPRNITEGEARGSVILTVKPIFEVSPSPLEPEEPFTFAPEIGATAFAEVENETGEATRPWGFPTPGLGPATAFTSEDLVVQVTAVPGQPHLPGGVVFHYRPGPTRYSLTFEEAQQACLRTGAVIASPEQLQAAYEAGYEQCDAGWLRDQTVRYPIVSPRTPCVGDKDSSPGVRTYGVRPSTETYDVYCFVDRLEGEVFFATRLEQFTFQEALEFCESHNATLATTGQLYAAWSRGLDKCYAGWLADGSLRYPIVTPRPACGGDKPGVRTVYLYPNQTGLPDPLSRHHAFCFRGISAVPSPGEEEGGTPTSPSGVEEWIVTQVVPGVAAVPVEEETTAVPSGETTAILEFTTEPENQTEWEPAYTPVGTSPLPGILPTWPPTGAATEESTEGPSATEVPSASEEPSPSEVPFPSEEPSPSEEPFPSVRPFPSVELFPSEEPFPSKEPSPSEEPSASEEPYTPSPPVPSWTELPSSGEESGAPDVSGDFTGSGDVSGHLDFSGQLSGDRASGLPSGDLDSSGLTSTVGSGLPVESGLPSGDEERIEWPSTPTVGELPSGAEILEGSASGVGDLSGLPSGEVLETSASGVGDLSGLPSGEVLETTAPGVEDISGLPSGEVLETTAPGVEDISGLPSGEVLETTAPGVEDISGLPSGEVLETTAPGVEDISGLPSGEVLETTAPGVEDISGLPSGEVLETTAPGVEDISGLPSGEVLETAAPGVEDISGLPSGEVLETAAPGVEDISGLPSGEVLETAAPGVEDISGLPSGEVLETAAPGVEDISGLPSGEVLETAAPGVEDISGLPSGEVLETAAPGVEDISGLPSGEVLETAAPGVEDISGLPSGEVLETAAPGVEDISGLPSGEVLETAAPGVEDISGLPSGEVLETAAPGVEDISGLPSGEVLETAAPGVEDISGLPSGEVLETAAPGVEDISGLPSGEVLETAAPGVEDISGLPSGEVLETAAPGVEDISGLPSGEVLETAAPGVEDISGLPSGEVLETAAPGVEDISGLPSGEVLETTAPGVEEISGLPSGEVLETTAPGVDEISGLPSGEVLETTAPGVEEISGLPSGEVLETSTSAVGDLSGLPSGGEVLEISVSGVEDISGLPSGEVVETSASGIEDVSELPSGEGLETSASGVEDLSRLPSGEEVLEISASGFGDLSGLPSGGEGLETSASEVGTDLSGLPSGREGLETSASGAEDLSGLPSGKEDLVGSASGDLDLGKLPSGTLGSGQAPETSGLPSGFSGEYSGVDLGSGPPSGLPDFSGLPSGFPTVSLVDSTLVEVVTASTASELEGRGTIGISGAGEISGLPSSELDISGRASGLPSGTELSGQASGSPDVSGEIPGLFGVSGQPSGFPDTSGETSGVTELSGLSSGQPGISGEASGVLYGTSQPFGITDLSGETSGVPDLSGQPSGLPGFSGATSGVPDLVSGTTSGSGESSGITFVDTSLVEVAPTTFKEEEGLGSVELSGLPSGEADLSGKSGMVDVSGQFSGTVDSSGFTSQTPEFSGLPSGIAEVSGESSRAEIGSSLPSGAYYGSGTPSSFPTVSLVDRTLVESVTQAPTAQEAGEGPSGILELSGAHSGAPDMSGEHSGFLDLSGLQSGLIEPSGEPPGTPYFSGDFASTTNVSGESSVAMGTSGEASGLPEVTLITSEFVEGVTEPTISQELGQRPPVTHTPQLFESSGKVSTAGDISGATPVLPGSGVEVSSVPESSSETSAYPEAGFGASAAPEASREDSGSPDLSETTSAFHEANLERSSGLGVSGSTLTFQEGEASAAPEVSGESTTTSDVGTEAPGLPSATPTASGDRTEISGDLSGHTSQLGVVISTSIPESEWTQQTQRPAETHLEIESSSLLYSGEETHTVETATSPTDASIPASPEWKRESESTAADQEVCEEGWNKYQGHCYRHFPDRETWVDAERRCREQQSHLSSIVTPEEQEFVNNNAQDYQWIGLNDRTIEGDFRWSDGHPMQFENWRPNQPDNFFAAGEDCVVMIWHEKGEWNDVPCNYHLPFTCKKGTVACGEPPVVEHARTFGQKKDRYEINSLVRYQCTEGFVQRHMPTIRCQPSGHWEEPQITCTDPTTYKRRLQKRSSRHPRRSRPSTAH

SEQ ID NO: 36941 - protein, 2530 aa, Homo sapiens; identical to SEQ ID NO: 36939

SEQ ID NO: 36942 - protein, 132 aa, Homo sapiens
MLTAAVLSCALLLALPATRGAQMGLAPMEGIRRPDQALLPELPGLGLRAPLKKTTAEQAEEDLLQEAQALAEVLDLQDREPRSSRRCVRLHESCLGQQVPCCDPCATCYCRFFNAFCYCRKLGTAMNPCSRT

SEQ ID NO: 36943 - protein, 132 aa, Homo sapiens
MDVTRLLLATLLVFLCFFTANSHLPPEEKLRDDRSLRSNSSVNLLDVPSVSIVALNKKSKQIGRKAAEKKRSSKKEASMKKVVRPRTPLSAPCVATRNSCKPPAPACCDPCASCQCRFFRSACSCRVLSLNC

SEQ ID NO: 36944 - protein, 311 aa, Homo sapiens
MALEVVFLARGPSGLLLYNGQKTDGKGDFVSLALRDRRLEFRYDLGKGAAVIRSREPVTLGAWTRVSLERNGRKGALRVGDGPRVLGESPKSRKVPHTVLNLKEPLYVGGAPDFSKLARAAAVSSGFDGAIQLVSLGGRQLLTPEHVLRQVDVTSFAGHPCTRASGHPCLNGASCVPREAAYVCLCPGGFSGPHCEKGLVEKSAGDVDTLAFDGRTFVEYLNAVTESELANEIPVPETLDSGALHSEKALQSNHFELSLRTEATQGLVLWSGKATERADYVALAIVDGHLQLSYNLGSQPVVLRSTVPVNT

SEQ ID NO: 36945 - protein, 2045 aa, Homo sapiens
MAGRSHPGPLRPLLPLLVVAACVLPGAGGTCPERALERREEEANVVLTGTVEEILNVDPVQHTYSCKVRVWRYLKGKDLVARESLLDGGNKVVISGFGDPLICDNQVSTGDTRIFFVNPAPPYLWPAHKNELMLNSSLMRITLRNLEEVEFCVEDKPGTHFTPVPPTPPDACRGMLCGFGAVCEPNAEGPGRASCVCKKSPCPSVVAPVCGSDASTYSNECELQRAQCSQQRRIRLLSRGPCGSRDPCSNVTCSFGSTCARSADGLTASCLCPATCRGAPEGTVCGSDGADYPGECQLLRRACARQENVFKKFDGPCDPCQGALPDPSRSCRVNPRTRRPEMLLRPESCPARQAPVCGDDGVTYENDCVMGRSGAARGLLLQKVRSGQCQGRDQCPEPCRFNAVCLSRRGRPRCSCDRVTCDGAYRPVCAQDGRTYDSDCWRQQAECRQQRAIPSKHQGPCDQAPSPCLGVQCAFGATCAVKNGQAACECLQACSSLYDPVCGSDGVTYGSACELEATACTLGREIQVARKGPCDRCGQCRFGALCEAETGRCVCPSECVALAQPVCGSDGHTYPSECMLHVHACTHQISLHVASAGPCETCGDAVCAFGAVCSAGQCVCPRCEHPPPGPVCGSDGVTYGSACELREAACLQQTQIEEARAGPCEQAECGSGGSGSGEDGDCEQELCRQRGGIWDEDSEDGPCVCDFSCQSVPGSPVCGSDGVTYSTECELKKARCESQRGLYVAAQGACRGPTFAPLPPVAPLHCAQTPYGCCQDNITAARGVGLAGCPSACQCNPHGSYGGTCDPATGQCSCRPGVGGLRCDRCEPGFWNFRGIVTDGRSGCTPCSCDPQGAVRDDCEQMTGLCSCKPGVAGPKCGQCPDGRALGPAGCEADASAPATCAEMRCEFGARCVEESGSAHCVCPMLTCPEANATKVCGSDGVTYGNECQLKTIACRQGLQISIQSLGPCQEAVAPSTHPTSASVTVTTPGLLLSQALPAPPGALPLAPSSTAHSQTTPPPSSRPRTTASVPRTTVWPVLTVPPTAPSPAPSLVASAFGESGSTDGSSDEELSGDQEASGGGSGGLEPLEGSSVATPGPPVERASCYNSALGCCSDGKTPSLDAEGSNCPATKVFQGVLELEGVEGQELFYTPEMADPKSELFGETARSIESTLDDLFRNSDVKKDFRSVRLRDLGPGKSVRAIVDVHFDPTTAFRAPDVARALLRQIQVSRRRSLGVRRPLQEHVRFMDFDWFPAFITGATSGAIAAGATARATTASRLPSSAVTPRAPHPSHTSQPVAKTTAAPTTRRPPTTAPSRVPGRRPPAPQQPPKPCDSQPCFHGGTCQDWALGGGFTCSCPAGRGGAVCEKVLGAPVPAFEGRSFLAFPTLRAYHTLRLALEFRALEPQGLLLYNGNARGKDFLALALLDGRVQLRFDTGSGPAVLTSAVPVEPGQWHRLELSRHWRRGTLSVDGETPVLGESPSGTDGLNLDTDLFVGGVPEDQAAVALERTFVGAGLRGCIRLLDVNNQRLELGIGPGAATRGSGVGECGDHPCLPNPCHGGAPCQNLEAGRFHCQCPPGRVGPTCADEKSPCQPNPCHGAAPCRVLPEGGAQCECPLGREGTFCQTASGQDGSGPFLADFNGFSHLELRGLHTFARDLGEKMALEVVFLARGPSGLLLYNGQKTDGKGDFVSLALRDRRLEFRYDLGKGAAVIRSREPVTLGAWTRVSLERNGRKGALRVGDGPRVLGESPVPHTVLNLKEPLYVGGAPDFSKLARAAAVSSGFDGAIQLVSLGGRQLLTPEHVLRQVDVTSFAGHPCTRASGHPCLNGASCVPREAAYVCLCPGGFSGPHCEKGLVEKSAGDVDTLAFDGRTFVEYLNAVTESEKALQSNHFELSLRTEATQGLVLWSGKATERADYVALAIVDGHLQLSYNLGSQPVVLRSTVPVNTNRWLRVVAHREQREGSLQVGNEAPVTGSSPLGATQLDTDGALWLGGLPELPVGPALPKAYGTGFVGCLRDVVVGRHPLHLLEDAVTKPELRPCPTP

SEQ ID NO: 36946 - protein, 271 aa, Homo sapiens
  VARIANT 1: note = MOD_RES - Any amino acid
XRYDLGKGAAVIRSREPVTLGAWTRVSLERNGRKGALRVGDGPRVLGESPKSRKVPHTVLNLKEPLYVGGAPDFSKLARAAAVSSGFDGAIQLVSLGGRQLLTPEHVLRQVDVTSFAGHPCTRASGHPCLNGASCVPREAAYVCLCPGGFSGPHCEKGLVEKSAGDVDTLAFDGRTFVEYLNAVTESELANEIPVPETLDSGALHSEKALQSNHFELSLRTEATQGLVLWSGKATERADYVALAIVDGHLQLSYNLGSQPVVLRSTVPVNT

SEQ ID NO: 36947 - protein, 153 aa, Homo sapiens
MALVFVYGTLKRGQPNHRVLRDGAHGSAAFRARGRTLEPYPLVIAGEHNIPWLLHLPGSGRLVEGEVYAVDERMLRFLDDFESCPALYQRTVLRVQLLEDRAPGAEEPPAPTAVQCFVYSRATFPPEWAQLPHHDSYDSEGPHGLRYNPRENR

SEQ ID NO: 36948 - protein, 153 aa, Homo sapiens; identical to SEQ ID NO: 36947

SEQ ID NO: 36949 - protein, 292 aa, Homo sapiens
MNPFWSMSTSSVRKRSEGEEKTLTGDVKTSPPRTAPKKQLPSIPKNALPITKPTSPAPAAQSTNGTHASYGPFYLEYSLLAEFTLVVKQKLPGVYVQPSYRSALMWFGVIFIRHGLYQDGVFKFTVYIPDNYPDGDCPRLVFDIPVFHPLVDPTSGELDVKRAFAKWRRNHNHIWQVLMYARRVFYKIDTASPLNPEAAVLYEKDIQLFKSKVVDSVKVCTARLFDQPKIEDPYAISFSPWNPSVHDEAREKMLTQKKPEEQHNKSVHVAGLSWVKPGSVQPFSKEEKTVAT

SEQ ID NO: 36950 - protein, 292 aa, Homo sapiens; identical to SEQ ID NO: 36949

SEQ ID NO: 36951 - protein, 392 aa, Homo sapiens
MASHKLLVTPPKALLKPLSIPNQLLLGPGPSNLPPRIMAAGGLQMIGSMSKDMYQIMDEIKEGIQYVFQTRNPLTLVISGSGHCALEAALVNVLEPGDSFLVGANGIWGQRAVDIGERIGARVHPMTKDPGGHYTLQEVEEGLAQHKPVLLFLTHGESSTGVLQPLDGFGELCHRYKCLLLVDSVASLGGTPLYMDRQGIDILYSGSQKALNAPPGTSLISFSDKAKKKMYSRKTKPFSFYLDIKWLANFWGCDDQPRMYHHTIPVISLYSLRESLALIAEQGLENSWRQHREAAAYLHGRLQALGLQLFVKDPALRLPTVTTVAVPAGYDWRDIVSYVIDHFDIEIMGGLGPSTGKVLRIGLLGCNATRENVDRVTEALRAALQHCPKKKL

SEQ ID NO: 36952 - protein, 514 aa, Homo sapiens
MTLIWRHLLRPLCLVTSAPRILEMHPFLSLGTSRTSVTKLSLHTKPRMPPCDFMPERYQSLGYNRVLEIHKEHLSPVVTAYFQKPLLLHQGHMEWLFDAEGSRYLDFFSGIVTVSVGHCHPKVNAVAQKQLGRLWHTSTVFFHPPMHEYAEKLAALLPEPLKVIFLVNSGSEANELAMLMARAHSNNIDIISFRGAYHGCSPYTLGLTNVGTYKMELPGGTGCQPTMCPDVFRGPWGGSHCRDSPVQTIRKCSCAPDCCQAKDQYIEQFKDTLSTSVAKSIAGFFAEPIQGVNGVVQYPKGFLKEAFELVRARGGVCIADEVQTGFGRLGSHFWGFQTHDVLPDIVTMAKGIGNGFPMAAVITTPEIAKSLAKCLQHFNTFGGNPMACAIGSAVLEVIKEENLQENSQEVGTYMLLKFAKLRDEFEIVGDVRGKGLMIGIEMVQDKISCRPLPREEVNQIHEDCKHMGLLVGRGSIFSQTFRIAPSMCITKPEVDFAVEVFRSALTQHMERRAK

SEQ ID NO: 36953 - protein, 968 aa, Homo sapiens
MDSTLTASEIRQRFIDFFKRNEHTYVHSSATIPLDDPTLLFANAGMNQFKPIFLNTIDPSHPMAKLSRAANTQKCIRAGGKHNDLDDVGKDVYHHTFFEMLGSWSFGDYFKELACKMALELLTQEFGIPIERLYVTYFGGDEAAGLEADLECKQIWQNLGLDDTKILPGNMKDNFWEMGDTGPCGPCSEIHYDRIGGRDAAHLVNQDDPNVLEIWNLVFIQYNREADGILKPLPKKSIDTGMGLERLVSVLQNKMSNYDTDLFVPYFEAIQKGTGARPYTGKVGAEDADGIDMAYRVLADHARTITVALADGGRPDNTGRGYVLRRILRRAVRYAHEKLNASRGFFATLVDVVVQSLGDAFPELKKDPDMVKDIINEEEVQFLKTLSRGRRILDRKIQSLGDSKTIPGDTAWLLYDTYGFPVDLTGLIAEEKGLVVDMDGFEEERKLAQLKSQGKGAGGEDLIMLDIYAIEELRARGLEVTDDSPKYNYHLDSSGSYVFENTVATVMALRREKMFVEEVSTGQECGVVLDKTCFYAEQGGQIYDEGYLVKVDDSSEDKTEFTVKNAQVRGGYVLHIGTIYGDLKVGDQVWLFIDEPRRRPIMSNHTATHILNFALRSVLGEADQKGSLVAPDRLRFDFTAKGAMSTQQIKKAEEIANEMIEAAKAVYTQDCPLAAAKAIQGLRAVFDETYPDPVRVVSIGVPVSELLDDPSGPAGSLTSVEFCGGTHLRNSSHAGAFVIVTEEAIAKGIRRIVAVTGAEAQKALRKAESLKKCLSVMEAKVKAQTAPNKDVQREIADLGEALATAVIPQWQKDELRETLKSLKKVMDDLDRASKADVQKRVLEKTKQFIDSNPNQPLVILEMESGASAKALNEALKLFKMHSPQTSAMLFTVDNEAGKITCLCQVPQNAANRGLKASEWVQQVSGLMDGKGGGKDVSAQATGKNVGCLQEALQLATSFAQLRLGDVKN

SEQ ID NO: 36954 - protein, 985 aa, Homo sapiens
MAASVAAAARRLRRAIRRSPAWRGLSHRPLSSEPPAAKASAVRAAFLNFFRDRHGHRLVPSASVRPRGDPSLLFVNAGMNQFKPIFLGTVDPRSEMAGFRRVANSQKCVRAGGHHNDLEDVGRDLSHHTFFEMLGNWAFGGEYFKEEACNMAWELLTQVYGIPEERLWISYFDGDPKAGLDPDLETRDIWLSLGVPASRVLSFGPQENFWEMGDTGPCGPCTEIHYDLAGGVGAPQLVELWNLVFMQHNREADGSLQPLPQRHVDTGMGLERLVAVLQGKHSTYDTDLFSPLLNAIQQGCRAPPYLGRVGVADEGRTDTAYRVVADHIRTLSVCISDGIFPGMSGPPLVLRRILRRAVRFSMEILKAPPGFLGSLVPVVVETLGDAYPELQRNSAQIANLVSEDEAAFLASLERGRRIIDRTLRTLGPSDMFPAEVAWSLSLCGDLGLPLDMVELMLEEKGVQLDSAGLERLAQEEAQHRARQAEPVQKQGLWLDVHALGELQRQGVPPTDDSPKYNYSLRPSGSYEFGTCEAQVLQLYTEDGTAVASVGKGQRCGLLLDRTNFYAEQGGQASDRGYLVRAGQEDVLFPVARAQVCGGFILHEAVAPECLRLGDQVQLHVDEAWRLGCMAKHTATHLLNWALRQTLGPGTEQQGSHLNPEQLRLDVTTQTPLTPEQLRAVENTVQEAVGQDEAVYMEEVPLALTAQVPGLRSLDEVYPDPVRVVSVGVPVAHALDPASQAALQTSVELCCGTHLLRTGAVGDLVIIGDRQLSKGTTRLLAVTGEQAQQARELGQSLAQEVKAATERLSLGSRDVAEALRLSKDIGRLIEAVETAVMPQWQRRELLATVKMLQRRANTAIRKLQMGQAAKKTQELLERHSKGPLIVDTVSAESLSVLVKVVRQLCEQAPSTSVLLLSPQPMGKVLCACQVAQGAMPTFTAEAWALAVCSHMGGKAWGSRVVAQGTGSTTDLEAALSIAQTYALSQL

SEQ ID NO: 36955 - protein, 525 aa, Homo sapiens
MEFCVEDSTDVHVLIEDHRIVFSCKNADGVELYNEIEFYAKVNSKDSQDKRSSRSITCFVRKWKEKVAWPRLTKEDIKPVWLSVDFDNWRDWEGDEEMELAHVEHYAELLKKVSTKRPPPAMDDLDFTTTVVSCCPAELQTEGSNGKKEVLSGFQVVLEDTVLFPEGGGQPDDRGTINDISVLRVTRRGEQADHFTQTPLDPGSQVLVRVDWERRFDHMQQHSGQHLITAVADHLFKLKTTSWELGRFRSAIELDTPSMTAEQVAAIEQSVNEKIRDRLPVNVRELSLDDPEVEQVSGRGLPDDHAGPIRVVNIEGVDSNMCCGTHVSNLSDLQVIKILGTEKGKKNRTNLIFLSGNRVLKWMERSHGTEKALTALLKCGAEDHVEAVKKLQNSTKILQKNNLNLLRDLAVHIAHSLRNSPDWGGVVILHRKEGDSEFMNIIANEIGSEETLLFLTVGDEKGGGLFLLAGPPASVETLGPRVAEVLEGKGAGKKGRFQGKATKMSRRMEAQALLQDYISTQSAKE

SEQ ID NO: 36956 - protein, 586 aa, Homo sapiens
MFSLPLNCSPDHIRRGSCWGRPQDLKIAAPAWNSKCHPGAGAAMARQHARTLWYDRPRYVFMEFCVEDSTDVHVLIEDHRIVFSCKNADGVELYNEIEFYAKVNSKDSQDKRSSRSITCFVRKWKEKVAWPRLTKEDIKPVWLSVDFDNWRDWEGDEEMELAHVEHYAELLKKVSTKRPPPAMDDLDFTTTVVSCCPAELQTEGSNGKKEVLSGFQVVLEDTVLFPEGGGQPDDRGTINDISVLRVTRRGEQADHFTQTPLDPGSQVLVRVDWERRFDHMQQHSGQHLITAVADHLFKLKTTSWELGRFRSAIELDTPSMTAEQVAAIEQSVNEKIRDRLPVNVRELSLDDPEVEQVSGRGLPDDHAGPIRVVNIEGVDSNMCCGTHVSNLSDLQVIKILGTEKGKKNRTNLIFLSGNRVLKWMERSHGTEKALTALLKCGAEDHVEAVKKLQNSTKILQKNNLNLLRDLAVHIAHSLRNSPDWGGVVILHRKEGDSEFMNIIANEIGSEETLLFLTVGDEKGGGLFLLAGPPASVETLGPRVAEVLEGKGAGKKGRFQGKATKMSRRMEAQALLQDYISTQSAKE

SEQ ID NO: 36957 - protein, 586 aa, Homo sapiens; identical to SEQ ID NO: 36956

SEQ ID NO: 36958 - protein, 412 aa, Homo sapiens
MAFWCQRDSYAREFTTTVVSCCPAELQTEGSNGKKEVLSGFQVVLEDTVLFPEGGGQPDDRGTINDISVLRVTRRGEQADHFTQTPLDPGSQVLVRVDWERRFDHMQQHSGQHLITAVADHLFKLKTTSWELGRFRSAIELDTPSMTAEQVAAIEQSVNEKIRDRLPVNVRELSLDDPEVEQVSGRGLPDDHAGPIRVVNIEGVDSNMCCGTHVSNLSDLQVIKILGTEKGKKNRTNLIFLSGNRVLKWMERSHGTEKALTALLKCGAEDHVEAVKKLQNSTKILQKNNLNLLRDLAVHIAHSLRNSPDWGGVVILHRKEGDSEFMNIIANEIGSEETLLFLTVGDEKGGGLFLLAGPPASVETLGPRVAEVLEGKGAGKKGRFQGKATKMSRRMEAQALLQDYISTQSAKE

SEQ ID NO: 36959 - protein, 166 aa, Homo sapiens
MFSLPLNCSPDHIRRGSCWGRPQDLKIAAPAWNSKCHPGAGAAMARQHARTLWYDRPRYVFMEFCVEDSTDVHVLIEDHRIVFSCKNADGVELYNEIEFYAKVNSKPVWLSVDFDNWRDWEGDEEMELAHVEHYAELLKKVSTKRPPPAMDDLDDDSDSADDATSN

SEQ ID NO: 36960 - protein, 132 aa, Homo sapiens
MEFCVEDSTDVHVLIEDHRIVFSCKNADGVELYNEIEFYAKVNSKDSQDKRSSRSITCFVRKWKEKVAWPRLTKEDIKPVWLSVDFDNWRDWEGDEEMELAHVEHYAELLKKVSTKRPPPAMDDLDFTTTVV

SEQ ID NO: 36961 - protein, 609 aa, Homo sapiens [sequence omitted]

SEQ ID NO: 36962 - protein, 396 aa, Homo sapiens
MKWVTFISLLFLFSSAYSRGVFRRDAHKSEVAHRFKDLGEENFKALVLIAFAQYLQQCPFEDHVKLVNEVTEFAKTCVADESAENCDKSLHTLFGDKLCTVATLRETYGEMADCCAKQEPERNECFLQHKDDNPNLPRLVRPEVDVMCTAFHDNEETFLKKYLYETTLEKCCAAADPHECYAKVFDEFKPLVEEPQNLIKQNCELFEQLGEYKFQNALLVRYTKKVPQVSTPTLVEVSRNLGKVGSKCCKHPEAKRMPCAEDYLSVVLNQLCVLHEKTPVSDRVTKCCTESLVNRRPCFSALEVDETYVPKEFNAETFTFHADICTLSEKERQIKKQTALVELVKHKPKATKEQLKAVMDDFAAFVEKCCKADDKETCFAEEGKKLVAASQAALGL

SEQ ID NO: 36963 - protein, 417 aa, Homo sapiens
MKWVTFISLLFLFSSAYSRGVFRRDAHKSEVAHRFKDLGEENFKALAVARLSQRFPKAEFAEVSKLVTDLTKVHTECCHGDLLECADDRADLAKYICENQDSISSKLKECCEKPLLEKSHCIAEVENDEMPADLPSLAADFVESKDVCKNYAEAKDVFLGMFLYEYARRHPDYSVVLLLRLAKTYETTLEKCCAAADPHECYAKVFDEFKPLVEEPQNLIKQNCELFEQLGEYKFQNALLVRYTKKVPQVSTPTLVEVSRNLGKVGSKCCKHPEAKRMPCAEDYLSVVLNQLCVLHEKTPVSDRVTKCCTESLVNRRPCFSALEVDETYVPKEFNAETFTFHADICTLSEKERQIKKQTALVELVKHKPKATKEQLKAVMDDFAAFVEKCCKADDKETCFAEEGKKLVAASQAALGL

SEQ ID NO: 36964 - protein, 618 aa, Homo sapiens
MKWVTFISLLFLFSSAYSRGVFRRDALFLFFFPCPDKSEVAHRFKDLGEENFKALVLIAFAQYLQQCPFEDHVKLVNEVTEFAKTCVADESAENCDKSLHTLFGDKLCTVATLRETYGEMADCCAKQEPERNECFLQHKDDNPNLPRLVRPEVDVMCTAFHDNEETFLKKYLYEIARRHPYFYAPELLFFAKRYKAAFTECCQAADKAACLLPKLDELRDEGKASSAKQRLKCASLQKFGERAFKAWAVARLSQRFPKAEFAEVSKLVTDLTKVHTECCHGDLLECADDRADLAKYICENQDSISSKLKECCEKPLLEKSHCIAEVENDEMPADLPSLAADFVESKDVCKNYAEAKDVFLGMFLYEYARRHPDYSVVLLLRLAKTYETTLEKCCAAADPHECYAKVFDEFKPLVEEPQNLIKQNCELFEQLGEYKFQNALLVRYTKKVPQVSTPTLVEVSRNLGKVGSKCCKHPEAKRMPCAEDYLSVVLNQLCVLHEKTPVSDRVTKCCTESLVNRRPCFSALEVDETYVPKEFNAETFTFHADICTLSEKERQIKKQTALVELVKHKPKATKEQLKAVMDDFAAFVEKCCKADDKETCFAEEGKKLVAASQAALGL

SEQ ID NO: 36965 - protein, 375 aa, Homo sapiens
MSTAGKVIKCKAAVLWELKKPFSIEEVEVAPPKAHEVRIKMVAVGICGTDDHVVSGTMVTPLPVILGHEAAGIVESVGEGVTTVKPGDKVIPLAIPQCGKCRICKNPESNYCLKNDVSNPQGTLQDGTSRFTCRRKPIHHFLGISTFSQYTVVDENAVAKIDAASPLEKVCLIGCGFSTGYGSAVNVAKVTPGSTCAVFGLGGVGLSAIMGCKAAGAARIIAVDINKDKFAKAKELGATECINPQDYKKPIQEVLKEMTDGGVDFSFEVIGRLDTMMASLLCCHEACGTSVIVGVPPDSQNLSMNPMLLLTGRTWKGAILGGFKSKECVPKLVADFMAKKFSLDALITHVLPFEKINEGFDLLHSGKSIRTILMF

SEQ ID NO: 36966 - protein, 375 aa, Homo sapiens
MSTAGKVIKCKAAVLWEVKKPFSIEDVEVAPPKAYEVRIKMVAVGICHTDDHVVSGNLVTPLPVILGHEAAGIVESVGEGVTTVKPGDKVIPLFTPQCGKCRVCKNPESNYCLKNDLGNPRGTLQDGTRRFTCRGKPIHHFLGTSTFSQYTVVDENAVAKIDAASPLEKVCLIGCGFSTGYGSAVNVAKVTPGSTCAVFGLGGVGLSAVMGCKAAGAARIIAVDINKDKFAKAKELGATECINPQDYKKPIQEVLKEMTDGGVDFSFEVIGRLDTMMASLLCCHEACGTSVIVGVPPASQNLSINPMLLLTGRTWKGAVYGGFKSKEGIPKLVADFMAKKFSLDALITHVLPFEKINEGFDLLHSGKSIRTVLTF

SEQ ID NO: 36967 - protein, 335 aa, Homo sapiens
MVAVGICHTDDHVVSGNLVTPLPVILGHEAAGIVESVGEGVTTVKPGDKVIPLFTPQCGKCRVCKNPESNYCLKNDLGNPRGTLQDGTRRFTCRGKPIHHFLGTSTFSQYTVVDENAVAKIDAASPLEKVCLIGCGFSTGYGSAVNVAKVTPGSTCAVFGLGGVGLSAVMGCKAAGAARIIAVDINKDKFAKAKELGATECINPQDYKKPIQEVLKEMTDGGVDFSFEVIGRLDTMMASLLCCHEACGTSVIVGVPPASQNLSINPMLLLTGRTWKGAVYGGFKSKEGIPKLVADFMAKKFSLDALITHVLPFEKINEGFDLLHSGKSIRTVLTF

SEQ ID NO: 36968 - protein, 362 aa, Homo sapiens
MSTAGKVIKCKAAVLWEVKKPFSIEDVEVAPPKAYEVRIKMVAVGICHTDDHVVSGNLVTPLPVILGHEAAGIVESVGEGVTTVKPGDKVIPLFTPQCGKCRVCKNPESNYCLKNDLGNPRGKPIHHFLGTSTFSQYTVVDENAVAKIDAASPLEKVCLIGCGFSTGYGSAVNVAKVTPGSTCAVFGLGGVGLSAVMGCKAAGAARIIAVDINKDKFAKAKELGATECINPQDYKKPIQEVLKEMTDGGVDFSFEVIGRLDTMMASLLCCHEACGTSVIVGVPPASQNLSINPMLLLTGRTWKGAVYGGFKSKEGIPKLVADFMAKKFSLDALITHVLPFEKINEGFDLLHSGKSIRTVLTF

SEQ ID NO: 36969 - protein, 380 aa, Homo sapiens
MGTKGKVIKCKAAIAWEAGKPLCIEEVEVAPPKAHEVRIQIIATSLCHTDATVIDSKFEGLAFPVIVGHEAAGIVESIGPGVTNVKPGDKVIPLYAPLCRKCKFCLSPLTNLCGKISNLKSPASDQQLMEDKTSRFTCKGKPVYHFFGTSTFSQYTVVSDINLAKIDDDANLERVCLLGCGFSTGYGAAINNAKVTPGSTCAVFGLGGVGLSAVMGCKAAGASRIIGIDINSEKFVKAKALGATDCLNPRDLHKPIQEVIIELTKGGVDFALDCAGGSETMKAALDCTTAGWGSCTFIGVAAGSKGLTIFPEELIIGRTINGTFFGGWKSVDSIPKLVTDYKNKKFNLDALVTHTLPFDKISEAFDLMNQGKSVRTILIF

SEQ ID NO: 36970 - protein, 399 aa, Homo sapiens
MLVRGPHFELQRCKTHLFSSNYLTQVIKCKAAIAWEAGKPLCIEEVEVAPPKAHEVRIQIIATSLCHTDATVIDSKFEGLAFPVIVGHEAAGIVESIGPGVTNVKPGDKVIPLYAPLCRKCKFCLSPLTNLCGKISNLKSPASDQQLMEDKTSRFTCKGKPVYHFFGTSTFSQYTVVSDINLAKIDDDANLERVCLLGCGFSTGYGAAINNAKVTPGSTCAVFGLGGVGLSAVMGCKAAGASRIIGIDINSEKFVKAKALGATDCLNPRDLHKPIQEVIIELTKGGVDFALDCAGGSETMKAALDCTTAGWGSCTFIGVAAGSKGLTIFPEELIIGRTINGTFFGGWKSVDSIPKLVTDYKNKKFNLDALVTHTLPFDKISEAFDLMNQGKSVRTILIF

SEQ ID NO: 36971 - protein, 374 aa, Homo sapiens
MANEVIKCKAAVAWEAGKPLSIEEIEVAPPKAHEVRIKIIATAVCHTDAYTLSGADPEGCFPVILGHEGAGIVESVGEGVTKLKAGDTVIPLYIPQCGECKFCLNPKTNLCQKIRVTQGKGLMPDGTSRFTCKGKTILHYMGTSTFSEYTVVADISVAKIDPLAPLDKVCLLGCGISTGYGAAVNTAKLEPGSVCAVFGLGGVGLAVIMGCKVAGASRIIGVDINKDKFARAKEFGATECINPQDFSKPIQEVLIEMTDGGVDYSFECIGNVKVMRAALEACHKGWGVSVVVGVAASGEEIATRPFQLVTGRTWKGTAFGGWKSVESVPKLVSEYMSKKIKVDEFVTHNLSFDEINKAFELMHSGKSIRTVVKI

SEQ ID NO: 36972 - protein, 368 aa, Homo sapiens
MCTTGQVIRCKAAILWKPGAPFSIEEVEVAPPKAKEVRIKVVATGLCGTEMKVLGSKHLDLLYPTILGHEGAGIVESIGEGVSTVKPGDKVITLFLPQCGECTSCLNSEGNFCIQFKQSKTQLMSDGTSRFTCKGKSIYHFGNTSTFCEYTVIKEISVAKIDAVAPLEKVCLISCGFSTGFGAAINTAKVTPGSTCAVFGLGGVGLSVVMGCKAAGAARIIGVDVNKEKFKKAQELGATECLNPQDLKKPIQEVLFDMTDAGIDFCFEAIGNLDVLAAALASCNESYGVCVVVGVLPASVQLKISGQLFFSGRSLKGSVFGGWKSRQHIPKLVADYMAEKLNLDPLITHTLNLDKINEAVELMKTGKW

SEQ ID NO: 36973 - protein, 375 aa, Homo sapiens
MCTTGQVIRCKAAILWKPGAPFSIEEVEVAPPKAKEVRIKVVATGLCGTEMKVLGSKHLDLLYPTILGHEGAGIVESIGEGVSTVKPGDKVITLFLPQCGECTSCLNSEGNFCIQFKQSKTQLMSDGTSRFTCKGKSIYHFGNTSTFCEYTVIKEISVAKIDAVAPLEKVCLISCGFSTGFGAAINTAKVTPGSTCAVFGLGGVGLSVVMGCKAAGAARIIGVDVNKEKFKKAQELGATECLNPQDLKKPIQEVLFDMTDAGIDFCFEAIGNLDVLAAALASCNESYGVCVVVGVLPASVQLKISGQLFFSGRSLKGSVFGGWKSRQHIPKLVADYMAEKLNLDPLITHTLNLDKINEAVELMKTGKCIRCILLL

SEQ ID NO: 36974 - protein, 166 aa, Homo sapiens
MGCKAAGAARIIGVDVNKEKFKKAQELGATECLNPQDLKKPIQEVLFDMTDAGIDFCFEAIGNLDVLAAALASCNESYGVCVVVGVLPASVQLKISGQLFFSGRSLKGSVFGGWKSRQHIPKLVADYMAEKLNLDPLITHTLNLDKINEAVELMKTGKCIRCILLL

SEQ ID NO: 36975 - protein, 386 aa, Homo sapiens
MFAEIQIQDKDRMGTAGKVIKCKAAVLWEQKQPFSIEEIEVAPPKTKEVRIKILATGICRTDDHVIKGTMVSKFPVIVGHEATGIVESIGEGVTTVKPGDKVIPLFLPQCRECNACRNPDGNLCIRSDITGRGVLADGTTRFTCKGKPVHHFMNTSTFTEYTVVDESSVAKIDDAAPPEKVCLIGCGFSTGYGAAVKTGKVKPGSTCVVFGLGGVGLSVIMGCKSAGASRIIGIDLNKDKFEKAMAVGATECISPKDSTKPISEVLSEMTGNNVGYTFEVIGHLETMIDALASCHMNYGTSVVVGVPPSAKMLTYDPMLLFTGRTWKGCVFGGLKSRDDVPKLVTEFLAKKFDLDQLITHVLPFKKISEGFELLNSGQSIRTVLTF

SEQ ID NO: 36976 - protein, 374 aa, Homo sapiens
MGTAGKVIKCKAAVLWEQKQPFSIEEIEVAPPKTKEVRIKILATGICRTDDHVIKGTMVSKFPVIVGHEATGIVESIGEGVTTVKPGDKVIPLFLPQCRECNACRNPDGNLCIRSDITGRGVLADGTTRFTCKGKPVHHFMNTSTFTEYTVVDESSVAKIDDAAPPEKVCLIGCGFSTGYGAAVKTGKVKPGSTCVVFGLGGVGLSVIMGCKSAGASRIIGIDLNKDKFEKAMAVGATECISPKDSTKPISEVLSEMTGNNVGYTFEVIGHLETMIDALASCHMNYGTSVVVGVPPSAKMLTYDPMLLFTGRTWKGCVFGGLKSRDDVPKLVTEFLAKKFDLDQLITHVLPFKKISEGFELLNSGQSIRTVLTF

SEQ ID NO: 36977 - protein, 394 aa, Homo sapiens
MKCLVSRHTVRETLDMVFQRMSVEAGVIKCKAAVLWEQKQPFSIEEIEVAPPKTKEVRIKILATGICRTDDHVIKGTMVSKFPVIVGHEATGIVESIGEGVTTVKPGDKVIPLFLPQCRECNACRNPDGNLCIRSDITGRGVLADGTTRFTCKGKPVHHFMNTSTFTEYTVVDESSVAKIDDAAPPEKVCLIGCGFSTGYGAAVKTGKVKPGSTCVVFGLGGVGLSVIMGCKSAGASRIIGIDLNKDKFEKAMAVGATECISPKDSTKPISEVLSEMTGNNVGYTFEVIGHLETMIDALASCHMNYGTSVVVGVPPSAKMLTYDPMLLFTGRTWKGCVFGGLKSRDDVPKLVTEFLAKKFDLDQLITHVLPFKKISEGFELLNSGQSIRTVLTF

SEQ ID NO: 36978 - protein, 317 aa, Homo sapiens
MVSKFPVIVGHEATGIVESIGEGVTTVKPGDKVIPLFLPQCRECNACRNPDGNLCIRSDITGRGVLADGTTRFTCKGKPVHHFMNTSTFTEYTVVDESSVAKIDDAAPPEKVCLIGCGFSTGYGAAVKTGKVKPGSTCVVFGLGGVGLSVIMGCKSAGASRIIGIDLNKDKFEKAMAVGATECISPKDSTKPISEVLSEMTGNNVGYTFEVIGHLETMIDALASCHMNYGTSVVVGVPPSAKMLTYDPMLLFTGRTWKGCVFGGLKSRDDVPKLVTEFLAKKFDLDQLITHVLPFKKISEGFELLNSGQSIRTVLTF

SEQ ID NO: 36979 - protein, 303 aa, Homo sapiens
MAAAARARVAYLLRQLQRAACQCPTHSHTYSQAPGLSPSGKTTDYAFEMAVSNIRYGAAVTKEVGMDLKNMGAKNVCLMTDKNLSKLPPVQVAMDSLVKNGIPFTVYDNVRVEPTDSSFMEAIEFAQKGAFDAYVAVGGGSTMDTCKAANLYASSPHSDFLDYVSAPIGKGKPVSVPLKPLIAVPTTSGTGSETTGVAIFDYEHLKVKIGITSRAIKPTLGLIDPLHTLHMPARVVANSGFDVLCHALESYTTLPYHLRSPCPSNPITRPAYQGSNPISDIWAIHALRIVAKYLKRAVNSTDK

SEQ ID NO: 36980 - protein, 467 aa, Homo sapiens
MAAAARARVAYLLRQLQRAACQCPTHSHTYSQAPGLSPSGKTTDYAFEMAVSNIRYGAAVTKEVGMDLKNMGAKNVCLMTDKNLSKLPPVQVAMDSLVKNGIPFTVYDNVRVEPTDSSFMEAIEFAQKGAFDAYVAVGGGSTMDTCKAANLYASSPHSDFLDYVSAPIGKGKPVSVPLKPLIAVPTTSGTGSETTGVAIFDYEHLKVKIGITSRAIKPTLGLIDPLHTLHMPARVVANSGFDVLCHALESYTTLPYHLRSPCPSNPITRPAYQGSNPISDIWAIHALRIVAKYLKRAVRNPDDLEARSHMHLASAFAGIGFGNAGVHLCHGMSYPISGLVKMYKAKDYNVDHPLVPHGLSVVLTSPAVFTFTAQMFPERHLEMAEILGADTRTARIQDAGLVLADTLRKFLFDLDVDDGLAAVGYSKADIPALVKGTLPQERVTKLAPCPQSEEDLAALFEASMKLY

SEQ ID NO: 36981 - protein, 801 aa, Homo sapiens
MKIAVIGQSLFGQEVYCHLRKEGHEVVGVFTVPDKDGKADPLGLEAEKDGVPVFKYSRWRAKGQALPDVVAKYQALGAELNVLPFCSQFIPMEIISAPRHGSIIYHPSLLPRHRGASAIHNWIRGNDKVPGAWTEACEQKLTFFNSTLNTSGLVPEGDALPIPGAHRPGVVTKAGLILFGNDDKMLLVKNIQLEDGKMILASNFFKGAASSVLELTEAELVTAEAVRSVWQRILPKVLEVEDSTDFFKSGAASVDVVRLVEEVKELCDGLELENEDVYMASTFGDFIQLLVRKLRGDDEEGECSIDYVEMAVNKRTVRMPHQLFIGGEFVDAEGAKTSETINPTDGSVICQVSLAQVTDVDKAVAAAKDAFENGRWGKISARDRGRLMYRLADLMEQHQEELATIEALDAGAVYTLALKTHVGMSIQTFRYFAGWCDKIQGSTIPINQARPNRNLTLTRKEPVGVCGIIIPWNYPLMMLSWKTAACLAAGNTVVIKPAQVTPLTALKFAELTLKAGIPKGVVNVLPGSGSLVGQRLSDHPDVRKIGFTGSTEVGKHIMKSCAISNVKKVSLELGGKSPLIIFADCDLNKAVQMGMSSVFFNKGENCIAAGRLFVEDSIHDEFVRRVVEEVRKMKVGNPLDRDTDHGPQNHHAHLVKLMEYCQHGVKEGATLVCGGNQVPRPGFFFEPTVFTDVEDHMFIAKEESFGPVMIISRFADGDLDAVLSRANATEFGLASGVFTRDINKALYVSDKLQAGTVFVNTYNKTDVAAPFGGFKQSGFGKDLGEAALNEYLRVKTVTFEY

SEQ ID NO: 36982 - protein, 501 aa, Homo sapiens
MSSSGTPDLPVLLTDLKIQYTKIFINNEWHDSVSGKKFPVFNPATEEELCQVEEGDKEDVDKAVKAARQAFQIGSPWRTMDASERGRLLYKLADLIERDRLLLATMESMNGGKLYSNAYLNDLAGCIKTLRYCAGWADKIQGRTIPIDGNFFTYTRHEPIGVCGQIIPWNFPLVMLIWKIGPALSCGNTVVVKPAEQTPLTALHVASLIKEAGFPPGVVNIVPGYGPTAGAAISSHMDIDKVAFTGSTEVGKLIKEAAGKSNLKRVTLELGGKSPCIVLADADLDNAVEFAHHGVFYHQGQCCIAASRIFVEESIYDEFVRRSVERAKKYILGNPLTPGVTQGPQIDKEQYDKILDLIESGKKEGAKLECGGGPWGNKGYFVQPTVFSNVTDEMRIAKEEIFGPVQQIMKFKSLDDVIKRANNTFYGLSAGVFTKDIDKAITISSALQAGTVWVNCYGVVSAQCPFGGFKMSGNGRELGEYGFHEYTEVKTVTVKISQKNS

SEQ ID NO: 36983 - protein, 230 aa, Homo sapiens
MSSSGTPDLPVLLTDLKIQYTKIFINNEWHDSVSGKKFPVFNPATEEELCQVEEGDKEDVDKAVKAARQAFQIGSPWRTMDASERGRLLYKLADLIERDRLLLATMESMNGGKLYSNAYLNDLAGCIKTLRYCAGWADKIQGRTIPIDGNFFTYTRHEPIGVCGQIIPWNFPLVMLIWKIGPALSCGNTVVVKPAEQTPLTALHVASLIKEAGFPPGVVNIVPGYGASVV

SEQ ID NO: 36984 - protein, 238 aa, Homo sapiens
MSSSGTPDLPVLLTDLKIQYTKIFINNEWHDSVSGKKFPVFNPATEEELCQVEEGDKEDVDKAVKAARQAFQIGSPWRTMDASERGRLLYKLADLIERDRLLLATMESMNGGKLYSNAYLNDLAGCIKTLRYCAGWADKIQGRTIPIDGNFFTYTRHEPIGVCGQIIPWNFPLVMLIWKIGPALSCGNTVVVKPAEQTPLTALHVASLIKEAGFPPGVVNIVPGYGPTAGAAISSHMD

SEQ ID NO: 36985 - protein, 329 aa, Homo sapiens
IAEPVTCVPGAESEMSSSGTPDLPVLLTDLKIQYTKIFINNEWHDSVSGKKFPVFNPATEEELCQVEEGDKEDVDKAVKAARQAFQIGSPWRTMDASERGRLLYKLADLIERDRLLLATMESMNGGKLYSNAYLNDLAGCIKTLRYCAGWADKIQGRTIPIDGNFFTYTRHEPIGVCGQIIPWNFPLVMLIWKIGPALSCGNTVVVKPAEQTPLTALHVASLIKEAGFPPGVVNIVPGYGPTAGAAISSHMDIDKVAFTGSTEVGKLIKEAAGKSNLKRVTLELGGKSPCIVLADADLDNAVEFAHHGVFYHQGQCCIAASRFCGRINL

SEQ ID NO: 36986 - protein, 203 aa, Homo sapiens
MSSSGTPDLPVLLTDLKIQYTKIFINNEWHDSVSGKKFPVFNPATEEELCQVEEGDKEDVDKAVKAARQAFQIGSPWRTMDASERGRLLYKLADLIERDRLLLATMESMNGGKLYSNAYLNDLAGCIKTLRYCAGWADKIQGRTIPIDGNFFTYTRHEPIGVCGQIIPWNFPLVMLIWKIGPALSCGNTVVVKPAEQTPLTAL

SEQ ID NO: 36987 - protein, 518 aa, Homo sapiens
MTSSKIEMPGEVKADPAALMASLHLLPSPTPNLEIKYTKIFINNEWQNSESGRVFPVYNPATGEQVCEVQEADKADIDKAVQAARLAFSLGSVWRRMDASERGRLLDKLADLVERDRAVLATMESLNGGKPFLQAFYVDLQGVIKTFRYYAGWADKIHGMTIPVDGDYFTFTRHEPIGVCGQIIPWNFPLLMFAWKIAPALCCGNTVVIKPAEQTPLSALYMGALIKEAGFPPGVINILPGYGPTAGAAIASHIGIDKIAFTGSTEVGKLIQEAAGRSNLKRVTLELGGKSPNIIFADADLDYAVEQAHQGVFFNQGQCCTAGSRIFVEESIYEEFVRRSVERAKRRVVGSPFDPTTEQGPQIDKKQYNKILELIQSGVAEGAKLECGGKGLGRKGFFIEPTVFSNVTDDMRIAKEEIFGPVQEILRFKTMDEVIERANNSDFGLVAAVFTNDINKALTVSSAMQAGTVWINCYNALNAQSPFGGFKMSGNGREMGEFGLREYSEVKTVTVKIPQKNS

SEQ ID NO: 36988 - protein, 480 aa, Homo sapiens
MTSSKIEMPGEVKADPAALMASLHLLPSPTPNLEIKYTKIFINNEWQNSESGRVFPVYNPATGEQVCEVQEADKADIDKAVQAARLAFSLGSVWRRMDASERGRLLDKLADLVERDRAVLATMESLNGGKPFLQAFYVDLQGVIKTFRYYAGWADKIHGMTIPVDGDYFTFTRHEPIGVCGQIIPWNFPLLMFAWKIAPALCCGNTVVIKPAEQTPLSALYMGALIKEVGKLIQEAAGRSNLKRVTLELGGKSPNIIFADADLDYAVEQAHQGVFFNQGQCCTAGSRIFVEESIYEEFVRRSVERAKRRVVGSPFDPTTEQGPQIDKKQYNKILELIQSGVAEGAKLECGGKGLGRKGFFIEPTVFSNVTDDMRIAKEEIFGPVQEILRFKTMDEVIERANNSDFGLVAAVFTNDINKALTVSSAMQAGTVWINCYNALNAQSPFGGFKMSGNGREMGEFGLREYSEVKTVTVKIPQKNS

SEQ ID NO: 36989 - protein, 497 aa, Homo sapiens
MKNQCETVWLKSPIKLKLIFINNEWQNSESGRVFPVYNPATGEQVCEVQEADKADIDKAVQAARLAFSLGSVWRRMDASERGRLLDKLADLVERDRAVLATMESLNGGKPFLQAFYVDLQGVIKTFRYYAGWADKIHGMTIPVDGDYFTFTRHEPIGVCGQIIPWNFPLLMFAWKIAPALCCGNTVVIKPAEQTPLSALYMGALIKEAGFPPGVINILPGYGPTAGAAIASHIGIDKIAFTGSTEVGKLIQEAAGRSNLKRVTLELGGKSPNIIFADADLDYAVEQAHQGVFFNQGQCCTAGSRIFVEESIYEEFVRRSVERAKRRVVGSPFDPTTEQGPQIDKKQYNKILELIQSGVAEGAKLECGGKGLGRKGFFIEPTVFSNVTDDMRIAKEEIFGPVQEILRFKTMDEVIERANNSDFGLVAAVFTNDINKALTVSSAMQAGTVWINCYNALNAQSPFGGFKMSGNGREMGEFGLREYSEVKTVTVKIPQKNS

SEQ ID NO: 36990 - protein, 489 aa, Homo sapiens
MKGKNCNDVKIFINNEWQNSESGRVFPVYNPATGEQVCEVQEADKADIDKAVQAARLAFSLGSVWRRMDASERGRLLDKLADLVERDRAVLATMESLNGGKPFLQAFYVDLQGVIKTFRYYAGWADKIHGMTIPVDGDYFTFTRHEPIGVCGQIIPWNFPLLMFAWKIAPALCCGNTVVIKPAEQTPLSALYMGALIKEAGFPPGVINILPGYGPTAGAAIASHIGIDKIAFTGSTEVGKLIQEAAGRSNLKRVTLELGGKSPNIIFADADLDYAVEQAHQGVFFNQGQCCTAGSRIFVEESIYEEFVRRSVERAKRRVVGSPFDPTTEQGPQIDKKQYNKILELIQSGVAEGAKLECGGKGLGRKGFFIEPTVFSNVTDDMRIAKEEIFGPVQEILRFKTMDEVIERANNSDFGLVAAVFTNDINKALTVSSAMQAGTVWINCYNALNAQSPFGGFKMSGNGREMGEFGLREYSEVKTVTVKIPQKNS

SEQ ID NO: 36991 - protein, 9 aa, Homo sapiens
MDASERGRL

SEQ ID NO: 36992 - protein, 489 aa, Homo sapiens
MKGRNWKTTKIFINNEWQNSESGRVFPVYNPATGEQVCEVQEADKADIDKAVQAARLAFSLGSVWRRMDASERGRLLDKLADLVERDRAVLATMESLNGGKPFLQAFYVDLQGVIKTFRYYAGWADKIHGMTIPVDGDYFTFTRHEPIGVCGQIIPWNFPLLMFAWKIAPALCCGNTVVIKPAEQTPLSALYMGALIKEAGFPPGVINILPGYGPTAGAAIASHIGIDKIAFTGSTEVGKLIQEAAGRSNLKRVTLELGGKSPNIIFADADLDYAVEQAHQGVFFNQGQCCTAGSRIFVEESIYEEFVRRSVERAKRRVVGSPFDPTTEQGPQIDKKQYNKILELIQSGVAEGAKLECGGKGLGRKGFFIEPTVFSNVTDDMRIAKEEIFGPVQEILRFKTMDEVIERANNSDFGLVAAVFTNDINKALTVSSAMQAGTVWINCYNALNAQSPFGGFKMSGNGREMGEFGLREYSEVKTVTVKIPQKNS

SEQ ID NO: 36993 - protein, 25 aa, Homo sapiens
MDASERGRLLDKLADLVERDRAVLA

SEQ ID NO: 36994 - protein, 422 aa, Homo sapiens
MDASERGRLLDKLADLVERDRAVLATMESLNGGKPFLQAFYVDLQGVIKTFRYYAGWADKIHGMTIPVDGDYFTFTRHEPIGVCGQIIPWNFPLLMFAWKIAPALCCGNTVVIKPAEQTPLSALYMGALIKEAGFPPGVINILPGYGPTAGAAIASHIGIDKIAFTGSTEVGKLIQEAAGRSNLKRVTLELGGKSPNIIFADADLDYAVEQAHQGVFFNQGQCCTAGSRIFVEESIYEEFVRRSVERAKRRVVGSPFDPTTEQGPQIDKKQYNKILELIQSGVAEGAKLECGGKGLGRKGFFIEPTVFSNVTDDMRIAKEEIFGPVQEILRFKTMDEVIERANNSDFGLVAAVFTNDINKALTVSSAMQAGTVWINCYNALNAQSPFGGFKMSGNGREMGEFGLREYSEVKTVTVKIPQKNS

SEQ ID NO: 36995 - protein, 85 aa, Homo sapiens
MDASERGRLLDKLADLVERDRAVLATMESLNGGKPFLQAFYVDLQGVIKTFRYYAGWADKIHGMTIPVDGDYFTFTRHEPIGVCG

SEQ ID NO: 36996 - protein, 512 aa, Homo sapiens
MATANGAVENGQPDRKPPALPRPIRNLEVKFTKIFINNEWHESKSGKKFATCNPSTREQICEVEEGDKPDVDKAVEAAQVAFQRGSPWRRLDALSRGRLLHQLADLVERDRATLAALETMDTGKPFLHAFFIDLEGCIRTLRYFAGWADKIQGKTIPTDDNVVCFTRHEPIGVCGAITPWNFPLLMLVWKLAPALCCGNTMVLKPAEQTPLTALYLGSLIKEAGFPPGVVNIVPGFGPTVGAAISSHPQINKIAFTGSTEVGKLVKEAASRSNLKRVTLELGGKNPCIVCADADLDLAVECAHQGVFFNQGQCCTAASRVFVEEQVYSEFVRRSVEYAKKRPVGDPFDVKTEQGPQIDQKQFDKILELIESGKKEGAKLECGGSAMEDKGLFIKPTVFSEVTDNMRIAKEEIFGPVQPILKFKSIEEVIKRANSTDYGLTAAVFTKNLDKALKLASALESGTVWINCYNALYAQAPFGGFKMSGNGRELGEYALAEYTEVKTVTIKLGDKNP

SEQ ID NO: 36997 - protein, 151 aa, Homo sapiens
MATANGAVENGQPDRKPPALPRPIRNLEVKFTKIFINNEWHESKSGKKFATCNPSTREQICEVEEGDKPDVDKAVEAAQVAFQRGSPWRRLDALSRGRLLHQLADLVERDRATLAALETMDTGKPFLHAFFIDLEGCIRTLRLIKSSSTKS

SEQ ID NO: 36998 - protein, 517 aa, Homo sapiens [sequence omitted]

SEQ ID NO: 36999 - protein, 218 aa, Homo sapiens
MEHAVEQCHEALFFNMGQCCCAGSRTFVEESIYNEFLERTVEKAKQRKVGNPFELDTQQGPQVDKEQFERVLGYIQLGQKEGAKLLCGGERFGERGFFIKPTVFGGVQDDMRIAKEEIFGPVQPLFKFKKIEEVVERANNTRYGLAAAVFTRDLDKAMYFTQALQAGTVWVNTYNIVTCHTPFGGFKESGNGRELGEDGLKAYTEVKTVTIKVPQKNS

SEQ ID NO: 37000 - protein, 912 aa, Homo sapiens
MAGPSNPPATMKIAVIGQSLFGQEVYCHLRKEGHEVVGVFTVPDKDGKADPLGLEAEKDGVPVFKYSRWRAKGQALPDVVAKYQALGAELNVLPFCSQFIPMEIISAPRHGSIIYHPSLLPRHRGASAINWTLIHGDKKGGFSIFWADDGLDTGDLLLQKECEVLPDDTVSTLYNRFLFPEGIKGMVQAVRLIAEGKAPRLPQPEEGATYEGIQKKETAKINWDQPAEAIHNWIRGNDKVPGAWTEACEQKLTFFNSTLNTSGLVPEGDALPIPGAHRPGVVTKAGLILFGNDDKMLLVKNIQLEDGKMILASNFFKGAASSVLELTEAELVTAEAVRSVWQRILPKVLEVEDSTDFFKSGAASVDVVRLVEEVKELCDGLELENEDVYMASTFGDFIQLLVRKLRGDDEEGECSIDYVEMAVNKRTVRMPHQLFIGGEFVDAEGAKTSETINPTDGSVICQVSLAQVTDVDKAVAAAKDAFENGRWGKISARDRGRLMYRLADLMEQHQEELATIEALDAGAVYTLALKTHVGMSIQTFRYFAGWCDKIQGSTIPINQARPNRNLTLTRKEPVGVCGIIIPWNYPLMMLSWKTAACLAAGNTVVIKPAQVTPLTALKFAELTLKAGIPKGVVNVLPGSGSLVGQRLSDHPDVRKIGFTGSTEVGKHIMKSCAISNVKKVSLELGGKSPLIIFADCDLNKAVQMGMSSVFFNKGENCIAAGRLFVEDSIHDEFVRRVVEEVRKMKVGNPLDRDTDHGPQNHHAHLVKLMEYCQHGVKEGATLVCGGNQVPRPGFFFEPTVFTDVEDHMFIAKEESFGPVMIISRFADGDLDAVLSRANATEFGLASGVFTRDINKALYVSDKLQAGTVFVNTYNKTDVAAPFGGFKQSGFGKDLGEAALNEYLRVKTVTFEY

SEQ ID NO: 37001 - protein, 505 aa, Homo sapiens
MKIAVIGQSLFGQEVYCHLRKEGHEVVGVFTVPDKDGKADPLGLEAEKDGVPVFKYSRWRAKGQALPDVVAKYQALGAELNVLPFCSQFIPMEIISAPRHGSIIYHPSLLPRHRGASAINWTLIHGDKKGGFSIFWADDGLDTGDLLLQKECEVLPDDTVSTLYNRFLFPEGIKGMVQAVRLIAEGKAPRLPQPEEGATYEGIQKKETAKINWDQPAEAIHNWIRGNDKVPGAWTEACEQKLTFFNSTLNTSGLVPEGDALPIPGAHRPGVVTKAGLILFGNDDKMLLVKNIQLEDGKMILASNFFKGAASSVLELTEAELVTAEAVRSVWQRILPKVLEVEDSTDFFKSGAASVDVVRLVEEVKELCDGLELENEDVYMASTFGDFIQLLVRKLRGDDEEGECSIDYVEMAVNKRTVRMPHQLFIGGEFVDAEGAKTSETINPTDGSVICQVSLAQVTDVDKAVAAAKDAFENGRWGKISARDRGRLMYRAPPSPSTRPDPTAT

SEQ ID NO: 37002 - protein, 902 aa, Homo sapiens
MKIAVIGQSLFGQEVYCHLRKEGHEVVGVFTVPDKDGKADPLGLEAEKDGVPVFKYSRWRAKGQALPDVVAKYQALGAELNVLPFCSQFIPMEIISAPRHGSIIYHPSLLPRHRGASAINWTLIHGDKKGGFSIFWADDGLDTGDLLLQKECEVLPDDTVSTLYNRFLFPEGIKGMVQAVRLIAEGKAPRLPQPEEGATYEGIQKKETAKINWDQPAEAIHNWIRGNDKVPGAWTEACEQKLTFFNSTLNTSGLVPEGDALPIPGAHRPGVVTKAGLILFGNDDKMLLVKNIQLEDGKMILASNFFKGAASSVLELTEAELVTAEAVRSVWQRILPKVLEVEDSTDFFKSGAASVDVVRLVEEVKELCDGLELENEDVYMASTFGDFIQLLVRKLRGDDEEGECSIDYVEMAVNKRTVRMPHQLFIGGEFVDAEGAKTSETINPTDGSVICQVSLAQVTDVDKAVAAAKDAFENGRWGKISARDRGRLMYRLADLMEQHQEELATIEALDAGAVYTLALKTHVGMSIQTFRYFAGWCDKIQGSTIPINQARPNRNLTLTRKEPVGVCGIIIPWNYPLMMLSWKTAACLAAGNTVVIKPAQVTPLTALKFAELTLKAGIPKGVVNVLPGSGSLVGQRLSDHPDVRKIGFTGSTEVGKHIMKSCAISNVKKVSLELGGKSPLIIFADCDLNKAVQMGMSSVFFNKGENCIAAGRLFVEDSIHDEFVRRVVEEVRKMKVGNPLDRDTDHGPQNHHAHLVKLMEYCQHGVKEGATLVCGGNQVPRPGFFFEPTVFTDVEDHMFIAKEESFGPVMIISRFADGDLDAVLSRANATEFGLASGVFTRDINKALYVSDKLQAGTVFVNTYNKTDVAAPFGGFKQSGFGKDLGEAALNEYLRVKTVTFEY

SEQ ID NO: 37003 - protein, 160 aa, Homo sapiens
MVQAVRLIAEGKAPRLPQPEEGATYEGIQKKETAKINWDQPAEAIHNWIRGNDKVPGAWTEACEQKLTFFNSTLNTSGLVPEGDALPIPGAHRPGVVTKAGLILFGNDDKMVRARLWVTCLLKATHAPVLGLRPHRKTLGSSGENGKNQTQEGTLTLICP

SEQ ID NO: 37004 - protein, 168 aa, Homo sapiens
MKIAVIGQSLFGQEVYCHLRKEGHEVVGVFTVPDKDGKADPLGLEAEKDGVPVFKYSRWRAKGQALPDVVAKYQALGAELNVLPFCSQFIPMEIISAPRHGSIIYHPSLLPRHRGASAINWTLIHGDKKGGFSIFWADDGLDTGDLLLQKECEVLPDDTVSTLYNRFL

SEQ ID NO: 37005 - protein, 902 aa, Homo sapiens; identical to SEQ ID NO: 37002

SEQ ID NO: 37006 - protein, 157 aa, Homo sapiens
MKIAVIGQSLFGQEVYCHLRKEGHEVVGVFTVPDKDGKADPLGLEAEKDGVPVFKYSRWRAKGQALPDVVAKYQALGAELNVLPFCSQFIPMEIISAPRHGSIIYHPSLLPRHRGASAINWTLIHGDKKGGFSIFWADDGLDTGDLLLQKECEVLPD

SEQ ID NO: 37007 - protein, 177 aa, Homo sapiens
MKIAVIGQSLFGQEVYCHLRKEGHEVVGVFTVPDKDGKADPLGLEAEKDGVPVFKYSRWRAKGQALPDVVAKYQALGAELNVLPFCSQFIPMEIISAPRHGSIIYHPSLLPRHRGASAINWTLIHGDKKGGFSIFWADDGLDTGDLLLQKECEVLPDDTVSTLYNRFLFPEGIKGMV

SEQ ID NO: 37008 - protein, 100 aa, Homo sapiens
MKIAVIGQSLFGQEVYCHLRKEGHEVVGVFTVPDKDGKADPLGLEAEKDGVPVFKYSRWRAKGQALPDVVAKYQALGAELNVLPFCSQFIPMEIISAPRH

SEQ ID NO: 37009 - protein, 802 aa, Homo sapiens
MAATRAGPRAREIFTSLEYGPVPESHACALAWLDTQDRCLGHYVNGKWLKPEHRNSVPCQDPITGENLASCLQAQAEDVAAAVEAARMAFKGWSAHPGVVRAQHLTRLAEVIQKHQRLLWTLESLVTGRAVREVRDGDVQLAQQLLHYHAIQASTQEEALAGWEPMGVIGLILPPTFSFLEMMWRICPALAVGCTVVALVPPASPAPLLLAQLAGELGPFPGILNVLSGPASLVPILASQPGIRKVAFCGAPEEGRALRRSLAGECAELGLALGTESLLLLTDTADVDSAVEGVVDAAWSDRGPGGLRLLIQESVWDEAMRRLQERMGRLRSGRGLDGAVDMGARGAAACDLVQRFVREAQSQGAQVFQAGDVPSERPFYPPTLVSNLPPASPCAQVEVPWPVVVASPFRTAKEALLVANGTPRGGSASVWSERLGQALELGYGLQVGTVWINAHGLRDPSVPTGGCKESGCSWHGGPDGLYEYLRPSGTPARLSCLSKNLNYDTFGLAVPSTLPAGPEIGPSPAPPYGLFVGGRFQAPGARSSRPIRDSSGNLHGYVAEGGAKDIRGAVEAAHQAFPGWAGQSPGARAALLWALAAALERRKSTLASRLERQGAELKAAEAEVELSARRLRAWGARVQAQGHTLQVAGLRGPVLRLREPLGVLAVVCPDEWPLLAFVSLLAPALAYGNTVVMVPSAACPLLALEVCQDMATVFPAGLANVVTGDRDHLTRCLALHQDVQAMWYFGSAQGSQFVEWASAGNLKPVWASRGCPRAWDQEAEGAGPELGLRVARTKALWLPMGD

SEQ ID NO: 37010 - protein, 637 aa, Homo sapiens
MGVIGLILPPTFSFLEMMWRICPALAVGCTVVALVPPASPAPLLLAQLAGELGPFPGILNVLSGPASLVPILASQPGIRKVAFCGAPEEGRALRRSLAGECAELGLALGTESLLLLTDTADVDSAVEGVVDAAWSDRGPGGLRLLIQESVWDEAMRRLQERMGRLRSGRGLDGAVDMGARGAAACDLVQRFVREAQSQGAQVFQAGDVPSERPFYPPTLVSNLPPASPCAQVEVPWPVVVASPFRTAKEALLVANGTPRGGSASVWSERLGQALELGYGLQVGTVWINAHGLRDPSVPTGGCKESGCSWHGGPDGLYEYLRPSGTPARLSCLSKNLNYDTFGLAVPSTLPAGPEIGPSPAPPYGLFVGGRFQAPGARSSRPIRDSSGNLHGYVAEGGAKDIRGAVEAAHQAFPGWAGQSPGARAALLWALAAALERRKSTLASRLERQGAELKAAEAEVELSARRLRAWGARVQAQGHTLQVAGLRGPVLRLREPLGVLAVVCPDEWPLLAFVSLLAPALAYGNTVVMVPSAACPLLALEVCQDMATVFPAGLANVVTGDRDHLTRCLALHQDVQAMWYFGSAQGSQFVEWASAGNLKPVWASRGCPRAWDQEAEGAGPELGLRVARTKALWLPMGD

SEQ ID NO: 37011 - protein, 751 aa, Homo sapiens
MAATRAGPRAREIFTSLEYGPVPESHACALAWLDTQDRCLGHYVNGKWLKPEHRNSVPCQDPITGENLASCLQAQAEDVAAAVEAARMAFKGWSAHPGVVRAQHLTRLAEVIQKHQRLLWTLESLVTGRAVREVRDGDVQLAQQLLHYHAIQASTQEEALAGWEPMGVIGLILPPTFSFLEMMWRICPALAVGCTVVALVPPASPAPLLLAQLAGELGPFPGILNVLSGPASLVPILASQPGIRKVAFCGAPEGGLRLLIQESVWDEAMRRLQERMGRLRSGRGLDGAVDMGARGAAACDLVQRFVREAQSQGAQVFQAGDVPSERPFYPPTLVSNLPPASPCAQVEVPWPVVVASPFRTAKEALLVANGTPRGGSASVWSERLGQALELGYGLQVGTVWINAHGLRDPSVPTGGCKESGCSWHGGPDGLYEYLRPSGTPARLSCLSKNLNYDTFGLAVPSTLPAGPEIGPSPAPPYGLFVGGRFQAPGARSSRPIRDSSGNLHGYVAEGGAKDIRGAVEAAHQAFPGWAGQSPGARAALLWALAAALERRKSTLASRLERQGAELKAAEAEVELSARRLRAWGARVQAQGHTLQVAGLRGPVLRLREPLGVLAVVCPDEWPLLAFVSLLAPALAYGNTVVMVPSAACPLLALEVCQDMATVFPAGLANVVTGDRDHLTRCLALHQDVQAMWYFGSAQGSQFVEWASAGNLKPVWASRGCPRAWDQEAEGAGPELGLRVARTKALWLPMGD

SEQ ID NO: 37012 - protein, 639 aa, Homo sapiens
MRTGVIGLILPPTFSFLEMMWRICPALAVGCTVVALVPPASPAPLLLAQLAGELGPFPGILNVLSGPASLVPILASQPGIRKVAFCGAPEEGRALRRSLAGECAELGLALGTESLLLLTDTADVDSAVEGVVDAAWSDRGPGGLRLLIQESVWDEAMRRLQERMGRLRSGRGLDGAVDMGARGAAACDLVQRFVREAQSQGAQVFQAGDVPSERPFYPPTLVSNLPPASPCAQVEVPWPVVVASPFRTAKEALLVANGTPRGGSASVWSERLGQALELGYGLQVGTVWINAHGLRDPSVPTGGCKESGCSWHGGPDGLYEYLRPSGTPARLSCLSKNLNYDTFGLAVPSTLPAGPEIGPSPAPPYGLFVGGRFQAPGARSSRPIRDSSGNLHGYVAEGGAKDIRGAVEAAHQAFPGWAGQSPGARAALLWALAAALERRKSTLASRLERQGAELKAAEAEVELSARRLRAWGARVQAQGHTLQVAGLRGPVLRLREPLGVLAVVCPDEWPLLAFVSLLAPALAYGNTVVMVPSAACPLLALEVCQDMATVFPAGLANVVTGDRDHLTRCLALHQDVQAMWYFGSAQGSQFVEWASAGNLKPVWASRGCPRAWDQEAEGAGPELGLRVARTKALWLPMGD

SEQ ID NO: 37013 - protein, 793 aa, Homo sapiens
MLSQVYRCGFQPFNQHLLPWVKCTTVFRSHCIQPSVIRHVRSWSNIPFITVPLSRTHGKSFAHRSELKHAKRIVVKLGSAVVTRGDECGLALGRLASIVEQVSVLQNQGREMMLVTSGAVAFGKQRLRHEILLSQSVRQALHSGQNQLKEMAIPVLEARACAAAGQSGLMALYEAMFTQYSICAAQILVTNLDFHDEQKRRNLNGTLHELLRMNIVPIVNTNDAVVPPAEPNSDLQGVISVKDNDSLAARLAVEMKTDLLIVLSDVEGLFDSPPGSDDAKLIDIFYPGDQQSVTFGTKSRVGMGGMEAKVKAALWALQGGTSVVIANGTHPKVSGHVITDIVEGKKVGTFFSEVKPAGPTVEQQGEMARSGGRMLATLEPEQRAEIIHHLADLLTDQRDEILLANKKDLEEAEGRLAAPLLKRLSLSTSKLNSLAIGLRQIAASSQDSVGRVLRRTRIAKNLELEQVTVPIGVLLVIFESRPDCLPQVAALAIASGNGLLLKGGKEAAHSNRILHLLTQEALSIHGVKEAVQLVNTREEVEDLCRLDKMIDLIIPRGSSQLVRDIQKAAKGIPVMGHSEGICHMYVDSEASVDKVTRLVRDSKCEYPAACNALETLLIHRDLLRTPLFDQIIDMLRVEQVKIHAGPKFASYLTFSPSEVKSLRTEYGDLELCIEVVDNVQDAIDHIHKYGSSHTDVIVTEDENTAEFFLQHVDSACVFWNASTRFSDGYRFGLGAEVGISTSRIHARGPVGLEGLLTTKWLLRGKDHVVSDFSEHGSLKYLHENLPIPQRNTN

SEQ ID NO: 37014 - protein, 795 aa, Homo sapiens [sequence omitted]

SEQ ID NO: 37015 - protein, 517 aa, Homo sapiens
MLRAAARFGPRLGRRLLSAAATQAVPAPNQQPEVFCNQIFINNEWHDAVSRKTFPTVNPSTGEVICQVAEGDKEDVDKAVKAARAAFQLGSPWRRMDASHRGRLLNRLADLIERDRTYLAALETLDNGKPYVISYLVDLDMVLKCLRYYAGWADKYHGKTIPIDGDFFSYTRHEPVGVCGQIIPWNFPLLMQAWKLGPALATGNVVVMKVAEQTPLTALYVANLIKEAGFPPGVVNIVPGFGPTAGAAIASHEDVDKVAFTGSTEIGRVIQVAAGSSNLKRVTLELGGKSPNIIMSDADMDWAVEQAHFALFFNQGQCCCAGSRTFVQEDIYDEFVERSVARAKSRVVGNPFDSKTEQGPQVDETQFKKILGYINTGKQEGAKLLCGGGIAADRGYFIQPTVFGDVQDGMTIAKEEIFGPVMQILKFKTIEEVVGRANNSTYGLAAAVFTKDLDKANYLSQALQAGTVWVNCYDVFGAQSPFGGYKMSGSGRELGEYGLQAYTEVKTVTVKVPQKNS

SEQ ID NO: 37016 - protein, 470 aa, Homo sapiens
MLRAAARFGPRLGRRLLSAAATQAVPAPNQQPEVFCNQIFINNEWHDAVSRKTFPTVNPSTGEVICQVAEGDKALETLDNGKPYVISYLVDLDMVLKCLRYYAGWADKYHGKTIPIDGDFFSYTRHEPVGVCGQIIPWNFPLLMQAWKLGPALATGNVVVMKVAEQTPLTALYVANLIKEAGFPPGVVNIVPGFGPTAGAAIASHEDVDKVAFTGSTEIGRVIQVAAGSSNLKRVTLELGGKSPNIIMSDADMDWAVEQAHFALFFNQGQCCCAGSRTFVQEDIYDEFVERSVARAKSRVVGNPFDSKTEQGPQVDETQFKKILGYINTGKQEGAKLLCGGGIAADRGYFIQPTVFGDVQDGMTIAKEEIFGPVMQILKFKTIEEVVGRANNSTYGLAAAVFTKDLDKANYLSQALQAGTVWVNCYDVFGAQSPFGGYKMSGSGRELGEYGLQAYTEVKTVTVKVPQKNS

SEQ ID NO: 37017 - protein, 453 aa, Homo sapiens
MSKISEAVKRARAAFSSGRTRPLQFRIQQLEALQRLIQEQEQELVGALAADLHKNEWNAYYEEVVYVLEEIEYMIQKLPEWAADEPVEKTPQTQQDELYIHSEPLGVVLVIGTWNYPFNLTIQPMVGAIAAGNSVVLKPSELSENMASLLATIIPQYLDKDLYPVINGGVPETTELLKERFDHILYTGSTGVGKIIMTAAAKHLTPVTLELGGKSPCYVDKNCDLDVACRRIAWGKFMNSGQTCVAPDYILCDPSIQNQIVEKLKKSLKEFYGEDAKKSRDYGRIISARHFQRVMGLIEGQKVAYGGTGDAATRYIAPTILTDVDPQSPVMQEEIFGPVLPIVCVRSLEEAIQFINQREKPLALYMFSSNDKVIKKMIAETSSGGVAANDVIVHITLHSLPFGGVGNSGMGSYHGKKSFETFSHRRSCLVRPLMNDEGLKVRYPPSPAKMTQH

SEQ ID NO: 37018 - protein, 511 aa, Homo sapiens
EVQRTPHPTFEYFFFLSRKLPGQELQGLNGREAGSLNTSPLGSCRSRSPSYRERLCQRRHEQDQRGREARPRRLQGRTRPLQFRIQQLEALQRLIQEQEQELVGALAADLHKNEWNAYYEEVVYVLEEIEYMIQKLPEWAADEPVEKTPQTQQDELYIHSEPLGVVLVIGTWNYPFNLTIQPMVGAIAAGNSVVLKPSELSENMASLLATIIPQYLDKDLYPVINGGVPETTELLKERFDHILYTGSTGVGKIIMTAAAKHLTPVTLELGGKSPCYVDKNCDLDVACRRIAWGKFMNSGQTCVAPDYILCDPSIQNQIVEKLKKSLKEFYGEDAKKSRDYGRIISARHFQRVMGLIEGQKVAYGGTGDAATRYIAPTILTDVDPQSPVMQEEIFGPVLPIVCVRSLEEAIQFINQREKPLALYMFSSNDKVIKKMIAETSSGGVAANDVIVHITLHSLPFGGVGNSGMGSYHGKKSFETFSHRRSCLVRPLMNDEGLKVRYPPSPAKMTQH

SEQ ID NO: 37019 - protein, 389 aa, Homo sapiens
MSKISEAVKRARAAFSSGRTRPLQFRIQQLEALQRLIQEQEQELVGALAADLHKNEWNAYYEEVVYVLEEIEYMIQKLPEWAADEPVEKTPQTQQDELYIHSEPLGVVLVIGTWNYPFNLTIQPMVGAIAAGNSVVLKPSELSENMASLLATIIPQYLDKDLYPVINGGVPETTELLKERFDHILYTGSTGVGKIIMTAAAKHLTPVTLELGGKSPCYVDKNCDLDVACRRIAWGKFMNSGQTCVAPDYILCDPSIQNQIVEKLKKSLKEIFGPVLPIVCVRSLEEAIQFINQREKPLALYMFSSNDKVIKKMIAETSSGGVAANDVIVHITLHSLPFGGVGNSGMGSYHGKKSFETFSHRRSCLVRPLMNDEGLKVRYPPSPAKMTQH

SEQ ID NO: 37020 - protein, 230 aa, Homo sapiens
MSKISEAVKRARAAFSSGRTRPLQFRIQQLEALQRLIQEQEQELVGALAADLHKNEWNAYYEEVVYVLEEIEYMIQKLPEWAADEPVEKTPQTQQDELYIHSEPLGVVLVIGTWNYPFNLTIQPMVGAIAAGNSVVLKPSELSENMASLLATIIPQYLDKDLYPVINGGVPETTELLKERFDHILYTGSTGVGKIIMTAAAKHLTPVTLELGGKSPCYVDKNCDLDVACR

SEQ ID NO: 37021 - protein, 372 aa, Homo sapiens
MSKISEAVKRARAAFSSGRTRPLQFRIQQLEALQRLIQEQEQELVGALAADLHKNEWNAYYEEVVYVLEEIEYMIQKLPEWAADEPVEKTPQTQQDELYIHSEPLGVVLVIGTWNYPFNLTIQPMVGAIAAGNSVVLKPSELSENMASLLATIIPQYLDKDLYPVINGGVPETTELLKERFDHILYTGSTGVGKIIMTAAAKHLTPVTLELGGKSPCYVDKNCDLDVACRRIAWGKFMNSGQTCVAPDYILCDPSIQNQIVEKLKKSLKEFYGEDAKKSRDYGRIISARHFQRVMGLIEGQKVAYGGTGDAATRYIAPTILTDVDPQSPVMQEEIFGPVLPIVCVRSLEEAIQFINQREKPLALYMFSSNDK

SEQ ID NO: 37022 - protein, 453 aa, Homo sapiens; identical to SEQ ID NO: 37017

SEQ ID NO: 37023 - protein, 453 aa, Homo sapiens; identical to SEQ ID NO: 37017

SEQ ID NO: 37024 - protein, 400 aa, Homo sapiens
MIQKLPEWAADEPVEKTPQTQQDELYIHSEPLGVVLVIGTWNYPFNLTIQPMVGAIAAGNSVVLKPSELSENMASLLATIIPQYLDKDLYPVINGGVPETTELLKERFDHILYTGSTGVGKIIMTAAAKHLTPVTLELGGKSPCYVDKNCDLDVACRRIAWGKFMNSGQTCVAPDYILCDPSIQNQIVEKLKKSLKEFYGEDAKKSRDYGRIISARHFQRVMGLIEGQKVAYGGTGDAATRYIAPTILTDVDPQSPVMQEEIFGPVLPIVCVRSLEEAIQFINQREKPLALYMFSSNDKVIKKMIAETSSGGVAANDVIVHITLHSLPFGGVGNSGMGSYHGKKSFETFSHRRSCLVRPLMNDEGLKVRYPPSPAKMTQHWLSWPWENRSCSPSPAPLLC

SEQ ID NO: 37025 - protein, 485 aa, Homo sapiens
MELEVRRVRQAFLSGRSRPLRFRLQQLEALRRMVQEREKDILTAIAADLCKSEFNVYSQEVITVLGEIDFMLENLPEWVTAKPVKKNVLTMLDEAYIQPQPLGVVLIIGAWNYPFVLTIQPLIGAIAAGNAVIIKPSELSENTAKILAKLLPQYLDQDLYIVINGGVEETTELLKQRFDHIFYTGNTAVGKIVMEAAAKHLTPVTLELGGKSPCYIDKDCDLDIVCRRITWGKYMNCGQTCIAPDYILCEASLQNQIVWKIKETVKEFYGENIKESPDYERIINLRHFKRILSLLEGQKIAFGGETDEATRYIAPTVLTDVDPKTKVMQEEIFGPILPIVPVKNVDEAINFINEREKPLALYVFSHNHKLIKRMIDETSSGGVTGNDVIMHFTLNSFPFGGVGSSGMGAYHGKHSFDTFSHQRPCLLKSLKREGANKLRYPPNSQSKVDWGKFFLLKRFNKEKLGLLLLTFLGIVAAVLVKAEYY

SEQ ID NO: 37026 - protein, 508 aa, Homo sapiens
MELEVRRVRQAFLSGRSRPLRFRLQQLEALRRMVQEREKDILTAIAADLCKSEFNVYSQEVITVLGEIDFMLENLPEWVTAKPVKKNVLTMLDEAYIQPQPLGVVLIIGAWNYPFVLTIQPLIGAIAAGNAVIIKPSELSENTAKILAKLLPQYLDQDLYIVINGGVEETTELLKQRFDHIFYTGNTAVGKIVMEAAAKHLTPVTLELGGKSPCYIDKDCDLDIVCRRITWGKYMNCGQTCIAPDYILCEASLQNQIVWKIKETVKEFYGENIKESPDYERIINLRHFKRILSLLEGQKIAFGGETDEATRYIAPTVLTDVDPKTKVMQEEIFGPILPIVPVKNVDEAINFINEREKPLALYVFSHNHKLIKRMIDETSSGGVTGNDVIMHFTLNSFPFGGVGSSGMGAYHGKHSFDTFSHQRPCLLKSLKREGANKLRYPPNSQSKVDWGKFFLLKRFNKEKLGLLLLTFLGIVAAVLVKKYQAVLRRKALLIFLVVHRLRWSSKQR

SEQ ID NO: 37027 - protein, 485 aa, Homo sapiens; identical to SEQ ID NO: 37025

SEQ ID NO: 37028 - protein, 166 aa, Homo sapiens
MELEVRRVRQAFLSGRSRPLRFRLQQLEALRRMVQEREKDILTAIAADLCKSEFNVYSQEVITVLGEIDFMLENLPEWVTAKPVKKNVLTMLDEAYIQPQPLGVVLIIGAWNYPFVLTIQPLIGAIAAGNAVIIKPSELSENTAKILAKLLPQYLDQDLYIVINGG

SEQ ID NO: 37029 - protein, 385 aa, Homo sapiens
MKDEPRSTNLFMKLDSVFIWKEPFGLVLIIAPWNYPLNLTLVLLVGALAAGSCVVLKPSEISQGTEKVLAEVLPQYLDQSCFAVVLGGPQETGQLLEHKLDYIFFTGSPRVGKIVMTAATKHLTPVTLELGGKNPCYVDDNCDPQTVANRVAWFCYFNAGQTCVAPDYVLCSPEMQERLLPALQSTITRFYGDDPQSSPNLGHIINQKQFQRLRALLGCSRVAIGGQSNESDRYIAPTVLVDVQETEPVMQEEIFGPILPIVNVQSVDEAIKFINRQEKPLALYAFSNSSQVVNQMLERTSSGSFGGNEGFTYISLLSVPFGGVGHSGMGRYHGKFTFDTFSHHRTCLLAPSGLEKLKEIHYPPYTDWNQQLLRWGMGSQSCTLL

SEQ ID NO: 37030 - protein, 148 aa, Homo sapiens
MKDEPRSTNLFMKLDSVFIWKEPFGLVLIIAPWNYPLNLTLVLLVGALAAGSCVVLKPSEISQGTEKVLAEVLPQYLDQSCFAVVLGGPQETGQLLEHKLDYIFFTGSPRVGKIVMTAATKHLTPVTLELGGKNPCYVDDNCDPQTVA

SEQ ID NO: 37031 - protein, 95 aa, Homo sapiens
MKDEPRSTNLFMKLDSVFIWKEPFGLVLIIAPWNYPLNLTLVLLVGALAAGSCVVLKPSEISQGTEKVLAEVLPQYLDQSCFAVVLGGPQETGQL

SEQ ID NO: 37032 - protein, 385 aa, Homo sapiens; identical to SEQ ID NO: 37029

SEQ ID NO: 37033 - protein, 563 aa, Homo sapiens
MLLPAPALRRALLSRPWTGAGLRWKHTSSLKVANEPVLAFTQGSPERDALQKALKDLKGRMEAIPCVVGDEEVWTSDVQYQVSPFNHGHKVAKFCYADKSLLNKAIEAALAARKEWDLKPIADRAQIFLKAADMLSGPRRAEILAKTMVGQGKTVIQAEIDAAAELIDFFRFNAKYAVELEGQQPISVPPSTNSTVYRGLEGFVAAISPFNFTAIGGNLAGAPALMGNVVLWKPSDTAMLASYAVYRILREAGLPPNIIQFVPADGPLFGDTVTSSEHLCGINFTGSVPTFKHLWKQVAQNLDRFHTFPRLAGECGGKNFHFVHRSADVESVVSGTLRSAFEYGGQKCSACSRLYVPHSLWPQIKGRLLEEHSRIKVGDPAEDFGTFFSAVIDAKSFARIKKWLEHARSSPSLTILAGGKCDDSVGYFVEPCIVESKDPQEPIMKEEIFGPVLSVYVYPDDKYKETLQLVDSTTSYGLTGAVFSQDKDVVQEATKVLRNAAGNFYINDKSTGSIVGQQPFGGARASGTNDKPGGPHYILRWTSPQVIKETHKPLGDWSYAYMQ

SEQ ID NO: 37034 - protein, 195 aa, Homo sapiens
MEAIPCVVGDEEVWTSDVQYQVSPFNHGHKVAKFCYADKSLLNKAIEAALAARKEWDLKPIADRAQIFLKAADMLSGPRRAEILAKTMVGQGKTVIQAEIDAAAELIDFFRFNAKYAVELEGQQPISVPPSTNSTVYRGLEGFVAAISPFNFTAIGGNLAGAPALMLREGVVTLPLCQMTKLRHTAVTYLARLSD

SEQ ID NO: 37035 - protein, 210 aa, Homo sapiens
MLLPAPALRRALLSRPWTGAGLRWKHTSSLKVANEPVLAFTQGSPERDALQKALKDLKGRMEAIPCVVGDEEVWTSDVQYQVSSLLNKAIEAALAARKEWDLKPIADRAQIFLKAADMLSGPRRAEILAKTMVGQGKTVIQAEIDAAAELIDFFRFNAKYAVELEGQQPISVPPSTNSTVYRGLEGFVAAISPFNFTAIGGNLAGAPALM

SEQ ID NO: 37036 - protein, 563 aa, Homo sapiens; identical to SEQ ID NO: 37033

SEQ ID NO: 37037 - protein, 214 aa, Homo sapiens
MLLPAPALRRALLSRPWTGAGLRWKHTSSLKVANEPVLAFTQGSPERDALQKALKDLKGRMEAIPCVVGDEEVWTSDVQYQVSSLLNKAIEAALAARKEWDLKPIADRAQIFLKAADMLSGPRRAEILAKTMVGQGKTVIQAEIDAAAELIDFFRFNAKYAVELEGQQPISVPPSTNSTVYRGLEGFVAAISPFNFTAIGGNLAGAPALMVRCG

SEQ ID NO: 37038 - protein, 153 aa, Homo sapiens
NKAIEAALAARKEWDLKPIADRAQIFLKAADMLSGPRRAEILAKTMVGQGKTVIQAEIDAAAELIDFFRFNAKYAVELEGQQPISVPPSTNSTVYRGLEGFVAAISPFNFTAIGGNLAGAPALMLREGVVTLPLCQMTKLRHTAVTYLARLSD

SEQ ID NO: 37039 - protein, 503 aa, Homo sapiens
MEAIPCVVGDEEVWTSDVQYQVSPFNHGHKVAKFCYADKSLLNKAIEAALAARKEWDLKPIADRAQIFLKAADMLSGPRRAEILAKTMVGQGKTVIQAEIDAAAELIDFFRFNAKYAVELEGQQPISVPPSTNSTVYRGLEGFVAAISPFNFTAIGGNLAGAPALMGNVVLWKPSDTAMLASYAVYRILREAGLPPNIIQFVPADGPLFGDTVTSSEHLCGINFTGSVPTFKHLWKQVAQNLDRFHTFPRLAGECGGKNFHFVHRSADVESVVSGTLRSAFEYGGQKCSACSRLYVPHSLWPQIKGRLLEEHSRIKVGDPAEDFGTFFSAVIDAKSFARIKKWLEHARSSPSLTILAGGKCDDSVGYFVEPCIVESKDPQEPIMKEEIFGPVLSVYVYPDDKYKETLQLVDSTTSYGLTGAVFSQDKDVVQEATKVLRNAAGNFYINDKSTGSIVGQQPFGGARASGTNDKPGGPHYILRWTSPQVIKETHKPLGDWSYAYMQ

SEQ ID NO: 37040 - protein, 512 aa, Homo sapiens
MLLPAPALRRALLSRPWTGAGLRWKHTSSLKVANEPVLAFTQGSPERDALQKALKDLKGRMEAIPCVVGDEEVWTSDVQYQVSPFNHGHKVAKFCYADKSLLNKAIEAALAARKEWDLKPIADRAQIFLKAADMLSGPRRAEILAKTMVGQGKTVIQAEIDAAAELIDFFRFNAKYAVELEGQQPISVPPSTNSTVYRGLEGFVAAISPFNFTAIGGNLAGAPALMGNVVLWKPSDTAMLASYAVYRILREAGLPPNIIQFVPADGPLFGDTVTSSEHLCGINFTGSVPTFKHLWKQVAQNLDRFHTFPRLAGECGGKNFHFVHRSADVESVVSGTLRSAFEYGGQKCSACSRLYVPHSLWPQIKGRLLEEHSRIKVGDPAEDFGTFFSAVIDAKEIFGPVLSVYVYPDDKYKETLQLVDSTTSYGLTGAVFSQDKDVVQEATKVLRNAAGNFYINDKSTGSIVGQQPFGGARASGTNDKPGGPHYILRWTSPQVIKETHKPLGDWSYAYMQ

SEQ ID NO: 37041 - protein, 548 aa, Homo sapiens
MATCIWLRSCGARRLGSTFPGCRLRPRAGGLVPASGPAPGPAQLRCYAGRLAGLSAALLRTDSFVGGRWLPAAATFPVQDPASGAALGMVADCGVREARAAVRAAYEAFCRWREVSAKERSSLLRKWYNLMIQNKDDLARIITAESGKPLKEAHGEILYSAFFLEWFSEEARRVYGDIIHTPAKDRRALVLKQPIGVAAVITPWNFPSAMITRKVGAALAAGCTVVVKPAEDTPFSALALAEVNQGFLLDLDPLLLASQAGIPSGVYNVIPCSRKNAKEVGEAICTDPLVSKISFTGSTTTGKILLHHAANSVKRVSMELGGLAPFIVFDSANVDQAVAGAMASKFRNTGQTCVCSNQFLVQRGIHDAFVKAFAEAMKKNLRVGNGFEEGTTQGPLINEKAVEKVEKQVNDAVSKGATVVTGGKRHQLGKNFFEPTLLCNVTQDMLCTHEETFGPLAPVIKFDTEEEAIAIANAADVGLAGYFYSQDPAQIWRVAEQLEVGMVGVNEGLISSVECPFGGVKQSGLGREGSKYGIDEYLELKYVCYGGL

SEQ ID NO: 37042 - protein, 535 aa, Homo sapiens
MATCIWLRSCGARRLGSTFPGCRLRPRAGGLVPASGPAPGPAQLRCYAGRLAGLSAALLRTDSFVGGRWLPAAATFPVQDPASGAALGMVADCGVREARAAVRAAYEAFCRWREVSAKERSSLLRKWYNLMIQNKDDLARIITAESGKPLKEAHGEILYSAFFLEWFSEEARRVYGDIIHTPAKDRRALVLKQPIGVAAVITPWNFPSAMITRKVGAALAAGCTVVVKPAEDTPFSALALAELASQAGIPSGVYNVIPCSRKNAKEVGEAICTDPLVSKISFTGSTTTGKILLHHAANSVKRVSMELGGLAPFIVFDSANVDQAVAGAMASKFRNTGQTCVCSNQFLVQRGIHDAFVKAFAEAMKKNLRVGNGFEEGTTQGPLINEKAVEKVEKQVNDAVSKGATVVTGGKRHQLGKNFFEPTLLCNVTQDMLCTHEETFGPLAPVIKFDTEEEAIAIANAADVGLAGYFYSQDPAQIWRVAEQLEVGMVGVNEGLISSVECPFGGVKQSGLGREGSKYGIDEYLELKYVCYGGL

SEQ ID NO: 37043 - protein, 447 aa, Homo sapiens
MVADCGVREARAAVRAAYEAFCRWREVSAKERSSLLRKWYNLMIQNKDDLARIITAESGKPLKEAHGEILYSAFFLEWFSEEARRVYGDIIHTPAKDRRALVLKQPIGVAAVITPWNFPSAMITRKVGAALAAGCTVVVKPAEDTPFSALALAELASQAGIPSGVYNVIPCSRKNAKEVGEAICTDPLVSKISFTGSTTTGKILLHHAANSVKRVSMELGGLAPFIVFDSANVDQAVAGAMASKFRNTGQTCVCSNQFLVQRGIHDAFVKAFAEAMKKNLRVGNGFEEGTTQGPLINEKAVEKVEKQVNDAVSKGATVVTGGKRHQLGKNFFEPTLLCNVTQDMLCTHEETFGPLAPVIKFDTEEEAIAIANAADVGLAGYFYSQDPAQIWRVAEQLEVGMVGVNEGLISSVECPFGGVKQSGLGREGSKYGIDEYLELKYVCYGGL

SEQ ID NO: 37044 - protein, 535 aa, Homo sapiens
MAALLAAAAVRARILQVSSKVKSSPTWYSASSFSSSVPTVKLFIGGKFVESKSDKWIDIHNPATNEVIGRVPQATKAEMDAAIASCKRAFPAWADTSVLSRQQVLLRYQQLIKENLKEIAKLITLEQGKTLADAEGDVFRGLQVVEHACSVTSLMMGETMPSITKDMDLYSYRLPLGVCAGIAPFNFPAMIPLWMFPMAMVCGNTFLMKPSERVPGATMLLAKLLQDSGAPDGTLNIIHGQHEAVNFICDHPDIKAISFVGSNKAGEYIFERGSRHGKRVQANMGAKNHGVVMPDANKENTLNQLVGAAFGAAGQRCMALSTAVLVGEAKKWLPELVEHAKNLRVNAGDQPGADLGPLITPQAKERVCNLIDSGTKEGASILLDGRKIKVKGYENGNFVGPTIISNVKPNMTCYKEEIFGPVLVVLETETLDEAIQIVNNNPYGNGTAIFTTNGATARKYAHLVDVGQVGVNVPIPVPLPMFSFTGSRSSFRGDTNFYGKQGIQFYTQLKTITSQWKEEDATLSSPAVVMPTMGR

SEQ ID NO: 37045 - protein, 539 aa, Homo sapiens
MWRLPRALCVHAAKTSKLSGPWSRPAAFMSTLLINQPQYAWLKELGLREENEGVYNGSWGGRGEVITTYCPANNEPIARVRQASVADYEETVKKAREAWKIWADIPAPKRGEIVRQIGDALREKIQVLGSLVSLEMGKILVEGVGEVQEYVDICDYAVGLSRMIGGPILPSERSGHALIEQWNPVGLVGIITAFNFPVAVYGWNNAIAMICGNVCLWKGAPTTSLISVAVTKIIAKVLEDNKLPGAICSLTCGGADIGTAMAKDERVNLLSFTGSTQVGKQVGLMVQERFGRSLLELGGNNAIIAFEDADLSLVVPSALFAAVGTAGQRCTTARRLFIHESIHDEVVNRLKKAYAQIRVGNPWDPNVLYGPLHTKQAVSMFLGAVEEAKKEGGTVVYGGKVMDRPGNYVEPTIVTGLGHDASIAHTETFAPILYVFKFKNEEEVFAWNNEVKQGLSSSIFTKDLGRIFRWLGPKGSDCGIVNVNIPTSGAEIGGAFGGEKHTGGGRESGSDAWKQYMRRSTCTINYSKDLPLAQGIKFQ

SEQ ID NO: 37046 - protein, 347 aa, Homo sapiens
MWRLPRALCVHAAKTSKLSGPWSRPAAFMSTSLISVAVTKIIAKVLEDNKLPGAICSLTCGGADIGTAMAKDERVNLLSFTGSTQVGKQVGLMVQERFGRSLLELGGNNAIIAFEDADLSLVVPSALFAAVGTAGQRCTTARRLFIHESIHDEVVNRLKKAYAQIRVGNPWDPNVLYGPLHTKQAVSMFLGAVEEAKKEGGTVVYGGKVMDRPGNYVEPTIVTGLGHDASIAHTETFAPILYVFKFKNEEEVFAWNNEVKQGLSSSIFTKDLGRIFRWLGPKGSDCGIVNVNIPTSGAEIGGAFGGEKHTGGGRESGSDAWKQYMRRSTCTINYSKDLPLAQGIKFQ

SEQ ID NO: 37047 - protein, 502 aa, Homo sapiens
MGSPGRGAGLYFSSSQGLGLIPSPGLSMWRLPRALCVHAAKTSKLSGPWSRPAAFMSTLLINQPQYAWLKELGLREENEGVYNGSWGGRGEVITTYCPANNEPIARVRQASVADYEETVKKAREAWKIWADIPAPKRGEIVRQIGDALREKIQVLGSLVSLEMGKILVEGVGEVQEYVDICDYAVGLSRMIGGPILPSERSGHALIEQWNPVGLVGIITAFNFPVAVYGWNNAIAMICGNVCLWKGAPTTSLISVAVTKIIAKVLEDNKLPGAICSLTCGGADIGTAMAKDERVNLLSFTGSTQVGKQVGLMVQERFGRSLLELGGNNAIIAFEDADLSLVVPSALFAAVGTAGQRCTTARRLVMDRPGNYVEPTIVTGLGHDASIAHTETFAPILYVFKFKNEEEVFAWNNEVKQGLSSSIFTKDLGRIFRWLGPKGSDCGIVNVNIPTSGAEIGGAFGGEKHTGGGRESGSDAWKQYMRRSTCTINYSKDLPLAQGIKFQ

SEQ ID NO: 37048 - protein, 437 aa, Homo sapiens
MAGTNALLMLENFIDGKFLPCSSYIDSYDPSTGEVYCRVPNSGKDEIEAAVKAAREAFPSWSSRSPQERSRVLNQVADLLEQSLEEFAQAESKDQGKTLALARTMDIPRSVQNFRFFASSSLHHTSECTQMDHLGCMHYTVRAPVGVGVPPGVVNIVFGTGPRVGEALVSHPEVPLISFTGSQPTAERITQLSAPHCKKLSLELGGKNPAIIFEDANLDECIPATVRSSFANQGEICLCTSRIFVQKSIYSEFLKRFVEATRKWKVGIPSDPLVSIGALISKAHLEKVRSYVKRALAEGAQIWCGEGVDKLSLPARNQAGYFMLPTVITDIKDESCCMTEEIFGPVTCVVPFDSEEEVIERANNVKYGLAATVWSSNVGRVHRVAKKLQSGLVWTNCWLIRELNLPFGGMKSSGIGREGAKDSYDFFTEIKTITVKH

SEQ ID NO: 37049 - protein, 487 aa, Homo sapiens
MAGTNALLMLENFIDGKFLPCSSYIDSYDPSTGEVYCRVPNSGKDEIEAAVKAAREAFPSWSSRSPQERSRVLNQVADLLEQSLEEFAQAESKDQGKTLALARTMDIPRSVQNFRFFASSSLHHTSECTQMDHLGCMHYTVRAPVGVAGLISPWNLPLYLLTWKIAPAMAAGNTVIAKPSELTSVTAWMLCKLLDKAGVPPGVVNIVFGTGPRVGEALVSHPEVPLISFTGSQPTAERITQLSAPHCKKLSLELGGKNPAIIFEDANLDECIPATVRSSFANQGEICLCTSRIFVQKSIYSEFLKRFVEATRKWKVGIPSDPLVSIGALISKAHLEKVRSYVKRALAEGAQIWCGEGVDKLSLPARNQAGYFMLPTVITDIKDESCCMTEEIFGPVTCVVPFDSEEEVIERANNVKYGLAATVWSSNVGRVHRVAKKLQSGLVWTNCWLIRELNLPFGGMKSSGIGREGAKDSYDFFTEIKTITVKH

SEQ ID NO: 37050 - protein, 433 aa, Homo sapiens
MAGTNALLMLENFIDGKFLPCSSYIDSYDPSTGEVYCRVPNSGKDEIEAAVKAAREAFPSWSSRSPQERSRVLNQVADLLEQSLEEFAQAESKDQGKTLALARTMDIPRSVQNFRFFASSSLHHTSECTQMDHLGCMHYTVRAPVGVAGLISPWNLPLYLLTWKIAPAMAAGNTVIAKPSELTSVTAWMLCKLLDKAGVPPGVVNIVFGTGPRVGEALVSHPEVPLISFTGSQPTAERITQLSAPHCKKLSLELGGKNPAIIFEDANLDECIPATVRSSFANQVRSYVKRALAEGAQIWCGEGVDKLSLPARNQAGYFMLPTVITDIKDESCCMTEEIFGPVTCVVPFDSEEEVIERANNVKYGLAATVWSSNVGRVHRVAKKLQSGLVWTNCWLIRELNLPFGGMKSSGIGREGAKDSYDFFTEIKTITVKH

SEQ ID NO: 37051 - protein, 518 aa, Homo sapiens
MFLRAGLAALSPLLRSLRPSPVAAMSTGTFVVSQPLNYRGGARVEPADASGTEKAFEPATGRVIATFTCSGEKEVNLAVQNAKAAFKIWSQKSGMERCRILLEAARIIREREDEIATMECINNGKSIFEARLDIDISWQCLEYYAGLAASMAGEHIQLPGGSFGYTRREPLGVCVGIGAWNYPFQIASWKSAPALACGNAMVFKPSPFTPVSALLLAEIYSEAGVPPGLFNVVQGGAATGQFLCQHPDVAKVSFTGSVPTGMKIMEMSAKGIKPVTLELGGKSPLIIFSDCDMNNAVKGALMANFLTQGQVCCNGTRVFVQKEILDKFTEEVVKQTQRIKIGDPLLEDTRMGPLINRPHLERVLGFVKVAKEQGAKVLCGGDIYVPEDPKLKDGYYMRPCVLTNCRDDMTCVKEEIFGPVMSILSFDTEAEVLERANDTTFGLAAGVFTRDIQRAHRVVAELQAGTCFINNYNVSPVELPFGGYKKSGFGRENGRVTIEYYSQLKTVCVEMGDVESAF

SEQ ID NO: 37052 - protein, 424 aa, Homo sapiens
MERCRILLEAARIIREREDEIATMECINNGKSIFEARLDIDISWQCLEYYAGLAASMAGEHIQLPGGSFGYTRREPLGVCVGIGAWNYPFQIASWKSAPALACGNAMVFKPSPFTPVSALLLAEIYSEAGVPPGLFNVVQGGAATGQFLCQHPDVAKVSFTGSVPTGMKIMEMSAKGIKPVTLELGGKSPLIIFSDCDMNNAVKGALMANFLTQGQVCCNGTRVFVQKEILDKFTEEVVKQTQRIKIGDPLLEDTRMGPLINRPHLERVLGFVKVAKEQGAKVLCGGDIYVPEDPKLKDGYYMRPCVLTNCRDDMTCVKEEIFGPVMSILSFDTEAEVLERANDTTFGLAAGVFTRDIQRAHRVVAELQAGTCFINNYNVSPVELPFGGYKKSGFGRENGRVTIEYYSQLKTVCVEMGDVESAF

SEQ ID NO: 37053 - protein, 1338 aa, Homo sapiens
MDRASELLFYVNGRKVIEKNVDPETMLLPYLRKKLRLTGTKYGCGGGGCGACTVMISRYNPITKRIRHHPANACLIPICSLYGAAVTTVEGIGSTHTRIHPVQERIAKCHGTQCGFCTPGMVMSIYTLLRNHPEPTLDQLTDALGGNLCRCTGYRPIIDACKTFCKTSGCCQSKENGVCCLDQGINGLPEFEEGSKTSPKLFAEEEFLPLDPTQELIFPPELMIMAEKQSQRTRVFGSERMMWFSPVTLKELLEFKFKYPQAPVIMGNTSVGPEVKFKGVFHPVIISPDRIEELSVVNHAYNGLTLGAGLSLAQVKDILADVVQKLPEEKTQMYHALLKHLGTLAGSQIRNMASLGGHIISRHPDSDLNPILAVGNCTLNLLSKEGKRQIPLNEQFLSKCPNADLKPQEILVSVNIPYSRKWEFVSAFRQAQRQENALAIVNSGMRVFFGEGDGIIRELCISYGGVGPATICAKNSCQKLIGRHWNEQMLDIACRLILNEVSLLGSAPGGKVEFKRTLIISFLFKFYLEVSQILKKMDPVHYPSLADKYESALEDLHSKHHCSTLKYQNIGPKQHPEDPIGHPIMHLSGVKHATGEAIYCDDMPLVDQELFLTFVTSSRAHAKIVSIDLSEALSMPGVVDIMTAEHLSDVNSFCFFTEAEKFLATDKVFCVGQLVCAVLADSEVQAKRAAKRVKIVYQDLEPLILTIEESIQHNSSFKPERKLEYGNVDEAFKVVDQILEGEIHMGGQEHFYMETQSMLVVPKGEDQEMDVYVSTQFPKYIQDIVASTLKLPANKVMCHVRRVGGAFGGKVLKTGIIAAVTAFAANKHGRAVRCVLERGEDMLITGGRHPYLGKYKAGFMNDGRILALDMEHYSNAGASLDESLFVIEMGLLKMDNAYKFPNLRCRGWACRTNLPSNTAFRGFGFPQAALITESCITEVAAKCGLSPEKVRIINMYKEIDQTPYKQEINAKNLIQCWRECMAMSSYSLRKVAVEKFNAENYWKKKGLAMVPLKFPVGLGSRAAGQAAALVHIYLDGSVLVTHGGIEMGQGVHTKMIQVVSRELRMPMSNVHLRGTSTETVPNANISGGSVVADLNGLAVKDACQTLLKRLEPIISKNPKGTWKDWAQTAFDESINLSAVGYFRGYESDMNWEKGEGQPFEYFVYGAACSEVEIDCLTGDHKNIRTDIVMDVGCSINPAIDIGQIEGAFIQGMGLYTIEELNYSPQGILHTRGPDQYKIPAICDMPTELHIALLPPSQNSNTLYSSKGLGESGVFLGCSVFFAIHDAVSAARQERGLHGPLTLNSPLTPEKIRMACEDKFTKMIPRDEPGSYVPWNVPI

SEQ ID NO: 37054 - protein, 151 aa, Homo sapiens
MLLPYLRKKLRLTGTKYGCGGGGCGACTVMISRYNPITKRIRHHPANACLIPICSLYGAAVTTVEGIGSTHTRIHPVQERIAKCHGTQCGFCTPGMVMSIYTLLRNHPEPTLDQLTDALGGNLCRCTGYRPIIDACKTFCKTSGCCQSKEN

SEQ ID NO: 37055 - protein, 285 aa, Homo sapiens
MDLSAASHRIPLSDGNSIPIIGLGTYSEPKSTPKGACATSVKVAIDTGYRHIDGAYIYQNEHEVGEAIREKIAEGKVRREDIFYCGKLWATNHVPEMVRPTLERTLRVLQLDYVDLYIIEVPMAFKPGDEIYPRDENGKWLYHKSNLCATWEVECHPYFTQPKLLKFCQQHDIVITAYSPLGTSRNPIWVNVSSPPLLKDALLNSLGKRYNKTAAQIVLRFNIQRGVVVIPKSFNLERIKENFQIFDFSLTEEEMKDIEALNKNVRFVELLMWRDHPEYPFHDEY

SEQ ID NO: 37056 - protein, 290 aa, Homo sapiens
MDLSAASHRIPLSDGNSIPIIGLGTYSEPKSTPKGACATSVKVAIDTGYRHIDGAYIYQNEHEVGEAIREKIAEGKVRREDIFYCGKLWATNHVPEMVRPTLERTLRVLQLDYVDLYIIEVPMAFKPGDEIYPRDENGKWLYHKSNLCATWEAMEACKDAGLVKSLGVSNFNRRQLELILNKPGLKHKPVSNQVECHPYFTQPKLLKFCQQHDIVITAYSPLGTSRNPIWVNVSSPPLLKDALLNSLGKRYNKTAAQIVLRFNIQRGVVVIPKSFNLERIKENFQVARSS

SEQ ID NO: 37057 - protein, 325 aa, Homo sapiens
MAASCVLLHTGQKMPLIGLGTWKSEPGQVKAAVKYALSVGYRHIDCAAIYGNEPEIGEALKEDVGPGKAVPREELFVTSKLWNTKHHPEDVEPALRKTLADLQLEYLDLYLMHWPYAFERGDNPFPKNADGTICYDSTHYKETWKALEALVAKGLVQALGLSNFNSRQIDDILSVASVRPAVLQVECHPYLAQNELIAHCQARGLEVTAYSPLGSSDRAWRDPDEPVLLEEPVVLALAEKYGRSPAQILLRWQVQRKVICIPKSITPSRILQNIKVFDFTFSPEEMKQLNALNKNWRYIVPMLTVDGKRVPRDAGHPLYPFNDPY

SEQ ID NO: 37058 - protein, 325 aa, Homo sapiens; identical to SEQ ID NO: 37057

SEQ ID NO: 37059 - protein, 147 aa, Homo sapiens
MAASCVLLHTGQKMPLIGLGTWKSEPGQVKAAVKYALSVGYRHIDCAAIYGNEPEIGEALKEDVGPGKAVPREELFVTSKLWNTKHHPEDVEPALRKTLADLQLEYLDLYLMHWPYAFERGDNPFPKNADGTICYDSTHYKETWKAL

SEQ ID NO: 37060 - protein, 316 aa, Homo sapiens
MASRLLLNNGAKMPILGLGTWKSPPGQVTEAVKVAIDVGYRHIDCAHVYQNENEVGVAIQEKLREQVVKREELFIVSKLWCTYHEKGLVKGACQKTLSDLKLDYLDLYLIHWPTGFKPGKEFFPLDESGNVVPSDTNILDTWAAMEELVDEGLVKAIGISNFNHLQVEMILNKPGLKYKPAVNQIECHPYLTQEKLIQYCQSKGIVVTAYSPLGSPDRPWAKPEDPSLLEDPRIKAIAAKHNKTTAQVLIRFPMQRNLVVIPKSVTPERIAENFKVFDFELSSQDMTTLLSYNRNWRVCALLSCTSHKDYPFHEEF

SEQ ID NO: 37061 - protein, 205 aa, Homo sapiens
MGVVSLFLCIVEQIFTSSKKIQFRGIFMAKVPKSKALEATKLAIEAGFRHIDSAHLYNNEEQVGLAIRSKIADGSVKREDIFYTSKLWCNSHRPELVRPALERSLKNLQLDYVDLYLIHFPVSVKPGEEVIPKDENGKILFDTVDLCATWEAVEKCKDAGLAKSIGVSNFNRRQLEMILNKPGLKYKPVCNQPRDNSIFSLSPDW

SEQ ID NO: 37062 - protein, 323 aa, Homo sapiens
MDSKYQCVKLNDGHFMPVLGFGTYAPAEVPKSKALEATKLAIEAGFRHIDSAHLYNNEEQVGLAIRSKIADGSVKREDIFYTSKLWCNSHRPELVRPALERSLKNLQLDYVDLYLIHFPVSVKPGEEVIPKDENGKILFDTVDLCATWEAVEKCKDAGLAKSIGVSNFNRRQLEMILNKPGLKYKPVCNQVECHPYFNQRKLLDFCKSKDIVLVAYSALGSHREEPWVDPNSPVLLEDPVLCALAKKHKRTPALIALRYQLQRGVVVLAKSYNEQRIRQNVQVFEFQLTSEEMKAIDGLNRNVRYLTLDIFAGPPNYPFSDEY

SEQ ID NO: 37063 - protein, 323 aa, Homo sapiens; identical to SEQ ID NO: 37062

SEQ ID NO: 37064 - protein, 248 aa, Homo sapiens
  VARIANT 1: note = MOD_RES - Any amino acid
XSKYQCVKLNDGHFMPVLGFGTYAPAEVGLAIRSKIADGSVKREDIFYTSKLWCNSHRPELVRPALERSLKNLQLDYVDLYLIHFPVSVKPGEEVIPKDENGKILFDTVDLCATWEAVEKCKDAGLAKSIGVSNFNRRQLEMILNKPGLKYKPVCNQVECHPYFNQRKLLDFCKSKDIVLVAYSALGSHREEPWVDPNSPVLLEDPVLCALAKKHKRTPALIALRYQLQRGVVVLAKSYNEQRIRQNV

SEQ ID NO: 37065 - protein, 323 aa, Homo sapiens
MDSKYQCVKLNDGHFMPVLGFGTYAPAEVPKSKALEAVKLAIEAGFHHIDSAHVYNNEEQVGLAIRSKIADGSVKREDIFYTSKLWSNSHRPELVRPALERSLKNLQLDYVDLYLIHFPVSVKPGEEVIPKDENGKILFDTVDLCATWEAMEKCKDAGLAKSIGVSNFNHRLLEMILNKPGLKYKPVCNQVECHPYFNQRKLLDFCKSKDIVLVAYSALGSHREEPWVDPNSPVLLEDPVLCALAKKHKRTPALIALRYQLQRGVVVLAKSYNEQRIRQNVQVFEFQLTSEEMKAIDGLNRNVRYLTLDIFAGPPNYPFSDEY

SEQ ID NO: 37066 - protein, 323 aa, Homo sapiens; identical to SEQ ID NO: 37065

SEQ ID NO: 37067 - protein, 297 aa, Homo sapiens
MDSKYQCVKLNDGHFMPVLGFGTYAPAEVPKSKALEAVKLAIEAGFHHIDSAHVYNNEEQVGLAIRSKIADGSVKREDIFYTSKLWSNSHRPELVRPALERSLKNLQLDYVDLYLIHFPVSVKAMEKCKDAGLAKSIGVSNFNHRLLEMILNKPGLKYKPVCNQVECHPYFNQRKLLDFCKSKDIVLVAYSALGSHREEPWVDPNSPVLLEDPVLCALAKKHKRTPALIALRYQLQRGVVVLAKSYNEQRIRQNVQVFEFQLTSEEMKAIDGLNRNVRYLTLDIFAGPPNYPFSDEY

SEQ ID NO: 37068 - protein, 139 aa, Homo sapiens
MDSKYQCVKLNDGHFMPVLGFGTYAPAEVPKSKALEAVKLAIEAGFHHIDSAHVYNNEEQVGLAIRSKIADGSVKREDIFYTSKLWSNSHRPELVRPALERSLKNLQLDYVDLYLIHFPVSVKEDIGILTWKKSPKHNS

SEQ ID NO: 37069 - protein, 323 aa, Homo sapiens
MDSKHQCVKLNDGHFMPVLGFGTYAPPEVPRSKALEVTKLAIEAGFRHIDSAHLYNNEEQVGLAIRSKIADGSVKREDIFYTSKLWSTFHRPELVRPALENSLKKAQLDYVDLYLIHSPMSLKPGEELSPTDENGKVIFDIVDLCTTWEAMEKCKDAGLAKSIGVSNFNRRQLEMILNKPGLKYKPVCNQVECHPYFNRSKLLDFCKSKDIVLVAYSALGSQRDKRWVDPNSPVLLEDPVLCALAKKHKRTPALIALRYQLQRGVVVLAKSYNEQRIRQNVQVFEFQLTAEDMKAIDGLDRNLHYFNSDSFASHPNYPYSDEY

SEQ ID NO: 37070 - protein, 204 aa, Homo sapiens
MSLKPGEELSPTDENGKVIFDIVDLCTTWEAMEKCKDAGLAKSIGVSNFNRRQLEMILNKPGLKYKPVCNQVECHPYFNRSKLLDFCKSKDIVLVAYSALGSQRDKRWVDPNSPVLLEDPVLCALAKKHKRTPALIALRYQLQRGVVVLAKSYNEQRIRQNVQVFEFQLTAEDMKAIDGLDRNLHYFNSDSFASHPNYPYSDEY

SEQ ID NO: 37071 - protein, 323 aa, Homo sapiens
MDPKYQRVELNDGHFMPVLGFGTYAPPEVPRNRAVEVTKLAIEAGFRHIDSAYLYNNEEQVGLAIRSKIADGSVKREDIFYTSKLWCTFFQPQMVQPALESSLKKLQLDYVDLYLLHFPMALKPGETPLPKDENGKVIFDTVDLSATWEVMEKCKDAGLAKSIGVSNFNCRQLEMILNKPGLKYKPVCNQVECHPYLNQSKLLDFCKSKDIVLVAHSALGTQRHKLWVDPNSPVLLEDPVLCALAKKHKQTPALIALRYQLQRGVVVLAKSYNEQRIRENIQVFEFQLTSEDMKVLDGLNRNYRYVVMDFLMDHPDYPFSDEY

SEQ ID NO: 37072 - protein, 323 aa, Homo sapiens; identical to SEQ ID NO: 37071

SEQ ID NO: 37073 - protein, 126 aa, Homo sapiens
MDPKYQRVELNDGHFMPVLGFGTYAPPEVPRNRAVEVTKLAIEAGFRHIDSAYLYNNEEQVGLAIRSKIADGSVKREDIFYTSKLWCTFFQPQMVQPALESSLKKLQLDYVDLYLLHFPMALKSTT

SEQ ID NO: 37074 - protein, 326 aa, Homo sapiens
MDLSAASHRIPLSDGNSIPIIGLGTYSEPKSTPKGACATSVKVAIDTGYRHIDGAYIYQNEHEVGEAIREKIAEGKVRREDIFYCGKLWATNHVPEMVRPTLERTLRVLQLDYVDLYIIEVPMAFKPGDEIYPRDENGKWLYHKSNLCATWEAMEACKDAGLVKSLGVSNFNRRQLELILNKPGLKHKPVSNQVECHPYFTQPKLLKFCQQHDIVITAYSPLGTSRNPIWVNVSSPPLLKDALLNSLGKRYNKTAAQIVLRFNIQRGVVVIPKSFNLERIKENFQIFDFSLTEEEMKDIEALNKNVRFVELLMWRDHPEYPFHDEY

SEQ ID NO: 37075 - protein, 146 aa, Homo sapiens
MAFKPGDEIYPRDENGKWLYHKSNLCATWEAMEACKDAGLVKSLGVSNFNRRQLELILNKPGLKHKPVSNQVECHPYFTQPKLLKFCQQHDIVITAYSPLGTSRNPIWRQLHKLALLDLPILRVTLHSVHTLHSEKLVTGDLQCPG

SEQ ID NO: 37076 - protein, 223 aa, Homo sapiens
MAHRFPALTQEQKKDSQGKLFRNILKEKGIVVGIKLDQGGAPLAGTNKETTIQGLDGLSERCAQYKKDGVDFGKWRAVLRIADQCPSSLAIQENANALARYASICQQNGLVPIVEPEVIPDGDHDLEHCQYVTEKVLAAVYKALNDHHVYLEGTLLKPNMVTAGHACTKKYTPEQVAMATVTALHRTVPAAVPGICFLSGGMSEEDATLNLNAIPTRVQCPPA

SEQ ID NO: 37077 - protein, 364 aa, Homo sapiens
MAHRFPALTQEQKKELSEIAQSIVANGKGILAADESVGTMGNRLQRIKVENTEENRRQFREILFSVDSSINQSIGGVILFHETLYQKDSQGKLFRNILKEKGIVVGIKLDQGGAPLAGTNKETTIQGLDGLSERCAQYKKDGVDFGKWRAVLRIADQCPSSLAIQENANALARYASICQQNGLVPIVEPEVIPDGDHDLEHCQYVTEKVLAAVYKALNDHHVYLEGTLLKPNMVTAGHACTKKYTPEQVAMATVTALHRTVPAAVPGICFLSGGMSEEDATLNLNAINLCPLPKPWKLSFSYGRALQASALAAWGGKAANKEATQEAFMKRAMANCQAAKGQYVHTGSSGAASTQSLFTACYTY

SEQ ID NO: 37078 - protein, 316 aa, Homo sapiens
MAHRFPALTQEQKKELSEIAQSIVANGKGILAADESVGTMGNRLQRIKVENTEENRRQFREILFSVDSSINQSIGGVILFHETLYQKDSQGKLFRNILKEKGIVVGIKLDQGGAPLAGTNKETTIQGLDGLSERCAQYKKDGVDFGKWRAVLRIADQCPSSLAIQENANALARYASICQQNGLVPIVEPEVIPDGDHDLEHCQYVTEKVLAAVYKALNDHHVYLEGTLLKPNMVTAGHACTKKYTPEQVAMATVTALHRTVPAAVPGICFLSGGMSEEDATLNLNAINLCPLPKPWKLSFSGVARLQTRRQPRRLL

SEQ ID NO: 37079 - protein, 364 aa, Homo sapiens
MPHSYPALSAEQKKELSDIALRIVAPGKGILAADESVGSMAKRLSQIGVENTEENRRLYRQVLFSADDRVKKCIGGVIFFHETLYQKDDNGVPFVRTIQDKGIVVGIKVDKGVVPLAGTDGETTTQGLDGLSERCAQYKKDGADFAKWRCVLKISERTPSALAILENANVLARYASICQQNGIVPIVEPEILPDGDHDLKRCQYVTEKVLAAVYKALSDHHVYLEGTLLKPNMVTPGHACPIKYTPEEIAMATVTALRRTVPPAVPGVTFLSGGQSEEEASFNLNAINRCPLPRPWALTFSYGRALQASALNAWRGQRDNAGAATEEFIKRAEVNGLAAQGKYEGSGEDGGAAAQSLYIANHAY

SEQ ID NO: 37080 - protein, 364 aa, Homo sapiens; identical to SEQ ID NO: 37079

SEQ ID NO: 37081 - protein, 149 aa, Homo sapiens
MPHSYPALSAEQKKELSDIALRIVAPGKGILAADESVGSMAKRLSQIGVENTEENRRLYRQVLFSADDRVKKCIGGVIFFHETLYQKDDNGVPFVRTIQDKGIVVGIKVDKGVVPLAGTDGETTTQGLDGLSERCAQYKKDGADFAKWR

SEQ ID NO: 37082 - protein, 264 aa, Homo sapiens
MPSIFAYQSSEVDWCESNFQYSELVAEFYNTFSNIPFFIFGPLMMLLMHPYAQKRSRYIYVVWVLFMIIGLFSMYFHMTLSFLGQLLDEIAILWLLGSGYSIWMPRCYFPSFLGGNRSQFIRLVFITTVVSTLLSFLRPTVNAYALNSIALHILYIVCQEYRKTSNKELRHLIEVSVVLWAVALTSWISDRLLCSFWQRIHFFYLHSIWHVLISITFPYGMVTMALVDANYEMPGETLKVRYWPRDSWPVGLPYVEIRGDDKDC

SEQ ID NO: 37083 - protein, 275 aa, Homo sapiens [sequence omitted]

SEQ ID NO: 37084 - protein, 140 aa, Homo sapiens
MCLFRQYATCFNSGIYLIWTLLVVVGIGSVYFHATLSFLGQMLDELAVLWVLMCALAMWFPRRYLPKIFRNDRGRFKVVVSVLSAVTTCLAFVKPAINNISLMTLGVPCTALLIAELKRHERNQRRRHRKGGQQGGGDKV

SEQ ID NO: 37085 - protein, 528 aa, Homo sapiens
MQGPWVLLLLGLRLQLSLGVIPAEEENPAFWNRQAAEALDAAKKLQPIQKVAKNLILFLGDGLGVPTVTATRILKGQKNGKLGPETPLAMDRFPYLALSKTYNVDRQVPDSAATATAYLCGVKANFQTIGLSAAARFNQCNTTRGNEVISVMNRAKQAGKSVGVVTTTRVQHASPAGTYAHTVNRNWYSDADMPASARQEGCQDIATQLISNMDIDVILGGGRKYMFPMGTPDPEYPADASQNGIRLDGKNLVQEWLAKHQGAWYVWNRTELMQASLDQSVTHLMGLFEPGDTKYEIHRDPTLDPSLMEMTEAALRLLSRNPRGFYLFVEGGRIDHGHHEGVAYQALTEAVMFDDAIERAGQLTSEEDTLTLVTADHSHVFSFGGYTLRGSSIFGLAPSKAQDSKAYTSILYGNGPGYVFNSGVRPDVNESESGSPDYQQQAAVPLSSETHGGEDVAVFARGPQAHLVHGVQEQSFVAHVMAFAACLEPYTACDLAPPACTTDAAHPVAASLPLLAGTLLLLGASAAP

SEQ ID NO: 37086 - protein, 170 aa, Homo sapiens [sequence omitted]

SEQ ID NO: 37087 - protein, 170 aa, Homo sapiens [sequence omitted]

SEQ ID NO: 37088 - protein, 524 aa, Homo sapiens
MISPFLVLAIGTCLTNSLVPEKEKDPKYWRDQAQETLKYALELQKLNTNVAKNVIMFLGDGMGVSTVTAARILKGQLHHNPGEETRLEMDKFPFVALSKTYNTNAQVPDSAGTATAYLCGVKANEGTVGVSAATERSRCNTTQGNEVTSILRWAKDAGKSVGIVTTTRVNHATPSAAYAHSADRDWYSDNEMPPEALSQGCKDIAYQLMHNIRDIDVIMGGGRKYMYPKNKTDVEYESDEKARGTRLDGLDLVDTWKSFKPRYKHSHFIWNRTELLTLDPHNVDYLLGLFEPGDMQYELNRNNVTDPSLSEMVVVAIQILRKNPKGFFLLVEGGRIDHGHHEGKAKQALHEAVEMDRAIGQAGSLTSSEDTLTVVTADHSHVFTFGGYTPRGNSIFGLAPMLSDTDKKPFTAILYGNGPGYKVVGGERENVSMVDYAHNNYQAQSAVPLRHETHGGEDVAVFSKGPMAHLLHGVHEQNYVPHVMAYAACIGANLGHCAPASSAGSLAAGPLLLALALYPLSVLF

SEQ ID NO: 37089 - protein, 524 aa, Homo sapiens; identical to SEQ ID NO: 37088

SEQ ID NO: 37090 - protein, 524 aa, Homo sapiens; identical to SEQ ID NO: 37088

SEQ ID NO: 37091 - protein, 447 aa, Homo sapiens
MPWSFRSSTPTWLRMSSCSWEMTYNTNAQVPDSAGTATAYLCGVKANEGTVGVSAATERSRCNTTQGNEVTSILRWAKDAGKSVGIVTTTRVNHATPSAAYAHSADRDWYSDNEMPPEALSQGCKDIAYQLMHNIRDIDVIMGGGRKYMYPKNKTDVEYESDEKARGTRLDGLDLVDTWKSFKPRYKHSHFIWNRTELLTLDPHNVDYLLGLFEPGDMQYELNRNNVTDPSLSEMVVVAIQILRKNPKGFFLLVEGGRIDHGHHEGKAKQALHEAVEMDRAIGQAGSLTSSEDTLTVVTADHSHVFTFGGYTPRGNSIFGLAPMLSDTDKKPFTAILYGNGPGYKVVGGERENVSMVDYAHNNYQAQSAVPLRHETHGGEDVAVFSKGPMAHLLHGVHEQNYVPHVMAYAACIGANLGHCAPASSAGSLAAGPLLLALALYPLSVLF

SEQ ID NO: 37092 - protein, 469 aa, Homo sapiens
MFLGDGMGVSTVTAARILKGQLHHNPGEETRLEMDKFPFVALSKTYNTNAQVPDSAGTATAYLCGVKANEGTVGVSAATERSRCNTTQGNEVTSILRWAKDAGKSVGIVTTTRVNHATPSAAYAHSADRDWYSDNEMPPEALSQGCKDIAYQLMHNIRDIDVIMGGGRKYMYPKNKTDVEYESDEKARGTRLDGLDLVDTWKSFKPRYKHSHFIWNRTELLTLDPHNVDYLLGLFEPGDMQYELNRNNVTDPSLSEMVVVAIQILRKNPKGFFLLVEGGRIDHGHHEGKAKQALHEAVEMDRAIGQAGSLTSSEDTLTVVTADHSHVFTFGGYTPRGNSIFGLAPMLSDTDKKPFTAILYGNGPGYKVVGGERENVSMVDYAHNNYQAQSAVPLRHETHGGEDVAVFSKGPMAHLLHGVHEQNYVPHVMAYAACIGANLGHCAPASSAGSLAAGPLLLALALYPLSVLF

SEQ ID NO: 37093 - protein, 535 aa, Homo sapiens
MLGPCMLLLLLLLGLRLQLSLGIIPVEEENPDFWNREAAEALGAAKKLQPAQTAAKNLIIFLGDGMGVSTVTAARILKGQKKDKLGPEIPLAMDRFPYVALSKTYNVDKHVPDSGATATAYLCGVKGNFQTIGLSAAARFNQCNTTRGNEVISVMNRAKKAGKSVGVVTTTRVQHASPAGTYAHTVNRNWYSDADVPASARQEGCQDIATQLISNMDIDVILGGGRKYMFRMGTPDPEYPDDYSQGGTRLDGKNLVQEWLAKRQGARYVWNRTELMQASLDPSVTHLMGLFEPGDMKYEIHRDSTLDPSLMEMTEAALRLLSRNPRGFFLFVEGGRIDHGHHESRAYRALTETIMFDDAIERAGQLTSEEDTLSLVTADHSHVFSFGGYPLRGSSIFGLAPGKARDRKAYTVLLYGNGPGYVLKDGARPDVTESESGSPEYRQQSAVPLDEETHAGEDVAVFARGPQAHLVHGVQEQTFIAHVMAFAACLEPYTACDLAPPAGTTDAAHPGRSVVPALLPLLAGTLLLLETATAP

SEQ ID NO: 37094 - protein, 532 aa, Homo sapiens
MQGPWVLLLLGLRLQLSLGIIPVEEENPDFWNRQAAEALGAAKKLQPAQTAAKNLIIFLGDGMGVSTVTAARILKGQKKDKLGPETFLAMDRFPYVALSKTYSVDKHVPDSGATATAYLCGVKGNFQTIGLSAAARFNQCNTTRGNEVISVMNRAKKAGKSVGVVTTTRVQHASPAGAYAHTVNRNWYSDADVPASARQEGCQDIATQLISNMDIDVILGGGRKYMFPMGTPDPEYPDDYSQGGTRLDGKNLVQEWLAKHQGARYVWNRTELLQASLDPSVTHLMGLFEPGDMKYEIHRDSTLDPSLMEMTEAALLLLSRNPRGFFLFVEGGRIDHGHHESRAYRALTETIMFDDAIERAGQLTSEEDTLSLVTADHSHVFSFGGYPLRGSSIFGLAPGKARDRKAYTVLLYGNGPGYVLKDGARPDVTESESGSPEYRQQSAVPLDGETHAGEDVAVFARGPQAHLVHGVQEQTFIAHVMAFAACLEPYTACDLAPRAGTTDAAHPGPSVVPALLPLLAGTLLLLGTATAP

SEQ ID NO: 37095 - protein, 157 aa, Homo sapiens
MDRFLVKGAQGGLLRKQEEQEPTGEEPAVLGGDKESTRKRPRREAPGNGGHSAGPSWRHIRAEGLDCSYTVLFGKAEADEIFQELEKEVEYFTGIKMAVTTSGSTEMMKENWPLGAPLPLSPSVPAETLSSGIRIPVGKAPPGGWRWSGCRWPTGAY

SEQ ID NO: 37096 - protein, 389 aa, Homo sapiens
MGKMAAAVGSVATLATEPGEDAFRKLFRFYRQSRPGTADLEGVIDFSAAHAARGKGPGAQKVIKSQLNVSSVSEQNAYRAGLQPVSKWQAYGLKGYPGFIFIPNPFLPGYQWHWVKQCLKLYSQKPNVCNLDKHMSKEETQDLWEQSKEFLRYKEATKRRPRSLLEKLRWVTVGYHYNWDSKKYSADHYTPFPSDLGFLSEQVAAACGFEDFRAEAGILNYYRLDSTLGIHVDRSELDHSKPLLSFSFGQSAIFLLGGLQRDEAPTAMFMHSGDIMIMSGFSRLLNHAVPRVLPNPEGEGLPHCLEAPLPAVLPRDSMVEPCSMEDWQVCASYLKTARVNMTVRQVLATDQNFPLEPIEDEKRDISTEGFCHLDDQNSEVKRARINPDS

SEQ ID NO: 37097 - protein, 261 aa, Homo sapiens
MDRFLVKGAQGGLLRKQEEQEPTGEEPAVLGGDKESTRKRPRREAPGNGGHSAGPSWRHIRAEGLDCSYTVLFGKAEADEIFQELEKEVEYFTGALARVQVFGKWHSVPRKQATYGDAGLTYTFSGLTLSPKPWIPVLERIRDHVSGVTGQTFNFVLINRYKDGCDHIGEHRDDERELAPGSPIASVSFGACRDFVFRHKDSRGKSPSRRVAVVRLPLAHGSLLMMNHPTNTHWYHSLPVRKKVLAPRVNLTFRKILLTKK

SEQ ID NO: 37098 - protein, 261 aa, Homo sapiens; identical to SEQ ID NO: 37097

SEQ ID NO: 37099 - protein, 261 aa, Homo sapiens; identical to SEQ ID NO: 37097

SEQ ID NO: 37100 - protein, 150 aa, Homo sapiens
MDRFLVKGAQGGLLRKQEEQEPTGEEPAVLGGDKESTRKRPRREAPGNGGHSAGPSWRHIRAEGLDCSYTVLFGKAEADEIFQELEKEVEYFTGALARVQVFGKWHSVPRKQATYGDAGLTYTFSGLTLSPKPWIPVLERIRDHVSGVTG

SEQ ID NO: 37101 - protein, 121 aa, Homo sapiens
MDRFLVKGAQGGLLRKQEEQEPTGEEPAVLGGDKESTRKRPRREAPGNGGHSAGPSWRHIRAEGLDCSYTVLFGKAEADEIFQELEKEVEYFTGALARVQVFGKWHSVPRKQATYGDAGLT

SEQ ID NO: 37102 - protein, 160 aa, Homo sapiens
MDRFLVKGAQGGLLRKQEEQEPTGEEPAVLGGDKESTRKRPRREAPGNGGHSAGPSWRHIRAEGLDCSYTVLFGKAEADEIFQELEKEVEYFTGALARVQVFGKWHSVPRKQATYGDAGLTYTFSGLTLSPKPWIPVLERIRDHVSGVTGQTFNFVLINR

SEQ ID NO: 37103 - protein, 286 aa, Homo sapiens
MEEKRRRARVQGAWAAPVKSQAIAQPATTAKSHLHQKPGQTWKNKEHHLSDREFVFKEPQQVVRRAPEPRVIDREGVYEISLSPTGVSRVCLYPGFVDVKEADWILEQLCQDVPWKQRTGIREDITYQQPRLTAWYGELPYTYSRITMEPNPHWHPVLRTLKNRIEENTGHTFNSLLCNLYRNEKDSVDWHSDDEPSLGRCPIIASLSFGATRTFEMRKKPPPEENGDYTYVERVKIPLDHGTLLIMEGATQADWQHRVPKEYHSREPRVNLTFRTVYPDPRGAPW

SEQ ID NO: 37104 - protein, 170 aa, Homo sapiens
MEEKRRRARVQGAWAAPVKSQAIAQPATTAKSHLHQKPGQTWKNKEHHLSDREFVFKEPQQVVRRAPEPRVIEEGVYEISLSPTGVSRVCLYPGFVDVKEADWILEQLCQDVPWKQRTGIREDSILQLTFKKSAPVSGTATAPQSCWYERPSPPHIPGPAILTRTRLWAP

SEQ ID NO: 37105 - protein, 60 aa, Homo sapiens
MEEKRRRARVQGAWAAPVKSQAIAQPATTAKSHLHQKPGQTWKNKEHHLSDREFVFKEPQ

SEQ ID NO: 37106 - protein, 302 aa, Homo sapiens
MAAAAAETPEVLRECGCKGIRTCLICERQRGSDPPWELPPAKTYRFIYCSDTGWAVGTEESDFEGWAFPFPGVMLIEDFVTREEEAELVRLMDRDPWKLSQSGRRKQDYGPKVNFRKQKLKTEGFCGLPSFSREVVRRMGLYPGLEGFRPVEQCNLDYCPERGSAIDPHLDDAWLWGERLVSLNLLSPTVLSMCREAPGSLLLCSAPSAAPEALVDSVIAPSRSVLCQEVEVAIPLPARSLLVLTGAARHQWKHAIHRRHIEARRVCVTFRELSAEFGPGGRQQELGQELLRIALSFQGRPV

SEQ ID NO: 37107 - protein, 458 aa, Homo sapiens
MAAASGYTDLREKLKSMTSRDNYKAGSREAAAAAAAAVAAAAAAAAAAEPYPVSGAKRKYQEDSDPERSDYEEQQLQKEEEARKVKSGIRQMRLFSQDECAKIEARIDEVVSRAEKGLYNEHTVDRAPLRNKYFFGEGYTYGAQLQKRGPGQERLYPPGDVDEIPEWVHQLVIQKLVEHRVIPEGFVNSAVINDYQPGGCIVSHVDPIHIFERPIVSVSFFSDSALCFGCKFQFKPIRVSEPVLSLPVRRGSVTVLSGYAADEITHCIRPQDIKERRAVIILRKTRLDAPRLETKSLSSSVLPPSYASDRLSGNNRDPALKPKRSHRKADPDAAHRPRILEMDKEENRRSVLLPTHRRRGSFSSENYWRKSYESSEDCSEAAGSPGNSGSSLRSCPSFCFEGFVFVHWGVFVFCFLFFLILYIFPWFCCLLGLKNRIGQDLGSHILGIPPGWKGCWHQ

SEQ ID NO: 37108 - protein, 394 aa, Homo sapiens
MAAASGYTDLREKLKSMTSRDNYKAGSREAAAAAAAAVAAAAAAAAAAEPYPVSGAKRKYQEDSDPERSDYEEQQLQKEEEARKVKSGIRQMRLFSQDECAKIEARIDEVVSRAEKGLYNEHTVDRAPLRNKYFFGEGYTYGAQLQKRGPGQERLYPPGDVDEIPEWVHQLVIQKLVEHRVIPEGFVNSAVINDYQPGGCIVSHVDPIHIFERPIVSVSFFSDSALCFGCKFQFKPIRVSEPVLSLPVRRGSVTVLSGYAADEITHCIRPQDIKERRAVIILRKTRLDAPRLETKSLSSSVLPPSYASDRLSGNNRDPALKPKRSHRKADPDAAHRPRILEMDKEENRRSVLLPTHRRRGSFSSENYWRKSYESSEDCSEAAGSPARKVKMRRH

SEQ ID NO: 37109 - protein, 383 aa, Homo sapiens
MRRCRRPCPAGRGEGGGGRSPAAAAAVAAAAAAAAAAEPYPVSGAKRKYQEDSDPERSDYEEQQLQKEEEARKVKSGIRQMRLFSQDECAKIEARIDEVVSRAEKGLYNEHTVDRAPLRNKYFFGEGYTYGAQLQKRGPGQERLYPPGDVDEIPEWVHQLVIQKLVEHRVIPEGFVNSAVINDYQPGGCIVSHVDPIHIFERPIVSVSFFSDSALCFGCKFQFKPIRVSEPVLSLPVRRGSVTVLSGYAADEITHCIRPQDIKERRAVIILRKTRLDAPRLETKSLSSSVLPPSYASDRLSGNNRDPALKPKRSHRKADPDAAHRPRILEMDKEENRRSVLLPTHRRRGSFSSENYWRKSYESSEDCSEAAGSPARKVKMRRH

SEQ ID NO: 37110 - protein, 238 aa, Homo sapiens
MEEQDARVPALEPFRVEQAPPVIYYVPDFISKEEEEYLLRQVFNAPKPKWTQLSGRKLQNWGGLPHPRGMVPERLPPWLQRYVDKVSNLSLFGGLPANHVLVNQYLPGEGIMPHEDGPLYYPTVSTISLGSHTVLDFYEPRRPEDDDPTEQPRPPPRPTTSLLLEPRSLLVLRGPAYTRLLHGIAAARVDALDAASSPPNAAACPSARPGACLVRGTRVSLTIRRVPRVLRAGLLLGK

SEQ ID NO: 37111 - protein, 266 aa, Homo sapiens
MAGRGMGMLNLEIGGDAGGRIGCKELVLMEEQDARVPALEPFRVEQAPPVIYYVPDFISKEEEEYLLRQVFNAPKPKWTQLSGRKLQNWGGLPHPRGMVPERLPPWLQRYVDKVSNLSLFGGLPANHVLVNQYLPGEGIMPHEDGPLYYPTVSTISLGSHTVLDFYEPRRPEDDDPTEQPRPPPRPTTSLLLEPRSLLVLRGPAYTRLLHGIAAARVDALDAASSPPNAAACPSARPGACLVRGTRVSLTIRRVPRVLRAGLLLGK

SEQ ID NO: 37112 - protein, 238 aa, Homo sapiens; identical to SEQ ID NO: 37110

SEQ ID NO: 37113 - protein, 221 aa, Homo sapiens
MAGTGLLALRTLPGPSWVRGSGPSVLSRLQDAAVVRPGFLSTAEEETLSRELEPELRRRRYEYDHWDAAIHGFRETEKSRWSEASRAILQRVQAAAFGPGQTLLSSVHVLDLEARGYIKPHVDSIKFCGATIAGLSLLSPSVMRLVHTQEPGEWLELLLEPGSLYILRGSARYDFSHEILRDEESFFGERRIPRGRRISVICRSLPEGMGPGESGQPPPAC

SEQ ID NO: 37114 - protein, 664 aa, Homo sapiens
MDSNHQSNYKLSKTEKKFLRKQIKAKHTLLRHEGIETVSYATQSLVVANGGLGNGVSRNQLLPVLEKCGLVDALLMPPNKPYSFARYRTTEESKRAYVTLNGKEVVDDLGQKITLYLNFVEKVQWKELRPQALPPGLMVVEEIISSEEEKMLLESVDWTEDTDNQNSQKSLKHRRVKHFGYEFHYENNNVDKDKPLSGGLPDICESFLEKWLRKGYIKHKPDQMTINQYEPGQGIPAHIDTHSAFEDEIVSLSLGSEIVMDFKHPDGIAVPVMLPRRSLLVMTGESRYLWTHGITCRKFDTVQASESLKSGIITSDVGDLTLSKRGLRTSFTFRKVRQTPCNCSYPLVCDSQRKETPPSFPESDKEASRLEQEYVHQVYEEIAGHFSSTRHTPWPHIVEFLKALPSGSIVADIGCGNGKYLGINKELYMIGCDRSQNLVDICRERQFQAFVCDALAVPVRSGSCDACISIAVIHHFATAERRVAALQEIVRLLRPGGKALIYVWAMEQEYNKQKSKYLRGNRNSQGKKEEMNSDTSVQRSLVEQMRDMGSRDSASSVPRINDSQEGGCNSRQVSNSKLPVHVNRTSFYSQDVLVPWHLKGNPDKGKPVEPFGPIGSQDPSPVFHRYYHVFREGELEGACRTVSDVRILQSYYDQGNWCVILQKA

SEQ ID NO: 37115 - protein, 667 aa, Homo sapiens
MFAMDSNHQSNYKLSKTEKKFLRKQIKAKHTLLRHEGIETVSYATQSLVVANGGLGNGVSRNQLLPVLEKCGLVDALLMPPNKPYSFARYRTTEESKRAYVTLNGKEVVDDLGQKITLYLNFVEKVQWKELRPQALPPGLMVVEEIISSEEEKMLLESVDWTEDTDNQNSQKSLKHRRVKHFGYEFHYENNNVDKDKPLSGGLPDICESFLEKWLRKGYIKHKPDQMTINQYEPGQGIPAHIDTHSAFEDEIVSLSLGSEIVMDFKHPDGIAVPVMLPRRSLLVMTGESRYLWTHGITCRKFDTVQASESLKSGIITSDVGDLTLSKRGLRTSFTFRKVRQTPCNCSYPLVCDSQRKETPPSFPESDKEASRLEQEYVHQVYEEIAGHFSSTRHTPWPHIVEFLKALPSGSIVADIGCGNGKYLGINKELYMIGCDRSQNLVDICRERQFQAFVCDALAVPVRSGSCDACISIAVIHHFATAERRVAALQEIVRLLRPGGKALIYVWAMEQEYNKQKSKYLRGNRNSQGKKEEMNSDTSVQRSLVEQMRDMGSRDSASSVPRINDSQEGGCNSRQVSNSKLPVHVNRTSFYSQDVLVPWHLKGNPDKGKPVEPFGPIGSQDPSPVFHRYYHVFREGELEGACRTVSDVRILQSYYDQGNWCVILQKA

SEQ ID NO: 37116 - protein, 664 aa, Homo sapiens; identical to SEQ ID NO: 37114

SEQ ID NO: 37117 - protein, 224 aa, Homo sapiens
MDSNHQSNYKLSKTEKKFLRKQIKAKHTLLRHEGIETVSYATQSLVVANGGLGNGVSRNQLLPVLEKCGLVDALLMPPNKPYSFARYRTTEESKRAYVTLNGKEVVDDLGQKITLYLNFVEKVQWKELRPQALPPGLMVVEEIISSEEEKMLLESVDWTEDTDNQNSQKSLKHRRVKHFGYEFHYENNNVDKDKPLSGGLPDICESFLEKWLRKAEKNLEVGIH

SEQ ID NO: 37118 - protein, 445 aa, Homo sapiens
MKNPEAQQDVSVSQGFRMLFYTMKPSETSFQTLEEVPDYVKKATPFFISLMLLELVVSWILKGKPPGRLDDALTSISAGVLSRLPSLFFRSIELTSYIYIWENYRLFNLPWDSPWTWYSAFLGVDFGYYWFHRMAHEVNIMWAGHQTHHSSEDYNLSTALRQSVLQIYTSWIFYSPLALFIPPSVYAVHLQFNLLYQFWIHTEVINNLGPLELILNTPSHHRVHHGRNRYCIDKNYAGVLIIWDKIFGTFEAENEKVVYGLTHPINTFEPIKVQFHHLFSIWTTFWATPGFFNKFSVIFKGPGWGPGKPRLGLSEEIPEVTGKEVPFSSSSSQLLKIYTVVQFALMLAFYEETFADTAALSQVTLLLRVCFIILTLTSIGFLLDQRPKAAIMETLRCLMFLMLYRFGHLKPLVPSLSSAFEIVFSICIAFWGVRSMKQLTSHPWK

SEQ ID NO: 37119 - protein, 658 aa, Homo sapiens
MAEAAAAAGGTGLGAGASYGSAADRDRDPDPDRAGRRLRVLSGHLLGRPREALSTNECKARRAASAATAAPTATPAAQESGTIPKKRQEVMKWNGWGYNDSKFIFNKKGQIELTGKRYPLSGMGLPTFKEWIQNTLGVNVEHKTTSKASLNPSDTPPSVVNEDFLHDLKETNISYSQEADDRVFRAHGHCLHEIFLLREGMFERIPDIVLWPTCHDDVVKIVNLACKYNLCIIPIGGGTSVSYGLMCPADETRTIISLDTSQMNRILWVDENNLTAHVEAGITGQELERQLKESGYCTGHEPDSLEFSTVGGWVSTRASGMKKNIYGNIEDLVVHIKMVTPRGIIEKSCQGPRMSTGPDIHHFIMGSEGTLGVITEATIKIRPVPEYQKYGSVAFPNFEQGVACLREIAKQRCAPASIRLMDNKQFQFGHALKPQVSSIFTSFLDGLKKFYITKFKGFDPNQLSVATLLFEGDREKVLQHEKQVYDIAAKFGGLAAGEDNGQRGYLLTYVIAYIRDLALEYYVLGESFETSAPWDRVVDLCRNVKERITRECKEKGVQFAPFSTCRVTQTYDAGACIYFYFAFNYRGISDPLTVFEQTEAAAREEILANGGSLSHHHGVGKLRKQWLKESISDVGFGMLKSVKEYVDPNNIFGNRNLL

SEQ ID NO: 37120 - protein, 321 aa, Homo sapiens
MDPKYPWSKCGHKTTSKASLNPSDTPPSVVNEDFLHDLKETNISYSQEADDRVFRAHGHCLHEIFLLREGMFERIPDIVLWPTCHDDVVKIVNLACKYNLCIIPIGGGTSVSYGLMCPADETRTIISLDTSQMNRILWVDENNLTAHVEAGITGQELERQLKESGYCTGHEPDSLEFSTVGGWVSTRASGMKKNIYGNIEDLVVHIKMVTPRGIIEKSCQGPRMSTGPDIHHFIMGSEGTLGVITEATIKIRPVPEYQKYGSVAFPNFEQGVACLREIAKQRCAPASIRLMDNKQFQFGHALKPQVSSIFTSFLDGLKKFY

SEQ ID NO: 37121 - protein, 391 aa, Homo sapiens
MDMASESVGGKILFATDDFFAPAENLIKSDSPCFKEHEYTEFGKWMDGWETRRKRIPGHDWCVLRLGIQGVIRGFDVDVSYFTGDYAPRVSIQAANLEEDKLPEIPERGTRTGAAATPEEFEAIAELKSDDWSYLVPMTELKPGNPASGHNYFLVNSQQRWTHIRLNIFPDGGIARLRVFGTGQKDWTATDPKEPADLVAIAFGGVCVGFSNAKFGHPNNIIGVGGAKSMADGWETARRLDRPPILENDENGILLVPGCEWAVFRLAHPGVITRIEIDTKYFEGNAPDSCKVDGCILTTQEEEAVIRQKWILPAHKWKPLLPVTKLSPNQSHLFDSLTLELQDVITHARLTIVPDGGVSRLRLRGFPSSICLLRPREKPMLKFSVSFKANP

SEQ ID NO: 37122 - protein, 161 aa, Homo sapiens
GRKASEKTGGREGEPADRGLQLGGKAFGLLKAQQEERLDEINKQFLDDPKYSSDEDLPSKLEGFKEKYMEFDLNGNGDIDIMSLKRMLEKLGVPKTHLELKKLIGEVSSGSGETFSYPDFLRMMLGKRSAILKMILMYEEKAREKEKPTGPPAKKAISELP

SEQ ID NO: 37123 - protein, 93 aa, Homo sapiens
MEFDLNGNGDIDIMSLKRMLEKLGVPKTHLELKKLIGEVSSGSGETFSYPDFLRMMLGKRSAILKMILMYEEKAREKEKPTGPPAKKAISELP

SEQ ID NO: 37124 - protein, 147 aa, Homo sapiens
MSQTRDLQGGKAFGLLKAQQEERLDEINKQFLDDPKYSSDEDLPSKLEGFKEKYMEFDLNGNGDIDIMSLKRMLEKLGVPKTHLELKKLIGEVSSGSGETFSYPDFLRMMLGKRSAILKMILMYEEKAREKEKPTGPPAKKAISELP

SEQ ID NO: 37125 - protein, 93 aa, Homo sapiens; identical to SEQ ID NO: 37123

SEQ ID NO: 37126 - protein, 147 aa, Homo sapiens; identical to SEQ ID NO: 37124

SEQ ID NO: 37127 - protein, 161 aa, Homo sapiens; identical to SEQ ID NO: 37122

SEQ ID NO: 37128 - protein, 147 aa, Homo sapiens; identical to SEQ ID NO: 37124

SEQ ID NO: 37129 - protein, 147 aa, Homo sapiens; identical to SEQ ID NO: 37124

SEQ ID NO: 37130 - protein, 93 aa, Homo sapiens; identical to SEQ ID NO: 37123

SEQ ID NO: 37131 - protein, 93 aa, Homo sapiens; identical to SEQ ID NO: 37123

SEQ ID NO: 37132 - protein, 161 aa, Homo sapiens; identical to SEQ ID NO: 37122

SEQ ID NO: 37133 - protein, 93 aa, Homo sapiens; identical to SEQ ID NO: 37123

SEQ ID NO: 37134 - protein, 93 aa, Homo sapiens; identical to SEQ ID NO: 37123

SEQ ID NO: 37135 - protein, 147 aa, Homo sapiens; identical to SEQ ID NO: 37124

SEQ ID NO: 37136 - protein, 161 aa, Homo sapiens; identical to SEQ ID NO: 37122

SEQ ID NO: 37137 - protein, 147 aa, Homo sapiens; identical to SEQ ID NO: 37124

SEQ ID NO: 37138 - protein, 161 aa, Homo sapiens; identical to SEQ ID NO: 37122

SEQ ID NO: 37139 - protein, 161 aa, Homo sapiens; identical to SEQ ID NO: 37122

SEQ ID NO: 37140 - protein, 93 aa, Homo sapiens; identical to SEQ ID NO: 37123

SEQ ID NO: 37141 - protein, 353 aa, Homo sapiens
MSKPPDLLLRLLRGAPRQRVCTLFIIGFKFTFFVSIMIYWHVVGEPKEKGQLYNLPAEIPCPTLTPPTPPSHGPTPGNIFFLETSDRTNPNFLFMCSVESAARTHPESHVLVLMKGLPGGNASLPRHLGISLLSCFPNVQMLPLDLRELFRDTPLADWYAAVQGRWEPYLLPVLSDASRIALMWKFGGIYLDTDFIVLKNLRNLTNVLGTQSRYVLNGAFLAFERRHEFMALCMRDFVDHYNGWIWGHQGPQLLTRVFKKWCSIRSLAESRACRGVTTLPPEAFYPIPWQDWKKYFEDINPEELPRLLSATYAVHVWNKKSQGTRFEATSRALLAQLHARYCPTTHEAMKMYL

SEQ ID NO: 37142 - protein, 353 aa, Homo sapiens; identical to SEQ ID NO: 37141

SEQ ID NO: 37143 - protein, 353 aa, Homo sapiens; identical to SEQ ID NO: 37141

SEQ ID NO: 37144 - protein, 436 aa, Homo sapiens
MSKPPDLLLRLLRGAPRQRVCTLFIIGFKFTFFVSIMIYWHVVGEPKEKGQLYNLPAEIPCPTLTPPTPPSHGPTPGNIFFLETSDRTNPNFLFMCSVESAARTHPESHVLVLMKGLPGGNASLPRHLGISLLSCFPNVQMLPLDLRELFRDTPLADWYAAVQGRWEPYLLPVLSDASRIALMWKFGGIYLDTDFIVLKNLRNLTNVLGTQSRYVLNGAFLAFERRHEFMALCMRDFVDHYNGWIWGHQGPQLLTRVFKKWCSIRSLAESRACRGVTTLPPEAFYPIPWQDWKKYFEDINPEELPRLLSATYAVHVWNKKSQGTAGPAACPLLPHDARGHENVLVRGPPGHLPNLLLMGHWAALPGEARLRAREREARAATGLRQAVEELWEQAQWEAVDTPRTVSCLEAGLTHGAIASGGRSVSAPGLLDNRQEG

SEQ ID NO: 37145 - protein, 102 aa, Homo sapiens
MALLKANKDLISAGLKEFSVLLNQQVFNDPLVSEEDMVTVVEDWMNFYINYYRQQVTGEPQERDKALQELRQELNTLANPFLAKYRDFLKSHELPSHPPPSS

SEQ ID NO: 37146 - protein, 495 aa, Homo sapiens
MSMLVVFLLLWGVTWGPVTEAAIFYETQPSLWAESESLLKPLANVTLTCQAHLETPDFQLFKNGVAQEPVHLDSPAIKHQFLLTGDTQGRYRCRSGLSTGWTQLSKLLELTGPKSLPAPWLSMAPVSWITPGLKTTAVCRGVLRGVTFLLRREGDHEFLEVPEAQEDVEATFPVHQPGNYSCSYRTDGEGALSEPSATVTIEELAAPPPPVLMHHGESSQVLHPGNKVTLTCVAPLSGVDFQLRRGEKELLVPRSSTSPDRIFFHLNAVALGDGGHYTCRYRLHDNQNGWSGDSAPVELILSDETLPAPEFSPEPESGRALRLRCLAPLEGARFALVREDRGGRRVHRFQSPAGTEALFELHNISVADSANYSCVYVDLKPPFGGSAPSERLELHVDGPPPRPQLRATWSGAVLAGRDAVLRCEGPIPDVTFELLREGETKAVKTVRTPGAAANLELIFVGPQHAGNYRCRYRSWVPHTFESELSDPVELLVAES

SEQ ID NO: 37147 - protein, 352 aa, Homo sapiens
MRSLGALLLLLSACLAVSAGPVPTPPDNIQVQENFNISRIYGKWYNLAIGSTCPWLKKIMDRMTVSTLVLGEGATEAEISMTSTRWRKGVCEETSGAYEKTDTDGKFLYHKSKWNITMESYVVHTNYDEYAIFLTKKFSRHHGPTITAKLYGRAPQLRETLLQDFRVVAQGVGIPEDSIFTMADRGECVPGEQEPEPILIPRVRRAVLPQEEEGSGGGQLVTEVTKKEDSCQLGYSAGPCMGMTSRYFYNGTSMACETFQYGGCMGNGNNFVTEKECLQTCRTVAACNLPIVRGPCRAFIQLWAFDAVKGKCVLFPYGGCQGNGNKFYSEKECREYCGVPGDGDEELLRFSN

SEQ ID NO: 37148 - protein, 270 aa, Homo sapiens
MDRMTVSTLVLGEGATEAEISMTSTRWRKGVCEETSGAYEKTDTDGKFLYHKSKWNITMESYVVHTNYDEYAIFLTKKFSRHHGPTITAKLYGRAPQLRETLLQDFRVVAQGVGIPEDSIFTMADRGECVPGEQEPEPILIPRVRRAVLPQEEEGSGGGQLVTEVTKKEDSCQLGYSAGPCMGMTSRYFYNGTSMACETFQYGGCMGNGNNFVTEKECLQTCRTVGECGSPPLCALHPQDPVPPVNHLRIEKVANRGHSSGRTPGGFLKS

SEQ ID NO: 37149 - protein, 298 aa, Homo sapiens
MVRMVPVLLSLLLLLGPAVPQENQDGRYSLTYIYTGLSKHVEDVPAFQALGSLNDLQFFRYNSKDRKSQPMGLWRQVEGMEDWKQDSQLQKAREDIFMETLKDIVEYYNDSNGSHVLQGRFGCEIENNRSSGAFWKYYYDGKDYIEFNKEIPAWVPFDPAAQITKQKWEAEPVYVQRAKAYLEEECPATLRKYLKYSKNILDRQDPPSVVVTSHQAPGEKKKLKCLAYDFYPGKIDVHWTRAGEVQEPELRGDVLHNGNGTYQSWVVVAVPPQDTAPYSCHVQHSSLAQPLVVPWEAS

SEQ ID NO: 37150 - protein, 367 aa, Homo sapiens
MKSLVLLLCLAQLWGCHSAPHGPGLIYRQPNCDDPETEEAALVAIDYINQNLPWGYKHTLNQIDEVKVWPQQPSGELFEIEIDTLETTCHVLDPTPVARCSVRQLKEHAVEGDCDFQLLKLDGKFSVVYAKCDSSPDSAEDVRKVCQDCPLLAPLNDTRVVHAAKAALAAFNAQNNGSNFQLEEISRAQLVPLPPSTYVEFTVSGTDCVAKEATEAAKCNLLAEKQYGFCKATLSEKLGGAEVAVTCMVFQTQPVSSQPQPEGANEAVPTPVVDPDAPPSPPLGAPGLPPAGSPPDSHVLLAAPPGHQLHRAHYDLRHTFMGVVSLGSPSGEVSHPRKTRTVVQPSVGAAAGPVVPPCPGRIRHFKV

SEQ ID NO: 37151 - protein, 433 aa, Homo sapiens
MFAGCFFFLLNQSRNHPVSLCNSSGRLQQINKAHHPPWVYLSQQSTWVGPEASNHLHACQGLSGAAMKSLVLLLCLAQLWGCHSAPHGPGLIYRQPNCDDPETEEAALVAIDYINQNLPWGYKHTLNQIDEVKVWPQQPSGELFEIEIDTLETTCHVLDPTPVARCSVRQLKEHAVEGDCDFQLLKLDGKFSVVYAKCDSSPDSAEDVRKVCQDCPLLAPLNDTRVVHAAKAALAAFNAQNNGSNFQLEEISRAQLVPLPPSTYVEFTVSGTDCVAKEATEAAKCNLLAEKQYGFCKATLSEKLGGAEVAVTCMVFQTQPVSSQPQPEGANEAVPTPVVDPDAPPSPPLGAPGLPPAGSPPDSHVLLAAPPGHQLHRAHYDLRHTFMGVVSLGSPSGEVSHPRKTRTVVQPSVGAAAGPVVPPCPGRIRHFKV

SEQ ID NO: 37152 - protein, 1474 aa, Homo sapiens
MGKNKLLHPSLVLLLLVLLPTDASVSGKPQYMVLVPSLLHTETTEKGCVLLSYLNETVTVSASLESVRGNRSLFTDLEAENDVLHCVAFAVPKSSSNEEVMFLTVQVKGPTQEFKKRTTVMVKNEDSLVFVQTDKSIYKPGQTVKFRVVSMDENFHPLNELIPLVYIQDPKGNRIAQWQSFQLEGGLKQFSFPLSSEPFQGSYKVVVQKKSGGRTEHPFTVEEFVLPKFEVQVTVPKIITILEEEMNVSVCGLYTYGKPVPGHVTVSICRKYSDASDCHGEDSQAFCEKFSGQLNSHGCFYQQVKTKVFQLKRKEYEMKLHTEAQIQEEGTVVELTGRQSSEITRTITKLSFVKVDSHFRQGIPFFGQVRLVDGKGVPIPNKVIFIRGNEANYYSNATTDEHGLVQFSINTTNVMGTSLTVRVNYKDRSPCYGYQWVSEEHEEAHHTAYLVFSPSKSFVHLEPMSHELPCGHTQTVQAHYILNGGTLLGLKKLSFYYLIMAKGGIVRTGTHGLLVKQEDMKGHFSISIPVKSDIAPVARLLIYAVLPTGDVIGDSAKYDVENCLANKVDLSFSPSQSLPASHAHLRVTAAPQSVCALRAVDQSVLLMKPDAELSASSVYNLLPEKDLTGFPGPLNDQDNEDCINRHNVYINGITYTPVSSTNEKDMYSFLEDMGLKAFTNSKIRKPKMCPQLQQYEMHGPEGLRVGFYESDVMGRGHARLVHVEEPHTETVRKYFPETWIWDLVVVNSAGVAEVGVTVPDTITEWKAGAFCLSEDAGLGISSTASLRAFQPFFVELTMPYSVIRGEAFTLKATVLNYLPKCIRVSVQLEASPAFLAVPVEKEQAPHCICANGRQTVSWAVTPKSLGNVNFTVSAEALESQELCGTEVPSVPEHGRKDTVIKPLLVEPEGLEKETTFNSLLCPSGGEVSEELSLKLPPNVVEESARASVSVLGDILGSAMQNTQNLLQMPYGCGEQNMVLFAPNIYVLDYLNETQQLTPEIKSKAIGYLNTGYQRQLNYKHYDGSYSTFGERYGRNQGNTWLTAFVLKTFAQARAYIFIDEAHITQALIWLSQRQKDNGCFRSSGSLLNNAIKGGVEDEVTLSAYITIALLEIPLTVTHPVVRNALFCLESAWKTAQEGDHGSHVYTKALLAYAFALAGNQDKRKEVLKSLNEEAVKKDNSVHWERPQKPKAPVGHFYEPQAPSAEVEMTSYVLLAYLTAQPAPTSEDLTSATNIVKWITKQQNAQGGFSSTQDTVVALHALSKYGAATFTRTGKAAQVTIQSSGTFSSKFQVDNNNRLLLQQVSLPELPGEYSMKVTGEGCVYLQTSLKYNILPEKEEFPFALGVQTLPQTCDEPKAHTSFQISLSVSYTGSRSASNMAIVDVKMVSGFIPLKPTVKMLERSNHVSRTEVSSNHVLIYLDKVSNQTLSLFFTVLQDVPVRDLKPAIVKVYDYYETDEFAIAEYNAPCSKDLGNA

SEQ ID NO: 37153 - protein, 168 aa, Homo sapiens
MGKNKLLHPSLVLLLLVLLPTDASVSGKPQYMVLVPSLLHTETTEKGCVLLSYLNETVTVSASLESVRGNRSLFTDLEAENDVLHCVAFAVPKSSSNEEVMFLTVQVKGPTQEFKKRTTVMVKNEDSLVFVQTDKSIYKPGQTVKFRVVSMDENFHPLNELIPLVYIQ

SEQ ID NO: 37154 - protein, 1489 aa, Homo sapiens
RVQYVCSPPAPSFCNMGKNKLLHPSLVLLLLVLLPTDASVSGKPQYMVLVPSLLHTETTEKGCVLLSYLNETVTVSASLESVRGNRSLFTDLEAENDVLHCVAFAVPKSSSNEEVMFLTVQVKGPTQEFKKRTTVMVKNEDSLVFVQTDKSIYKPGQTVKFRVVSMDENFHPLNELIPLVYIQDPKGNRIAQWQSFQLEGGLKQFSFPLSSEPFQGSYKVVVQKKSGGRTEHPFTVEEFVLPKFEVQVTVPKIITILEEEMNVSVCGLYTYGKPVPGHVTVSICRKYSDASDCHGEDSQAFCEKFSGQLNSHGCFYQQVKTKVFQLKRKEYEMKLHTEAQIQEEGTVVELTGRQSSEITRTITKLSFVKVDSHFRQGIPFFGQVRLVDGKGVPIPNKVIFIRGNEANYYSNATTDEHGLVQFSINTTNVMGTSLTVRVNYKDRSPCYGYQWVSEEHEEAHHTAYLVFSPSKSFVHLEPMSHELPCGHTQTVQAHYILNGGTLLGLKKLSFYYLIMAKGGIVRTGTHGLLVKQEDMKGHFSISIPVKSDIAPVARLLIYAVLPTGDVIGDSAKYDVENCLANKVDLSFSPSQSLPASHAHLRVTAAPQSVCALRAVDQSVLLMKPDAELSASSVYNLLPEKDLTGFPGPLNDQDNEDCINRHNVYINGITYTPVSSTNEKDMYSFLEDMGLKAFTNSKIRKPKMCPQLQQYEMHGPEGLRVGFYESDVMGRGHARLVHVEEPHTETVRKYFPETWIWDLVVVNSAGVAEVGVTVPDTITEWKAGAFCLSEDAGLGISSTASLRAFQPFFVELTMPYSVIRGEAFTLKATVLNYLPKCIRVSVQLEASPAFLAVPVEKEQAPHCICANGRQTVSWAVTPKSLGNVNFTVSAEALESQELCGTEVPSVPEHGRKDTVIKPLLVEPEGLEKETTFNSLLCPSGGEVSEELSLKLPPNVVEESARASVSVLGDILGSAMQNTQNLLQMPYGCGEQNMVLFAPNIYVLDYLNETQQLTPEIKSKAIGYLNTGYQRQLNYKHYDGSYSTFGERYGRNQGNTWLTAFVLKTFAQARAYIFIDEAHITQALIWLSQRQKDNGCFRSSGSLLNNAIKGGVEDEVTLSAYITIALLEIPLTVTHPVVRNALFCLESAWKTAQEGDHGSHVYTKALLAYAFALAGNQDKRKEVLKSLNEEAVKKDNSVHWERPQKPKAPVGHFYEPQAPSAEVEMTSYVLLAYLTAQPAPTSEDLTSATNIVKWITKQQNAQGGFSSTQDTVVALHALSKYGAATFTRTGKAAQVTIQSSGTFSSKFQVDNNNRLLLQQVSLPELPGEYSMKVTGEGCVYLQTSLKYNILPEKEEFPFALGVQTLPQTCDEPKAHTSFQISLSVSYTGSRSASNMAIVDVKMVSGFIPLKPTVKMLERSNHVSRTEVSSNHVLIYLDKVSNQTLSLFFTVLQDVPVRDLKPAIVKVYDYYETDEFAIAEYNAPCSKDLGNA

SEQ ID NO: 37155 - protein, 1454 aa, Homo sapiens
MWAQLLLGMLALSPAIAEELPNYLVTLPARLNFPSVQKVCLDLSPGYSDVKFTVTLETKDKTQKLLEYSGLKKRHLHCISFLVPPPAGGTEEVATIRVSGVGNNISFEEKKKVLIQRQGNGTFVQTDKPLYTPGQQVYFRIVTMDSNFVPVNDKYSMVELQDPNSNRIAQWLEVVPEQGIVDLSFQLAPEAMLGTYTVAVAEGKTFGTFSVEEYVLPKFKVEVVEPKELSTVQESFLVKICCRYTYGKPMLGAVQVSVCQKANTYWYREVEREQLPDKCRNLSGQTDKTGCFSAPVDMATFDLIGYAYSHQINIVATVVEEGTGVEANATQNIYISPQMGSMTFEDTSNFYHPNFPFSGKIRVRGHDDSFLKNHLVFLVIYGTNGTFNQTLVTDNNGLAPFTLETSGWNGTDVSLEGKFQMEDLVYNPEQVPRYYQNAYLHLRPFYSTTRSFLGIHRLNGPLKCGQPQEVLVDYYIDPADASPDQEISFSYYLIGKGSLVMEGQKHLNSKKKGLKASFSLSLTFTSRLAPDPSLVIYAIFPSGGVVADKIQFSVEMCFDNQVSLGFSPSQQLPGAEVELQLQAAPGSLCALRAVDESVLLLRPDRELSNRSVYGMFPFWYGHYPYQVAEYDQCPVSGPWDFPQPLIDPMPQGHSSQRSIIWRPSFSEGTDLFSFFRDVGLKILSNAKIKKPVDCSHRSPEYSTAMGAGGGHPEAFESSTPLHQAEDSQVRQYFPETWLWDLFPIGNSGKEAVHVTVPDAITEWKAMSFCTSQSRGFGLSPTVGLTAFKPFFVDLTLPYSVVRGESFRLTATIFNYLKDCIRVQTDLAKSHEYQLESWADSQTSSCLCADDAKTHHWNITAVKLGHINFTISTKILDSNEPCGGQKGFVPQKGRSDTLIKPVLVKPEGVLVEKTHSSLLCPKGKVASESVSLELPVDIVPDSTKAYVTVLGDIMGTALQNLDGLVQMPSGCGEQNMVLFAPIIYVLQYLEKAGLLTEEIRSRAVGFLEIGYQKELMYKHSNGSYSAFGERDGNGNTWLTAFVTKCFGQAQKFIFIDPKNIQDALKWMAGNQLPSGCYANVGNLLHTAMKGGVDDEVSLTAYVTAALLEMGKDVDDPMVSQGLRCLKNSATSTTNLYTQALLAYIFSLAGEMDIRNILLKQLDQQAIISGESIYWSQKPTPSSNASPWSEPAAVDVELTAYALLAQLTKPSLTQKEIAKATSIVAWLAKQHNAYGGFSSTQDTVVALQALAKYATTAYMPSEEINLVVKSTENFQRTFNIQSVNRLVFQQDTLPNVPGMYTLEASGQGCVYVQTVLRYNILPPTNMKTFSLSVEIGKARCEQPTSPRSLTLTIHTSYVGSRSSSNMAIVEVKMLSGFSPMEGTNQLLLQQPLVKKVEFGTDTLNIYLDELIKNTQTYTFTISQSVLVTNLKPATIKVYDYYLPDEQATIQYSDPCE

SEQ ID NO: 37156 - protein, 1454 aa, Homo sapiens
MWAQLLLGMLALSPAIAEELPNYLVTLPARLNFPSVQKVCLDLSPGYSDVKFTVTLETKDKTQKLLEYSGLKKRHLHCISFLVPPPAGGTEEVATIRVSGVGNNISFEEKKKVLIQRQGNGTFVQTDKPLYTPGQQVYFRIVTMDSNFVPVNDKVSWEEGQDPNSNRIAQWLEVVPEQGIVDLSFQLAPEAMLGTYTVAVAEGKTFGTFSVEEYVLPKFKVEVVEPKELSTVQESFLVKICCRYTYGKPMLGAVQVSVCQKANTYWYREVEREQLPDKCRNLSGQTDKTGCFSAPVDMATFDLIGYAYSHQINIVATVVEEGTGVEANATQNIYISPQMGSMTFEDTSNFYHPNFPFSGKIRVRGHDDSFLKNHLVFLVIYGTNGTFNQTLVTDNNGLAPFTLETSGWNGTDVSLEGKFQMEDLVYNPEQVPRYYQNAYLHLRPFYSTTRSFLGIHRLNGPLKCGQPQEVLVDYYIDPADASPDQEISFSYYLIGKGSLVMEGQKHLNSKKKGLKASFSLSLTFTSRLAPDPSLVIYAIFPSGGVVADKIQFSVEMCFDNQVSLGFSPSQQLPGAEVELQLQAAPGSLCALRAVDESVLLLRPDRELSNRSVYGMFPFWYGHYPYQVAEYDQCPVSGPWDFPQPLIDPMPQGHSSQRSIIWRPSFSEGTDLFSFFRDVGLKILSNAKIKKPVDCSHRSPEYSTAMGAGGGHPEAFESSTPLHQAEDSQVRQYFPETWLWDLFPIGNSGKEAVHVTVPDAITEWKAMSFCTSQSRGFGLSPTVGLTAFKPFFVDLTLPYSVVRGESFRLTATIFNYLKDCIRVQTDLAKSHEYQLESWADSQTSSCLCADDAKTHHWNITAVKLGHINFTISTKILDSNEPCGGQKGFVPQKGRSDTLIKPVLVKPEGVLVEKTHSSLLCPKGKVASESVSLELPVDIVPDSTKAYVTVLGDIMGTALQNLDGLVQMPSGCGEQNMVLFAPIIYVLQYLEKAGLLTEEIRSRAVGFLEIGYQKELMYKHSNGSYSAFGERDGNGNTWLTAFVTKCFGQAQKFIFIDPKNIQDALKWMAGNQLPSGCYANVGNLLHTAMKGGVDDEVSLTAYVTAALLEMGKDVDDPMVSQGLRCLKNSATSTTNLYTQALLAYIFSLAGEMDIRNILLKQLDQQAIISGESIYWSQKPTPSSNASPWSEPAAVDVELTAYALLAQLTKPSLTQKEIAKATSIVAWLAKQHNAYGGFSSTQDTVVALQALAKYATTAYMPSEEINLVVKSTENFQRTFNIQSVNRLVFQQDTLPNVPGMYTLEASGQGCVYVQTVLRYNILPPTNMKTFSLSVEIGKARCEQPTSPRSLTLTIHTSYVGSRSSSNMAIVEVKMLSGFSPMEGTNQLLLQQPLVKKVEFGTDTLNIYLDELIKNTQTYTFTISQSVLVTNLKPATIKVYDYYLPDEQATIQYSDPCE

SEQ ID NO: 37157 - protein, 1004 aa, Homo sapiens
SFLGIHRLNGPLKCGQPQEVLVDYYIDPADASPDQEISFSYYLIGKGSLVMEGQKHLNSKKKGLKASFSLSLTFTSRLAPDPSLVIYAIFPSGGVVADKIQFSVEMCFDNQVSLGFSPSQQLPGAEVELQLQAAPGSLCALRAVDESVLLLRPDRELSNRSVYGMFPFWYGHYPYQVAEYDQCPVSGPWDFPQPLIDPMPQGHSSQRSIIWRPSFSEGTDLFSFFRDVGLKILSNAKIKKPVDCSHRSPEYSTAMGAGGGHPEAFESSTPLHQAEDSQVRQYFPETWLWDLFPIGNSGKEAVHVTVPDAITEWKAMSFCTSQSRGFGLSPTVGLTAFKPFFVDLTLPYSVVRGESFRLTATIFNYLKDCIRVQTDLAKSHEYQLESWADSQTSSCLCADDAKTHHWNITAVKLGHINFTISTKILDSNEPCGGQKGFVPQKGRSDTLIKPVLVKPEGVLVEKTHSSLLCPKGKVASESVSLELPVDIVPDSTKAYVTVLGDIMGTALQNLDGLVQMPSGCGEQNMVLFAPIIYVLQYLEKAGLLTEEIRSRAVGFLEIGYQKELMYKHSNGSYSAFGERDGNGNTWLTAFVTKCFGQAQKFIFIDPKNIQDALKWMAGNQLPSGCYANVGNLLHTAMKGGVDDEVSLTAYVTAALLEMGKDVDDPMVSQGLRCLKNSATSTTNLYTQALLAYIFSLAGEMDIRNILLKQLDQQAIISGESIYWSQKPTPSSNASPWSEPAAVDVELTAYALLAQLTKPSLTQKEIAKATSIVAWLAKQHNAYGGFSSTQDTVVALQALAKYATTAYMPSEEINLVVKSTENFQRTFNIQSVNRLVFQQDTLPNVPGMYTLEASGQGCVYVQTVLRYNILPPTNMKTFSLSVEIGKARCEQPTSPRSLTLTIHTSYVGSRSSSNMAIVEVKMLSGFSPMEGTNQLLLQQPLVKKVEFGTDTLNIYLDELIKNTQTYTFTISQSVLVTNLKPATIKVYDYYLPDEQATIQYSDPCE

SEQ ID NO: 37158 - protein, 609 aa, Homo sapiens
MKWVESIFLIFLLNFTESRTLHRNEYGIASILDSYQCTAEISLADLATIFFAQFVQEATYKEVSKMVKDALTAIEKPTGDEQSSGCLENQLPAFLEELCHEKEILEKYGHSDCCSQSEEGRHNCFLAHKKPTPASIPLFQVPEPVTSCEAYEEDRETFMNKFIYEIARRHPFLYAPTILLWAARYDKIIPSCCKAENAVECFQTKAATVTKELRESSLLNQHACAVMKNFGTRTFQAITVTKLSQKFTKVNFTEIQKLVLDVAHVHEHCCRGDVLDCLQDGEKIMSYICSQQDTLSNKITECCKLTTLERGQCIIHAENDEKPEGLSPNLNRFLGDRDFNQFSSGEKNIFLASFVHEYSRRHPQLAVSVILRVAKGYQELLEKCFQTENPLECQDKGEEELQKYIQESQALAKRSCGLFQKLGEYYLQNAFLVAYTKKAPQLTSSELMAITRKMAATAATCCQLSEDKLLACGEGAADIIIGHLCIRHEMTPVNPGVGQCCTSSYANRRPCFSSLVVDETYVPPAFSDDKFIFHKDLCQAQGVALQTMKQEFLINLVKQKPQITEEQLEAVIADFSGLLEKCCQGQEQEVCFAEEGQKLISKTRAALGV

SEQ ID NO: 37159 - protein, 1244 aa, Homo sapiens
MNNQKVVAVLLQECKQVLDQLLLEAPDVSEEDKSEDQRCRALLPSELRTLIQEAKEMKWPFVPEKWQYKQAVGPEDKTNLKDVIGAGLQQLLASLRASILARDCAAAAAIVFLVDRFLYGLDVSGKLLQVAKGLHKLQPATPIAPQVVIRQARISVNSGKLLKAEYILSSLISNNGATGTWLYRNESDKVLVQSVCIQIRGQILQKLGMWYEAAELIWASIVGYLALPQPDKKGLSTSLGILADIFVSMSKNDYEKFKNNPQINLSLLKEFDHHLLSAAEACKLAAAFSAYTPLFVLTAVNIRGTCLLSYSSSNDCPPELKNLHLCEAKEAFEIGLLTKRDDEPVTGKQELHSFVKAAFGLTTVHRRLHGETGTVHAASQLCKEAMGKLYNFSTSSRSQDREALSQEVMSVIAQVKEHLQVQSFSNVDDRSYVPESFECRLDKLILHGQGDFQKILDTYSQHHTSVCEVFESDCGNNKNEQKDAKTGVCITALKTEIKNIDTVSTTQEKPHCQRDTGISSSLMGKNVQRELRRGGRRNWTHSDAFRVSLDQDVETETEPSDYSNGEGAVFNKSLSGSQTSSAWSNLSGFSSSASWEEVNYHVDDRSARKEPGKEHLVDTQCSTALSEELENDREGRAMHSLHSQLHDLSLQEPNNDNLEPSQNQPQQQMPLTPFSPHNTPGIFLAPGAGLLEGAPEGIQEVRNMGPRNTSAHSRPSYRSASWSSDSGRPKNMGTHPSVQKEEAFEIIVEFPETNCDVKDRQGKEQGEEISERGAGPTFKASPSWVDPEGETAESTEDAPLDFHRVLHNSLGNISMLPCSSFTPNWPVQNPDSRKSGGPVAEQGIDPDASTVDEEGQLLDSMDVPCTNGHGSHRLCILRQPPGQRAETPNSSVSGNILFPVLSEDCTTTEEGNQPGNMLNCSQNSSSSSVWWLKSPAFSSGSSEGDSPWSYLNSSGSSWVSLPGKMRKEILEARTLQPDDFEKLLAGVRHDWLFQRLENTGVFKPSQLHRAHSALLLKYSKKSELWTAQETIVYLGDYLTVKKKGRQRNAFWVHHLHQEEILGRYVGKDYKEQKGLWHHFTDVERQMTAQHYVTEFNKRLYEQNIPTQIFYIPSTILLILEDKTIKGCISVEPYILGEFVKLSNNTKVVKTEYKATEYGLAYGHFSYEFSNHRDVVVDLQGWVTGNGKGLIYLTDPQIHSVDQKVFTTNFGKRGIFYFFNNQHVECNEICHRLSLTRPSMEKPCT

SEQ ID NO: 37160 - protein, 142 aa, Homo sapiens
MNNQKVVAVLLQECKALLPSELRTLIQEAKEMKWPFVPEKWQYKQAVGPEDKTNLKDVIGAGLQQLLASLRASILARDCAAAAAIVFLVDRFLYGLDVSGKLLQVAKGLHKLQPATPIAPQVVIRQARISVNSGSHPAKHSM

SEQ ID NO: 37161 - protein, 1244 aa, Homo sapiens; identical to SEQ ID NO: 37159

SEQ ID NO: 37162 - protein, 1166 aa, Homo sapiens
MCRKRTRARTSAAEASLRASILARDCAAAAAIVFLVDRFLYGLDVSGKLLQVAKGLHKLQPATPIAPQVVIRQARISVNSGKLLKAEYILSSLISNNGATGTWLYRNESDKVLVQSVCIQIRGQILQKLGMWYEAAELIWASIVGYLALPQPDKKGLSTSLGILADIFVSMSKNDYEKFKNNPQINLSLLKEFDHHLLSAAEACKLAAAFSAYTPLFVLTAVNIRGTCLLSYSSSNDCPPELKNLHLCEAKEAFEIGLLTKRDDEPVTGKQELHSFVKAAFGLTTVHRRLHGETGTVHAASQLCKEAMGKLYNFSTSSRSQDREALSQEVMSVIAQVKEHLQVQSFSNVDDRSYVPESFECRLDKLILHGQGDFQKILDTYSQHHTSVCEVFESDCGNNKNEQKDAKTGVCITALKTEIKNIDTVSTTQEKPHCQRDTGISSSLMGKNVQRELRRGGRRNWTHSDAFRVSLDQDVETETEPSDYSNGEGAVFNKSLSGSQTSSAWSNLSGFSSSASWEEVNYHVDDRSARKEPGKEHLVDTQCSTALSEELENDREGRAMHSLHSQLHDLSLQEPNNDNLEPSQNQPQQQMPLTPFSPHNTPGIFLAPGAGLLEGAPEGIQEVRNMGPRNTSAHSRPSYRSASWSSDSGRPKNMGTHPSVQKEEAFEIIVEFPETNCDVKDRQGKEQGEEISERGAGPTFKASPSWVDPEGETAESTEDAPLDFHRVLHNSLGNISMLPCSSFTPNWPVQNPDSRKSGGPVAEQGIDPDASTVDEEGQLLDSMDVPCTNGHGSHRLCILRQPPGQRAETPNSSVSGNILFPVLSEDCTTTEEGNQPGNMLNCSQNSSSSSVWWLKSPAFSSGSSEGDSPWSYLNSSGSSWVSLPGKMRKEILEARTLQPDDFEKLLAGVRHDWLFQRLENTGVFKPSQLHRAHSALLLKYSKKSELWTAQETIVYLGDYLTVKKKGRQRNAFWVHHLHQEEILGRYVGKDYKEQKGLWHHFTDVERQMTAQHYVTEFNKRLYEQNIPTQIFYIPSTILLILEDKTIKGCISVEPYILGEFVKLSNNTKVVKTEYKATEYGLAYGHFSYEFSNHRDVVVDLQGWVTGNGKGLIYLTDPQIHSVDQKVFTTNFGKRGIFYFFNNQHVECNEICHRLSLTRPSMEKPCT

SEQ ID NO: 37163 - protein, 382 aa, Homo sapiens
MALQGISVVELSGLAPGPFCAMVLADFGARVVRVDRPGSRYDVSRLGRGKRSLVLDLKQPRGAAVLRRLCKRSDVLLEPFRRGVMEKLQLGPEILQRENPRLIYARLSGFGQSGSFCRLAGHDINYLALSGVLSKIGRSGENPYAPLNLLADFAGGGLMCALGIIMALFDRTRTGKGQVIDANMVEGTAYLSSFLWKTQKLSLWEAPRGQNMLDGGAPFYTTYRTADGEFMAVGAIEPQFYELLIKGLGLKSDELPNQMSMDDWPEMKKKFADVFAEKTKAEWCQIFDGTDACVTPVLTFEEVVHHDHNKERGSFITSEEQDVSPRPAPLLLNTPAIPSFKRDPFIGEHTEEILEEFGFSREEIYQLNSDKIIESNKVKASL

SEQ ID NO: 37164 - protein, 198 aa, Homo sapiens
MALQGISVVELSGLAPGPFCAMVLADFGARVVRVDRPGSRYDVSRLGRGKRSLVLDLKQPRGAAVLRRLCKRSDVLLEPFRRGVMEKLQLGPEILQRENPRLIYARLSGFGQSGSFCRLAGHDINYLALSGGRNSIFKFFSVENSEIESVGSTSRTEHVGWWSTFLYDLQDSRWGIHGCWSNRTPVLRAADQRTWTKV

SEQ ID NO: 37165 - protein, 229 aa, Homo sapiens
MALQGISVVELSGLAPGPFCAMVLADFGARVVRVDRPGSRYDVSRLGRGKRSLVLDLKQPRGAAVLRRLCKRSDVLLEPFRRGVMEKLQLGPEILQRENPRLIYARLSGFGQSGSFCRLAGHDINYLALSGGRNSIFKFFSVENSEIESVGSTSRTEHVGWWSTFLYDLQDSRWGIHGCWSNRTPVLRAADQRSLIPYFNLYLQFLNISMQNLFKVHTLLRPCYFLGQK

SEQ ID NO: 37166 - protein, 394 aa, Homo sapiens
MALQGISVVELSGLAPGPFCAMVLADFGARVVRVDRPGSRYDVSRLGRGKRSLVLDLKQPRGAAVLRRLCKRSDVLLEPFRRGVMEKLQLGPEILQRENPRLIYARLSGFGQSGSFCRLAGHDINYLALSGVLSKIGRSGENPYAPLNLLADFAGGGLMCALGIIMALFDRTRTGKGQVIDANMVEGTAYLSSFLWKTQKLSLWEAPRGQNMLDGGAPFYTTYRTADGEFMAVGAIEPQFYELLIKGLGLKSDELPNQMSMDDWPEMKKKFADVFAEKTKAEWCQIFDGTDACVTPVLTFEEVVHHDHNKERGSFITSEEQDVSPRPAPLLLNTPAIPSFKRDPFIGEHTEEILEEFGFSREEIYQLNSDKIIESNKAGSKFWILYPTHSNIQK

SEQ ID NO: 37167 - protein, 333 aa, Homo sapiens
MAAGCCGVKKQKLSSSPPSGSGGGGGASSSSHCSGESQCRAGELGLGGAGTRLNGLGGLTGGGSGSGCTLSPPQGCGGGGGGIALSPPPSCGVGTLLSTPAAATSSSPSSSSAASSSSPGSRKMVVSAEMCCFCFDVLYCHLYGYQQPRTPRFTNEPYPLFVTWKIGRDKRLRGCIGTFSAMNLHSGLREYTLTSALKDSRFPPMTRDELPRLFCSVSLLTNFEDVCDYLDWEVGVHGIRIEFINEKGSKRTATYLPEVAKEQGWDHIQTIDSLLRKGGYKAPITNEFRKTIKLTRYRSEKMTLSYAEYLAHRQHHHFQNGIGHPLPPYNHYS

SEQ ID NO: 37168 - protein, 210 aa, Homo sapiens
MVVSAEMCCFCFDVLYCHLYGYQQPRTPRFTNEPYPLFVTWKIGRDKRLRGCIGTFSAMNLHSGLREYTLTSALKDSRFPPMTRDELPRLFCSVSLLTNFEDVCDYLDWEVGVHGIRIEFINEKGSKRTATYLPEVAKEQGWDHIQTIDSLLRKGGYKAPITNEFRKTIKLTRYRSEKMTLSYAEYLAHRQHHHFQNGIGHPLPPYNHYS

SEQ ID NO: 37169 - protein, 296 aa, Homo sapiens
MAAGCCGVKKQKLSSSPPSGSGGGGGASSSSHCSGESQCRAGELGLGGAGTRLNGLGGLTGGGSGSGCTLSPPQGCGGGGGGIALSPPPSCGVGTLLSTPAAATSSSPSSSSAASSSSPGSRKMVVSAEMCCFCFDVLYCHLYGYQQPRTPRFTNEPYALKDSRFPPMTRDELPRLFCSVSLLTNFEDVCDYLDWEVGVHGIRIEFINEKGSKRTATYLPEVAKEQGWDHIQTIDSLLRKGGYKAPITNEFRKTIKLTRYRSEKMTLSYAEYLAHRQHHHFQNGIGHPLPPYNHYS

SEQ ID NO: 37170 - protein, 953 aa, Homo sapiens
MCNPEEAALLRLEEVFSATLAHVNSLVLQPLLPAAPDPSDPWGRECLRLLQQLHKSSQQLWEVTEESLHSLQERLRYPDSTGLESLLLLRGADRVLQAHIEYIESYTSCMVVQAFQKAAKRRSEYWRGQRKALRQLLSGVSSEGSVGASLGQALHQPLAHHVQQYVLLLLSLGDTIGEHHPTRELVVNAVTLFGNLQSFMKQELDQAVATQALWHTLRGRLRDVLCTPAHRLLQDSQDVPVTVAPLRAERVLLFDDALVLLQGHNVHTFDLKLVWVDPGQDGCTFHLLTPEEEFSFCAKDSQGQAVWQWKVTWAVHQALHGKKDFPVLGAGLEPSQPPDCRCAEYTFQAEGRLCQATYEGEWCRGRPHGKGTLKWPDGRNHVGNFCQGLEHGFGIRLLPQASEDKFDCYKCHWREGSMCGYGICEYSTDEVYKGYFQEGLRHGFGVLESGPQAPQPFRYTGHWERGQRSGYGIEEDGDRGERYIGMWQAGQRHGPGVMVTQAGVCYQGTFQADKTVGPGILLSEDDSLYEGTFTRDLTLMGKGKVTFPNGFTLEGSFGSGAGRGLHTQGVLDTAALPPDPSSTCKRQLGVGAFPVESRWQGVYSPFRDFVCAGCPRDLQEALLGFDVQSSRELRRSQDYLSCERTHPEDSVGSMEDILEELLQHREPKALQLYLRKALSNSLHPLGKLLRTLMLTFQATYAGVGANKHLQELAQEEVKQHAQELWAAYRGLLRVALERKGQALEEDEDTETRDLQVHGLVLPLMLPSFYSELFTLYLLLHEREDSFYSQGIANLSLFPDTQLLEFLDVQKHLWPLKDLTLTSNQRYSLVRDKCFLSATECLQKIMTTVDPREKLEVLERTYGEIEGTVSRVLGREYKLPMDDLLPLLIYVVSRARIQHLGAEIHLIRDMMDPNHTGGLYDFLLTALESCYEHIQKEDMRLHRLPGHWHSRELW

SEQ ID NO: 37171 - protein, 300 aa, Homo sapiens
MEDILEELLQHREPKALQLYLRKALSNSLHPLGKLLRTLMLTFQATYAGVGANKHLQELAQEEVKQHAQELWAAYRGLLRVALERKGQALEEDEDTETRDLQVHGLVLPLMLPSFYSELFTLYLLLHEREDSFYSQGIANLSLFPDTQLLEFLDVQKHLWPLKDLTLTSNQRYSLVRDKCFLSATECLQKIMTTVDPREKLEVLERTYGEIEGTVSRVLGREYKLPMDDLLPLLIYVVSRARIQHLGAEIHLIRDMMDPNHTGGLYDFLLTALESCYEHIQKEDMRLHRLPGHWHSRELW

SEQ ID NO: 37172 - protein, 953 aa, Homo sapiens; identical to SEQ ID NO: 37170

SEQ ID NO: 37173 - protein, 4167 aa, Homo sapiens
MEPEDLPWPGELEEEEEEEEEEEEEEEEAAAAAAANVDDVVVVEEVEEEAGRELDSDSHYGPQHLESIDDEEDEEAKAWLQAHPGRILPPLSPPQHRYSEGERTSLEKIVPLTCHVWQQIVYQGNSRTQISDTNVVCLETTAQRGSGDDQKTESWHCLPQEMDSSQTLDTSQTRFNVRTEDTEVTDFPSLEEGILTQSENQVKEPNRDLFCSPLLVIQDSFASPDLPLLTCLTQDQEFAPDSLFHQSELSFAPLRGIPDKSEDTEWSSRPSEVSEALFQATAEVASDLASSRFSVSQHPLIGSTAVGSQCPFLPSEQGNNEETISSVDELKIPKDCDRYDDLCSYMSWKTRKDTQWPENNLADKDQVSVATSFDITDENIATKRSDHFDAARSYGQYWTQEDSSKQAETYLTKGLQGKVESDVITLDGLNENAVVCSERVAELQRKPTRESEYHSSDLRMLRMSPDTVPKAPKHLKAGDTSKGGIAKVTQSNLKSGITTTPVDSDIGSHLSLSLEDLSQLAVSSLETTTGQHTDTLNQKTLADTHLTEETLKVTAIPEPADQKTATPTVLSSSHSHRGKPSIFYQQGLPDSHLTEEALKVSAAPGLADQTTGMSTLTSTSYSHREKPGTFYQQELPESNLTEEPLEVSAAPGPVEQKTGIPTVSSTSHSHVEDLLFFYRQTLPDGHLTDQALKVSAVSGPADQKTGTATVLSTPHSHREKPGIFYQQEFADSHQTEETLTKVSATPGPADQKTEIPAVQSSSYSQREKPSILYPQDLADSHLPEEGLKVSAVAGPADQKTGLPTVPSSAYSHREKLLVFYQQALLDSHLPEEALKVSAVSGPADGKTGTPAVTSTSSASSSLGEKPSAFYQQTLPNSHLTEEALKVSIVPGPGDQKTGIPSAPSSFYSHREKPIIFSQQTLPDFLFPEEALKVSAVSVLAAQKTGTPTVSSNSHSHSEKSSVFYQQELPDSDLPRESLKMSAIPGLTDQKTVPTPTVPSGSFSHREKPSIFYQQEWPDSYATEKALKVSTGPGPADQKTEIPAVQSSSYPQREKPSVLYPQVLSDSHLPEESLKVSAFPGPADQMTDTPAVPSTFYSQREKPGIFYQQTLPESHLPKEALKISVAPGLADQKTGTPTVTSTSYSQHREKPSIFHQQALPGTHIPEEAQKVSAVTGPGNQKTWIPRVLSTFYSQREKPGIFYQQTLPGSHIPEEAQKVSPVLGPADQKTGTPTPTSASYSHTEKPGIFYQQVLPDNHPTEEALKISVASEPVDQTTGTPAVTSTSYSQYREKPSIFYQQSLPSSHLTEEAKNVSAVPGPADQKTVIPILPSTFYSHTEKPGVFYQQVLPHSHPTEEALKISVASEPVDQTTGTPTVTSTSYSQHTEKPSIFYQQSLPGSHLTEEAKNVSAVPGPGDRKTGIPTLPSTFYSHTEKPGSFYQQVLPHSHLPEEALEVSVAPGPVDQTIGTPTVTSPSSSFGEKPIVIYKQAFPEGHLPEESLKVSVAPGPVGQTTGAPTITSPSYSQHRAKSGSFYQLALLGSQIPEEALRVSSAPGPADQTTGIPTITSTSYSFGEKPIVNYKQAFPDGHLPEEALKVSIVSGPTEKKTDIPAGPLGSSALGEKPITFYRQALLDSPLNKEVVKVSAAPGPADQKTETLPVHSTSYSNRGKPVIFYQQTLSDSHLPEEALKVPPVPGPDAQKTETPSVSSSLYSYREKPIVFYQQALPDSELTQEALKVSAVPQPADQKTGLSTVTSSFYSHTEKPNISYQQELPDSHLTEEALKVSNVPGPADQKTGVSTVTSTSYSHREKPIVSYQRELPHFTEAGLKILRVPGPADQKTGINILPSNSYPQREHSVISYEQELPDLTEVTLKAIGVPGPADQKTGIQIASSSSYSNREKASIFHQQELPDVTEEALNVFVVPGQGDRKTEIPTVPLSYYSRREKPSVISQQELPDSHLTEEALKVSPVSIPAEQKTGIPIGLSSSYSHSHKEKLKISTVHIPDDQKTEFPAATLSSYSQIEKPKISTVIGPNDQKTPSQTAFHSSYSQTVKPNILFQQQLPDRDQSKGILKISAVPELTDVNTGKPVSLSSSYFHREKSNIFSPQELPGSHVTEDVLKVSTIPGPAGQKTVLPTALPSSFSHREKPDIFYQKDLPDRHLTEDALKISSALGQADQITGLQTVPSGTYSHGENHKLVSEHVQRLIDNLNSSDSSVSSNNVLLNSQADDRVVINKPESAGFRDVGSEEIQDAENSAKTLKEIRTLLMEAENMALKRCNFPAPLARFRDISDISFIQSKKVVCFKEPSSTGVSNGDLLHRQPFTEESPSSRCIQKDIGTQTNLKCRRGIENWEFISSTTVRSPLQEAESKVSMALEETLRQYQAAKSVMRSEPEGCSGTIGNKIIIPMMTVIKSDSSSDASDGNGSCSWDSNLPESLESVSDVLLNFFPYVSPKTSITDSREEEGVSESEDGGGSSVDSLAAHVKNLLQCESSLNHAKEILRNAEEEESRVRAHAWNMKFNLAHDCGYSISELNEDDRRKVEEIKAELFGHGRTTDLSKGLQSPRGMGCKPEAVCSHIIIESHEKGCFRTLTSEHPQLDRHPCAFRSAGPSEMTRGRQNPSSCRAKHVNLSASLDQNNSHFKVWNSLQLKSHSPFQNFIPDEFKISKGLRMPFDEKMDPWLSELVEPAFVPPKEVDFHSSSQMPSPEPMKKFTTSITFSSHRHSKCISNSSVVKVGVTEGSQCTGASVGVFNSHFTEEQNPPRDLKQKTSSPSSFKMHSNSQDKEVTILAEGRRQSQKLPVDFERSFQEEKPLERSDFTGSHSEPSTRANCSNFKEIQISDNHTLISMGRPSSTLGVNRSSSRLGVKEKNVTITPDLPSCIFLEQRELFEQSKAPRADDHVRKHHSPSPQHQDYVAPDLPSCIFLEQRELFEQCKAPYVDHQMRENHSPLPQGQDSIASDLPSPISLEQCQSKAPGVDDQMNKHHFPLPQGQDCVVEKNNQHKPKSHISNINVEAKFNTVVSQSAPNHCTLAASASTPPSNRKALSCVHITLCPKTSSKLDSGTLDERFHSLDAASKARMNSEFNFDLHTVSSRSLEPTSKLLTSKPVAQDQESLGFLGPKSSLDFQVVQPSLPDSNTITQDLKTIPSQNSQIVTSRQIQVNISDFEGHSNPEGTPVFADRLPEKMKTPLSAFSEKLSSDAVTQITTESPEKTLFSSEIFINAEDRGHEIIEPGNQKLRKAPVKFASSSSVQQVTFSRGTDGQPLLLPYKPSGSTKMYYVPQLRQIPPSPDSKSDTTVESSHSGSNDAIAPDFPAQVLGTRDDDLSATVNIKHKEGIYSKRVVTKASLPVGEKPLQNENADASVQVLITGDENLSDKKQQEIHSTRAVTEAAQAKEKESLQKDTADSSAAAAAEHSAQVGDPEMKNLPDTKAITQKEEIHRKKTVPEEAWPNNKESLQINIEESECHSEFENTTRSVFRSAKFYIHHPVHLPSDQDICHESLGKSVFMRHSWKDFFQHHPDKHREHMCLPLPYQNMDKTKTDYTRIKSLSINVNLGNKEVMDTTKSQVRDYPKHNGQISDPQRDQKVTPEQTTQHTVSLNELWNKYRERQRQQRQPELGDRKELSLVDRLDRLAKILQNPITHSLQVSESTHDDSRGERSVKEWSGRQQQRNKLQKKKRFKSLEKSHKNTGELKKSKVLSHHRAGRSNQIKIEQIKFDKYILSKQPGFNYISNTSSDCRPSEESELLTDTTTNILSGTTSTVESDILTQTDREVALHERSSSVSTIDTARLIQAFGHERVCLSPRRIKLYSSITNQQRRYLEKRSKHSKKVLNTGHPLVTSEHTRRRHIQVANHVISSDSISSSASSFLSSNSTFCNKQNVHMLNKGIQAGNLEIVNGAKKHTRDVGITFPTPSSSEAKLEENSDVTSWSEEKREEKMLFTGYPEDRKLKKNKKNSHEGVSWFVPVENVESRSKKENVPNTCGPGISWFEPITKTRPWREPLREQNCQGQHLDGRGYLAGPGREAGRDLLRPFVRATLQESLQFHRPDFISRSGERIKRLKLIVQERKLQSMLQTERDALFNIDRERQGHQNRMCPLPKRVFLAIQKNKPISKKEMIQRSKRIYEQLPEVQKKREEEKRKSEYKSYRLRAQLYKKRVTNQLLGRKVPWD

SEQ ID NO: 37174 - protein, 2561 aa, Homo sapiens
MEPEDLPWPGELEEEEEEEEEEEEEEEEAAAAAAANVDDVVVVEEVEEEAGRELDSDSHYGPQHLESIDDEEDEEAKAWLQAHPGRILPPLSPPQHRYSEGERTSLEKIVPLTCHVWQQIVYQGNSRTQISDTNVVCLETTAQRGSGDDQKTESWHCLPQEMDSSQTLDTSQTRFNVRTEDTEVTDFPSLEEGILTQSENQVKEPNRDLFCSPLLVIQDSFASPDLPLLTCLTQDQEFAPDSLFHQSELSFAPLRGIPDKSEDTEWSSRPSEVSEALFQATAEVASDLASSRFSVSQHPLIGSTAVGSQCPFLPSEQGNNEETISSVDELKIPKDCDRYDDLCSYMSWKTRKDTQWPENNLADKDQVSVATSFDITDENIATKRSDHFDAARSYGQYWTQEDSSKQAETYLTKGLQGKVESDVITLDGLNENAVVCSERVAELQRKPTRESEYHSSDLRMLRMSPDTVPKAPKHLKAGDTSKGGIAKVTQSNLKSGITTTPVDSDIGSHLSLSLEDLSQLAVSSLETTTGQHTDTLNQKTLADTHLTEETLKVTAIPEPADQKTATPTVLSSSHSHRGKPSIFYQQGLPDSHLTEEALKVSAAPGLADQTTGMSTLTSTSYSHREKPGTFYQQELPESNLTEEPLEVSAAPGPVEQKTGIPTVSSTSHSHVEDLLFFYRQTLPDGHLTDQALKVSAVSGPADQKTGTATVLSTPHSHREKPGIFYQQEFADSHQTEETLTKVSATPGPADQKTEIPAVQSSSYSQREKPSILYPQDLADSHLPEEGLKVSAVAGPADQKTGLPTVPSSAYSHREKLLVFYQQALLDSHLPEEALKVSAVSGPADGKTGTPAVTSTSSASSSLGEKPSAFYQQTLPNSHLTEEALKVSIVPGPGDQKTGIPSAPSSFYSHREKPIIFSQQTLPDFLFPEEALKVSAVSVLAAQKTGTPTVSSNSHSHSEKSSVFYQQELPDSDLPRESLKMSAIPGLTDQKTVPTPTVPSGSFSHREKPSIFYQQEWPDSYATEKALKVSTGPGPADQKTEIPAVQSSSYPQREKPSVLYPQVLSDSHLPEESLKVSAFPGPADQMTDTPAVPSTFYSQREKPGIFYQQTLPESHLPKEALKISVAPGLADQKTGTPTVTSTSYSQHREKPSIFHQQALPGTHIPEEAQKVSAVTGPGNQKTWIPRVLSTFYSQREKPGIFYQQTLPGSHIPEEAQKVSPVLGPADQKTGTPTPTSASYSHTEKPGIFYQQVLPDNHPTEEALKISVASEPVDQTTGTPAVTSTSYSQYREKPSIFYQQSLPSSHLTEEAKNVSAVPGPADQKTVIPILPSTFYSHTEKPGVFYQQVLPHSHPTEEALKISVASEPVDQTTGTPTVTSTSYSQHTEKPSIFYQQSLPGSHLTEEAKNVSAVPGPGDRKTGIPTLPSTFYSHTEKPGSFYQQVLPHSHLPEEALEVSVAPGPVDQTIGTPTVTSPSSSFGEKPIVIYKQAFPEGHLPEESLKVSVAPGPVGQTTGAPTITSPSYSQHRAKSGSFYQLALLGSQIPEEALRVSSAPGPADQTTGIPTITSTSYSFGEKPIVNYKQAFPDGHLPEEALKVSIVSGPTEKKTDIPAGPLGSSALGEKPITFYRQALLDSPLNKEVVKVSAAPGPADQKTETLPVHSTSYSNRGKPVIFYQQTLSDSHLPEEALKVPPVPGPDAQKTETPSVSSSLYSYREKPIVFYQQALPDSELTQEALKVSAVPQPADQKTGLSTVTSSFYSHTEKPNISYQQELPDSHLTEEALKVSNVPGPADQKTGVSTVTSTSYSHREKPIVSYQRELPHFTEAGLKILRVPGPADQKTGINILPSNSYPQREHSVISYEQELPDLTEVTLKAIGVPGPADQKTGIQIASSSSYSNREKASIFHQQELPDVTEEALNVFVVPGQGDRKTEIPTVPLSYYSRREKPSVISQQELPDSHLTEEALKVSPVSIPAEQKTGIPIGLSSSYSHSHKEKLKISTVHIPDDQKTEFPAATLSSYSQIEKPKISTVIGPNDQKTPSQTAFHSSYSQTVKPNILFQQQLPDRDQSKGILKISAVPELTDVNTGKPVSLSSSYFHREKSNIFSPQELPGSHVTEDVLKVSTIPGPAGQKTVLPTALPSSFSHREKPDIFYQKDLPDRHLTEDALKISSALGQADQITGLQTVPSGTYSHGENHKLVSEHVQRLIDNLNSSDSSVSSNNVLLNSQADDRVVINKPESAGFRDVGSEEIQDAENSAKTLKEIRTLLMEAENMALKRCNFPAPLARFRDISDISFIQSKKVVCFKEPSSTGVSNGDLLHRQPFTEESPSSRCIQKDIGTQTNLKCRRGIENWEFISSTTVRSPLQEAESKVSMALEETLRQYQAAKSVMRSEPEGCSGTIGNKIIIPMMTVIKSDSSSDASDGNGSCSWDSNLPESLESVSDVLLNFFPYVSPKTSITDSREEEGVSESEDGGGSSVDSLAAHVKNLLQCESSLNHAKEILRNAEEEESRVRAHAWNMKFNLAHDCGYSISELNEDDRRKVEEIKAELFGHGRTTDLSKGLQS

SEQ ID NO: 37175 - protein, 647 aa, Homo sapiens
MAAPAGGGGSAVSVLAPNGRRHTVKVTPSTVLLQVLEDTCRRQDFNPCEYDLKFQRSVLDLSLQWRFANLPNNAKLEMVPASRSREGPENMVRIALQLDDGSRLQDSFCSGQTLWELLSHFPQIRECLQHPGGATPVCVYTRDEVTGEAALRGTTLQSLGLTGGSATIRFVMKCYDPVGKTPGSLGSSASAGQAAASAPLPLESGELSRGDLSRPEDADTSGPCCEHTQEKQSTRAPAAAPFVPFSGGGQRLGGPPGPTRPLTSSSAKLPKSLSSPGGPSKPKKSKSGQDPQQEQEQERERDPQQEQERERPVDREPVDREPVVCHPDLEERLQAWPAELPDEFFELTVDDVRRRLAQLKSERKRLEEAPLVTKAFREAQIKEKLERYPKVALRVLFPDRYVLQGFFRPSETVGDLRDFVRSHLGNPELSFYLFITPPKTVLDDHTQTLFQPQLGDRVAPFTLGPSLKRCLGPEQRTRLPVVGDGGDVDSGRLLFWGPSRGRASPSTGQPPCHPVCRPSSPPSPRPSSGDPSRVKAGHKHVGTGRANLFPAALVHLGAEEPAGVYLEPGLLEHAISPSAADVLVARYMSRAAGSPSPLPAPDPAPKSEPAAEEGALVPPEPIPGTAQPVKRSLGKVPKWLKLPASKR

SEQ ID NO: 37176 - protein, 553 aa, Homo sapiens
MAAPAGGGGSAVSVLAPNGRRHTVKVTPSTVLLQVLEDTCRRQDFNPCEYDLKFQRSVLDLSLQWRFANLPNNAKLEMVPASRSREGPENMVRIALQLDDGSRLQDSFCSGQTLWELLSHFPQIRECLQHPGGATPVCVYTRDEVTGEAALRGTTLQSLGLTGGSATIRFVMKCYDPVGKTPGSLGSSASAGQAAASAPLPLESGELSRGDLSRPEDADTSGPCCEHTQEKQSTRAPAAAPFVPFSGGGQRLGGPPGPTRPLTSSSAKLPKSLSSPGGPSKPKKSKSGQDPQQEQEQERERDPQQEQERERPVDREPVDREPVVCHPDLEERLQAWPAELPDEFFELTVDDVRRRLAQLKSERKRLEEAPLVTKAFREAQIKEKLERYPKVALRVLFPDRYVLQGFFRPSETVGDLRDFVRSHLGNPELSFYLFITPPKTVLDDHTQTLFQANLFPAALVHLGAEEPAGVYLEPGLLEHAISPSAADVLVARYMSRAAGSPSPLPAPDPAPKSEPAAEEGALVPPEPIPGTAQPVKRSLGKVPKWLKLPASKR

SEQ ID NO: 37177 - protein, 349 aa, Homo sapiens
MVPASRSREGPENMVRIALQLDDGSRLQDSFCSGQTLWELLSHFPQIRECLQHPGGATPVCVYTRDEVTGEAALRGTTLQSLGLTGGSATIRFVMKCYDPVGKTPGSLGSSASAGQAAASAPLPLESGELSRGDLSRPEDADTSGPCCEHTQEKQSTRAPAAAPFVPFSGGGQRLGGPPGPTRPLTSSSAKLPKSLSSPGGPSKPKKSKSGQDPQQEQEQERERDPQQEQERERPVDREPVDREPVVCHPDLEERLQAWPAELPDEFFELTVDDVRRRLAQLKSERKRLEEAPLVTKAFREAQIKEKLERYPKRRSLSLSPRLESVVPSQLTASSASRVQVVLLPQPPK

SEQ ID NO: 37178 - protein, 326 aa, Homo sapiens
MEFLSEKFALKSPPSKNSDFYMGAGGPLEHVMETLDNESFYSKASAGKCVQAFGPLPRAEHHVRLERTSPCQDSSVNYGITKVEGQPLHTELNRAMDNCNSLRMSPVKGMQEKGELDELGDKCDSNVSSSKKRRHRTTFTSLQLEELEKVFQKTHYPDVYVREQLALRTELTEARVQVWFQNRRAKWRKRERYGQIQQAKSHFAATYDISVLPRTDSYPQIQNNLWAGNASGGSVVTSCMLPRDTSSCMTPYSHSPRTDSSYTGFSNHQNQFSHVPLNNFFTDSLLTGATNGHAFETKPEFERRSSSIAVLRMKAKEHTANISWAM

SEQ ID NO: 37179 - protein, 343 aa, Homo sapiens
MDPEHCAPFRVGPAPGPYVASGDEPPGPQGTPAAAPHLHPAPPRGPRLTRFPACGPLEPYLPEPAKPPAKYLQDLGPGPALNGGHFYEGPAEAEEKTSKAASFPQLPLDCRGGPRDGPSNLQGSPGPCLASLHLPLSPGLPDSMELAKNKSKKRRNRTTFSTFQLEELEKVFQKTHYPDVYAREQLALRTDLTEARVQVWFQNRRAKWRKRERYGKIQEGRNPFTAAYDISVLPRTDSHPQLQNSLWASPGSGSPGGPCLVSPEGIPSPCMSPYSHPHGSVAGFMGVPAPSAAHPGIYSIHGFPPTLGGHSFEPSSDGDYKSPSLVSLRVKPKEPPGLLNWTT

SEQ ID NO: 37180 - protein, 411 aa, Homo sapiens
MNAETCVSYCESPAAAMDAYYSPVSQSREGSSPFRAFPGGDKFGTTFLSAAAKAQGFGDAKSRARYGAGQQDLATPLESGAGARGSFNKFQPQPSTPQPQPPPQPQPQQQQPQPQPPAQPHLYLQRGACKTPPDGSLKLQEGSSGHSAALQVPCYAKESSLGEPELPPDSDTVGMDSSYLSVKEAGVKGPQDRASSDLPSPLEKADSESNKGKKRRNRTTFTSYQLEELEKVFQKTHYPDVYAREQLAMRTDLTEARVQVWFQNRRAKWRKRERFGQMQQVRTHFSTAYELPLLTRAENYAQIQNPSWLGNNGAASPVPACVVPCDPVPACMSPHAHPPGSGASSVTDFLSVSGAGSHVGQTHMGSLFGAASLSPGLNGYELNGEPDRKTSSIAALRMKAKEHSAAISWAT

SEQ ID NO: 37181 - protein, 209 aa, Homo sapiens
MRSTILLFCLLGSTRSLPQLKPALGLPPTKLAPDQGTLPNQQQSNQVFPSLSLIPLTQMLTLGPDLHLLNPAAGMTPGTQTHPLTLGGLNVQQQLHPHVLPIFVTQLGAQGTILSSEELPQIFTSLIIHSLFPGGILPTSQAGANPDVQDGSLPAGGAGVNPATQGTPAGRLPTPSGTDDDFAVTTPAGIQRSTHAIEEATTESANGIQ

SEQ ID NO: 37182 - protein, 208 aa, Homo sapiens
MRSTILLFCLLGSTRSLPLKPALGLPPTKLAPDQGTLPNQQQSNQVFPSLSLIPLTQMLTLGPDLHLLNPAAGMTPGTQTHPLTLGGLNVQQQLHPHVLPIFVTQLGAQGTILSSEELPQIFTSLIIHSLFPGGILPTSQAGANPDVQDGSLPAGGAGVNPATQGTPAGRLPTPSGTDDDFAVTTPAGIQRSTHAIEEATTESANGIQ

SEQ ID NO: 37183 - protein, 751 aa, Homo sapiens
MPALGWAVAAILMLQTAMAEPSPGTLPRKAGVFSDLSNQELKAVHSFLWSKKELRLQPSSTTTMAKNTVFLIEMLLPKKYHVLRFLDKGERHPVREARAVIFFGDQEHPNVTEFAVGPLPGPCYMRALSPRPGYQSSWASRPISTAEYALLYHTLQEATKPLHQFFLNTTGFSFQDCHDRCLAFTDVAPRGVASGQRRSWLIIQRYVEGYFLHPTGLELLVDHGSTDAGHWAVEQVWYNGKFYGSPEELARKYADGEVDVVVLEDPLPGGKGHDSTEEPPLFSSHKPRGDFPSPIHVSGPRLVQPHGPRFRLEGNAVLYGGWSFAFRLRSSSGLQVLNVHFGGERIAYEVSVQEAVALYGGHTPAGMQTKYLDVGWGLGSVTHELAPGIDCPETATFLDTFHYYDADDPVHYPRALCLFEMPTGVPLRRHFNSNFKGGFNFYAGLKGQVLVLRTTSTVYNYDYIWDFIFYPNGVMEAKMHATGYVHATFYTPEGLRHGTRLHTHLIGNIHTHLVHYRVDLDVAGTKNSFQTLQMKLENITNPWSPRHRVVQPTLEQTQYSWERQAAFRFKRKLPKYLLFTSPQENPWGHKRTYRLQIHSMADQVLPPGWQEEQAITWARYPLAVTKYRESELCSSSIYHQNDPWHPPVVFEQFLHNNENIENEDLVAWVTVGFLHIPHSEDIPNTATPGNSVGFLLRPFNFFPEDPSLASRDTVIVWPRDNGPNYVQRWIPEDRDCSMPPPFSYNGTYRPV

SEQ ID NO: 37184 - protein, 770 aa, Homo sapiens
MPALGWAVAAILMLQTAMAEPSPGTLPRKAGVFSDLSNQELKAVHSFLWSKKELRLQPSSTTTMAKNTVFLIEMLLPKKYHVLRFLDKGERHPVREARAVIFFGDQEHPNVTEFAVGPLPGPCYMRALSPRPGYQSSWASRPISTAEYALLYHTLQEATKPLHQFFLNTTGFSFQDCHDRCLAFTDVAPRGVASGQRRSWLIIQRYVEGYFLHPTGLELLVDHGSTDAGHWAVEQVWYNGKFYGSPEELARKYADGEVDVVVLEDPLPGGKGHDSTEEPPLFSSHKPRGDFPSPIHVSGPRLVQPHGPRFRLEGNAVLYGGWSFAFRLRSSSGLQVLNVHFGGERIAYEVSVQEAVALYGGHTPAGMQTKYLDVGWGLGSVTHELAPGIDCPETATFLDTFHYYDADDPVHYPRALCLFEMPTGVPLRRHFNSNFKGGFNFYAGLKGQVLVLRTTSTVYNYDYIWDFIFYPNGVMEAKMHATGYVHATFYTPEGLRHGTRLHTHLIGNIHTHLVHYRVDLDVAGTKNSFQTLQMKLENITNPWSPRHRVVQPTLEQTQYSWERQAAFRFKRKLPKYLLFTSPQENPWGHKRTYRLQIHSMADQVLPPGWQEEQAITWARTEGGQPRALSQAASPVPGRYPLAVTKYRESELCSSSIYHQNDPWHPPVVFEQFLHNNENIENEDLVAWVTVGFLHIPHSEDIPNTATPGNSVGFLLRPFNFFPEDPSLASRDTVIVWPRDNGPNYVQRWIPEDRDCSMPPPFSYNGTYRPV

SEQ ID NO: 37185 - protein, 627 aa, Homo sapiens
MRALSPRPGYQSSWASRPISTAEYALLYHTLQEATKPLHQFFLNTTGFSFQDCHDRCLAFTDVAPRGVASGQRRSWLIIQRYVEGYFLHPTGLELLVDHGSTDAGHWAVEQVWYNGKFYGSPEELARKYADGEVDVVVLEDPLPGGKGHDSTEEPPLFSSHKPRGDFPSPIHVSGPRLVQPHGPRFRLEGNAVLYGGWSFAFRLRSSSGLQVLNVHFGGERIAYEVSVQEAVALYGGHTPAGMQTKYLDVGWGLGSVTHELAPGIDCPETATFLDTFHYYDADDPVHYPRALCLFEMPTGVPLRRHFNSNFKGGFNFYAGLKGQVLVLRTTSTVYNYDYIWDFIFYPNGVMEAKMHATGYVHATFYTPEGLRHGTRLHTHLIGNIHTHLVHYRVDLDVAGTKNSFQTLQMKLENITNPWSPRHRVVQPTLEQTQYSWERQAAFRFKRKLPKYLLFTSPQENPWGHKRTYRLQIHSMADQVLPPGWQEEQAITWARYPLAVTKYRESELCSSSIYHQNDPWHPPVVFEQFLHNNENIENEDLVAWVTVGFLHIPHSEDIPNTATPGNSVGFLLRPFNFFPEDPSLASRDTVIVWPRDNGPNYVQRWIPEDRDCSMPPPFSYNGTYRPV

SEQ ID NO: 37186 - protein, 249 aa, Homo sapiens
MPALGWAVAAILMLQTAMAEPSPGTLPRKAGVFSDLSNQELKAVHSFLWSKKELRLQPSSTTTMAKNTVFLIEMLLPKKYHVLRFLDKGERHPVREARAVIFFGDQEHPNVTEFAVGPLPGPCYMRALSPRPGYQSSWASRPISTAEYALLYHTLQEATKPLHQFFLNTTGFSFQDCHDRCLAFTDVAPRGVASGQRRSWLIIQRYVEGYFLHPTGLELLVDHGSTDAGHWAVEQVWYNGKFYGSPEEL

SEQ ID NO: 37187 - protein, 751 aa, Homo sapiens; identical to SEQ ID NO: 37183

SEQ ID NO: 37188 - protein, 337 aa, Homo sapiens
MPALGWAVAAILMLQTAMAEPSPGTLPRKAGVFSDLSNQELKAVHSFLWSKKELRLQPSSTTTMAKNTVFLIEMLLPKKYHVLRFLDKGERHPVREARAVIFFGDQEHPNVTEFAVGPLPGPCYMRALSPRPGYQSSWASRPISTAEYALLYHTLQEATKPLHQFFLNTTGFSFQDCHDRCLAFTDVAPRGVASGQRRSWLIIQRYVEGYFLHPTGLELLVDHGSTDAGHWAVEQVWYNGKFYGSPEELARKYADGEVDVVVLEDPLPGGKGHDSTEEPPLFSSHKPRGDFPSPIHVSGPRLVQPHGPRFRLEGNAVLYGGWSFAFRLRSSSGLQVL

SEQ ID NO: 37189 - protein, 193 aa, Homo sapiens
MEAKMHATGYVHATFYTPEGLRHGTRLHTHLIGNIHTHLVHYRVDLDVAGTKNSFQTLQMKLENITNPWSPRHRVVQPTLEQTQYSWERQAAFRFKRKLPKYLLFTSPQENPWGHKRTYRLQIHSMADQVLPPGWQEEQAITWARYPLAVTKYRESELCSSSIYHQNDPWHPWSLSSFFTTTRTLKMRTWWPG

SEQ ID NO: 37190 - protein, 751 aa, Homo sapiens; identical to SEQ ID NO: 37183

SEQ ID NO: 37191 - protein, 563 aa, Homo sapiens
MSRIGGAGLPAAALTGPGRFRMAREEPAPAALAAAGQPGGGRGGERALQGPGVARRGRPSLSRAKLHGLRHMCAGRTAAGGSFQRRALWVLAFCTSFGLLLSWSSNRLLYWLSFPSHTRVHREWSRQLPFPAVTVCNNNPLRFPRLSKGDLYYAGHWLGLLLPNRTARPLVSELLRGDEPRRQWFRKLADFRLFLPPRHFEGISAAFMDRLGHQLEDMLLSCKYRGELCGPHNFSSVFTKYGKCYMFNSGEDGKPLLTTVKGGTGNGLEIMLDIQQDEYLPIWGETEETTFEAGVKVQIHSQSEPPFIQELGFGVAPGFQTFVATQEQRLTYLPPPWGECRSSEMGLDFFPVYSITACRIDCETRYIVENCNCRMVHMPGDAPFCTPEQHKECAEPALGLLAEKDSNYCLCRTPCNLTRYNKELSMVKIPSKTSAKYLEKKFNKSEKYISENILVLDIFFEALNYETIEQKKAYEVAALLGDIGGQMGLFIGASILTILELFDYIYELIKEKLLDLLGKEEDEGSHDENVSTCDTMPNHSETISHTVNVPLQTTLGTLEEIAC

SEQ ID NO: 37192 - protein, 512 aa, Homo sapiens
MDLKESPSEGSLQPSSIQIFANTSTLHGIRHIFVYGPLTIRRVLWAVAFVGSLGLLLVESSERVSYYFSYQHVTKVDEVVAQSLVFPAVTLCNLNGFRFSRLTTNDLYHAGELLALLDVNLQIPDPHLADPSVLEALRQKANFKHYKPKQFSMLEFLHRVGHDLKDMMLYCKFKGQECGHQDFTTVFTKYGKCYMFNSGEDGKPLLTTVKGGTGNGLEIMLDIQQDEYLPIWGETEETTFEAGVKVQIHSQSEPPFIQELGFGVAPGFQTFVATQEQRLTYLPPPWGECRSSEMGLDFFPVYSITACRIDCETRYIVENCNCRMVHMPGDAPFCTPEQHKECAEPALGLLAEKDSNYCLCRTPCNLTRYNKELSMVKIPSKTSAKYLEKKFNKSEKYISENILVLDIFFEALNYETIEQKKAYEVAALLGDIGGQMGLFIGASILTILELFDYIYELIKEKLLDLLGKEEDEGSHDENVSTCDTMPNHSETISHTVNVPLQTTLGTLEEIAC

SEQ ID NO: 37193 - protein, 203 aa, Homo sapiens
MFNSGEDGKPLLTTVKGGTGNGLEIMLDIQQDEYLPIWGETEETTFEAGVKVQIHSQSEPPFIQELGFGVAPGFQTFVATQEQRLTYLPPPWGECRSSEMGLDFFPVYSITACRIDCETRYIVENCNCRMVHMPGDAPFCTPEQHKECAEPALGLLAEKDSNYCLCRTPCNLTRYNKELSMVKIPSKTSAKYLEKKFNKSEKY

SEQ ID NO: 37194 - protein, 574 aa, Homo sapiens
MELKAEEEEVGGVQPVSIQAFASSSTLHGLAHIFSYERLSLKRALWALCFLGSLAVLLCVCTERVQYYFHYHHVTKLDEVAASQLTFPAVTLCNLNEFRFSQVSKNDLYHAGELLALLNNRYEIPDTQMADEKQLEILQDKANFRSFKPKPFNMREFYDRAGHDIRDMLLSCHFRGEVCSAEDFKVVFTRYGKCYTFNSGRDGRPRLKTMKGGTGNGLEIMLDIQQDEYLPVWGETDETSFEAGIKVQIHSQDEPPFIDQLGFGVAPGFQTFVACQEQRLIYLPPPWGTCKAVTMDSDLDFFDSYSITACRIDCETRYLVENCNCRMVHMPGDAPYCTPEQYKECADPALDFLVEKDQEYCVCEMPCNLTRYGKELSMVKIPSKASAKYLAKKFNKSEQYIGENILVLDIFFEVLNYETIEQKKAYEIAGLLGELLMTPVPFSCHGHGVAPYHPKAGCSLLSHEGPPPQRPFPKPCCLGDIGGQMGLFIGASILTVLELFDYAYEVIKHKLCRRGKCQKEAKRSSADKGVALSLDDVKRHNPCESLRGHPAGMTYAANILPHHPARGTFEDFTC

SEQ ID NO: 37195 - protein, 528 aa, Homo sapiens
MELKAEEEEVGGVQPVSIQAFASSSTLHGLAHIFSYERLSLKRALWALCFLGSLAVLLCVCTERVQYYFHYHHVTKLDEVAASQLTFPAVTLCNLNEFRFSQVSKNDLYHAGELLALLNNRYEIPDTQMADEKQLEILQDKANFRSFKPKPFNMREFYDRAGHDIRDMLLSCHFRGEVCSAEDFKVVFTRYGKCYTFNSGRDGRPRLKTMKGGTGNGLEIMLDIQQDEYLPVWGETDETSFEAGIKVQIHSQDEPPFIDQLGFGVAPGFQTFVACQEQRLIYLPPPWGTCKAVTMDSDLDFFDSYSITACRIDCETRYLVENCNCRMVHMPGDAPYCTPEQYKECADPALDFLVEKDQEYCVCEMPCNLTRYGKELSMVKIPSKASAKYLAKKFNKSEQYIGENILVLDIFFEVLNYETIEQKKAYEIAGLLGDIGGQMGLFIGASILTVLELFDYAYEVIKHKLCRRGKCQKEAKRSSADKGVALSLDDVKRHNPCESLRGHPAGMTYAANILPHHPARGTFEDFTC

SEQ ID NO: 37196 - protein, 562 aa, Homo sapiens
MPIQIFCSMSFSSGEEAPGPLGDIWGPHHHQQQQDISESEEEEEEKEKEAVRKEASEGHSPMDLVAFANSCTLHGTNHIFVEGGPGPRQVLWAVAFVLALGAFLCQVGDRVAYYLSYPHVTLLNEVATTELAFPAVTLCNTNAVRLSQLSYPDLLYLAPMLGLDESDDPGVPLAPPGPEAFSGEPFNLHRFYNRSCHRLEDMLLYCSYQGGPCGPHNFSVVFTRYGKCYTFNSGRDGRPRLKTMKGGTGNGLEIMLDIQQDEYLPVWGETDETSFEAGIKVQIHSQDEPPFIDQLGFGVAPGFQTFVACQEQRLIYLPPPWGTCKAVTMDSDLDFFDSYSITACRIDCETRYLVENCNCRMVHMPGDAPYCTPEQYKECADPALDFLVEKDQEYCVCEMPCNLTRYGKELSMVKIPSKASAKYLAKKFNKSEQYIGENILVLDIFFEVLNYETIEQKKAYEIAGLLGDIGGQMGLFIGASILTVLELFDYAYEVIKHKLCRRGKCQKEAKRSSADKGVALSLDDVKRHNPCESLRGHPAGMTYAANILPHHPARGTFEDFTC

SEQ ID NO: 37197 - protein, 549 aa, Homo sapiens
MKPTSGPEEARRPASDIRVFASNCSMHGLGHVFGPGSLSLRRGMWAAAVVLSVATFLYQVAERVRYYREFHHQTALDERESHRLIFPAVTLCNINPLRRSRLTPNDLHWAGSALLGLDPAEHAAFLRALGRPPAPPGFMPSPTFDMAQLYARAGHSLDDMLLDCRFRGQPCGPENFTTIFTRMGKCYTFNSGADGAELLTTTRGGMGNGLDIMLDVQQEEYLPVWRDNEETPFEVGIRVQIHSQEEPPIIDQLGLGVSPGYQTFVSCQQQQLSFLPPPWGDCSSASLNPNYEPEPSDPLGSPSPSPSPPYTLMGCRLACETRYVARKCGCRMVYMPGDVPVCSPQQYKNCAHPAIDAMLRKDSCACPNPCASTRYAKELSMVRIPSRAAARFLARKLNRSEAYIAENVLALDIFFEALNYETVEQKKAYEMSELLGDIGGQMGLFIGASLLTILEILDYLCEVFRDKVLGYFWNRQHSQRHSSTNLLQEGLGSHRTQVPHLSLGPSTLLCSEDLPPLPVPSPRLSPPPTAPATLSHSSRPAVCVLGAPP

SEQ ID NO: 37198 - protein, 531 aa, Homo sapiens
MKPTSGPEEARRPASDIRVFASNCSMHGLGHVFGPGSLSLRRGMWAAAVVLSVATFLYQVAERVRYYREFHHQTALDERESHRLIFPAVTLCNINPLRRSRLTPNDLHWAGSALLGLDPAEHAAFLRALGRPPAPPGFMPSPTFDMAQLYARAGHSLDDMLLDCRFRGQPCGPENFTTIFTRMGKCYTFNSGADGAELLTTTRGGMGNGLDIMLDVQQEEYLPVWRDNEETPFEVGIRVQIHSQEEPPIIDQLGLGVSPGYQTFVSCQQQQLSFLPPPWGDCSSASLNPNYEPEPSDPLGSPSPSPSPPYTLMGCRLACETRYVARKCGCRMVYMPGDVPVCSPQQYKNCAHPAIDAMLRKDSCACPNPCASTRYAKELSMVRIPSRAAARFLARKLNRSEAYIAENVLALDIFFEALNYETVEQKKAYEMSELLGDIGGQMGLFIGASLLTILEILDYLCEVFRDKVLGYFWNRQHSQRHSSTNLLQEGLGSHRTQVPHLSLGPRPPTPPCAVTKTLSASHRTCYLVTQL

SEQ ID NO: 37199 - protein, 543 aa, Homo sapiens
MKPTSGPEEARRPASDIRVFASNCSMHGLGHVFGPGSLSLRRGMWAAAVVLSVATFLYQVAERVRYYREFHHQTALDERESHRLIFPAVTLCNINPLRRSRLTPNDLHWAGSALLGLDPAEHAAFLRALGRPPAPPGFMPSPTFDMAQLYARAGHSLDDMLLDCRFRGQPCGPENFTTIFTRMGKCYTFNSGADGAELLTTTRGGMGNGLDIMLDVQQEEYLPVWRDNEETPFEVGIRVQIHSQEEPPIIDQLGLGVSPGYQTFVSCQQQQLSFLPPPWGDCSSASLNPNYEPEPSDPLGSPSPSPSPPYTLMGCRLACETRYVARKCGCRMVYMPGDVPVCSPQQYKNCAHPAIDAMLRKDSCACPNPCASTRYAKELSMVRIPSRAAARFLARKLNRSEAYIAENVLALDIFFEALNYETVEQKKAYEMSELLGDIGGQMGLFIGASLLTILEILDYLCEVFRDKVLGYFWNRQHSQRHSSTNLTSHPSLCRHQDSLRLPPHLLPCHTALDLLSVSSEPRPDILDMPSLHVAFPSSPQIKS

SEQ ID NO: 37200 - protein, 647 aa, Homo sapiens
MLSGAAGAARRGGAALAPSLTRSLAGTHAGADSCAGADKGSHKETIEERDKRQQRQQRQRQHQGCGAAGSGSDSPTSGPHPVPVLFPLALSLEEQPLPPLPLGRAPGLLAREGQGREALASPSSRGQMPIEIVCKIKFAEEDAKPKEKEAGDEQSLLGAVAPGAAPRDLATFASTSTLHGLGRACGPGPHGLRRTLWALALLTSLAAFLYQAAGLARGYLTRPHLVAMDPAAPAPVAGFPAVTLCNINRFRHSALSDADIFHLANLTGLPPKDRDGHRAAGLRYPEPDMVDILNRTGHQLADMLKSCNFSGHHCSASNFSVVYTRYGKCYTFNADPRSSLPSRAGGMGSGLEIMLDIQQEEYLPIWRETNETSFEAGIRVQIHSQEEPPYIHQLGFGVSPGFQTFVSCQEQRLTYLPQPWGNCRAESELREPELQGYSAYSVSACRLRCEKEAVLQRCHCRMVHMPDSLGGGPEGPCFCPTPCNLTRYGKEISMVRIPNRGSARYLARKYNRNETYIRENFLVLDVFFEALTSEAMEQRAAYGLSALLGDLGGQMGLFIGASILTLLEILDYIYEVSWDRLKRVWRRPKTPLRTSTGGISTLGLQELKEQSPCPSRGRVEGGGVSSLLPNHHHPHGPPGGLFEDFAC

SEQ ID NO: 37201 - protein, 666 aa, Homo sapiens
MLSGAAGAARRGGAALAPSLTRSLAGTHAGADSCAGADKGSHKETIEERDKRQQRQQRQRQHQGCGAAGSGSDSPTSGPHPVPVLFPLALSLEEQPLPPLPLGRAPGLLAREGQGREALASPSSRGQMPIEIVCKIKFAEEDAKPKEKEAGDEQSLLGAVAPGAAPRDLATFASTSTLHGLGRACGPGPHGLRRTLWALALLTSLAAFLYQAAGLARGYLTRPHLVAMDPAAPAPVAGFPAVTLCNINRFRHSALSDADIFHLANLTGLPPKDRDGHRAAGLRYPEPDMVDILNRTGHQLADMLKSCNFSGHHCSASNFSVVYTRYGKCYTFNADPRSSLPSRAGGMGSGLEIMLDIQQEEYLPIWRETNETSFEAGIRVQIHSQEEPPYIHQLGFGVSPGFQTFVSCQEQRLTYLPQPWGNCRAESELREPELQGYSAYSVSACRLRCEKEAVLQRCHCRMVHMPGNETICPPNIYIECADHTLDSLGGGPEGPCFCPTPCNLTRYGKEISMVRIPNRGSARYLARKYNRNETYIRENFLVLDVFFEALTSEAMEQRAAYGLSALLGDLGGQMGLFIGASILTLLEILDYIYEVSWDRLKRVWRRPKTPLRTSTGGISTLGLQELKEQSPCPSRGRVEGGGVSSLLPNHHHPHGPPGGLFEDFAC

SEQ ID NO: 37202 - protein, 756 aa, Homo sapiens
MHLKIVLAFLALSLITIFALAYVLLTSPGGSSQPPHCPSVSHRAQPWPHPGQSQLFADLSREELTAVMRFLTQRLGPGLVDAAQAQPSDNCIFSVELQLPPKAAALAHLDRGSPPPAREALAIVLFGGQPQPNVSELVVGPLPHPSYMRDVTVERHGGPLPYHRRPVLRAEFTQMWRHLKEVELPKAPIFLSSTFNYNGSTLAAVHATPRGLRSGDRATWMALYHNISGVGLFLHPVGLELLLDHRALDPAHWTVQQVFYLGHYYADLGQLEREFKSGRLEVVRVPLPPPNGASSLRSRNSPGPLPPLQFSPQGSQYSVQGNLVVSSLWSFTFGHGVFSGLRIFDVRFQGERIAYEVSVQECVSIYGADSPKTMLTRYLDSSFGLGRNSRGLVRGVDCPYQATMVDIHILVGKGAVQLLPGAVCVFEEAQGLPLRRHHNYLQNHFYGGLASSALVVRSVSSVGNYDYIWDFVLYPNGALEGRVHATGYINTAFLKGGEEGLLFGNRVGERVLGTVHTHAFHFKLDLDVAGLKNWVVAEDVVFKPVAAPWNPEHWLQRPQLTRQVLGKEDLTAFSLGSPLPRYLYLASNQTNAWGHQRGYRIQIHSPLGIHIPLESDMERALSWGRYQLVVTQRKEEESQSSSIYHQNDIWTPTVTFADFINNETLLGEDLVAWVTASFLHIPHAEDIPNTVTLGNRVGFLLRPYNFFDEDPSIFSPGSVYFEKGQDAGLCSINPVACLPDLAACVPDLPPFSYHGF

SEQ ID NO: 37203 - protein, 729 aa, Homo sapiens
MHLKIVLAFLALSLITIFALAYVLLTSPGGSSQPPHCPSVSHRAQPWPHPGQSQLFADLSREELTAVMRFLTQRLGPGLVDAAQAQPSDNCIFSVELQLPPKAAALAHLDRGSPPPAREALAIVLFGGQPQPNVSELVVGPLPHPSYMRDVTVERHGGPLPYHRRPVLRAEFTQMWRHLKEVELPKAPIFLSSTFNYNGSTLAAVHATPRGLRSGDRATWMALYHNISGVGLFLHPVGLELLLDHRALDPAHWTVQQVFYLGHYYADLGQLEREFKSGRLEVVRVPLPPPNGASSLRSRNSPGPLPPLQFSPQGSQYSVQGNLVVSSLWSFTFGHGVFSGLRIFDVRFQGERIAYEVSVQECVSIYGADSPKTMLTRYLDSSFGLGRNSRGLVRGVDCPYQATMVDIHILVGKGAVQLLPGAVCVFEEAQGLPLRRHHNYLQNHFYGGLASSALVVRSVSSVGNYDYIWDFVLYPNGALEGRVHATGYINTAFLKGGEEGLLFGNRVGERVLGTVHTHAFHFKLDLDVAGLKNWVVAEDVVFKPVAAPWNPEHWLQRPQLTRQVLGKEDLTAFSLGSPLPRYLYLASNQTNAWGHQRGYQLVVTQRKEEESQSSSIYHQNDIWTPTVTFADFINNETLLGEDLVAWVTASFLHIPHAEDIPNTVTLGNRVGFLLRPYNFFDEDPSIFSPGSVYFEKGQDAGLCSINPVACLPDLAACVPDLPPFSYHGF

SEQ ID NO: 37204 - protein, 763 aa, Homo sapiens
MNQKTILVLLILAVITIFALVCVLLVGRGGDGGEPSQLPHCPSVSPSAQPWTHPGQSQLFADLSREELTAVMRFLTQRLGPGLVDAAQARPSDNCVFSVELQLPPKAAALAHLDRGSPPPAREALAIVFFGRQPQPNVSELVVGPLPHPSYMRDVTVERHGGPLPYHRRPVLFQEYLDIDQMIFNRELPQASGLLHHCCFYKHRGRNLVTMTTAPRGLQSGDRATWFGLYYNISGAGFFLHHVGLELLVNHKALDPARWTIQKVFYQGRYYDSLAQLEAQFEAGLVNVVLIPDNGTGGSWSLKSPVPPGPAPPLQFYPQGPRFSVQGSRVASSLWTFSFGLGAFSGPRIFDVRFQGERLVYEISLQEALAIYGGNSPAAMTTRYVDGGFGMGKYTTPLTRGVDCPYLATYVDWHFLLESQAPKTIRDAFCVFEQNQGLPLRRHHSDLYSHYFGGLAETVLVVRSMSTLLNYDYVWDTVFHPSGAIEIRFYATGYISSAFLFGATGKYGNQVSEHTLGTVHTHSAHFKVDLDVAGLENWVWAEDMVFVPMAVPWSPEHQLQRLQVTRKLLEMEEQAAFLVGSATPRYLYLASNHSNKWGHPRGYRIQMLSFAGEPLPQNSSMARGFSWERYQLAVTQRKEEEPSSSSVFNQNDPWAPTVDFSDFINNETIAGKDLVAWVTAGFLHIPHAEDIPNTVTVGNGVGFFLRPYNFFDEDPSFYSADSIYFRGDQDAGACEVNPLACLPQAAACAPDLPAFSHGGFSHN

SEQ ID NO: 37205 - protein, 312 aa, Homo sapiens
MANNDAVLKRLEQKGAEADQIIEYLKQQVSLLKEKAILQATLREEKKLRVENAKLKKEIEELKQELIQAEIQNGVKQIPFPSGTPLHANSMVSENVIQSTAVTTVSSGTKEQIKGGTGDEKKAKEKIEKKGEKKEKKQQSIAGSADSKPIDVSRLDLRIGCIITARKHPDADSLYVEEVDVGEIAPRTVVSGLVNHVPLEQMQNRMVILLCNLKPAKMRGVLSQAMVMCASSPEKIEILAPPNGSVPGDRITFDAFPGEPDKELNPKKKIWEQIQPDLHTNDECVATYKGVPFEVKGKGVCRAQTMSNSGIK

SEQ ID NO: 37206 - protein, 336 aa, Homo sapiens
MLPAVAVSEPVVLRFMIFCRLLAKMANNDAVLKRLEQKGAEADQIIEYLKQQVSLLKEKAILQATLREEKKLRVENAKLKKEIEELKQELIQAEIQNGVKQIPFPSGTPLHANSMVSENVIQSTAVTTVSSGTKEQIKGGTGDEKKAKEKIEKKGEKKEKKQQSIAGSADSKPIDVSRLDLRIGCIITARKHPDADSLYVEEVDVGEIAPRTVVSGLVNHVPLEQMQNRMVILLCNLKPAKMRGVLSQAMVMCASSPEKIEILAPPNGSVPGDRITFDAFPGEPDKELNPKKKIWEQIQPDLHTNDECVATYKGVPFEVKGKGVCRAQTMSNSGIK

SEQ ID NO: 37207 - protein, 269 aa, Homo sapiens
MANNDAVLKRLEQKGAEADQIIEYLKQQVSLLKEKAILQATLREEKKLRVENAKLKKEIEELKQELIQAEIQNGVKQIPFPSGTPLHANSMVSENVIQSTAVTTVSSGTKEQIKGGTGDEKKAKEKIEKKGEKKEKKQQSIAPRTVVSGLVNHVPLEQMQNRMVILLCNLKPAKMRGVLSQAMVMCASSPEKIEILAPPNGSVPGDRITFDAFPGEPDKELNPKKKIWEQIQPDLHTNDECVATYKGVPFEVKGKGVCRAQTMSNSGIK

SEQ ID NO: 37208 - protein, 312 aa, Homo sapiens; identical to SEQ ID NO: 37205

SEQ ID NO: 37209 - protein, 150 aa, Homo sapiens
MANNDAVLKRLEQKGAEADQIIEYLKQQVSLLKEKAILQATLREEKKLRVENAKLKKEIEELKQELIQAEIQNGVKQIPFPSGTPLHANSMVSENVIQSTAVTTVSSGTKEQIKGGTGDEKKAKEKIEKKGEKKEKKQQSIAGSADSKPI

SEQ ID NO: 37210 - protein, 408 aa, Homo sapiens
MTSKGPEEEHPSVTLFRQYLRIRTVQPKPDYGAAVAFFEETARQLGLGCQKVEVAPGYVVTVLTWPGTNPTLSSILLNSHTDVVPVFKEHWSHDPFEAFKDSEGYIYARGAQDMKCVSIQYLEAVRRLKVEGHRFPRTIHMTFVPDEEVGGHQGMELFVQRPEFHALRAGFALDEGIANPTDAFTVFYSERSPWWVRVTSTGRPGHASRFMEDTAAEKLHKVVNSILAFREKEWQRLQSNPHLKEGSVTSVNLTKLEGGVAYNVIPATMSASFDFRVAPDVDFKAFEEQLQSWCQAAGEGVTLEFAQKWMHPQVTPTDDSNPWWAAFSRVCKDMNLTLEPEIMPAATDNRYIRAVGVPALGFSPMNRTPVLLHDHDERLHEAVFLRGVDIYTRLLPALASVPALPSDS

SEQ ID NO: 37211 - protein, 498 aa, Homo sapiens
MWGCQAPLSRLPASGETPMSQSWLVSPLATRPSFTARCSHSTRHTGWRWCCFMERPLTLTRGSSWAHCSYCHRGATGPWPLTFQLTTRSAMTSKGPEEEHPSVTLFRQYLRIRTVQPKPDYGAAVAFFEETARQLGLGCQKVEVAPGYVVTVLTWPGTNPTLSSILLNSHTDVVPVFKEHWSHDPFEAFKDSEGYIYARGAQDMKCVSIQYLEAVRRLKVEGHRFPRTIHMTFVPDEEVGGHQGMELFVQRPEFHALRAGFALDEGIANPTDAFTVFYSERSPWWVRVTSTGRPGHASRFMEDTAAEKLHKVVNSILAFREKEWQRLQSNPHLKEGSVTSVNLTKLEGGVAYNVIPATMSASFDFRVAPDVDFKAFEEQLQSWCQAAGEGVTLEFAQKWMHPQVTPTDDSNPWWAAFSRVCKDMNLTLEPEIMPAATDNRYIRAVGVPALGFSPMNRTPVLLHDHDERLHEAVFLRGVDIYTRLLPALASVPALPSDS

SEQ ID NO: 37212 - protein, 373 aa, Homo sapiens
MTSKGPEEEHPSVTLFRQYLRIRTVQPKPDYGTNPTLSSILLNSHTDVVPVFKEHWSHDPFEAFKDSEGYIYARGAQDMKCVSIQYLEAVRRLKVEGHRFPRTIHMTFVPDEEVGGHQGMELFVQRPEFHALRAGFALDEGIANPTDAFTVFYSERSPWWVRVTSTGRPGHASRFMEDTAAEKLHKVVNSILAFREKEWQRLQSNPHLKEGSVTSVNLTKLEGGVAYNVIPATMSASFDFRVAPDVDFKAFEEQLQSWCQAAGEGVTLEFAQKWMHPQVTPTDDSNPWWAAFSRVCKDMNLTLEPEIMPAATDNRYIRAVGVPALGFSPMNRTPVLLHDHDERLHEAVFLRGVDIYTRLLPALASVPALPSDS

SEQ ID NO: 37213 - protein, 343 aa, Homo sapiens
MTSKGPEEEHPSVTLFRQYLRIRTVQPKPDYGAAVAFFEETARQLGLGCQKVEVAPGYVVTVLTWPGTNPTLSSILLNSHTDVVPVFKEHWSHDPFEAFKDSEGYIYARGAQDMKCVSIQYLEAVRRLKVEGHRFPRTIHMTFVPDEEVGGHQGMELFVQRPEFHALRAGFALDEGIANPTDAFTVFYSERSPWWVRVTSTGRPGHASRFMEDTAAEKLAFEEQLQSWCQAAGEGVTLEFAQKWMHPQVTPTDDSNPWWAAFSRVCKDMNLTLEPEIMPAATDNRYIRAVGVPALGFSPMNRTPVLLHDHDERLHEAVFLRGVDIYTRLLPALASVPALPSDS

SEQ ID NO: 37214 - protein, 336 aa, Homo sapiens
MTSKGPEEEHPSVTLFRQYLRIRTVQPKPDYGAAVAFFEETARQLGLGCQKVEVAPGYVVTVLTWPGTNPTLSSILLNSHTDVVPVFKEHWSHDPFEAFKDSEGIANPTDAFTVFYSERSPWWVRVTSTGRPGHASRFMEDTAAEKLHKVVNSILAFREKEWQRLQSNPHLKEGSVTSVNLTKLEGGVAYNVIPATMSASFDFRVAPDVDFKAFEEQLQSWCQAAGEGVTLEFAQKWMHPQVTPTDDSNPWWAAFSRVCKDMNLTLEPEIMPAATDNRYIRAVGVPALGFSPMNRTPVLLHDHDERLHEAVFLRGVDIYTRLLPALASVPALPSDS

SEQ ID NO: 37215 - protein, 425 aa, Homo sapiens
MNYARFITAASAARNPSPIRTMTDILSRGPKSMISLAGGLPNPNMFPFKTAVITVENGKTIQFGEEMMKRALQYSPSAGIPELLSWLKQLQIKLHNPPTIHYPPSQGQMDLCVTSGSQQGLCKVFEMIINPGDNVLLDEPAYSGTLQSLHPLGCNIINVASDESGIVPDSLRDILSRWKPEDAKNPQKNTPKFLYTVPNGNNPTGNSLTSERKKEIYELARKYDFLIIEDDPYYFLQFNKFRVPTFLSMDVDGRVIRADSFSKIISSGLRIGFLTGPKPLIERVILHIQVSTLHPSTFNQLMISQLLHEWGEEGFMAHVDRVIDFYSNQKDAILAAADKWLTGLAEWHVPAAGMFLWIKVKGINDVKELIEEKAVKMGVLMLPGNAFYVDSSAPSPYLRASFSSASPEQMDVAFQVLAQLIKESL

SEQ ID NO: 37216 - protein, 425 aa, Homo sapiens; identical to SEQ ID NO: 37215

SEQ ID NO: 37217 - protein, 180 aa, Homo sapiens
MNYARFITAASAARNPSPIRTMTDILSRGPKSMISLAGGLPNPNMFPFKTAVITVENGKTIQFGEEMMKRALQYSPSAGIPELLSWLKQLQIKLHNPPTIHYPPSQGQMDLCVTSGSQQGLCKVFEMIINPGDNVLLDEPAYSGTLQSLHPLGCNIINVASDESGIVPDSLRDILSRWKP

SEQ ID NO: 37218 - protein, 209 aa, Homo sapiens
MNYARFITAASAARNPSPIRTMTDILSRGPKSMISLAGGLPNPNMFPFKTAVITVENGKTIQFGEEMMKRALQYSPSAGIPELLSWLKQLQIKLHNPPTIHYPPSQGQMDLCVTSGSQQGLCKVFEMIINPGDNVLLDEPAYSGTLQSLHPLGCNIINVASDESGIVPDSLRDILSRWKPEDAKNPQKNTPKFLYTVPNGNNPTGNSLT

SEQ ID NO: 37219 - protein, 429 aa, Homo sapiens
MNYARFITAASAARNPSPIRTMSEKRADILSRGPKSMISLAGGLPNPNMFPFKTAVITVENGKTIQFGEEMMKRALQYSPSAGIPELLSWLKQLQIKLHNPPTIHYPPSQGQMDLCVTSGSQQGLCKVFEMIINPGDNVLLDEPAYSGTLQSLHPLGCNIINVASDESGIVPDSLRDILSRWKPEDAKNPQKNTPKFLYTVPNGNNPTGNSLTSERKKEIYELARKYDFLIIEDDPYYFLQFNKFRVPTFLSMDVDGRVIRADSFSKIISSGLRIGFLTGPKPLIERVILHIQVSTLHPSTFNQLMISQLLHEWGEEGFMAHVDRVIDFYSNQKDAILAAADKWLTGLAEWHVPAAGMFLWIKVKGINDVKELIEEKAVKMGVLMLPGNAFYVDSSAPSPYLRASFSSASPEQMDVAFQVLAQLIKESL

SEQ ID NO: 37220 - protein, 425 aa, Homo sapiens; identical to SEQ ID NO: 37215

SEQ ID NO: 37221 - protein, 1098 aa, Homo sapiens
MTLQELVHKAASCYMDRVAVCFDECNNQLPVYYTYKTVVNAASELSNFLLLHCDFQGIREIGLYCQPGIDLPSWILGILQVPAAYVPIEPDSPPSLSTHFMKKCNLKYILVEKKQINKFKSFHETLLNYDTFTVEHNDLVLFRLHWKNTEVNLMLNDGKEKYEKEKIKSISSEHVNEEKAEEHMDLRLKHCLAYVLHTSGTTGIPKIVRVPHKCIVPNIQHFRVLFDITQEDVLFLASPLTFDPSVVEIFLALSSGASLLIVPTSVKLLPSKLASVLFSHHRVTVLQATPTLLRRFGSQLIKSTVLSATTSLRVLALGGEAFPSLTVLRSWRGEGNKTQIFNVYGITEVSSWATIYRIPEKTLNSTLKCELPVQLGFPLLGTVVEVRDTNGFTIQEGSGQVFLGGRNRVCFLDDEVTVPLGTMRATGDFVTVKDGEIFFLGRKDSQIKRHGKRLNIELVQQVAEELQQVESCAVTWYNQEKLILFMVSKDASVKEYIFKELQKYLPSHAVPDELVLIDSLPFTSHGKIDVSELNKIYLNYINLKSENKLSGKEDLWEKLQYLWKSTLNLPEDLLRVPDESLFLNSGGDSLKSIRLLSEIEKLVGTSVPGLLEIILSSSILEIYNHILQTVVPDEDVTFRKSCATKRKLSDINQEEASGTSLHQKAIMTFTCHNEINAFVVLSRGSQILSLNSTRFLTKLGHCSSACPSDSVSQTNIQNLKGLNSPVLIGKSKDPSCVAKVSEEGKPAIGTQKMELHVRWRSDTGKCVDASPLVVIPTFDKSSTTVYIGSHSHRMKAVDFYSGKVKWEQILGDRIESSACVSKCGNFIVVGCYNGLVYVLKSNSGEKYWMFTTEDAVKSSATMDPTTGLIYIGSHDQHAYALDIYRKKCVWKSKCGGTVFSSPCLNLIPHHLYFATLGGLLLAVNPATGNVIWKHSCGKPLFSSPQCCSQYICIGCVDGNLLCFTHFGEQVWQFSTSGPIFSSPCTSPSEQKIFFGSHDCFIYCCNMKGHLQWKFETTSRVYATPFAFHNYNGSNEMLLAAASTDGKVWILESQSGQLQSVYELPGEVFSSPVVLESMLIIGCRDNYVYCLDLLGGNQK

SEQ ID NO: 37222 - protein, 613 aa, Homo sapiens
MVSKDASVKEYIFKELQKYLPSHAVPDELVLIDSLPFTSHGKIDVSELNKIYLNYINLKSENKLSGKEDLWEKLQYLWKSTLNLPEDLLRVPDESLFLNSGGDSLKSIRLLSEIEKLVGTSVPGLLEIILSSSILEIYNHILQTVVPDEDVTFRKSCATKRKLSDINQEEASGTSLHQKAIMTFTCHNEINAFVVLSRGSQILSLNSTRFLTKLGHCSSACPSDSVSQTNIQNLKGLNSPVLIGKSKDPSCVAKVSEEGKPAIGTQKMELHVRWRSDTGKCVDASPLVVIPTFDKSSTTVYIGSHSHRMKAVDFYSGKVKWEQILGDRIESSACVSKCGNFIVVGCYNGLVYVLKSNSGEKYWMFTTEDAVKSSATMDPTTGLIYIGSHDQHAYALDIYRKKCVWKSKCGGTVFSSPCLNLIPHHLYFATLGGLLLAVNPATGNVIWKHSCGKPLFSSPQCCSQYICIGCVDGNLLCFTHFGEQVWQFSTSGPIFSSPCTSPSEQKIFFGSHDCFIYCCNMKGHLQWKFETTSRVYATPFAFHNYNGSNEMLLAAASTDGKVWILESQSGQLQSVYELPGEVFSSPVVLESMLIIGCRDNYVYCLDLLGGNQK

SEQ ID NO: 37223 - protein, 857 aa, Homo sapiens
MTLQELVHKAASCYMDRVAVCFDECNNQLPVYYTYKTVVNAASELSNFLLLHCDFQGIREIGLYCQPGIDLPSWILGILQVPAAYVPIEPDSPPSLSTHFMKKCNLKYILVEKKQINKFKSFHETLLNYDTFTVEHNDLVLFRLHWKNTEVNLMLNDGKEKYEKEKIKSISSEHVNEEKAEEHMDLRLKHCLAYVLHTSGTTGIPKIVRVPHKCIVPNIQHFRVLFDITQEDVLFLASPLTFDPSVVEIFLALSSGASLLIVPTSVKLLPSKLASVLFSHHRVTVLQATPTLLRRFGSQLIKSTVLSATTSLRVLALGGEAFPSLTVLRSWRGEGNKTQIFNVYGITEVSSWATIYRIPEKTLNSTLKCELPVQLGFPLLGTVVEVRDTNGFTIQEGSGQVFLGGRNRVCFLDDEVTVPLGTMRATGDFVTVKDGEIFFLGRKDSQIKRHGKRLNIELVQQVAEELQQVESCAVTWYNQEKLILFMVSKDASVKEYIFKELQKYLPSHAVPDELVLIDSLPFTSHGKIDVSELNKIYLNYINLKSENKLSGKEDLWEKLQYLWKSTLNLPEDLLRVPDESLFLNSGGDSLKSIRLLSEIEKLVGTSVPGLLEIILSSSILEIYNHILQTVVPDEDVTFRKSCATKRKLSDINQEEASGTSLHQKAIMTFTCHNEINAFVVLSRGSQILSLNSTRFLTKLGHCSSACPSDSVSQTNIQNLKGLNSPVLIGKSKDPSCVAKVSEEGKPAIGTQKMELHVRWRSDTGKCVDASPLVVIPTFDKSSTTVYIGSHSHRMKAVDFYSGKVKWEQILGDRIESSACVSKCGNFIVVGLAVLYQWTNLFIPVYLTIRAKNIFWFP

SEQ ID NO: 37224 - protein, 841 aa, Homo sapiens
MTLQELVHKAASCYMDRVAVCFDECNNQLPVYYTYKTVVNAASELSNFLLLHCDFQGIREIGLYCQPGIDLPSWILGILQVPAAYVPIEPDSPPSLSTHFMKKCNLKYILVEKKQINKFKSFHETLLNYDTFTVEHNDLVLFRLHWKNTEVNLMLNDGKEKYEKEKIKSISSEHVNEEKAEEHMDLRLKHCLAYVLHTSGTTGIPKIVRVPHKCIVPNIQHFRVLFDITQEDVLFLASPLTFDPSVVEIFLALSSGASLLIVPTSVKLLPSKLASVLFSHHRVTVLQATPTLLRRFGSQLIKSTVLSATTSLRVLALGGEAFPSLTVLRSWRGEGNKTQIFNVYGITEVSSWATIYRIPEKTLNSTLKCELPVQLGFPLLGTVVEVRDTNGFTIQEGSGQVFLGGRNRVCFLDDEVTVPLGTMRATGDFVTVKDGEIFFLGRKDSQIKRHGKRLNIELVQQVAEELQQVESCAVTWYNQEKLILFMVSKDASVKEYIFKELQKYLPSHAVPDELVLIDSLPFTSHGKIDVSELNKIYLNYINLKSENKLSGKEDLWEKLQYLWKSTLNLPEDLLRVPDESLFLNSGGDSLKSIRLLSEIEKLVGTSVPGLLEIILSSSILEIYNHILQTVVPDEDVTFRKSCATKRKLSDINQEEASGTSLHQKAIMTFTCHNEINAFVVLSRGSQILSLNSTRFLTKLGHCSSACPSDSVSQTNIQNLKGLNSPVLIGKSKDPSCVAKVSEEGKPAIGTQKMELHVRWRSDTGKCVDASPLVVIPTFDKSSTTVYIGSHSHRMKAVDFYSGKVKWEQILGDRIESSACVSKCGNFIVVGKFLNLRFVELN

SEQ ID NO: 37225 - protein, 998 aa, Homo sapiens
MKKCNLKYILVEKKQINKFKSFHETLLNYDTFTVEHNDLVLFRLHWKNTEVNLMLNDGKEKYEKEKIKSISSEHVNEEKAEEHMDLRLKHCLAYVLHTSGTTGIPKIVRVPHKCIVPNIQHFRVLFDITQEDVLFLASPLTFDPSVVEIFLALSSGASLLIVPTSVKLLPSKLASVLFSHHRVTVLQATPTLLRRFGSQLIKSTVLSATTSLRVLALGGEAFPSLTVLRSWRGEGNKTQIFNVYGITEVSSWATIYRIPEKTLNSTLKCELPVQLGFPLLGTVVEVRDTNGFTIQEGSGQVFLGGRNRVCFLDDEVTVPLGTMRATGDFVTVKDGEIFFLGRKDSQIKRHGKRLNIELVQQVAEELQQVESCAVTWYNQEKLILFMVSKDASVKEYIFKELQKYLPSHAVPDELVLIDSLPFTSHGKIDVSELNKIYLNYINLKSENKLSGKEDLWEKLQYLWKSTLNLPEDLLRVPDESLFLNSGGDSLKSIRLLSEIEKLVGTSVPGLLEIILSSSILEIYNHILQTVVPDEDVTFRKSCATKRKLSDINQEEASGTSLHQKAIMTFTCHNEINAFVVLSRGSQILSLNSTRFLTKLGHCSSACPSDSVSQTNIQNLKGLNSPVLIGKSKDPSCVAKVSEEGKPAIGTQKMELHVRWRSDTGKCVDASPLVVIPTFDKSSTTVYIGSHSHRMKAVDFYSGKVKWEQILGDRIESSACVSKCGNFIVVGCYNGLVYVLKSNSGEKYWMFTTEDAVKSSATMDPTTGLIYIGSHDQHAYALDIYRKKCVWKSKCGGTVFSSPCLNLIPHHLYFATLGGLLLAVNPATGNVIWKHSCGKPLFSSPQCCSQYICIGCVDGNLLCFTHFGEQVWQFSTSGPIFSSPCTSPSEQKIFFGSHDCFIYCCNMKGHLQWKFETTSRVYATPFAFHNYNGSNEMLLAAASTDGKVWILESQSGQLQSVYELPGEVFSSPVVLESMLIIGCRDNYVYCLDLLGGNQK

SEQ ID NO: 37226 - protein, 926 aa, Homo sapiens
MLQVHRTGLGRLGVSLSKGLHHKAVLAVRREDVNAWERRAPLAPKHIKGITNLGYKVLIQPSNRRAIHDKDYVKAGGILQEDISEACLILGVKRPPEEKLMSRKTYAFFSHTIKAQEANMGLLDEILKQEIRLIDYEKMVDHRGVRVVAFGQWAGVAGMINILHGMGLRLLALGHHTPFMHIGMAHNYRNSSQAVQAVRDAGYEISLGLMPKSIGPLTFVFTGTGNVSKGAQAIFNELPCEYVEPHELKEVSQTGDLRKVYGTVLSRHHHLVRKTDAVYDPAEYDKHPERYISRFNTDIAPYTTCLINGIYWEQNTPRLLTRQDAQSLLAPGKFSPAGVEGCPALPHKLVAICDISADTGGSIEFMTECTTIEHPFCMYDADQHIIHDSVEGSGILMCSIDNLPAQLPIEATECFGDMLYPYVEEMILSDATQPLESQNFSPVVRDAVITSNGTLPDKYKYIQTLRESRERAQSLSMGTRRKVLVLGSGYISEPVLEYLSRDGNIEITVGSDMKNQIEQLGKKYNINPVSMDICKQEEKLGFLVAKQDLVISLLPYVLHPLVAKACITNKVNMVTASYITPALKELEKSVEDAGITIIGELGLDPGLDHMLAMETIDKAKEVGATIESYISYCGGLPAPEHSNNPLRYKFSWSPVGVLMNVMQSATYLLDGKVVNVAGGISFLDAVTSMDFFPGLNLEGYPNRDSTKYAEIYGISSAHTLLRGTLRYKGYMKALNGFVKLGLINREALPAFRPEANPLTWKQLLCDLVGISPSSEHDVLKEAVLKKLGGDNTQLEAAEWLGLLGDEQVPQAESILDALSKHLVMKLSYGPEEKDMIVMRDSFGIRHPSGHLEHKTIDLVAYGDINGFSAMAKTVGLPTAMAAKMLLDGEIGAKGLMGPFSKEIYGPILERIKAEGIIYTTQSTIKP

SEQ ID NO: 37227 - protein, 926 aa, Homo sapiens; identical to SEQ ID NO: 37226

SEQ ID NO: 37228 - protein, 313 aa, Homo sapiens
MQPQSVLHSGYFHPLLRAWQTATTTLNASNLIYPIFVTYGVKRLEEMLRPLVEEGLRCVLIFGVPSRVPKDERGSAADSEESPAIEAIHLLRKTFPNLLVACDVCLCPYTSHGHCGLLSENGAFRAEESRQRLAEVALAYAKAGCQVVAPSDMMDGRVEAIKEALMAHGLGNRVSVMSYSAKFASCFYGPFRDAAKSSPAFGDRRCYQLPPGARGLALRAVDRDVREGADMLMVKPGMPYLDIVREVKDKHPDLPLAVYHVSGEFAMLWHGAQAGAFDLKAAVLEAMTAFRRAGADIIITYYTPQLLQWLKEE

SEQ ID NO: 37229 - protein, 330 aa, Homo sapiens
MQPQSVLHSGYFHPLLRAWQTATTTLNASNLIYPIFVTDVPDDIQPITSLPGVARYGVKRLEEMLRPLVEEGLRCVLIFGVPSRVPKDERGSAADSEESPAIEAIHLLRKTFPNLLVACDVCLCPYTSHGHCGLLSENGAFRAEESRQRLAEVALAYAKAGCQVVAPSDMMDGRVEAIKEALMAHGLGNRVSVMSYSAKFASCFYGPFRDAAKSSPAFGDRRCYQLPPGARGLALRAVDRDVREGADMLMVKPGMPYLDIVREVKDKHPDLPLAVYHVSGEFAMLWHGAQAGAFDLKAAVLEAMTAFRRAGADIIITYYTPQLLQWLKEE

SEQ ID NO: 37230 - protein, 14 aa, Homo sapiens
MPLCPLAHAMQPQS

SEQ ID NO: 37231 - protein, 120 aa, Homo sapiens
MPLCPLAHAMQPQSVLHSGYFHPLLRAWQTATTTLNASNLIYPIFVTDVPDDIQPITSLPGVARYGVKRLEEMLRPLVEEGLRCVLIFGVPSRVPKDERGSAADSEESPAIEAIHLLRKT

SEQ ID NO: 37232 - protein, 59 aa, Homo sapiens
MPLCPLAHAMQPQSVLHSGYFHPLLRAWQTATTTLNASNLIYPIFVTDVPDDIQPITSL

SEQ ID NO: 37233 - protein, 640 aa, Homo sapiens
MESVVRRCPFLSRVPQAFLQKAGKSLLFYAQNCPKMMEVGAKPAPRALSTAAVHYQQIKETPPASEKDKTAKAKVQQTPDGSQQSPDGTQLPSGHPLPATSQGTASKCPFLAAQMNQRGSSVFCKASLELQEDVQEMNAVRKEVAETSAGPSVVSVKTDGGDPSGLLKNFQDIMQKQRPERVSHLLQDNLPKSVSTFQYDRFFEKKIDEKKNDHTYRVFKTVNRRAHIFPMADDYSDSLITKKQVSVWCSNDYLGMSRHPRVCGAVMDTLKQHGAGAGGTRNISGTSKFHVDLERELADLHGKDAALLFSSCFVANDSTLFTLAKMMPGCEIYSDSGNHASMIQGIRNSRVPKYIFRHNDVSHLRELLQRSDPSVPKIVAFETVHSMDGAVCPLEELCDVAHEFGAITFVDEVHAVGLYGARGGGIGDRDGVMPKMDIISGTLGKAFGCVGGYIASTSSLIDTVRSYAAGFIFTTSLPPMLLAGALESVRILKSAEGRVLRRQHQRNVKLMRQMLMDAGLPVVHCPSHIIPVRVADAAKNTEVCDELMSRHNIYVQAINYPTVPRGEELLRIAPTPHHTPQMMNYFLENLLVTWKQVGLELKPHSSAECNFCRRPLHFEVMSEREKSYFSGLSKLVSAQA

SEQ ID NO: 37234 - protein, 640 aa, Homo sapiens; identical to SEQ ID NO: 37233

SEQ ID NO: 37235 - protein, 114 aa, Homo sapiens
MESVVRRCPFLSRVPQAFLQKAGKSLLFYAQNCPKMMEVGAKPAPRALSTAAVHYQQIKETPPASEKDKTAKAKVQQTPDGSQQSPDGTQFRLDTPCLPQARALQANALSWQHR

SEQ ID NO: 37236 - protein, 640 aa, Homo sapiens; identical to SEQ ID NO: 37233

SEQ ID NO: 37237 - protein, 640 aa, Homo sapiens; identical to SEQ ID NO: 37233

SEQ ID NO: 37238 - protein, 587 aa, Homo sapiens
MVTAAMLLQCCPVLARGPTSLLGKVVKTHQFLFGIGRCPILATQGPNCSQIHLKATKAGGDSPSWAKGHCPFMLSELQDGKSKIVQKAAPEVQEDVKAFKTDLPSSLVSVSLRKPFSGPQEQEQISGKVTHLIQNNMPGNYVFSYDQFFRDKIMEKKQDHTYRVFKTVNRWADAYPFAQHFSEASVASKDVSVWCSNDYLGMSRHPQVLQATQETLQRHGAGAGGTRNISGTSKFHVELEQELAELHQKDSALLFSSCFVANDSTLFTLAKILPGCEIYSDAGNHASMIQGIRNSGAAKFVFRHNDPDHLKKLLEKSNPKIPKIVAFETVHSMDGAICPLEELCDVSHQYGALTFVDEVHAVGLYGSRGAGIGERDGIMHKIDIISGTLGKAFGCVGGYIASTRDLVDMVRSYAAGFIFTTSLPPMVLSGALESVRLLKGEEGQALRRAHQRNVKHMRQLLMDRGLPVIPCPSHIIPIRVGNAALNSKLCDLLLSKHGIYVQAINYPTVPRGEELLRLAPSPHHSPQMMEDFVEKLLLAWTAVGLPLQDVSVAACNFCRRPVHFELMSEWERSYFGNMGPQYVTTYA

SEQ ID NO: 37239 - protein, 550 aa, Homo sapiens
MVTAAMLLQCCPVLARGPTSLLGKVVKTHQFLFGIGRCPILATQGPNCSQIHLKATKAGGDSPSWAKGHCPFMLSELQDGKSKIVQKAAPEVQEDVKAFKTGNYVFSYDQFFRDKIMEKKQDHTYRVFKTVNRWADAYPFAQHFSEASVASKDVSVWCSNDYLGMSRHPQVLQATQETLQRHGAGAGGTRNISGTSKFHVELEQELAELHQKDSALLFSSCFVANDSTLFTLAKILPGCEIYSDAGNHASMIQGIRNSGAAKFVFRHNDPDHLKKLLEKSNPKIPKIVAFETVHSMDGAICPLEELCDVSHQYGALTFVDEVHAVGLYGSRGAGIGERDGIMHKIDIISGTLGKAFGCVGGYIASTRDLVDMVRSYAAGFIFTTSLPPMVLSGALESVRLLKGEEGQALRRAHQRNVKHMRQLLMDRGLPVIPCPSHIIPIRVGNAALNSKLCDLLLSKHGIYVQAINYPTVPRGEELLRLAPSPHHSPQMMEDFVEKLLLAWTAVGLPLQDVSVAACNFCRRPVHFELMSEWERSYFGNMGPQYVTTYA

SEQ ID NO: 37240 - protein, 574 aa, Homo sapiens
MRGGEVALGWNKKKRLFCEDFRFKMVTAAMLLQCCPVLARGPTSLLGKVVKTHQFLFGIGRCPILATQGPNCSQIHLKATKAGGDSPSWAKGHCPFMLSELQDGKSKIVQKAAPEVQEDVKAFKTGNYVFSYDQFFRDKIMEKKQDHTYRVFKTVNRWADAYPFAQHFSEASVASKDVSVWCSNDYLGMSRHPQVLQATQETLQRHGAGAGGTRNISGTSKFHVELEQELAELHQKDSALLFSSCFVANDSTLFTLAKILPGCEIYSDAGNHASMIQGIRNSGAAKFVFRHNDPDHLKKLLEKSNPKIPKIVAFETVHSMDGAICPLEELCDVSHQYGALTFVDEVHAVGLYGSRGAGIGERDGIMHKIDIISGTLGKAFGCVGGYIASTRDLVDMVRSYAAGFIFTTSLPPMVLSGALESVRLLKGEEGQALRRAHQRNVKHMRQLLMDRGLPVIPCPSHIIPIRVGNAALNSKLCDLLLSKHGIYVQAINYPTVPRGEELLRLAPSPHHSPQMMEDFVEKLLLAWTAVGLPLQDVSVAACNFCRRPVHFELMSEWERSYFGNMGPQYVTTYA

SEQ ID NO: 37241 - protein, 222 aa, Homo sapiens
  VARIANT 1: note = MOD_RES - Any amino acid
XLSFVRPQCRATDSPSWAKGHCPFMLSELQDGKSKIVQKAAPEVQEDVKAFKTDLPSSLVSVSLRKPFSGPQEQEQISGKVTHLIQNNMPGNYVFSYDQFFRDKIMEKKQDHTYRVFKTVNRWADAYPFAQHFSEASVASKDVSVWCSNDYLGMSRHPQVLQATQETLQRHGAGAGGTRNISGTSKFHVELEQELAELHQKDSALLFSSCFVANDSTLFTLA

SEQ ID NO: 37242 - protein, 403 aa, Homo sapiens
MQRAVSVVARLGFRLQAFPPALCRPLSCAQEVLRRTPLYDFHLAHGGKMVAFAGWSLPVQYRDSHTDSHLHTRQHCSLFDVSHMLQTKILGSDRVKLMESLVVGDIAELRPNQGTLSLFTNEAGGILDDLIVTNTSEGHLYVVSNAGCWEKDLALMQDKVRELQNQGRDVGLEVLDNALLALQGPTAAQVLQAGVADDLRKLPFMTSAVMEVFGVSGCRVTRCGYTGEDGVEISVPVAGAVHLATAILKNPEVKLAGLAARDSLRLEAGLCLYGNDIDEHTTPVEGSLSWTLGKRRRAAMDFPGAKVIVPQLKGRVQRRRVGLMCEGAPMRAHSPILNMEGTKIGTVTSGCPSPSLKKNVAMGYVPCEYSRPGTMLLVEVRRKQQMAVVSKMPFVPTNYYTLK

SEQ ID NO: 37243 - protein, 386 aa, Homo sapiens
MQRAVSVVARLGFRLQAFPPALCRPLSCAQEVLRRTPLYDFHLAHGGKMVAFAGWSLPVQYRDSHTDSHLHTRQHCSLFDVSHMLQTKILGSDRVKLMESLVVGDIAELRPNQGTLSLFTNEAGGILDDLIVTNTSEGHLYVVSNAGCWEKDLALMQDKVRELQNQGRDVGLEVLDNALLALQGPTAAQVLQAGVADDLRKLPFMTSAVMEVFGVSGCRVTRCGYTGEDGVEISVPVAGAVHLATAILKNPEVKLAGLAARDSLRLEAGLCLYGNDIDEHTTPVEGSLSWTLGKRRRAAMDFPGAKVIVPQLKGRVQRRRVGLMCEGAPMRAHSPILNMEGTKIGTVTSGCPSPSLKKNVAMGYVPCEYSRPGTMLLVELPSGPCF

SEQ ID NO: 37244 - protein, 384 aa, Homo sapiens
  VARIANT 1: note = MOD_RES - Any amino acid
XAVSVVARLGFRLQAFPPALCRPLSCAQEVLRRTPLYDFHLAHGGKMVAFAGWSLPVQYRDSHTDSHLHTRQHCSLFDVSHMLQTKILGSDRVKLMESLVVGDIAELRPNQGTLSLFTNEAGGILDDLIVTNTSEGHLYVVSNAGCWEKDLALMQDKVRELQNQGRDVGLEVLDNALLALQGPTAAQVLQAGVADDLRKLPFMTSAVMEVFGVSGCRVTRCGYTGEDGVEISVPVAGAVHLATAILKNPEVKLAGLAARDSLRLEAGLCLYGNDIDEHTTPVEGSLSWTLGKRRRAAMDFPGAKVIVPQLKGRVQRRRVGLMCEGAPMRAHSPILNMEGTKIGTVTSGCPSPSLKKNVAMGYVPCEYSRPGTMLLVELPSGPCF

SEQ ID NO: 37245 - protein, 359 aa, Homo sapiens
MQRAVSVVARLGFRLQAFPPALCRPLSCAQEVLRRTPLYDFHLAHGGKMVAFAGWSLPVQYRDSHTDSHLHTRQHCSLFDVSHMLQTKILGSDRVKLMESLVVGDIAELRPNQDKVRELQNQGRDVGLEVLDNALLALQGPTAAQVLQAGVADDLRKLPFMTSAVMEVFGVSGCRVTRCGYTGEDGVEISVPVAGAVHLATAILKNPEVKLAGLAARDSLRLEAGLCLYGNDIDEHTTPVEGSLSWTLGKRRRAAMDFPGAKVIVPQLKGRVQRRRVGLMCEGAPMRAHSPILNMEGTKIGTVTSGCPSPSLKKNVAMGYVPCEYSRPGTMLLVEVRRKQQMAVVSKMPFVPTNYYTLK

SEQ ID NO: 37246 - protein, 347 aa, Homo sapiens
MQRAVSVVARLGFRLQAFPPALCRPLSCAQTKILGSDRVKLMESLVVGDIAELRPNQGTLSLFTNEAGGILDDLIVTNTSEGHLYVVSNAGCWEKDLALMQDKVRELQNQGRDVGLEVLDNALLALQGPTAAQVLQAGVADDLRKLPFMTSAVMEVFGVSGCRVTRCGYTGEDGVEISVPVAGAVHLATAILKNPEVKLAGLAARDSLRLEAGLCLYGNDIDEHTTPVEGSLSWTLGKRRRAAMDFPGAKVIVPQLKGRVQRRRVGLMCEGAPMRAHSPILNMEGTKIGTVTSGCPSPSLKKNVAMGYVPCEYSRPGTMLLVEVRRKQQMAVVSKMPFVPTNYYTLK

SEQ ID NO: 37247 - protein, 306 aa, Homo sapiens
MESLVVGDIAELRPNQGTLSLFTNEAGGILDDLIVTNTSEGHLYVVSNAGCWEKDLALMQDKVRELQNQGRDVGLEVLDNALLALQGPTAAQVLQAGVADDLRKLPFMTSAVMEVFGVSGCRVTRCGYTGEDGVEISVPVAGAVHLATAILKNPEVKLAGLAARDSLRLEAGLCLYGNDIDEHTTPVEGSLSWTLGKRRRAAMDFPGAKVIVPQLKGRVQRRRVGLMCEGAPMRAHSPILNMEGTKIGTVTSGCPSPSLKKNVAMGYVPCEYSRPGTMLLVEVRRKQQMAVVSKMPFVPTNYYTLK

SEQ ID NO: 37248 - protein, 919 aa, Homo sapiens
MWLAAAAPSLARRLLFLGPPPPPLLLLVFSRSSRRRLHSLGLAAMPEKRPFERLPADVSPINYSLCLKPDLLDFTFEGKLEAAAQVRQATNQIVMNCADIDIITASYAPEGDEEIHATGFNYQNEDEKVTLSFPSTLQTGTGTLKIDFVGELNDKMKGFYRSKYTTPSGEVRYAAVTQFEATDARRAFPCWDEPAIKATFDISLVVPKDRVALSNMNVIDRKPYPDDENLVEVKFARTPVMSTYLVAFVVGEYDFVETRSKDGVCVRVYTPVGKAEQGKFALEVAAKTLPFYKDYFNVPYPLPKIDLIAIADFAAGAMENWGLVTYRETALLIDPKNSCSSSRQWVALVVGHELAHQWFGNLVTMEWWTHLWLNEGFASWIEYLCVDHCFPEYDIWTQFVSADYTRAQELDALDNSHPIEVSVGHPSEVDEIFDAISYSKGASVIRMLHDYIGDKDFKKGMNMYLTKFQQKNAATEDLWESLENASGKPIAAVMNTWTKQMGFPLIYVEAEQVEDDRLLRLSQKKFCAGGSYVGEDCPQWMVPITISTSEDPNQAKLKILMDKPEMNVVLKNVKPDQWVKLNLGTVGFYRTQYSSAMLESLLPGIRDLSLPPVDRLGLQNDLFSLARAGIISTVEVLKVMEAFVNEPNYTVWSDLSCNLGILSTLLSHTDFYEEIQEFVKDVFSPIGERLGWDPKPGEGHLDALLRGLVLGKLGKAGHKATLEEARRRFKDHVEGKQILSADLRSPVYLTVLKHGDGTTLDIMLKLHKQADMQEEKNRIERVLGATLLPDLIQKVLTFALSEEVRPQDTVSVIGGVAGGSKHGRKAAWKFIKDNWEELYNRYQGGFLISRLIKLSVEGFAVDKMAGEVKAFFESHPAPSAERTIQQCCENILLNAAWLKRDAESIHQYLLQRKASPPTV

SEQ ID NO: 37249 - protein, 627 aa, Homo sapiens
MWLAAAAPSLARRLLFLGPPPPPLLLLVFSRSSRRRLHSLGLADVSPINYSLCLKPDLLDFTFEGKLEAAAQVRQATNQIVMNCADIDIITASYAPEGDEEIHATGFNYQNEDEKVTLSFPSTLQTGTGTLKIDFVGELNDKMKGFYRSKYTTPSGEVRYAAVTQFEATDARRAFPCWDEPAIKATFDISLVVPKDRVALSNMNVIDRKPYPDDENLVEVKFARTPVMSTYLVAFVVGEYDFVETRSKDGVCVRVYTPVGKAEQGKFALEVAAKTLPFYKDYFNVPYPLPKIDLIAIADFAAGAMENWGLVTYRETALLIDPKNSCSSSRQWVALVVGHELAHQWFGNLVTMEWWTHLWLNEGFASWIEYLCVDHCFPEYDIWTQFVSADYTRAQELDALDNSHPIEVSVGHPSEVDEIFDAISYSKGASVIRMLHDYIGDKDFKKGMNMYLTKFQQKNAATEDLWESLENASGKPIAAVMNTWTKQMGFPLIYVEAEQVEDDRLLRLSQKKFCAGGSYVGEDCPQWMVPITISTSEDPNQAKLKILMDKPEMNVVLKNVKPDQWVKLNLGTVGFYRTQYSSAMLESLLPGIRDLSLPPVDRLGLQNDLFSLFILCVREVSGNCCRA

SEQ ID NO: 37250 - protein, 839 aa, Homo sapiens
MPEKRPFERLPADVSPINYSLCLKPDLLDFTFEGKLEAAAQVRQATNQIVMNCADIDIITASYAPEGDEEIHATGFNYQNEDEKVTLSFPSTLQTGTGTLKIDFVGELNDKMKGFYRSKYTTPSGEVRYAAVTQFENVIDRKPYPDDENLVEVKFARTPVMSTYLVAFVVGEYDFVETRSKDGVCVRVYTPVGKAEQGKFALEVAAKTLPFYKDYFNVPYPLPKIDLIAIADFAAGAMENWGLVTYRETALLIDPKNSCSSSRQWVALVVGHELAHQWFGNLVTMEWWTHLWLNEGFASWIEYLCVDHCFPEYDIWTQFVSADYTRAQELDALDNSHPIEVSVGHPSEVDEIFDAISYSKGASVIRMLHDYIGDKDFKKGMNMYLTKFQQKNAATEDLWESLENASGKPIAAVMNTWTKQMGFPLIYVEAEQVEDDRLLRLSQKKFCAGGSYVGEDCPQWMVPITISTSEDPNQAKLKILMDKPEMNVVLKNVKPDQWVKLNLGTVGFYRTQYSSAMLESLLPGIRDLSLPPVDRLGLQNDLFSLARAGIISTVEVLKVMEAFVNEPNYTVWSDLSCNLGILSTLLSHTDFYEEIQEFVKDVFSPIGERLGWDPKPGEGHLDALLRGLVLGKLGKAGHKATLEEARRRFKDHVEGKQILSADLRSPVYLTVLKHGDGTTLDIMLKLHKQADMQEEKNRIERVLGATLLPDLIQKVLTFALSEEVRPQDTVSVIGGVAGGSKHGRKAAWKFIKDNWEELYNRYQGGFLISRLIKLSVEGFAVDKMAGEVKAFFESHPAPSAERTIQQCCENILLNAAWLKRDAESIHQYLLQRKASPPTV

SEQ ID NO: 37251 - protein, 264 aa, Homo sapiens
MCHKNGFPQEGGITAAFLQKRKLRLSKNHRPARAKVTEHVRGTRPGRATAGPAASTRAAGSLFFDRWGNRGPAGCRGSSHLPQQLKFTTSDSCDRIKDEFQLLQAQYHSLKLECDKLASEKSEMQRHYVMYYEMSYGLNIEMHKQAEIVKRLNGICAQVLPYLSQEHQQQVLGAIERAKQVTAPELNSIIRQQLQAHQLSQLQALALPLTPLPVGLQPPSLPAVSAGTGLLSLSALGSQAHLSKEDKNGHDGDTHQEDDGEKSD

SEQ ID NO: 37252 - protein, 197 aa, Homo sapiens
MMFPQSRHSGSSHLPQQLKFTTSDSCDRIKDEFQLLQAQYHSLKLECDKLASEKSEMQRHYVMYYEMSYGLNIEMHKQAEIVKRLNGICAQVLPYLSQEHQQQVLGAIERAKQVTAPELNSIIRQQLQAHQLSQLQALALPLTPLPVGLQPPSLPAVSAGTGLLSLSALGSQAHLSKEDKNGHDGDTHQEDDGEKSD

SEQ ID NO: 37253 - protein, 453 aa, Homo sapiens
MGVLGRVLLWLQLCALTQAVSKLWVPNTDFDVAANWSQNRTPCAGGAVEFPADKMVSVLVQEGHAVSDMLLPLDGELVLASGAGFGVSDVGSHLDCGAGEPAVFRDSDRFSWHDPHLWRSGDEAPGLFFVDAERVPCRHDDVFFPPSASFRVGLGPGASPVRVRSISALGRTFTRDEDLAVFLASRAGRLRFHGPGALSVGPEDCADPSGCVCGNAEAQPWICAALLQPLGGRCPQAACHSALRPQGQCCDLCGAVVLLTHGPAFDLERYRARILDTFLGLPQYHGLQVAVSKVPRSSRLREADTEIQVVLVENGPETGGAGRLARALLADVAENGEALGVLEATMRESGAHVWGSSAAGLAGGVAAAVLLALLVLLVAPPLLRRAGRLRWRRHEAAAPAGAPLGFRNPVFDVTASEELPLPRRLSLVPKAAADSTSHSYFVNPLFAGAEAEA

SEQ ID NO: 37254 - protein, 653 aa, Homo sapiens
MADIKTGIFAKNVQKRLNRAQEKVLQKLGKADETKDEQFEEYVQNFKRQEAEGTRLQRELRGYLAAIKGMQEASMKLTESLHEVYEPDWYGREDVKMVGEKCDVLWEDFHQKLVDGSLLTLDTYLGQFPDIKNRIAKRSRKLVDYDSARHHLEALQSSKRKDESRISKAEEEFQKAQKVFEEFNVDLQEELPSLWSRRVGFYVNTFKNVSSLEAKFHKEIAVLCHKLYEVMTKLGDQHADKAFTIQGAPSDSGPLRIAKTPSPPEEPSPLPSPTASPNHTLAPASPAPARPRSPSQTRKGPPVPPLPKVTPTKELQQENIISFFEDNFVPEISVTTPSQNEVPEVKKEETLLDLDFDPFKPEVTPAGSAGVTHSPMSQTLPWDLWTTSTDLVQPASGGSFNGFTQPQDTSLFTMQTDQSMICNLIIPGADADAAVGTLVSAAEGAPGEEAEAEKATVPAGEGVSLEEAKIGTETTEGAESAQPEAEELEATVPQEKVIPSVVIEPASNHEEEGENEITIGAEPKETTEDAAPPGPTSETPELATEQKPIQDPQPTPSAPAMGAADQLASAREASQELPPGFLYKVETLHDFEAANSDELTLQRGDVVLVVPSDSEADQDAGWLVGVKESDWLQYRDLATYKGLFPENFTRRLD

SEQ ID NO: 37255 - protein, 597 aa, Homo sapiens
MTKLGDQHADKAFTIQGAPSDSGPLRIAKTPSPPEEPSPLPSPTASPNHTLAPASPAPARPRSPSQTRKGPPVPPLPKVTPTKELQQENIISFFEDNFVPEISVTTPSQNEVPEVKKEETLLDLDFDPFKPEVTPAGSAGVTHSPMSQTLPWDLWTTHTFNDDITDSSESLSLCNLIMEETPDSGLAEEIQRSQNDIGAFTWGPDASTDRVSQEVTSGGFGEDSACPSETEQDIRLSTSLLSSADWPTVAEESEHAPGPAFPGGNEQLPPKPAPEAGVAIAACVEMEQLYDPLDSDMPAMDTAGLFKESHEDMKKSDEEEEKQKMEDSLWAGVEACQKASGGSFNGFTQPQDTSLFTMQTDQSMICNLIIPGADADAAVGTLVSAAEGAPGEEAEAEKATVPAGEGVSLEEAKIGTETTEGAESAQPEAEELEATVPQEKVIPSVVIEPASNHEEEGENEITIGAEPKETTEDAAPPGPTSETPELATEQKPIQDPQPTPSAPAMGAADQLASAREASQELPPGFLYKVETLHDFEAANSDELTLQRGDVVLVVPSDSEADQDAGWLVGVKESDWLQYRDLATYKGLFPENFTRRLD

SEQ ID NO: 37256 - protein, 695 aa, Homo sapiens
MADIKTGIFAKNVQKRLNRAQEKVLQKLGKADETKDEQFEEYVQNFKRQEAEGTRLQRELRGYLAAIKGMQEASMKLTESLHEVYEPDWYGREDVKMVGEKCDVLWEDFHQKLVDGSLLTLDTYLGQFPDIKNRIAKRSRKLVDYDSARHHLEALQSSKRKDESRISKAEEEFQKAQKVFEEFNVDLQEELPSLWSRRVGFYVNTFKNVSSLEAKFHKEIAVLCHKLYEVMTKLGDQHADKAFTIQGAPSDSGPLRIAKTPSPPEEPSPLPSPTASPNHTLAPASPAPARPRSPSQTRKGPPVPPLPKVTPTKELQQENIISFFEDNFVPEISVTTPSQNEVPEVKKEETLLDLDFDPFKPEVTPAGSAGVTHSPMSQTLPWDLWTTSTDLVQPASGGSFNGFTQPQDTSLFTMQTDQSMICNLAESEQAPPTEPKAEEPLAAVTPAVGLDLGMDTRAEEPVEEAVIIPGADADAAVGTLVSAAEGAPGEEAEAEKATVPAGEGVSLEEAKIGTETTEGAESAQPEAEELEATVPQEKVIPSVVIEPASNHEEEGENEITIGAEPKETTEDAAPPGPTSETPELATEQKPIQDPQPTPSAPAMGAADQLASAREASQELPPGFLYKVETLHDFEAANSDELTLQRGDVVLVVPSDSEADQDAGWLVGVKESDWLQYRDLATYKGLFPENFTRRLD

SEQ ID NO: 37257 - protein, 196 aa, Homo sapiens
MEETPDSGLAEEIQRSQNDIGAFTWGPDASTDRVSQEVTSGGFGEDSACPSETEQDIRLSTSLLSSADWPTVAEESEHAPGPAFPGGNEQLPPKPAPEAGVAIAACVEMEQLYDPLDSDMPAMDTAGLFKESHEDMKKSDEEEEKQKMEDSLWAGVEACQKASGGSFNGFTQPQDTSLFTMQTDQSMICNLEITVN

SEQ ID NO: 37258 - protein, 653 aa, Homo sapiens
MADIKTGIFAKNVQKRLNRAQEKVLQKLGKADETKDEQFEEYVQNFKRQEAEGTRLQRELRGYLAAIKGMQEASMKLTESLHEVYEPDWYGREDVKMVGEKCDVLWEDFHQKLVDGSLLTLDTYLGQFPDIKNRIAKRSRKLVDYDSARHHLEALQSSKRKDESRISKAEEEFQKAQKVFEEFNVDLQEELPSLWSRRVGFYVNTFKNVSSLEAKFHKEIAVLCHKLYEVMTKLGDQHADKAFTIQGAPSDSGPLRIAKTPSPPEEPSPLPSPTASPNHTLAPASPAPARPRSPSQTRKGPPVPPLPKVTPTKELQQENIISFFEDNFVPEISVTTPSQNEVPEVKKEETLLDLDFDPFKPEVTPAGSAGVTHSPMSQTLPWDLWTAGVEACQKASGGSFNGFTQPQDTSLFTMQTDQSMICNLIIPGADADAAVGTLVSAAEGAPGEEAEAEKATVPAGEGVSLEEAKIGTETTEGAESAQPEAEELEATVPQEKVIPSVVIEPASNHEEEGENEITIGAEPKETTEDAAPPGPTSETPELATEQKPIQDPQPTPSAPAMGAADQLASAREASQELPPGFLYKVETLHDFEAANSDELTLQRGDVVLVVPSDSEADQDAGWLVGVKESDWLQYRDLATYKGLFPENFTRRLD

SEQ ID NO: 37259 - protein, 385 aa, Homo sapiens
MADIKTGIFAKNVQKRLNRAQEKVLQKLGKADETKDEQFEEYVQNFKRQEAEGTRLQRELRGYLAAIKGMQEASMKLTESLHEVYEPDWYGREDVKMVGEKCDVLWEDFHQKLVDGSLLTLDTYLGQFPDIKNRIAKRSRKLVDYDSARHHLEALQSSKRKDESRISKAEEEFQKAQKVFEEFNVDLQEELPSLWSRRVGFYVNTFKNVSSLEAKFHKEIAVLCHKLYEVMTKLGDQHADKAFTIQGAPRQYLDSGPLRIAKTPSPPEEPSPLPSPTASPNHTLAPASPAPARPRSPSQTRKGPPVPPLPKVTPTKELQQENIISFFEDNFVPEISVTTPSQNEVPEVKKEETLLDLDFDPFKPEVTPAGSAGVTHSPMSQTVGW

SEQ ID NO: 37260 - protein, 252 aa, Homo sapiens
MRAPLLPPAPVVLSLLILGSGHYAAGLDLNDTYSGKREPFSGDHSADGFEVTSRSEMSSGSEISPVSEMPSSSEPSSGADYDYSEEYDNEPQIPGYIVDDSVRVEQVVKPPQNKTESENTSDKPKRKKKGGKNGKNRRNRKKKNPCNAEFQNFCIHGECKYIEHLEAVTCKCQQEYFGERCGEKSMKTHSMIDSSLSKIALAAIAAFMSAVILTAVAVITVQLRRQYVRKYEGEAEERKKLRQENGNVHAIA

SEQ ID NO: 37261 - protein, 252 aa, Homo sapiens; identical to SEQ ID NO: 37260

SEQ ID NO: 37262 - protein, 511 aa, Homo sapiens
MKLFWLLFTIGFCWAQYSSNTQQGRTSIVHLFEWRWVDIALECERYLAPKGFGGVQVSPPNENVAIHNPFRPWWERYQPVSYKLCTRSGNEDEFRNMVTRCNNVGVRIYVDAVINHMCGNAVSAGTSSTCGSYFNPGSRDFPAVPYSGWDFNDGKCKTGSGDIENYNDATQVRDCRLSGLLDLALGKDYVRSKIAEYMNHLIDIGVAGFRIDASKHMWPGDIKAILDKLHNLNSNWFPEGSKPFIYQEVIDLGGEPIKSSDYFGNGRVTEFKYGAKLGTVIRKWNGEKMSYLKNWGEGWGFMPSDRALVFVDNHDNQRGHGAGGASILTFWDARLYKMAVGFMLAHPYGFTRVMSSYRWPRYFENGKDVNDWVGPPNDNGVTKEVTINPDTTCGNDWVCEHRWRQIRNMVNFRNVVDGQPFTNWYDNGSNQVAFGRGNRGFIVFNNDDWTFSLTLQTGLPAGTYCDVISGDKINGNCTGIKIYVSDDGKAHFSISNSAEDPFIAIHAESKL

SEQ ID NO: 37263 - protein, 105 aa, Homo sapiens
MKLFWLLFTIGFCWAQYSSNTQQGRTSIVHLFEWRWVDIALECERYLAPKGFGGVQVSPPNENVAIHNPFRPWWERYQPVSYKLCTRSGNEDEFRNMVTRCNNVG

SEQ ID NO: 37264 - protein, 226 aa, Homo sapiens
MKLFWLLFTIGFCWAQYSSNTQQGRTSIVHLFEWRWVDIALECERYLAPKGFGGVQVSPPNENVAIHNPFRPWWERYQPVSYKLCTRSGNEDEFRNMVTRCNNVGVRIYVDAVINHMCGNAVSAGTSSTCGSYFNPGSRDFPAVPYSGWDFNDGKCKTGSGDIENYNDATQVRDCRLSGLLDLALGKDYVRSKIAEYMNHLIDIGVAGFRIDASKHMWPGDIKAIL

SEQ ID NO: 37265 - protein, 511 aa, Homo sapiens; identical to SEQ ID NO: 37262

SEQ ID NO: 37266 - protein, 511 aa, Homo sapiens; identical to SEQ ID NO: 37262

SEQ ID NO: 37267 - protein, 105 aa, Homo sapiens; identical to SEQ ID NO: 37263

SEQ ID NO: 37268 - protein, 226 aa, Homo sapiens; identical to SEQ ID NO: 37264

SEQ ID NO: 37269 - protein, 511 aa, Homo sapiens; identical to SEQ ID NO: 37262

SEQ ID NO: 37270 - protein, 511 aa, Homo sapiens
MKFFLLLFTIGFCWAQYSPNTQQGRTSIVHLFEWRWVDIALECERYLAPKGFGGVQVSPPNENVAIYNPFRPWWERYQPVSYKLCTRSGNEDEFRNMVTRCNNVGVRIYVDAVINHMCGNAVSAGTSSTCGSYFNPGSRDFPAVPYSGWDFNDGKCKTGSGDIENYNDATQVRDCRLTGLLDLALEKDYVRSKIAEYMNHLIDIGVAGFRLDASKHMWPGDIKAILDKLHNLNSNWFPAGSKPFIYQEVIDLGGEPIKSSDYFGNGRVTEFKYGAKLGTVIRKWNGEKMSYLKNWGEGWGFVPSDRALVFVDNHDNQRGHGAGGASILTFWDARLYKMAVGFMLAHPYGFTRVMSSYRWPRQFQNGNDVNDWVGPPNNNGVIKEVTINPDTTCGNDWVCEHRWRQIRNMVIFRNVVDGQPFTNWYDNGSNQVAFGRGNRGFIVFNNDDWSFSLTLQTGLPAGTYCDVISGDKINGNCTGIKIYVSDDGKAHFSISNSAEDPFIAIHAESKL

SEQ ID NO: 37271 - protein, 511 aa, Homo sapiens
MKFFLLLFTIGFCWAQYSPNTQQGRTSIVHLFEWRWVDIALECERYLAPKGFGGVQVSPPNENVAIHNPFRPWWERYQPVSYKLCTRSGNEDEFRNMVTRCNNVGVRIYVDAVINHMSGNAVSAGTSSTCGSYFNPGSRDFPAVPYSGWDFNDGKCKTGSGDIENYNDATQVRDCRLVGLLDLALEKDYVRSKIAEYMNHLIDIGVAGFRLDASKHMWPGDIKAILDKLHNLNSNWFPAGSKPFIYQEVIDLGGEPIKSSDYFGNGRVTEFKYGAKLGTVIRKWNGEKMSYLKNWGEGWGFMPSDRALVFVDNHDNQRGHGAGGASILTFWDARLYKMAVGFMLAHPYGFTRVMSSYRWPRQFQNGNDVNDWVGPPNNNGVIKEVTINPDTTCGNDWVCEHRWRQIRNMVNFRNVVDGQPFTNWYDNGSNQVAFGRGNRGFIVFNNDDWTFSLTLQTGLPAGTYCDVISGDKINGNCTGIKIYVSDDGKAHFSISNSAEDPFIAIHAESKL

SEQ ID NO: 37272 - protein, 96 aa, Homo sapiens
MKFFLLLFTIGFCWAQYSPNTQQGRTSIVHLFEWRWVDIALECERYLAPKGFGGVQVSPPNENVAIHNPFRPWWERYQPVSYKLCTRSGNEDEFRN

SEQ ID NO: 37273 - protein, 86 aa, Homo sapiens
MKFFLLLFTIGFCWAQYSPNTQQGRTSIVHLFEWRWVDIALECERYLAPKGFGGVQVSPPNENVAIHNPFRPWWERYQPVSYKLCT

SEQ ID NO: 37274 - protein, 770 aa, Homo sapiens
MLPGLALLLLAAWTARALEVPTDGNAGLLAEPQIAMFCGRLNMHMNVQNGKWDSDPSGTKTCIDTKEGILQYCQEVYPELQITNVVEANQPVTIQNWCKRGRKQCKTHPHFVIPYRCLVGEFVSDALLVPDKCKFLHQERMDVCETHLHWHTVAKETCSEKSTNLHDYGMLLPCGIDKFRGVEFVCCPLAEESDNVDSADAEEDDSDVWWGGADTDYADGSEDKVVEVAEEEEVAEVEEEEADDDEDDEDGDEVEEEAEEPYEEATERTTSIATTTTTTTESVEEVVREVCSEQAETGPCRAMISRWYFDVTEGKCAPFFYGGCGGNRNNFDTEEYCMAVCGSAMSQSLLKTTQEPLARDPVKLPTTAASTPDAVDKYLETPGDENEHAHFQKAKERLEAKHRERMSQVMREWEEAERQAKNLPKADKKAVIQHFQEKVESLEQEAANERQQLVETHMARVEAMLNDRRRLALENYITALQAVPPRPRHVFNMLKKYVRAEQKDRQHTLKHFEHVRMVDPKKAAQIRSQVMTHLRVIYERMNQSLSLLYNVPAVAEEIQDEVDELLQKEQNYSDDVLANMISEPRISYGNDALMPSLTETKTTVELLPVNGEFSLDDLQPWHSFGADSVPANTENEVEPVDARPAADRGLTTRPGSGLTNIKTEEISEVKMDAEFRHDSGYEVHHQKLVFFAEDVGSNKGAIIGLMVGGVVIATVIVITLVMLKKKQYTSIHHGVVEVDAAVTPEERHLSKMQQNGYENPTYKFFEQMQN

SEQ ID NO: 37275 - protein, 695 aa, Homo sapiens
MLPGLALLLLAAWTARALEVPTDGNAGLLAEPQIAMFCGRLNMHMNVQNGKWDSDPSGTKTCIDTKEGILQYCQEVYPELQITNVVEANQPVTIQNWCKRGRKQCKTHPHFVIPYRCLVGEFVSDALLVPDKCKFLHQERMDVCETHLHWHTVAKETCSEKSTNLHDYGMLLPCGIDKFRGVEFVCCPLAEESDNVDSADAEEDDSDVWWGGADTDYADGSEDKVVEVAEEEEVAEVEEEEADDDEDDEDGDEVEEEAEEPYEEATERTTSIATTTTTTTESVEEVVRVPTTAASTPDAVDKYLETPGDENEHAHFQKAKERLEAKHRERMSQVMREWEEAERQAKNLPKADKKAVIQHFQEKVESLEQEAANERQQLVETHMARVEAMLNDRRRLALENYITALQAVPPRPRHVFNMLKKYVRAEQKDRQHTLKHFEHVRMVDPKKAAQIRSQVMTHLRVIYERMNQSLSLLYNVPAVAEEIQDEVDELLQKEQNYSDDVLANMISEPRISYGNDALMPSLTETKTTVELLPVNGEFSLDDLQPWHSFGADSVPANTENEVEPVDARPAADRGLTTRPGSGLTNIKTEEISEVKMDAEFRHDSGYEVHHQKLVFFAEDVGSNKGAIIGLMVGGVVIATVIVITLVMLKKKQYTSIHHGVVEVDAAVTPEERHLSKMQQNGYENPTYKFFEQMQN

SEQ ID NO: 37276 - protein, 639 aa, Homo sapiens
MLPGLALLLLAAWTARALEVYPELQITNVVEANQPVTIQNWCKRGRKQCKTHPHFVIPYRCLVGEFVSDALLVPDKCKFLHQERMDVCETHLHWHTVAKETCSEKSTNLHDYGMLLPCGIDKFRGVEFVCCPLAEESDNVDSADAEEDDSDVWWGGADTDYADGSEDKVVEVAEEEEVAEVEEEEADDDEDDEDGDEVEEEAEEPYEEATERTTSIATTTTTTTESVEEVVRVPTTAASTPDAVDKYLETPGDENEHAHFQKAKERLEAKHRERMSQVMREWEEAERQAKNLPKADKKAVIQHFQEKVESLEQEAANERQQLVETHMARVEAMLNDRRRLALENYITALQAVPPRPRHVFNMLKKYVRAEQKDRQHTLKHFEHVRMVDPKKAAQIRSQVMTHLRVIYERMNQSLSLLYNVPAVAEEIQDEVDELLQKEQNYSDDVLANMISEPRISYGNDALMPSLTETKTTVELLPVNGEFSLDDLQPWHSFGADSVPANTENEVEPVDARPAADRGLTTRPGSGLTNIKTEEISEVKMDAEFRHDSGYEVHHQKLVFFAEDVGSNKGAIIGLMVGGVVIATVIVITLVMLKKKQYTSIHHGVVEVDAAVTPEERHLSKMQQNGYENPTYKFFEQMQN

SEQ ID NO: 37277 - protein, 751 aa, Homo sapiens
MLPGLALLLLAAWTARALEVPTDGNAGLLAEPQIAMFCGRLNMHMNVQNGKWDSDPSGTKTCIDTKEGILQYCQEVYPELQITNVVEANQPVTIQNWCKRGRKQCKTHPHFVIPYRCLVGEFVSDALLVPDKCKFLHQERMDVCETHLHWHTVAKETCSEKSTNLHDYGMLLPCGIDKFRGVEFVCCPLAEESDNVDSADAEEDDSDVWWGGADTDYADGSEDKVVEVAEEEEVAEVEEEEADDDEDDEDGDEVEEEAEEPYEEATERTTSIATTTTTTTESVEEVVREVCSEQAETGPCRAMISRWYFDVTEGKCAPFFYGGCGGNRNNFDTEEYCMAVCGSAIPTTAASTPDAVDKYLETPGDENEHAHFQKAKERLEAKHRERMSQVMREWEEAERQAKNLPKADKKAVIQHFQEKVESLEQEAANERQQLVETHMARVEAMLNDRRRLALENYITALQAVPPRPRHVFNMLKKYVRAEQKDRQHTLKHFEHVRMVDPKKAAQIRSQVMTHLRVIYERMNQSLSLLYNVPAVAEEIQDEVDELLQKEQNYSDDVLANMISEPRISYGNDALMPSLTETKTTVELLPVNGEFSLDDLQPWHSFGADSVPANTENEVEPVDARPAADRGLTTRPGSGLTNIKTEEISEVKMDAEFRHDSGYEVHHQKLVFFAEDVGSNKGAIIGLMVGGVVIATVIVITLVMLKKKQYTSIHHGVVEVDAAVTPEERHLSKMQQNGYENPTYKFFEQMQN

SEQ ID NO: 37278 - protein, 752 aa, Homo sapiens
MLPGLALLLLAAWTARALEVPTDGNAGLLAEPQIAMFCGRLNMHMNVQNGKWDSDPSGTKTCIDTKEGILQYCQEVYPELQITNVVEANQPVTIQNWCKRGRKQCKTHPHFVIPYRCLVGEFVSDALLVPDKCKFLHQERMDVCETHLHWHTVAKETCSEKSTNLHDYGMLLPCGIDKFRGVEFVCCPLAEESDNVDSADAEEDDSDVWWGGADTDYADGSEDKVVEVAEEEEVAEVEEEEADDDEDDEDGDEVEEEAEEPYEEATERTTSIATTTTTTTESVEEVVREVCSEQAETGPCRAMISRWYFDVTEGKCAPFFYGGCGGNRNNFDTEEYCMAVCGSAMSQSLLKTTQEPLARDPVKLPTTAASTPDAVDKYLETPGDENEHAHFQKAKERLEAKHRERMSQVMREWEEAERQAKNLPKADKKAVIQHFQEKVESLEQEAANERQQLVETHMARVEAMLNDRRRLALENYITALQAVPPRPRHVFNMLKKYVRAEQKDRQHTLKHFEHVRMVDPKKAAQIRSQVMTHLRVIYERMNQSLSLLYNVPAVAEEIQDEVDELLQKEQNYSDDVLANMISEPRISYGNDALMPSLTETKTTVELLPVNGEFSLDDLQPWHSFGADSVPANTENEGSGLTNIKTEEISEVKMDAEFRHDSGYEVHHQKLVFFAEDVGSNKGAIIGLMVGGVVIATVIVITLVMLKKKQYTSIHHGVVEVDAAVTPEERHLSKMQQNGYENPTYKFFEQMQN

SEQ ID NO: 37279 - protein, 714 aa, Homo sapiens
MLPGLALLLLAAWTARALEVPTDGNAGLLAEPQIAMFCGRLNMHMNVQNGKWDSDPSGTKTCIDTKEGILQYCQEVYPELQITNVVEANQPVTIQNWCKRGRKQCKTHPHFVIPYRCLVGEFVSDALLVPDKCKFLHQERMDVCETHLHWHTVAKETCSEKSTNLHDYGMLLPCGIDKFRGVEFVCCPLAEESDNVDSADAEEDDSDVWWGGADTDYADGSEDKVVEVAEEEEVAEVEEEEADDDEDDEDGDEVEEEAEEPYEEATERTTSIATTTTTTTESVEEVVRVSQSLLKTTQEPLARDPVKLPTTAASTPDAVDKYLETPGDENEHAHFQKAKERLEAKHRERMSQVMREWEEAERQAKNLPKADKKAVIQHFQEKVESLEQEAANERQQLVETHMARVEAMLNDRRRLALENYITALQAVPPRPRHVFNMLKKYVRAEQKDRQHTLKHFEHVRMVDPKKAAQIRSQVMTHLRVIYERMNQSLSLLYNVPAVAEEIQDEVDELLQKEQNYSDDVLANMISEPRISYGNDALMPSLTETKTTVELLPVNGEFSLDDLQPWHSFGADSVPANTENEVEPVDARPAADRGLTTRPGSGLTNIKTEEISEVKMDAEFRHDSGYEVHHQKLVFFAEDVGSNKGAIIGLMVGGVVIATVIVITLVMLKKKQYTSIHHGVVEVDAAVTPEERHLSKMQQNGYENPTYKFFEQMQN

SEQ ID NO: 37280 - protein, 714 aa, Homo sapiens
MLPGLALLLLAAWTARALEVYPELQITNVVEANQPVTIQNWCKRGRKQCKTHPHFVIPYRCLVGEFVSDALLVPDKCKFLHQERMDVCETHLHWHTVAKETCSEKSTNLHDYGMLLPCGIDKFRGVEFVCCPLAEESDNVDSADAEEDDSDVWWGGADTDYADGSEDKVVEVAEEEEVAEVEEEEADDDEDDEDGDEVEEEAEEPYEEATERTTSIATTTTTTTESVEEVVREVCSEQAETGPCRAMISRWYFDVTEGKCAPFFYGGCGGNRNNFDTEEYCMAVCGSAMSQSLLKTTQEPLARDPVKLPTTAASTPDAVDKYLETPGDENEHAHFQKAKERLEAKHRERMSQVMREWEEAERQAKNLPKADKKAVIQHFQEKVESLEQEAANERQQLVETHMARVEAMLNDRRRLALENYITALQAVPPRPRHVFNMLKKYVRAEQKDRQHTLKHFEHVRMVDPKKAAQIRSQVMTHLRVIYERMNQSLSLLYNVPAVAEEIQDEVDELLQKEQNYSDDVLANMISEPRISYGNDALMPSLTETKTTVELLPVNGEFSLDDLQPWHSFGADSVPANTENEVEPVDARPAADRGLTTRPGSGLTNIKTEEISEVKMDAEFRHDSGYEVHHQKLVFFAEDVGSNKGAIIGLMVGGVVIATVIVITLVMLKKKQYTSIHHGVVEVDAAVTPEERHLSKMQQNGYENPTYKFFEQMQN

SEQ ID NO: 37281 - protein, 746 aa, Homo sapiens
MDQLEDLLVLFINYVPTDGNAGLLAEPQIAMFCGRLNMHMNVQNGKWDSDPSGTKTCIDTKEGILQYCQEVYPELQITNVVEANQPVTIQNWCKRGRKQCKTHPHFVIPYRCLVGEFVSDALLVPDKCKFLHQERMDVCETHLHWHTVAKETCSEKSTNLHDYGMLLPCGIDKFRGVEFVCCPLAEESDNVDSADAEEDDSDVWWGGADTDYADGSEDKVVEVAEEEEVAEVEEEEADDDEDDEDGDEVEEEAEEPYEEATERTTSIATTTTTTTESVEEVVREVCSEQAETGPCRAMISRWYFDVTEGKCAPFFYGGCGGNRNNFDTEEYCMAVCGSAIPTTAASTPDAVDKYLETPGDENEHAHFQKAKERLEAKHRERMSQVMREWEEAERQAKNLPKADKKAVIQHFQEKVESLEQEAANERQQLVETHMARVEAMLNDRRRLALENYITALQAVPPRPRHVFNMLKKYVRAEQKDRQHTLKHFEHVRMVDPKKAAQIRSQVMTHLRVIYERMNQSLSLLYNVPAVAEEIQDEVDELLQKEQNYSDDVLANMISEPRISYGNDALMPSLTETKTTVELLPVNGEFSLDDLQPWHSFGADSVPANTENEVEPVDARPAADRGLTTRPGSGLTNIKTEEISEVKMDAEFRHDSGYEVHHQKLVFFAEDVGSNKGAIIGLMVGGVVIATVIVITLVMLKKKQYTSIHHGVVEVDAAVTPEERHLSKMQQNGYENPTYKFFEQMQN

SEQ ID NO: 37282 - protein, 660 aa, Homo sapiens
MFCGRLNMHMNVQNGKWDSDPSGTKTCIDTKEGILQYCQEVYPELQITNVVEANQPVTIQNWCKRGRKQCKTHPHFVIPYRCLVGEFVSDALLVPDKCKFLHQERMDVCETHLHWHTVAKETCSEKSTNLHDYGMLLPCGIDKFRGVEFVCCPLAEESDNVDSADAEEDDSDVWWGGADTDYADGSEDKVVEVAEEEEVAEVEEEEADDDEDDEDGDEVEEEAEEPYEEATERTTSIATTTTTTTESVEEVVRVPTTAASTPDAVDKYLETPGDENEHAHFQKAKERLEAKHRERMSQVMREWEEAERQAKNLPKADKKAVIQHFQEKVESLEQEAANERQQLVETHMARVEAMLNDRRRLALENYITALQAVPPRPRHVFNMLKKYVRAEQKDRQHTLKHFEHVRMVDPKKAAQIRSQVMTHLRVIYERMNQSLSLLYNVPAVAEEIQDEVDELLQKEQNYSDDVLANMISEPRISYGNDALMPSLTETKTTVELLPVNGEFSLDDLQPWHSFGADSVPANTENEVEPVDARPAADRGLTTRPGSGLTNIKTEEISEVKMDAEFRHDSGYEVHHQKLVFFAEDVGSNKGAIIGLMVGGVVIATVIVITLVMLKKKQYTSIHHGVVEVDAAVTPEERHLSKMQQNGYENPTYKFFEQMQN

SEQ ID NO: 37283 - protein, 262 aa, Homo sapiens
MRVQDTSGTYYWHIPTGTTQWEPPGRASPSQGSSPQEESQLTWTGFAHGEGFEDGEFWKDEPSDEAPMELGLKEPEEGTLTFPAQSLSPEPLPQEEEKLPPRNTNPGIKCFAVRSLGWVEMTEEELAPGRSSVAVNNCIRQLSYHKNNLHDPMSGGWGEGKDLLLQLEDETLKLVEPQSQALLHAQPIISIRVWGVGRDSGRDFAYVARDKLTQMLKCHVFRCEAPAKNIATSLHEICSKARPPPLPGLVATFALQGCGWGH

SEQ ID NO: 37284 - protein, 493 aa, Homo sapiens
MLGKDYMLAIILVNCDDDLWGDHSLEVEAGLPPGWRKIHDAAGTYYWHVPSGSTQWQRPTWELGDAEDPGTGTEGIWGLRPPKGRSFSSLESSLDRSNSLSWYGGESYIQSMEPGAKCFAVRSLGWVEVPEEDLAPGKSSIAVNNCIQQLAQTRSRSQPPDGAWGEGQNMLMILKKDAMSLVNPLDHSLIHCQPLVHIRVWGVGSSKGRDSPISAPARDFAFVASDKDSCMLKCHVFCCDVPAKAIASALHGLCAQILSERVEVSGDASCCSPDPISPEDLPRQVELLDAVSQAAQKYEALYMGTLPVTKAMGMDVLNEAIGTLTARGDRNAWVPTMLSVSDSLMTAHPIQAEASTEEEPLWQCPVRLVTFIGVGRDPHTFGLIADLGRQSFQCAAFWCQPHAGGLSEAVQAACMVQYQKCLVASAARGKAWGAQARARLRLKRTSSMDSPGGPLPLPLLKGGVGGAGATPRKRGVFSFLDAFRLKPSLLHMP

SEQ ID NO: 37285 - protein, 752 aa, Homo sapiens
TTAMAHRKLESVGSGMLDHRVRPGPVPHSQEPESEDMELPLEGYVPEGLELAALRPESPAPEEQECHNHSPDGDSSSDYVNNTSEEEDYDEGLPEEEEGITYYIRYCPEDDSYLEGMDCNGEEYLAHSAHPVDTDECQEAVEEWTDSAGPHPHGHEAEGSQDYPDGQLPIPEDEPSVLEAHDQEEDGHYCASKEGYQDYYPEEANGNTGASPYRLRRGDGDLEDQEEDIDQIVAEIKMSLSMTSITSASEASPEHGPEPGPEDSVEACPPIKASCSPSRHEARPKSLNLLPEAKHPGDPQRGFKPKTRTPEERLKWPHEQVCNGLEQPRKQQRSDLNGPVDNNNIPETKKVASFPSFVAVPGPCEPEDLIDGIIFAANYLGSTQLLSERNPSKNIRMMQAQEAVSRVKRMQKAAKIKKKANSEGDAQTLTEVDLFISTQRIKVLNADTQETMMDHALRTISYIADIGNIVVLMARRRMPRSASQDCIETTPGAQEGKKQYKMICHVFESEDAQLIAQSIGQAFSVAYQEFLRANGINPEDLSQKEYSDIINTQEMYNDDLIHFSNSENCKELQLEKHKGEILGVVVVESGWGSILPTVILANMMNGGPAARSGKLSIGDQIMSINGTSLVGLPLATCQGIIKGLKNQTQVKLNIVSCPPVTTVLIKRPDLKYQLGFSVQNGIICSLMRGGIAERGGVRVGHRIIEINGQSVVATAHEKIVQALSNSVGEIHMKTMPAAMFRLLTGQETPLYI

SEQ ID NO: 37286 - protein, 737 aa, Homo sapiens
MAHRKLESVGSGMLDHRVRPGPVPHSQEPESEDMELPLEGYVPEGLELAALRPESPAPEEQECHNHSPDGDSSSDYVNNTSEEEDYDEGLPEEEEGITYYIRYCPEDDSYLEGMDCNGEEYLAHSAHPVDTDECQEAVEEWTDSAGPHPHGHEAEGSQDYPDGQLPIPEDEPSVLEAHDQEEDGHYCASKEGYQDYYPEEANGNTGASPYRLRRGDGDLEDQEEDIDQIVAEIKMSLSMTSITSASEASPEHGPEPGPEDSVEACPPIKASCSPSRHEARPKSLNLLPEAKHPGDPQRGFKPKTRTPEERLKWPHEQVCNGLEQPRKQQRSDLNGPVDNNNIPETKKVASFPSFVAVPGPCEPEDLIDGIIFAANYLGSTQLLSERNPSKNIRMMQAQEAVSRVKNSEGDAQTLTEVDLFISTQRIKVLNADTQETMMDHALRTISYIADIGNIVVLMARRRMPRSASQDCIETTPGAQEGKKQYKMICHVFESEDAQLIAQSIGQAFSVAYQEFLRANGINPEDLSQKEYSDIINTQEMYNDDLIHFSNSENCKELQLEKHKGEILGVVVVESGWGSILPTVILANMMNGGPAARSGKLSIGDQIMSINGTSLVGLPLATCQGIIKGLKNQTQVKLNIVSCPPVTTVLIKRPDLKYQLGFSVQNGIICSLMRGGIAERGGVRVGHRIIEINGQSVVATAHEKIVQALSNSVGEIHMKTMPAAMFRLLTGQETPLYI

SEQ ID NO: 37287 - protein, 27 aa, Homo sapiens
MAHRKLESVGSGMLDHRVRPGPVPHSQ

SEQ ID NO: 37288 - protein, 749 aa, Homo sapiens
MAHRKLESVGSGMLDHRVRPGPVPHSQEPESEDMELPLEGYVPEGLELAALRPESPAPEEQECHNHSPDGDSSSDYVNNTSEEEDYDEGLPEEEEGITYYIRYCPEDDSYLEGMDCNGEEYLAHSAHPVDTDECQEAVEEWTDSAGPHPHGHEAEGSQDYPDGQLPIPEDEPSVLEAHDQEEDGHYCASKEGYQDYYPEEANGNTGASPYRLRRGDGDLEDQEEDIDQIVAEIKMSLSMTSITSASEASPEHGPEPGPEDSVEACPPIKASCSPSRHEARPKSLNLLPEAKHPGDPQRGFKPKTRTPEERLKWPHEQVCNGLEQPRKQQRSDLNGPVDNNNIPETKKVASFPSFVAVPGPCEPEDLIDGIIFAANYLGSTQLLSERNPSKNIRMMQAQEAVSRVKRMQKAAKIKKKANSEGDAQTLTEVDLFISTQRIKVLNADTQETMMDHALRTISYIADIGNIVVLMARRRMPRSASQDCIETTPGAQEGKKQYKMICHVFESEDAQLIAQSIGQAFSVAYQEFLRANGINPEDLSQKEYSDIINTQEMYNDDLIHFSNSENCKELQLEKHKGEILGVVVVESGWGSILPTVILANMMNGGPAARSGKLSIGDQIMSINGTSLVGLPLATCQGIIKGLKNQTQVKLNIVSCPPVTTVLIKRPDLKYQLGFSVQNGIICSLMRGGIAERGGVRVGHRIIEINGQSVVATAHEKIVQALSNSVGEIHMKTMPAAMFRLLTGQETPLYI

SEQ ID NO: 37289 - protein, 737 aa, Homo sapiens; identical to SEQ ID NO: 37286

SEQ ID NO: 37290 - protein, 264 aa, Homo sapiens
MAHRKLESVGSGMLDHRVRPGPVPHSQEPESEDMELPLEGYVPEGLELAALRPESPAPEEQECHNHSPDGDSSSDYVNNTSEEEDYDEGLPEEEEGITYYIRYCPEDDSYLEGMDCNGEEYLAHSAHPVDTDECQEAVEEWTDSAGPHPHGHEAEGSQDYPDGQLPIPEDEPSVLEAHDQEEDGHYCASKEGYQDYYPEEANGNTGASPYRLRRGDGDLEDQEEDIDQIVAEIKMSLSMTSITSASEASPEHGPEPGPEDSVEA

SEQ ID NO: 37291 - protein, 749 aa, Homo sapiens; identical to SEQ ID NO: 37288

SEQ ID NO: 37292 - protein, 70 aa, Homo sapiens
MAHRKLESVGSGMLDHRVRPGPVPHSQEPESEDMELPLEGYVPEGLELAALRPESPAPEEQECHNHSPDG

SEQ ID NO: 37293 - protein, 4 aa, Homo sapiens
MAHR

SEQ ID NO: 37294 - protein, 112 aa, Homo sapiens
MAHRKLESVGSGMLDHRVRPGPVPHSQEPESEDMELPLEGYVPEGLELAALRPESPAPEEQECHNHSPDGDSSSDYVNNTSEEEDYDEGLPEEEEGITYYIRYCPEDDSYLE

SEQ ID NO: 37295 - protein, 749 aa, Homo sapiens; identical to SEQ ID NO: 37288

SEQ ID NO: 37296 - protein, 708 aa, Homo sapiens
MSVPSSLSQSAINANSHGGPALSLPLPLHAAHNQLLNAKLQATAVGPKDLRSAMGEGGGPEPGPANAKWLKEGQNQLRRAATAHRDQNRNVTLTLAEEASQEPEMAPLGPKGLIHLYSELELSAHNAANRGLRGPGLIISTQEQGPDEGEEKAAGEAEEEEEDDDDEEEEEDLSSPPGLPEPLESVEAPPRPQALTDGPREHSKSASLLFGMRNSAASDEDSSWATLSQGSPSYGSPEDTDSFWNPNAFETDSDLPAGWMRVQDTSGTYYWHIPTGTTQWEPPGRASPSQGSSPQEESQLTWTGFAHGEGFEDGEFWKDEPSDEAPMELGLKEPEEGTLTFPAQSLSPEPLPQEEEKLPPRNTNPGIKCFAVRSLGWVEMTEEELAPGRSSVAVNNCIRQLSYHKNNLHDPMSGGWGEGKDLLLQLEDETLKLVEPQSQALLHAQPIISIRVWGVGRDSGRDFAYVARDKLTQMLKCHVFRCEAPAKNIATSLHEICSKIMAERRNARCLVNGLSLDHSKLVDVPFQVEFPAPKNELVQKFQVYYLGNVPVAKPVGVDVINGALESVLSSSSREQWTPSHVSVAPATLTILHQQTEAVLGECRVRFLSFLAVGRDVHTFAFIMAAGPASFCCHMFWCEPNAASLSEAVQAACMLRYQKCLDARSQASTSCLPAPPAESVARRVGWTVRRGVQSLWGSLKPKRLGAHTP

SEQ ID NO: 37297 - protein, 708 aa, Homo sapiens; identical to SEQ ID NO: 37296

SEQ ID NO: 37298 - protein, 710 aa, Homo sapiens [sequence omitted]

SEQ ID NO: 37299 - protein, 451 aa, Homo sapiens [sequence omitted]

SEQ ID NO: 37300 - protein, 559 aa, Homo sapiens
MSVPSSLSQSAINANSHGGPALSLPLPLHAAHNQLLNAKLQATAVGPKDLHSKSASLLFGMRNSAASDEDSSWATLSQGSPSYGSPEDTDSFWNPNAFETDSDLPAGWMRVQDTSGTYYWHIPTGTTQWEPPGRASPSQGSSPQEESQLTWTGFAHGEGFEDGEFWKDEPSDEAPMELGLKEPEEGTLTFPAQSLSPEPLPQEEEKLPPRNTNPGIKCFAVRSLGWVEMTEEELAPGRSSVAVNNCIRQLSYHKNNLHDPMSGGWGEGKDLLLQLEDETLKLVEPQSQALLHAQPIISIRVWGVGRDSGSNRDFAYVARDKLTQMLKCHVFRCEAPAKNIATSLHEICSKIMAERRNARCLVNGLSLDHSKLVDVPFQVEFPAPKNELVQKFQVYYLGNVPVAKPVGVDVINGALESVLSSSSREQWTPSHVSVAPATLTILHQQTEAVLGECRVRFLSFLAVGRDVHTFAFIMAAGPASFCCHMFWCEPNAASLSEAVQAACMLRYQKCLDARSQASTSCLPAPPAESVARRVGWTVRRGVQSLWGSLKPKRLGAHTP

SEQ ID NO: 37301 - protein, 475 aa, Homo sapiens [sequence omitted]

SEQ ID NO: 37302 - protein, 758 aa, Homo sapiens
MSEVLPADSGVDTLAVFMASSGTTDVTNRNSPATPPNTLNLRSSHNELLNAEIKHTETKNSTPPKCRKKYALTNIQAAMGLSDPAAQPLLGNGSANIKLVKNGENQLRKAAEQGQQDPNKNLSPTAVINITSEKLEGKEPHPQDSSSCEILPSQPRRTKSFLNYYADLETSARELEQNRGNHHGTAEEKSQPVQGQASTIIGNGDLLLQKPNRPQSSPEDGQVATVSSSPETKKDHPKTGAKTDCALHRIQNLAPSDEESSWTTLSQDSASPSSPDETDIWSDHSFQTDPDLPPGWKRVSDIAGTYYWHIPTGTTQWERPVSIPADLQGSRKGSLSSVTPSPTPENEKQPWSDFAVLNGGKINSDIWKDLHAATVNPDPSLKEFEGATLRYASLKLRNAPHPDDDDSCSINSDPEAKCFAVRSLGWVEMAEEDLAPGKSSVAVNNCIRQLSYCKNDIRDTVGIWGEGKDMYLILENDMLSLVDPMDRSVLHSQPIVSIRVWGVGRDNGRDFAYVARDKDTRILKCHVFRCDTPAKAIATSLHEICSKIMAERKNAKALACSSLQERANVNLDVPLQVDFPTPKTELVQKFHVQYLGMLPVDKPVGMDILNSAIENLMTSSNKEDWLSVNMNVADATVTVISEKNEEEVLVECRVRFLSFMGVGKDVHTFAFIMDTGNQRFECHVFWCEPNAGNVSEAVQAACMLRYQKCLVARPPSQKVRPPPPPADSVTRRVTTNVKRGVLSLIDTLKQKRPVTEMP

SEQ ID NO: 37303 - protein, 757 aa, Homo sapiens
SHCIPADSGVDTLAVFMASSGTTDVTNRNSPATPPNTLNLRSSHNELLNAEIKHTETKNSTPPKCRKKYALTNIQAAMGLSDPAAQPLLGNGSANIKLVKNGENQLRKAAEQGQQDPNKNLSPTAVINITSEKLEGKEPHPQDSSSCEILPSQPRRTKSFLNYYADLETSARELEQNRGNHHGTAEEKSQPVQGQASTIIGNGDLLLQKPNRPQSSPEDGQVATVSSSPETKKDHPKTGAKTDCALHRIQNLAPSDEESSWTTLSQDSASPSSPDETDIWSDHSFQTDPDLPPGWKRVSDIAGTYYWHIPTGTTQWERPVSIPADLQGSRKGSLSSVTPSPTPENEKQPWSDFAVLNGGKINSDIWKDLHAATVNPDPSLKEFEGATLRYASLKLRNAPHPDDDDSCSINSDPEAKCFAVRSLGWVEMAEEDLAPGKSSVAVNNCIRQLSYCKNDIRDTVGIWGEGKDMYLILENDMLSLVDPMDRSVLHSQPIVSIRVWGVGRDNGRDFAYVARDKDTRILKCHVFRCDTPAKAIATSLHEICSKIMAERKNAKALACSSLQERANVNLDVPLQVDFPTPKTELVQKFHVQYLGMLPVDKPVGMDILNSAIENLMTSSNKEDWLSVNMNVADATVTVISEKNEEEVLVECRVRFLSFMGVGKDVHTFAFIMDTGNQRFECHVFWCEPNAGNVSEAVQAACMLRYQKCLVARPPSQKVRPPPPPADSVTRRVTTNVKRGVLSLIDTLKQKRPVTEMP

SEQ ID NO: 37304 - protein, 210 aa, Homo sapiens
MAERKNAKALACSSLQERANVNLDVPLQVDFPTPKTELVQKFHVQYLGMLPVDKPVGMDILNSAIENLMTSSNKEDWLSVNMNVADATVTVISEKNEEEVLVECRVRFLSFMGVGKDVHTFAFIMDTGNQRFECHVFWCEPNAGNVSEAVQAACMLRYQKCLVARPPSQKVRPPPPPADSVTRRVTTNVKRGVLSLIDTLKQKRPVTEMP

SEQ ID NO: 37305 - protein, 10 aa, Homo sapiens
MSEVLPADSG

SEQ ID NO: 37306 - protein, 210 aa, Homo sapiens; identical to SEQ ID NO: 37304

SEQ ID NO: 37307 - protein, 737 aa, Homo sapiens
MSEVLPADSGVDTLAVFMASSGTTDVTNRNSPATPPNTLNLRSSHNELLNAEIKHTETKNSTPPKCRKKYALTNIQAAMGLSDPAAQPLLGNGSANIKLVKNGENQLRKAAEQGQQDPNKNLSPTAVINITSEKLEGKEPHPQDSSSCEILPSQPRRTKSFLNYYADLETSARELEQNRGNHHGTAEEKSQPVQGQASTIIGNGDLLLQKPNRPQSSPEDGQVATVSSSPETKKDHPKTGAKTDCALHRIQNLAPSDEESSWTTLSQDSASPSSPDETDIWSDHSFQTDPDLPPGWKRVSDIAGTYYWHIPTGTTQWERPVSIPADLQGSRKGSLSSVTPSPTPENEDLHAATVNPDPSLKEFEGATLRYASLKLRNAPHPDDDDSCSINSDPEAKCFAVRSLGWVEMAEEDLAPGKSSVAVNNCIRQLSYCKNDIRDTVGIWGEGKDMYLILENDMLSLVDPMDRSVLHSQPIVSIRVWGVGRDNGRDFAYVARDKDTRILKCHVFRCDTPAKAIATSLHEICSKIMAERKNAKALACSSLQERANVNLDVPLQVDFPTPKTELVQKFHVQYLGMLPVDKPVGMDILNSAIENLMTSSNKEDWLSVNMNVADATVTVISEKNEEEVLVECRVRFLSFMGVGKDVHTFAFIMDTGNQRFECHVFWCEPNAGNVSEAVQAACMLRYQKCLVARPPSQKVRPPPPPADSVTRRVTTNVKRGVLSLIDTLKQKRPVTEMP

SEQ ID NO: 37308 - protein, 759 aa, Homo sapiens
MSEVLPADSGVDTLAVFMASSGTTDVTNRNSPATPPNTLNLRSSHNELLNAEIKHTETKNSTPPKCRKKYALTNIQAAMGLSDPAAQPLLGNGSANIKLVKNGENQLRKAAEQGQQDPNKNLSPTAVINITSEKLEGKEPHPQDSSSCEILPSQPRRTKSFLNYYADLETSARELEQNRGNHHGTAEEKSQPVQGQASTIIGNGDLLLQKPNRPQSSPEDGQVATVSSSPETKKDHPKTGAKTDCALHRIQNLAPSDEESSWTTLSQDSASPSSPDETADIWSDHSFQTDPDLPPGWKRVSDIAGTYYWHIPTGTTQWERPVSIPADLQGSRKGSLSSVTPSPTPENEKQPWSDFAVLNGGKINSDIWKDLHAATVNPDPSLKEFEGATLRYASLKLRNAPHPDDDDSCSINSDPEAKCFAVRSLGWVEMAEEDLAPGKSSVAVNNCIRQLSYCKNDIRDTVGIWGEGKDMYLILENDMLSLVDPMDRSVLHSQPIVSIRVWGVGRDNGRDFAYVARDKDTRILKCHVFRCDTPAKAIATSLHEICSKIMAERKNAKALACSSLQERANVNLDVPLQVDFPTPKTELVQKFHVQYLGMLPVDKPVGMDILNSAIENLMTSSNKEDWLSVNMNVADATVTVISEKNEEEVLVECRVRFLSFMGVGKDVHTFAFIMDTGNQRFECHVFWCEPNAGNVSEAVQAACMLRYQKCLVARPPSQKVRPPPPPADSVTRRVTTNVKRGVLSLIDTLKQKRPVTEMP

SEQ ID NO: 37309 - protein, 27 aa, Homo sapiens
MSEVLPADSGVDTLAVFMASSGTTDVT

SEQ ID NO: 37310 - protein, 68 aa, Homo sapiens
MSEVLPADSGVDTLAVFMASSGTTDVTNRNSPATPPNTLNLRSSHNELLNAEIKHTETKNSTPPKCRK

SEQ ID NO: 37311 - protein, 736 aa, Homo sapiens
MSEVLPADSGVDTLAVFMASSGTTDVTNRNSPATPPNTLNLRSSHNELLNAEIKHTETKNSTPPKCRKKYALTNIQAAMGLSDPAAQPLLGNGSANIKLVKNGENQLRKAAEQGQQDPNKNLSPTAVINITSEKLEGKEPHPQDSSSCEILPSQPRRTKSFLNYYADLETSARELEQNRGNHHGTAEEKSQPVQGQASTIIGNGDLLLQKPNRPQSSPEDGQVATVSSSPETKKDHPKTGAKTDCALHRIQNLAPSDEESSWTTLSQDSASPSSPDETDIWSDHSFQTDPDLPPGWKRVSDIAGTYYWHIPTGTTQWERPVSIPADLQGSRKGSLSSVTPSPTPENEDLHAATVNPDPSLKEFEGATLRYASLKLRNAPHPDDDDSCSINSDPEAKCFAVRSLGWVEMAEEDLAPGKSSVAVNNCIRQLSYCKNDIRDTVGIWGEGKDMYLILENDMLSLVDPMDRSVLHSQPIVSIRVWGVGRDNGRDFAYVARDKDTRILKCHVFRCDTPAKAIATSLHEICSKIMAERKNAKALACSSLQERANVNLDVPLQDFPTPKTELVQKFHVQYLGMLPVDKPVGMDILNSAIENLMTSSNKEDWLSVNMNVADATVTVISEKNEEEVLVECRVRFLSFMGVGKDVHTFAFIMDTGNQRFECHVFWCEPNAGNVSEAVQAACMLRYQKCLVARPPSQKVRPPPPPADSVTRRVTTNVKRGVLSLIDTLKQKRPVTEMP

SEQ ID NO: 37312 - protein, 728 aa, Homo sapiens
  VARIANT 1: note = MOD_RES - Any amino acid
XDTLAVFMASSGTTDVTNRNSPATPPNTLNLRSSHNELLNAEIKHTETKNSTPPKCRKKYALTNIQAAMGLSDPAAQPLLGNGSANIKLVKNGENQLRKAAEQGQQDPNKNLSPTAVINITSEKLEGKEPHPQDSSSCEILPSQPRRTKSFLNYYADLETSARELEQNRGNHHGTAEEKSQPVQGQASTIIGNGDLLLQKPNRPQSSPEDGQVATVSSSPETKKDHPKTGAKTDCALHRIQNLAPSDEESSWTTLSQDSASPSSPDETADIWSDHSFQTDPDLPPGWKRVSDIAGTYYWHIPTGTTQWERPVSIPADLQGSRKGSLSSVTPSPTPENEDLHAATVNPDPSLKEFEGATLRYASLKLRNAPHPDDDDSCSINSDPEAKCFAVRSLGWVEMAEEDLAPGKSSVAVNNCIRQLSYCKNDIRDTVGIWGEGKDMYLILENDMLSLVDPMDRSVLHSQPIVSIRVWGVGRDNGRDFAYVARDKDTRILKCHVFRCDTPAKAIATSLHEICSKIMAERKNAKALACSSLQERANVNLDVPLQVDFPTPKTELVQKFHVQYLGMLPVDKPVGMDILNSAIENLMTSSNKEDWLSVNMNVADATVTVISEKNEEEVLVECRVRFLSFMGVGKDVHTFAFIMDTGNQRFECHVFWCEPNAGNVSEAVQAACMLRYQKCLVARPPSQKVRPPPPPADSVTRRVTTNVKRGVLSLIDTLKQKRPVTEMP

SEQ ID NO: 37313 - protein, 210 aa, Homo sapiens; identical to SEQ ID NO: 37304

SEQ ID NO: 37314 - protein, 491 aa, Homo sapiens
MLGKDYMLAIILVNCDDDLWGDHSLEVEAGLPPGWRKIHDAAGTYYWHVPSGSTQWQRPTWELGDAEDPGTGTEGIWGLRPPKGRSFSSLESSLDRSNSLSWYGGESYIQSMEPGAKCFAVRSLGWVEVPEEDLAPGKSSIAVNNCIQQLAQTRSRSQPPDGAWGEGQNMLMILKKDAMSLVNPLDHSLIHCQPLVHIRVWGVGSSKGRPISAPARDFAFVASDKDSCMLKCHVFCCDVPAKAIASALHGLCAQILSERVEVSGDASCCSPDPISPEDLPRQVELLDAVSQAAQKYEALYMGTLPVTKAMGMDVLNEAIGTLTARGDRNAWVPTMLSVSDSLMTAHPIQAEASTEEEPLWQCPVRLVTFIGVGRDPHTFGLIADLGRQSFQCAAFWCQPHAGGLSEAVQAACMVQYQKCLVASAARGKAWGAQARARLRLKRTSSMDSPGGPLPLPLLKGGVGGAGATPRKRGVFSFLDAFRLKPSLLHMP

SEQ ID NO: 37315 - protein, 486 aa, Homo sapiens
MLGKDYMLAIILVNCDDDLWGDHSLEVEAGLPPGWRKIHDAAGTYYWHVPSGSTQWQRPTWELGDAEDPGTGTEGIWGLRPPKGRSFSSLESSLDRSNSLSWYGGESYIQSMEPGAKCFAVRSLGWVEVPEEDLAPGKSSIAVNNCIQQLAQTRSRSQPPDGAWGEGQNMLMILKKDAMSLVNPLDHSLIHCQPLVHIRVWGVGSSKGRDRDFAFVASDKDSCMLKCHVFCCDVPAKAIASALHGLCAQILSERVEVSGDASCCSPDPISPEDLPRQVELLDAVSQAAQKYEALYMGTLPVTKAMGMDVLNEAIGTLTARGDRNAWVPTMLSVSDSLMTAHPIQAEASTEEEPLWQCPVRLVTFIGVGRDPHTFGLIADLGRQSFQCAAFWCQPHAGGLSEAVQAACMVQYQKCLVASAARGKAWGAQARARLRLKRTSSMDSPGGPLPLPLLKGGVGGAGATPRKRGVFSFLDAFRLKPSLLHMP

SEQ ID NO: 37316 - protein, 339 aa, Homo sapiens
MLGKDYMLAIILVNCDDDLWGDHSLEVEAGLPPGWRKIHDAAGTYYWHVPSGSTQWQRPTWELGDAEDPGTGTEGIWGLRPPKGRSFSSLESSLDRSNSLSWYGGESYIQSMEPGAKCFAVRSLGWVEVPEEDLAPGKSSIAVNNCIQQLAQTRSRSQPPDGAWGEGQNMLMILKKDAMSLVNPLDHSLIHCQPLVHIRVWGVGSSKGRDRDFAFVASDKDSCMLKCHVFCCDVPAKAIASALHGLCAQILSERVEVSGDASCCSPDPISPEDLPRQVELLDAVSQAAQKYEALYMGTLPVTKAMGRGQYRGGAIVAVPCAPCDIYWCWPRPTHLWPHR

SEQ ID NO: 37317 - protein, 484 aa, Homo sapiens
MLGKDYMLAIILVNCDDDLWGDHSLEVEAGLPPGWRKIHDAAGTYYWHVPSGSTQWQRPTWELGDAEDPGTGTEGIWGLRPPKGRSFSSLESSLDRSNSLSWYGGESYIQSMEPGAKCFAVRSLGWVEVPEEDLAPGKSSIAVNNCIQQLAQTRSRSQPPDGAWGEGQNMLMILKKDAMSLVNPLDHSLIHCQPLVHIRVWGVGSSKGRDFAFVASDKDSCMLKCHVFCCDVPAKAIASALHGLCAQILSERVEVSGDASCCSPDPISPEDLPRQVELLDAVSQAAQKYEALYMGTLPVTKAMGMDVLNEAIGTLTARGDRNAWVPTMLSVSDSLMTAHPIQAEASTEEEPLWQCPVRLVTFIGVGRDPHTFGLIADLGRQSFQCAAFWCQPHAGGLSEAVQAACMVQYQKCLVASAARGKAWGAQARARLRLKRTSSMDSPGGPLPLPLLKGGVGGAGATPRKRGVFSFLDAFRLKPSLLHMP

SEQ ID NO: 37318 - protein, 245 aa, Homo sapiens
MLGKDYMLAIILVNCDDDLWGDHSLEVEAGLPPGWRKIHDAAGTYYWHVPSGSTQWQRPTWELGDAEDPGTGTEGIWGLRPPKGRSFSSLESSLDRSNSLSWYGGESYIQSMEPGAKCFAVRSLGWVEVPEEDLAPGKSSIAVNNCIQQLAQTRSRSQPPDGAWGEGQNMLMILKKDAMSLVNPLDHSLIHCQPLVHIRVWGVGSSKGRSSDVDPGLLPLPGPALVGEGGPSSAGTVWGESERLG

SEQ ID NO: 37319 - protein, 263 aa, Homo sapiens [sequence omitted]

SEQ ID NO: 37320 - protein, 214 aa, Homo sapiens
MLGKDYMLAIILVNCDDDLWGDHSLEVEAGLPPGWRKIHDAAGTYYWHVPSGSTQWQRPTWELGDAEDPGTGTEGIWGLRPPKGRSFSSLESSLDRSNSLSWYGGESYIQSMEPGAKCFAVRSLGWVEVPEEDLAPGKSSIAVNNCIQQLAQTRSRSQPPDGAWGEGQNMLMILKKDAMSLVNPLDHSLIHCQPLAVIPTDADPQYLNPWTQIL

SEQ ID NO: 37321 - protein, 651 aa, Homo sapiens
MGPASPAARGLSRRPGQPPLPLLLPLLLLLLRAQPAIGSLAGGSPGAAEAPGSAQVAGLCGRLTLHRDLRTGRWEPDPQRSRRCLRDPQRVLEYCRQMYPELQIARVEQATQAIPMERWCGGSRSGSCAHPHHQVVPFRCLPGEFVSEALLVPEGCRFLHQERMDQCESSTRRHQEAQEACSSQGLILHGSGMLLPCGSDRFRGVEYVCCPPPGTPDPSGTAVGDPSTRSWPPGSRVEGAEDEEEEESFPQPVDDYFVEPPQAEEEEETVPPPSSHTLAVVGKVTPTPRPTDGVDIYFGMPGEISEHEGFLRAKMDLEERRMRQINEVMREWAMADNQSKNLPKADRQALNEHFQSILQTLEEQVSGERQRLVETHATRVIALINDQRRAALEGFLAALQADPPQAERVLLALRRYLRAEQKEQRHTLRHYQHVAAVDPEKAQQMRFQVHTHLQVIEERVNQSLGLLDQNPHLAQELRPQIQELLHSEHLGPSELEAPAPGGSSEDKGGLQPPDSKDADTPMTLPKGSTEQDAASPEKEKMNPLEQYERKVNASVPRGFPFHSSEIQRDELAPAGTGVSREAVSGLLIMGAGGGSLIVLSMLLLRRKKPYGAISHGVVEVDPMLTLEEQQLRELQRHGYENPTYRFLEERP

SEQ ID NO: 37322 - protein, 611 aa, Homo sapiens
MLASLEKDKTAPGSAQVAGLCGRLTLHRDLRTGRWEPDPQRSRRCLRDPQRVLEYCRQMYPELQIARVEQATQAIPMERWCGGSRSGSCAHPHHQVVPFRCLPGEFVSEALLVPEGCRFLHQERMDQCESSTRRHQEAQEACSSQGLILHGSGMLLPCGSDRFRGVEYVCCPPPGTPDPSGTAVGDPSTRSWPPGSRVEGAEDEEEEESFPQPVDDYFVEPPQAEEEEETVPPPSSHTLAVVGKVTPTPRPTDGVDIYFGMPGEISEHEGFLRAKMDLEERRMRQINEVMREWAMADNQSKNLPKADRQALNEHFQSILQTLEEQVSGERQRLVETHATRVIALINDQRRAALEGFLAALQADPPQAERVLLALRRYLRAEQKEQRHTLRHYQHVAAVDPEKAQQMRFQVHTHLQVIEERVNQSLGLLDQNPHLAQELRPQIQELLHSEHLGPSELEAPAPGGSSEDKGGLQPPDSKDDTPMTLPKGSTEQDAASPEKEKMNPLEQYERKVNASVPRGFPFHSSEIQRDELAPAGTGVSREAVSGLLIMGAGGGSLIVLSMLLLRRKKPYGAISHGVVEVDPMLTLEEQQLRELQRHGYENPTYRFLEERP

SEQ ID NO: 37323 - protein, 763 aa, Homo sapiens
MAATGTAAAAATGRLLLLLLVGLTAPALALAGYIEALAANAGTGFAVAEPQIAMFCGKLNMHVNIQTGKWEPDPTGTKSCFETKEEVLQYCQEMYPELQITNVMEANQRVSIDNWCRRDKKQCKSRFVTPFKCLVGEFVSDVLLVPEKCQFFHKERMEVCENHQHWHTVVKEACLTQGMTLYSYGMLLPCGVDQFHGTEYVCCPQTKIIGSVSKEEEEEDEEEEEEEDEEEDYDVYKSEFPTEADLEDFTEAAVDEDDEDEEEGEEVVEDRDYYYDTFKGDDYNEENPTEPGSDGTMSDKEITHDVKAVCSQEAMTGPCRAVMPRWYFDLSKGKCVRFIYGGCGGNRNNFESEDYCMAVCKAMIPPTPLPTNDVDVYFETSADDNEHARFQKAKEQLEIRHRNRMDRVKKEWEEAELQAKNLPKAERQTLIQHFQAMVKALEKEAASEKQQLVETHLARVEAMLNDRRRMALENYLAALQSDPPRPHRILQALRRYVRAENKDRLHTIRHYQHVLAVDPEKAAQMKSQVMTHLHVIEERRNQSLSLLYKVPYVAQEIQEEIDELLQEQRADMDQFTASISETPVDVRVSSEESEEIPPFHPFHPFPALPENEDTQPELYHPMKKGSGVGEQDGGLIGAEEKVINSKNKVDENMVIDETLDVKEMIFNAERVGGLEEERESVGPLREDFSLSSSALIGLLVIAVAIATVIVISLVMLRKRQYGTISHGIVEVDPMLTPEERHLNKMQNHGYENPTYKYLEQMQI

SEQ ID NO: 37324 - protein, 761 aa, Homo sapiens
MLRAPGELPRQAARCSLCRLGPGRGRAFFKWRCLPASVDRGNPLWALAANAGTGFAVAEPQIAMFCGKLNMHVNIQTGKWEPDPTGTKSCFETKEEVLQYCQEMYPELQITNVMEANQRVSIDNWCRRDKKQCKSRFVTPFKCLVGEFVSDVLLVPEKCQFFHKERMEVCENHQHWHTVVKEACLTQGMTLYSYGMLLPCGVDQFHGTEYVCCPQTKIIGSVSKEEEEEDEEEEEEEDEEEDYDVYKSEFPTEADLEDFTEAAVDEDDEDEEEGEEVVEDRDYYYDTFKGDDYNEENPTEPGSDGTMSDKEITHDVKAVCSQEAMTGPCRAVMPRWYFDLSKGKCVRFIYGGCGGNRNNFESEDYCMAVCKAMIPPTPLPTNDVDVYFETSADDNEHARFQKAKEQLEIRHRNRMDRVKKEWEEAELQAKNLPKAERQTLIQHFQAMVKALEKEAASEKQQLVETHLARVEAMLNDRRRMALENYLAALQSDPPRPHRILQALRRYVRAENKDRLHTIRHYQHVLAVDPEKAAQMKSQVMTHLHVIEERRNQSLSLLYKVPYVAQEIQEEIDELLQEQRADMDQFTASISETPVDVRVSSEESEEIPPFHPFHPFPALPENEGSGVGEQDGGLIGAEEKVINSKNKVDENMVIDETLDVKEMIFNAERVGGLEEERESVGPLREDFSLSSSALIGLLVIAVAIATVIVISLVMLRKRQYGTISHGIVEVDPMLTPEERHLNKMQNHGYENPTYKYLEQMQI

SEQ ID NO: 37325 - protein, 751 aa, Homo sapiens
MAATGTAAAAATGRLLLLLLVGLTAPALALAGYIEALAANAGTGFAVAEPQIAMFCGKLNMHVNIQTGKWEPDPTGTKSCFETKEEVLQYCQEMYPELQITNVMEANQRVSIDNWCRRDKKQCKSRFVTPFKCLVGEFVSDVLLVPEKCQFFHKERMEVCENHQHWHTVVKEACLTQGMTLYSYGMLLPCGVDQFHGTEYVCCPQTKIIGSVSKEEEEEDEEEEEEEDEEEDYDVYKSEFPTEADLEDFTEAAVDEDDEDEEEGEEVVEDRDYYYDTFKGDDYNEENPTEPGSDGTMSDKEITHDVKAVCSQEAMTGPCRAVMPRWYFDLSKGKCVRFIYGGCGGNRNNFESEDYCMAVCKAMIPPTPLPTNDVDVYFETSADDNEHARFQKAKEQLEIRHRNRMDRVKKEWEEAELQAKNLPKAERQTLIQHFQAMVKALEKEAASEKQQLVETHLARVEAMLNDRRRMALENYLAALQSDPPRPHRILQALRRYVRAENKDRLHTIRHYQHVLAVDPEKAAQMKSQVMTHLHVIEERRNQSLSLLYKVPYVAQEIQEEIDELLQEQRADMDQFTASISETPVDVRVSSEESEEIPPFHPFHPFPALPENEGSGVGEQDGGLIGAEEKVINSKNKVDENMVIDETLDVKEMIFNAERVGGLEEERESVGPLREDFSLSSSALIGLLVIAVAIATVIVISLVMLRKRQYGTISHGIVEVDPMLTPEERHLNKMQNHGYENPTYKYLEQMQI

SEQ ID NO: 37326 - protein, 522 aa, Homo sapiens
MAATGTAAAAATGRLLLLLLVGLTAPALALAGYIEALAANAGTGFAVAEPQIAMFCGKLNMHVNIQTGKWEPDPTGTKSCFETKEEVLQYCQEMYPELQITNVMEANQRVSIDNWCRRDKKQCKSRFVTPFKCLVPPTPLPTNDVDVYFETSADDNEHARFQKAKEQLEIRHRNRMDRVKKEWEEAELQAKNLPKAERQTLIQHFQAMVKALEKEAASEKQQLVETHLARVEAMLNDRRRMALENYLAALQSDPPRPHRILQALRRYVRAENKDRLHTIRHYQHVLAVDPEKAAQMKSQVMTHLHVIEERRNQSLSLLYKVPYVAQEIQEEIDELLQEQRADMDQFTASISETPVDVRVSSEESEEIPPFHPFHPFPALPENEGSGVGEQDGGLIGAEEKVINSKNKVDENMVIDETLDVKEMIFNAERVGGLEEERESVGPLREDFSLSSSALIGLLVIAVAIATVIVISLVMLRKRQYGTISHGIVEVDPMLTPEERHLNKMQNHGYENPTYKYLEQMQI

SEQ ID NO: 37327 - protein, 695 aa, Homo sapiens
MAATGTAAAAATGRLLLLLLVGLTAPALALAGYIEALAANAGTGFAVAEPQIAMFCGKLNMHVNIQTGKWEPDPTGTKSCFETKEEVLQYCQEMYPELQITNVMEANQRVSIDNWCRRDKKQCKSRFVTPFKCLVGEFVSDVLLVPEKCQFFHKERMEVCENHQHWHTVVKEACLTQGMTLYSYGMLLPCGVDQFHGTEYVCCPQTKIIGSVSKEEEEEDEEEEEEEDEEEDYDVYKSEFPTEADLEDFTEAAVDEDDEDEEEGEEVVEDRDYYYDTFKGDDYNEENPTEPGSDGTMSDKEITHDVKVPPTPLPTNDVDVYFETSADDNEHARFQKAKEQLEIRHRNRMDRVKKEWEEAELQAKNLPKAERQTLIQHFQAMVKALEKEAASEKQQLVETHLARVEAMLNDRRRMALENYLAALQSDPPRPHRILQALRRYVRAENKDRLHTIRHYQHVLAVDPEKAAQMKSQVMTHLHVIEERRNQSLSLLYKVPYVAQEIQEEIDELLQEQRADMDQFTASISETPVDVRVSSEESEEIPPFHPFHPFPALPENEGSGVGEQDGGLIGAEEKVINSKNKVDENMVIDETLDVKEMIFNAERVGGLEEERESVGPLREDFSLSSSALIGLLVIAVAIATVIVISLVMLRKRQYGTISHGIVEVDPMLTPEERHLNKMQNHGYENPTYKYLEQMQI

SEQ ID NO: 37328 - protein, 159 aa, Homo sapiens [sequence omitted]

SEQ ID NO: 37329 - protein, 116 aa, Homo sapiens
MAATGTAAAAATGRLLLLLLVGLTAPALALAGYIEALAANAGTGFAVAEPQIAMFCGKLNMHVNIQTGKWEPDPTGTKSCFETKEEVLQYCQEMYPELQITNSGWRCVRITSTGTR

SEQ ID NO: 37330 - protein, 551 aa, Homo sapiens
MEVCENHQHWHTVVKEACLTQGMTLYSYGMLLPCGVDQFHGTEYVCCPQTKIIGSVSKEEEEEDEEEEEEEDEEEDYDVYKSEFPTEADLEDFTEAAVDEDDEDEEEGEEVVEDRDYYYDTFKGDDYNEENPTEPGSDGTMSDKEITHDVKVPPTPLPTNDVDVYFETSADDNEHARFQKAKEQLEIRHRNRMDRVKKEWEEAELQAKNLPKAERQTLIQHFQAMVKALEKEAASEKQQLVETHLARVEAMLNDRRRMALENYLAALQSDPPRPHRILQALRRYVRAENKDRLHTIRHYQHVLAVDPEKAAQMKSQVMTHLHVIEERRNQSLSLLYKVPYVAQEIQEEIDELLQEQRADMDQFTASISETPVDVRVSSEESEEIPPFHPFHPFPALPENEDTQPELYHPMKKGSGVGEQDGGLIGAEEKVINSKNKVDENMVIDETLDVKEMIFNAERVGGLEEERESVGPLREDFSLSSSALIGLLVIAVAIATVIVISLVMLRKRQYGTISHGIVEVDPMLTPEERHLNKMQNHGYENPTYKYLEQMQI

SEQ ID NO: 37331 - protein, 658 aa, Homo sapiens
MYPELQITNVMEANQRVSIDNWCRRDKKQCKSRFVTPFKCLVGEFVSDVLLVPEKCQFFHKERMEVCENHQHWHTVVKEACLTQGMTLYSYGMLLPCGVDQFHGTEYVCCPQTKIIGSVSKEEEEEDEEEEEEEDEEEDYDVYKSEFPTEADLEDFTEAAVDEDDEDEEEGEEVVEDRDYYYDTFKGDDYNEENPTEPGSDGTMSDKEITHDVKAVCSQEAMTGPCRAVMPRWYFDLSKGKCVRFIYGGCGGNRNNFESEDYCMAVCKAMIPPTPLPTNDVDVYFETSADDNEHARFQKAKEQLEIRHRNRMDRVKKEWEEAELQAKNLPKAERQTLIQHFQAMVKALEKEAASEKQQLVETHLARVEAMLNDRRRMALENYLAALQSDPPRPHRILQALRRYVRAENKDRLHTIRHYQHVLAVDPEKAAQMKSQVMTHLHVIEERRNQSLSLLYKVPYVAQEIQEEIDELLQEQRADMDQFTASISETPVDVRVSSEESEEIPPFHPFHPFPALPENEGSGVGEQDGGLIGAEEKVINSKNKVDENMVIDETLDVKEMIFNAERVGGLEEERESVGPLREDFSLSSSALIGLLVIAVAIATVIVISLVMLRKRQYGTISHGIVEVDPMLTPEERHLNKMQNHGYENPTYKYLEQMQI

SEQ ID NO: 37332 - protein, 585 aa, Homo sapiens
MAAVELEWIPETLYNTAISAVVDNYIRSRRDIRSLPENIQFDVYYKLYQQGRLCQLGSEFCELEVFAKVLRALDKRHLLHHCFQALMDHGVKVASVLAYSFSRRCSYIAESDAAVKEKAIQVGFVLGGFLSDAGWYSDAEKVFLSCLQLCTLHDEMLHWFRAVECCVRLLHVRNGNCKYHLGEETFKLAQTYMDKLSKHGQQANKAALYGELCALLFAKSHYDEAYKWCIEAMKEITAGLPVKVVVDVLRQASKACVVKREFKKAEQLIKHAVYLARDHFGSKHPKYSDTLLDYGFYLLNVDNICQSVAIYQAALDIRQSVFGGKNIHVATAHEDLAYSSYVHQYSSGKFDNALFHAERAIGIITHILPEDHLLLASSKRVKALILEEIAIDCHNKETEQRLLQEAHDLHLSSLQLAKKAFGEFNVQTAKHYGNLGRLYQSMRKFKEAEEMHIKAIQIKEQLLGQEDYEVALSVGHLASLYNYDMNQYENAEKLYLRSIAIGKKLFGEGYSGLEYDYRGLIKLYNSIGNYEKVFEYHNVLSNWNRLRDRQYSVTDALEDVSTSPQSTEEVVQSFLISQNVEGPSC

SEQ ID NO: 37333 - protein, 1657 aa, Homo sapiens
MDSKKRSSTEAEGSKERGLVHIWQAGSFPITPERLPGWGGKTVLQAALGVKHGVLLTEDGEVYSFGTLPWRSGPVEICPSSPILENALVGQYVITVATGSFHSGAVTDNGVAYMWGENSAGQCAVANQQYVPEPNPVSIADSEASPLLAVRILQLACGEEHTLALSISREIWAWGTGCQLGLITTAFPVTKPQKVEHLAGRVVLQVACGAFHSLALVQCLPSQDLKPVPERCNQCSQLLITMTDKEDHVIISDSHCCPLGVTLTESQAENHASTALSPSTETLDRQEEVFENTLVANDQSVATELNAVSAQITSSDAMSSQQNVMGTTEISSARNIPSYPDTQAVNEYLRKLSDHSVREDSEHGEKPVPSQPLLEEAIPNLHSPPTTSTSALNSLVVSCASAVGVRVAATYEAGALSLKKVMNFYSTTPCETGAQAGSSAIGPEGLKDSREEQVKQESMQGKKSSSLVDIREEETEGGSRRLSLPGLLSQVSPRLLRKAARVKTRTVVLTPTYSGEADALLPSLRTEVWTWGKGKEGQLGHGDVLPRLQPLCVKCLDGKEVIHLEAGGYHSLALTAKSQVYSWGSNTFGQLGHSDFPTTVPRLAKISSENGVWSIAAGRDYSLFLVDTEDFQPGLYYSGRQDPTEGDNLPENHSGSKTPVLLSCSKLGYISRVTAGKDSYLALVDKNIMGYIASLHELATTERRFYSKLSDIKSQILRPLLSLENLGTTTTVQLLQEVASRFSKLCYLIGQHGASLSSFLHGVKEARSLVILKHSSLFLDSYTEYCTSITNFLVMGGFQLLAKPAIDFLNKNQELLQDLSEVNDENTQLMEILNTLFFLPIRRLHNYAKVLLKLATCFEVASPEYQKLQDSSSCYECLALHLGRKRKEAEYTLGFWKTFPGKMTDSLRKPERRLLCESSNRALSLQHAGRFSVNWFILFNDALVHAQFSTHHVFPLATLWAEPLSEEAGGVNGLKITTPEEQFTLISSTPQEKTKWLRAISQAVDQALRGMSDLPPYGSGSSVQRQEPPISRSAKYTFYKDPRLKDATYDGRWLSGKPHGRGVLKWPDGKMYSGMFRNGLEDGYGEYRIPNKAMNKEDHYVGHWKEGKMCGQGVYSYASGEVFEGCFQDNMRHGHGLLRSGKLTSSSPSMFIGQWVMDKKAGYGVFDDITRGEKYMGMWQDDVCQGNGVVVTQFGLYYEGNFHLNKMMGNGVLLSEDDTIYEGEFSDDWTLSGKGTLTMPNGDYIEGYFSGEWGSGIKITGTYFKPSLYESDKDRPKVFRKLGNLAVPADEKWKAVFDECWRQLGCEGPGQGEVWKAWDNIAVALTTSRRQHRDSPEILSRSQTQTLESLEFIPQHVGAFSVEKYDDIRKYLIKACDTPLHPLGRLVETLVAVYRMTYVGVGANRRLLQEAVKEIKSYLKRIFQLVRFLFPELPEEGSTIPLSAPLPTERKSFCTGKSDSRSESPEPGYVVTSSGLLLPVLLPRLYPPLFMLYALDNDREEDIYWECVLRLNKQPDIALLGFLGVQRKFWPATLSILGESKKVLPTTKDACFASAVECLQQISTTFTPSDKLKVIQQTFEEISQSVLASLHEDFLWSMDDLFPVFLYVVLRARIRNLGSEVHLIEDLMDPYLQHGEQGIMFTTLKACYYQIQREKLN

SEQ ID NO: 37334 - protein, 139 aa, Homo sapiens
MDSKKRSSTEAEGSKERGLVHIWQAGSFPITPERLPGWGGKTVLQAALGVKHGVLLTEDGEVYSFGTLPWRSGPVEICPSSPILENALVGQYVITVATGSFHSGAVTDNGVAYMWGENSAGQCAVANQQYVPEPNPVSI

SEQ ID NO: 37335 - protein, 106 aa, Homo sapiens
MDSKKRSSTEAEGSKERGLVHIWQAGSFPITPERLPGWGGKTVLQAALGVKHGVLLTEDGEVYSFGTLPWRSGPVEICPSSPILENALVGQYVITVATGSFHSGAV

SEQ ID NO: 37336 - protein, 585 aa, Homo sapiens
  VARIANT 1: note = MOD_RES - Any amino acid
XLALVDKNIMGYIASLHELATTERRFYSKLSDIKSQILRPLLSLENLGTTTTVQLLQEVASRFSKLCYLIGQHGASLSSFLHGVKEARSLVILKHSSLFLDSYTEYCTSITNFLVMGGFQLLAKPAIDFLNKNQELLQDLSEVNDENTQLMEILNTLFFLPIRRLHNYAKVLLKLATCFEVASPEYQKLQDSSSCYECLALHLGRKRKEAEYTLGFWKTFPGKMTDSLRKPERRLLCESSNRALSLQHAGRFSVNWFILFNDALVHAQFSTHHVFPLATLWAEPLSEEAGGVNGLKITTPEEQFTLISSTPQEKTKWLRAISQAVDQALRGMSDLPPYGSGSSVQRQEPPISRSAKYTFYKDPRLKDATYDGRWLSGKPHGRGVLKWPDGKMYSGMFRNGLEDGYGEYRIPNKAMNKEDHYVGHWKEGKMCGQGVYSYASGEVFEGCFQDNMRHGHGLLRSGKLTSSSPSMFIGQWVMDKKAGYGVFDDITRGEKYMGMWQDDVCQGNGVVVTQFGLYYEGNFHLNKMMGNGVLLSEDDTIYEGEFSDDWTLSGKDNSGLIEQVGKCSLLPYFLKVCEALVLFLL

SEQ ID NO: 37337 - protein, 576 aa, Homo sapiens
MGYIASLHELATTERRFYSKLSDIKSQILRPLLSLENLGTTTTVQLLQEVASRFSKLCYLIGQHGASLSSFLHGVKEARSLVILKHSSLFLDSYTEYCTSITNFLVMGGFQLLAKPAIDFLNKNQELLQDLSEVNDENTQLMEILNTLFFLPIRRLHNYAKVLLKLATCFEVASPEYQKLQDSSSCYECLALHLGRKRKEAEYTLGFWKTFPGKMTDSLRKPERRLLCESSNRALSLQHAGRFSVNWFILFNDALVHAQFSTHHVFPLATLWAEPLSEEAGGVNGLKITTPEEQFTLISSTPQEKTKWLRAISQAVDQALRGMSDLPPYGSGSSVQRQEPPISRSAKYTFYKDPRLKDATYDGRWLSGKPHGRGVLKWPDGKMYSGMFRNGLEDGYGEYRIPNKAMNKEDHYVGHWKEGKMCGQGVYSYASGEVFEGCFQDNMRHGHGLLRSGKLTSSSPSMFIGQWVMDKKAGYGVFDDITRGEKYMGMWQDDVCQGNGVVVTQFGLYYEGNFHLNKMMGNGVLLSEDDTIYEGEFSDDWTLSGKDNSGLIEQVGKCSLLPYFLKVCEALVLFLL

SEQ ID NO: 37338 - protein, 396 aa, Homo sapiens
MDSKKRSSTEAEGSKERGLVHIWQAGSFPITPERLPGWGGKTVLQAALGVKHGVLLTEDGEVYSFGTLPWRSGPVEICPSSPILENALVGQYVITVATGSFHSGAVTDNGVAYMWGENSAGQCAVANQQYVPEPNPVSIADSEASPLLAVRILQLACGEEHTLALSISREIWAWGTGCQLGLITTAFPVTKPQKVEHLAGRVVLQVACGAFHSLALVQCLPSQDLKPVPERCNQCSQLLITMTDKEDHVIISDSHCCPLGVTLTESQAENHASTALSPSTETLDRQEEVFENTLVANDQSVATELNAVSAQITSSDAMSSQQNVMGTTEISSARNIPSYPDTQAVNEYLRKLSDHSVREDSEHGEKPVPSQVPAQFYKIKVCLELNCMGFSLETLK

SEQ ID NO: 37339 - protein, 725 aa, Homo sapiens
MEQSNDSLRVNHNDGEESKTSAQVFEHLICMDSRDSSFGQNDSPTVLPITTREANNSLISQNIPGPLTQTQTLSAEQFHLVDQNGQAIQYELQSLGESNAQMMIVASPTENGQVLRVIPPTQTGMAQVIIPQGQLVDVNSPRDVPEEKPSNRNLPTVRVDTLADNTSNYILHPQTSFPLPKKSVTGMLEEPLLGPLQPLSSNTPIWACRLRSCEKIGDSYRGYCVSETELESVLTFHKQQTQSVWGTRQSPSPAKPATRLMWKSQYVPYDGIPFVNAGSRAVVMECQYGPRRKGFQLKKVSEQESRSCQLYKATCPARIYIKKVQKFPEYRVPTDPKIDKKIIRMEQEKAFNMLKKNLVDAGGVLRWYVQLPTQQAHQYHELETPCLTLSPSPFPVSSLEEEETAVRDENCALPSRLHPQVAHKIQELVSQGIEQVYAVRKQLRKFVERELFKPDEVPERHNLSFFPTVNDIKNHIHEVQKSLRNGDTVYNSEIIPATLQWTTDSGNILKETMTVTFAEGNSPGESITTKVETNQTRGSLSPEPTHLLSSLSSFQPKIFTQLQGLQLQPRYTSPDESPAVVSVNNQPSSSPSGLLDTIGSAVMNNNSLLLGQSHSLQRDTCLTQNNSTASTMGNLPEPDQNLVAMDELVEVGDVEDTGNLEGTVHRILLGDVQTIPIQIIDNHSALIEENPESTISVSQVKQEPKEPALSMEAKKTVDYKKLSAT

SEQ ID NO: 37340 - protein, 725 aa, Homo sapiens; identical to SEQ ID NO: 37339

SEQ ID NO: 37341 - protein, 54 aa, Homo sapiens
MEQSNDSLRVNHNDGEESKTSAQVFEHLICMDSRDSSFGQNDSPTVLPITTREA

SEQ ID NO: 37342 - protein, 131 aa, Homo sapiens
MEQSNDSLRVNHNDGEESKTSAQVFEHLICMDSRDSSFGQNDSPTVLPITTREANNSLISQNIPGPLTQTQTLSAEQFHLVDQNGQAIQYELQSLGESNAQMMIVASPTENGQVLRVIPPTQTGMAQVIIP

SEQ ID NO: 37343 - protein, 21 aa, Homo sapiens
MEQSNDSLRVNHNDGEESKTS

SEQ ID NO: 37344 - protein, 73 aa, Homo sapiens
MEQSNDSLRVNHNDGEESKTSAQVFEHLICMDSRDSSFGQNDSPTVLPITTREANNSLISQNIPGPLTQTQTL

SEQ ID NO: 37345 - protein, 725 aa, Homo sapiens; identical to SEQ ID NO: 37339

SEQ ID NO: 37346 - protein, 73 aa, Homo sapiens; identical to SEQ ID NO: 37344

SEQ ID NO: 37347 - protein, 95 aa, Homo sapiens
MEQSNDSLRVNHNDGEESKTSAQVFEHLICMDSRDSSFGQNDSPTVLPITTREANNSLISQNIPGPLTQTQTLSAEQFHLVDQNGQAIQYELQSL

SEQ ID NO: 37348 - protein, 207 aa, Homo sapiens
MLEAWNLNLSHYLKHLICMDSRDSSFGQNDSPTVLPITTREANNSLISQNIPGPLTQTQTLSAEQFHLVDQNGQAIQYELQSLGESNAQMMIVASPTENGQVLRVIPPTQTGMAQVIIPQGQLVDVNSPRDVPEEKPSNRNLPTVRVDTLADNTSNYILHPQTSFPLPKKSVTGMLEEPLLGPLQPLSSNTPIWACRLRSCEGVELW

SEQ ID NO: 37349 - protein, 637 aa, Homo sapiens
MLEAWNLNLSHYLKMIVASPTENGQVLRVIPPTQTGMAQVIIPQGQLVDVNSPRDVPEEKPSNRNLPTVRVDTLADNTSNYILHPQTSFPLPKKSVTGMLEEPLLGPLQPLSSNTPIWACRLRSCEKIGDSYRGYCVSETELESVLTFHKQQTQSVWGTRQSPSPAKPATRLMWKSQYVPYDGIPFVNAGSRAVVMECQYGPRRKGFQLKKVSEQESRSCQLYKATCPARIYIKKVQKFPEYRVPTDPKIDKKIIRMEQEKAFNMLKKNLVDAGGVLRWYVQLPTQQAHQYHELETPCLTLSPSPFPVSSLEEEETAVRDENCALPSRLHPQVAHKIQELVSQGIEQVYAVRKQLRKFVERELFKPDEVPERHNLSFFPTVNDIKNHIHEVQKSLRNGDTVYNSEIIPATLQWTTDSGNILKETMTVTFAEGNSPGESITTKVETNQTRGSLSPEPTHLLSSLSSFQPKIFTQLQGLQLQPRYTSPDESPAVVSVNNQPSSSPSGLLDTIGSAVMNNNSLLLGQSHSLQRDTCLTQNNSTASTMGNLPEPDQNLVAMDELVEVGDVEDTGNLEGTVHRILLGDVQTIPIQIIDNHSALIEENPESTISVSQVKQEPKEPALSMEAKKTVDYKKLSAT

SEQ ID NO: 37350 - protein, 649 aa, Homo sapiens
MEQSNDSLRVNHNDGEESKTSAQVFEMIVASPTENGQVLRVIPPTQTGMAQVIIPQGQLVDVNSPRDVPEEKPSNRNLPTVRVDTLADNTSNYILHPQTSFPLPKKSVTGMLEEPLLGPLQPLSSNTPIWACRLRSCEKIGDSYRGYCVSETELESVLTFHKQQTQSVWGTRQSPSPAKPATRLMWKSQYVPYDGIPFVNAGSRAVVMECQYGPRRKGFQLKKVSEQESRSCQLYKATCPARIYIKKVQKFPEYRVPTDPKIDKKIIRMEQEKAFNMLKKNLVDAGGVLRWYVQLPTQQAHQYHELETPCLTLSPSPFPVSSLEEEETAVRDENCALPSRLHPQVAHKIQELVSQGIEQVYAVRKQLRKFVERELFKPDEVPERHNLSFFPTVNDIKNHIHEVQKSLRNGDTVYNSEIIPATLQWTTDSGNILKETMTVTFAEGNSPGESITTKVETNQTRGSLSPEPTHLLSSLSSFQPKIFTQLQGLQLQPRYTSPDESPAVVSVNNQPSSSPSGLLDTIGSAVMNNNSLLLGQSHSLQRDTCLTQNNSTASTMGNLPEPDQNLVAMDELVEVGDVEDTGNLEGTVHRILLGDVQTIPIQIIDNHSALIEENPESTISVSQVKQEPKEPALSMEAKKTVDYKKLSAT

SEQ ID NO: 37351 - protein, 185 aa, Homo sapiens
MTTPNKTPPGADPKQLERTGTVREIGSQAVWSLSSCKPGFGVDQLRDDNLETYWQSDGSQPHLVNIQFRRKTTVKTLCIYADYKSDESYTPSKISVRVGNNFHNLQEIRQLELVEPSGWIHVPLTDNHKKPTRTFMIQIAVLANHQNGRDTHMRQIKIYTPVEESSIGKFPRCTTIDFMMYRSIR

SEQ ID NO: 37352 - protein, 185 aa, Homo sapiens; identical to SEQ ID NO: 37351

SEQ ID NO: 37353 - protein, 68 aa, Homo sapiens
MTTPNKTPPGADPKQLERTGTVREIGSQAVWSLSSCKPGFGVDQLRDDNLETYWQSDGSQPHLVNIQF

SEQ ID NO: 37354 - protein, 109 aa, Homo sapiens
MTTPNKTPPGADPKQLERTGTVREIGSQAVWSLSSCKPGFGVDQLRDDNLETYWQSDGSQPHLVNIQFRRKTTVKTLCIYADYKSDESYTPSKISVRVGNNFHNLQEIR

SEQ ID NO: 37355 - protein, 185 aa, Homo sapiens; identical to SEQ ID NO: 37351

SEQ ID NO: 37356 - protein, 158 aa, Homo sapiens
MTTPNKTPPGADPKQLERTGTVREIGSQAVWSLSSCKPGFGVDQLRDDNLETYWQSDGSQPHLVNIQFRRKTTVKTLCIYADYKSDESYTPSKISVRVGNNFHNLQEIRQLELVEPSGWIHVPLTDNHKKPTRTFMIQIAVLANHQNGRDTHMRQIKI

SEQ ID NO: 37357 - protein, 158 aa, Homo sapiens; identical to SEQ ID NO: 37356

SEQ ID NO: 37358 - protein, 110 aa, Homo sapiens
MAASSSSSSAGGVSGSSVTGSGFSVSDLAPPRKALFTYPKGAGEMLEDGSERFLCESVFSYQVASTLKQVKHDQQVARMEKLAGLVEELEADEWRFKPIEQLLGFTPSSG

SEQ ID NO: 37359 - protein, 808 aa, Homo sapiens
MLRFPTCFPSFRVVGEKQLPQEIIFLVWSPKRDLIALANTAGEVLLHRLASFHRVWSFPPNENTGKEVTCLAWRPDGKLLAFALADTKKIVLCDVEKPESLHSFSVEAPVSCMHWMEVTVESSVLTSFYNAEDESNLLLPKLPTLPKNYSNTSKIFSEENSDEIIKLLGDVRLNILVLGGSSGFIELYAYGMFKIARVTGIAGTCLALCLSSDLKSLSVVTEVSTNGASEVSYFQLETNLLYSFLPEVTRMARKFTHISALLQYINLSLTCMCEAWEEILMQMDSRLTKFVQEKNTTTSVQDEFMHLLLWGKASAELQTLLMNQLTVKGLKKLGQSIESSYSSIQKLVISHLQSGSESLLYHLSELKGMASWKQKYEPLGLDAAGIEEAITAVGSFILKANELLQVIDSSMKNFKAFFRWLYVAMLRMTEDHVLPELNKMTQKDITFVAEFLTEHFNEAPDLYNRKGKYFNVERVGQYLKDEDDDLVSPPNTEGNQWYDFLQNSSHLKESPLLFPYYPRKSLHFVKRRMENIIDQCLQKPADVIGKSMNQAICIPLYRDTRSEDSTRRLFKFPFLWNNKTSNLHYLLFTILEDSLYKMCILRRHTDISQSVSNGLIAIKFGSFTYATTEKVRRSIYSCLDAQFYDDETVTVVLKDTVGREGRDRLLVQLPLSLVYNSEDSAEYQFTGTYSTRLDEQCSAIPTRTMHFEKHWRLLESMKAQYVAGNGFRKVSCVLSSNLRHVRVFEMDIDDEWELDESSDEEEEASNKPVKIKEEVLSESEAENQQAGAAALAPEIVIKVEKLDPELDS

SEQ ID NO: 37360 - protein, 162 aa, Homo sapiens
MLRFPTCFPSFRVVGEKQLPQEIIFLVWSPKRDLIALANTAGEVLLHRLASFHRVWSFPPNENTGKEVTCLAWRPDGKLLAFALADTKKIVLCDVEKPESLHSFSVEAPVSCMHWMEVTVESSVLTSFYNAEDESNLLLPKLPTLPKNYSNTSKIFSEENSD

SEQ ID NO: 37361 - protein, 809 aa, Homo sapiens
MLRFPTCFPSFRVVGEKQLPQEIIFLVWSPKRDLIALANTAGEVLLHRLASFHRVWSFPPNENTGKEVTCLAWRPDGKLLAFALADTKKIVLCDVEKPESLHSFSVEAPVSCMHWMEVTVESSVLTSFYNAEDESNLLLPKLPTLPKNYSNTSKIFSEENSDEIIKLLGDVRLNILVLGGSSGFIELYAYGMFKIARVTGIAGTCLALCLSSDLKSLSVVTEVSTNGASEVSYFQLETNLLYSFLPEVTRMARKFTHISALLQYINLSLTCMCEAWEEILMQMDSRLTKFVQEKNTTTSVQDEFMHLLLWGKASAELQTLLMNQLTVKGLKKLGQSIESSYSSIQKLVISHLQSGSESLLYHLSELKGMASWKQKYEPLGLDAAGIEEAITAVGSFILKANELLQVIDSSMKNFKAFFRWLYVAMLRMTEDHVLPELNKVMTQKDITFVAEFLTEHFNEAPDLYNRKGKYFNVERVGQYLKDEDDDLVSPPNTEGNQWYDFLQNSSHLKESPLLFPYYPRKSLHFVKRRMENIIDQCLQKPADVIGKSMNQAICIPLYRDTRSEDSTRRLFKFPFLWNNKTSNLHYLLFTILEDSLYKMCILRRHTDISQSVSNGLIAIKFGSFTYATTEKVRRSIYSCLDAQFYDDETVTVVLKDTVGREGRDRLLVQLPLSLVYNSEDSAEYQFTGTYSTRLDEQCSAIPTRTMHFEKHWRLLESMKAQYVAGNGFRKVSCVLSSNLRHVRVFEMDIDDEWELDESSDEEEEASNKPVKIKEEVLSESEAENQQAGAAALAPEIVIKVEKLDPELDS

SEQ ID NO: 37362 - protein, 755 aa, Homo sapiens
MASVHESLYFNPMMTNGVVHANVFGIKDWVTPYKIAVLVLLNEMSRTGEGAVSLMERRRLNQLLLPLLQGPDITLSKLYKLIEESCPQLANSVQIRIKLMAEGELKDMEQFFDDLSDSFSGTEPEVHKTSVVGLFLRHMILAYSKLSFSQVFKLYTALQQYFQNGEKKTVEDADMELTSRDEGERKMEKEELDVSVREEEVSCSGPLSQKQAEFFLSQQASLLKNDETKALTPASLQKELNNLLKFNPDFAEAHYLSYLNNLRVQDVFSSTHSLLHYFDRLILTGAESKSNGEEGYGRSLRYAALNLAALHCRFGHYQQAELALQEAIRIAQESNDHVCLQHCLSWLYVLGQKRSDSYVLLEHSVKKAVHFGLPYLASLGIQSLVQQRAFAGKTANKLMDALKDSDLLHWKHSLSELIDISIAQKTAIWRLYGRSTMALQQAQMLLSMNSLEAVNAGVQQNNTESFAVALCHLAELHAEQGCFAAASEVLKHLKERFPPNSQHAQLWMLCDQKIQFDRAMNDGKYHLADSLVTGITALNSIEGVYRKAVVLQAQNQMSEAHKLLQKLLVHCQKLKNTEMVISVLLSVAELYWRSSSPTIALPMLLQALALSKEYRLQYLASETVLNLAFAQLILGIPEQALSLLHMAIEPILADGAILDKGRAMFLVAKCQVASAASYDQPKKAEALEAAIENLNEAKNYFAKVDCKERIRDVVYFQARLYHTLGKTQERNRCAMLFRQLHQELPSHGVPLINHL

SEQ ID NO: 37363 - protein, 643 aa, Homo sapiens
MAEGELKDMEQFFDDLSDSFSGTEPEVHKTSVVGLFLRHMILAYSKLSFSQVFKLYTALQQYFQNGEKKTVEDADMELTSRDEGERKMEKEELDVSVREEEVSCSGPLSQKQAEFFLSQQASLLKNDETKALTPASLQKELNNLLKFNPDFAEAHYLSYLNNLRVQDVFSSTHSLLHYFDRLILTGAESKSNGEEGYGRSLRYAALNLAALHCRFGHYQQAELALQEAIRIAQESNDHVCLQHCLSWLYVLGQKRSDSYVLLEHSVKKAVHFGLPRAFAGKTANKLMDALKDSDLLHWKHSLSELIDISIAQKTAIWRLYGRSTMALQQAQMLLSMNSLEAVNAGVQQNNTESFAVALCHLAELHAEQGCFAAASEVLKHLKERFPPNSQHAQLWMLCDQKIQFDRAMNDGKYHLADSLVTGITALNSIEGVYRKAVVLQAQNQMSEAHKLLQKLLVHCQKLKNTEMVISVLLSVAELYWRSSSPTIALPMLLQALALSKEYRLQYLASETVLNLAFAQLILGIPEQALSLLHMAIEPILADGAILDKGRAMFLVAKCQVASAASYDQPKKAEALEAAIENLNEAKNYFAKVDCKERIRDVVYFQARLYHTLGKTQERNRCAMLFRQLHQELPSHGVPLINHL

SEQ ID NO: 37364 - protein, 643 aa, Homo sapiens; identical to SEQ ID NO: 37363

SEQ ID NO: 37365 - protein, 219 aa, Homo sapiens
MLSPCLSSYFVGLFLRHMILAYSKLSFSQVFKLYTALQQYFQNGEKKTVEDADMELTSRDEGERKMEKEELDVSVREEEVSCSGPLSQKQAEFFLSQQASLLKNDETKALTPASLQKELNNLLKFNPDFAEAHYLSYLNNLRVQDVFSSTHSLLHYFDRLILTGAESKSNGEEGYGRSLRYAALNLAALHCRFGHYTSPPWEYSPLFNRELLLGRRQTS

SEQ ID NO: 37366 - protein, 44 aa, Homo sapiens
MAEGELKDMEQFFDDLSDSFSGTEPEVHKTSVVGLFLRHMILAY

SEQ ID NO: 37367 - protein, 357 aa, Homo sapiens
MDALKDSDLLHWKHSLSELIDISIAQKTAIWRLYGRSTMALQQAQMLLSMNSLEAVNAGVQQNNTESFAVALCHLAELHAEQGCFAAASEVLKHLKERFPPNSQHAQLWMLCDQKIQFDRAMNDGKYHLADSLVTGITALNSIEGVYRKAVVLQAQNQMSEAHKLLQKLLVHCQKLKNTEMVISVLLSVAELYWRSSSPTIALPMLLQALALSKEYRLQYLASETVLNLAFAQLILGIPEQALSLLHMAIEPILADGAILDKGRAMFLVAKCQVASAASYDQPKKAEALEAAIENLNEAKNYFAKVDCKERIRDVVYFQARLYHTLGKTQERNRCAMLFRQLHQELPSHGVPLINHL

SEQ ID NO: 37368 - protein, 742 aa, Homo sapiens
MASVHESLYFNPMMTNGVVHANVFGIKDWVTPYKIAVLVLLNEMSRTGEGAVSLMERRRLNQLLLPLLQGPDITLSKLYKLIEESCPQLANSVQIRIKLMAEGELKDMEQFFDDLSDSFSGTEPEVHKTSVVGLFLRHMILAYSKLSFSQVFKLYTALQQYFQNGEKKTVEDADMELTSRDEGERKMEKEELDVSVREEEVSCSGPLSQKQAEFFLSQQASLLKNDETKALTPASLQKELNNLLKFNPDFAEAHYLSYLNNLRVQDVFSSTHSLLHYFDRLILTGAESKSNGEEGYGRSLRYAALNLAALHCRFGHYQQAELALQEAIRIAQESNDHVCLQHCLSWLYVLGQKRSDSYVLLEHSVKKAVHFGLPRAFAGKTANKLMDALKDSDLLHWKHSLSELIDISIAQKTAIWRLYGRSTMALQQAQMLLSMNSLEAVNAGVQQNNTESFAVALCHLAELHAEQGCFAAASEVLKHLKERFPPNSQHAQLWMLCDQKIQFDRAMNDGKYHLADSLVTGITALNSIEGVYRKAVVLQAQNQMSEAHKLLQKLLVHCQKLKNTEMVISVLLSVAELYWRSSSPTIALPMLLQALALSKEYRLQYLASETVLNLAFAQLILGIPEQALSLLHMAIEPILADGAILDKGRAMFLVAKCQVASAASYDQPKKAEALEAAIENLNEAKNYFAKVDCKERIRDVVYFQARLYHTLGKTQERNRCAMLFRQLHQELPSHGVPLINHL

SEQ ID NO: 37369 - protein, 474 aa, Homo sapiens
MELPSGPGPERLFDSHRLPGDCFLLLVLLLYAPVGFCLLVLRLFLGIHVFLVSCALPDSVLRRFVVRTMCAVLGLVARQEDSGLRDHSVRVLISNHVTPFDHNIVNLLTTCSTVSESEAESATGRFPGAQLKAPLSPLAFPMEDTELPLTPILYPTCQFFFIFLNIFLLAFSSPGSQPLLNSPPSFVCWSRGFMEMNGRGELVESLKRFCASTRLPPTPLLLFPEEEATNGREGLLRFSSWPFSIQDVVQPLTLQVQRPLVSVTVSDASWVSELLWSLFVPFTVYQVRWLRPVHRQLGEANEEFALRVQQLVAKELGQTGTRLTPADKAEHMKRQRHPRLRPQSAQSSFPPSPGPSPDVQLATLAQRVKEVLPHVPLGVIQRDLAKTGCVDLTITNLLEGAVAFMPEDITKGTQSLPTASASKFPSSGPVTPQPTALTFAKSSWARQESLQERKQALYEYARRRFTERRAQEAD

SEQ ID NO: 37370 - protein, 410 aa, Homo sapiens
MELPSGPGPERLFDSHRLPGDCFLLLVLLLYAPVGFCLLVLRLFLGIHVFLVSCALPDSVLRRFVVRTMCAVLGLVARQEDSGLRDHSVRVLISNHVTPFDHNIVNLLTTCSTPLLNSPPSFVCWSRGFMEMNGRGELVESLKRFCASTRLPPTPLLLFPEEEATNGREGLLRFSSWPFSIQDVVQPLTLQVQRPLVSVTVSDASWVSELLWSLFVPFTVYQVRWLRPVHRQLGEANEEFALRVQQLVAKELGQTGTRLTPADKAEHMKRQRHPRLRPQSAQSSFPPSPGPSPDVQLATLAQRVKEVLPHVPLGVIQRDLAKTGCVDLTITNLLEGAVAFMPEDITKGTQSLPTASASKFPSSGPVTPQPTALTFAKSSWARQESLQERKQALYEYARRRFTERRAQEAD

SEQ ID NO: 37371 - protein, 375 aa, Homo sapiens
MELPSGPGPERLFDSHRLPGDCFLLLVLLLYAPVGFCLLVLRLFLGIHVFLVSCALPDSVLRRFRFVVRTMCAVLGLVARQEDSGLRDHSVRVLISNHVTPFDHNIVNLLTTCSTPLLNSPPSFVCWSRGFMEMNGRGELVESLKRFCASTRLPPTPLLLFPEEEATNGREGLLRFSSWPFSIQDVVQPLTLQVQRPLVSVTVSDASWVSELLWSLFVPFTVYQVRWLRPVHRQLGEANEEFALRVQQLVAKELGQTGTRLTPADKAEHMKRQRHPRLRPQSAQSSFPPSPGPSPDVQLATLAQRVKEVLPHVPLGVIQRDLAKTGCVDLTITNLLEGAVAFMPEDITKGTQSLPTASASKAFDACLMMMTPQAL

SEQ ID NO: 37372 - protein, 714 aa, Homo sapiens
MASEAPSPPRSPPPPTSPEPELAQLRRKVEKLERELRSCKRQVREIEKLLHHTERLYQNAESNNQELRTQVEELSKILQRGRNEDNKKSDVEVQTENHAPWSISDYFYQTYYNDVSLPNKVTELSDQQDQAIETSILNSKDHLQVENDAYPGTDRTENVKYRQVDHFASNSQEPASALATEDTSLEGSSLAESLRAAAEAAVSQTGFSYDENTGLYFDHSTGFYYDSENQLYYDPSTGIYYYCDVESGRYQFHSRVDLQPYPTSSTKQSKDKKLKKKRKDPDSSATNEEKDLNSEDQKAFSVEHTSCNEEENFANMKKKAKIGIHHKNSPPKVTVPTSGNTIESPLHENISNSTSFKDEKIMETDSEPEEGEITDSQTEDSYDEAITSEGNVTAEDSEDEDEDKIWPPCIRVIVIRSPVLQIGSLFIITAVNPATIGREKDMEHTLRIPEVGVSKFHAEIYFDHDLQSYVLVDQGSQNGTIVNGKQILQPKTKCDPYVLEHGDEVKIGETVLSFHIHPGSDTCDGCEPGQVRAHLRLDKKDESFVGPTLSKEEKELERRKELKKIRVKYGLQNTEYEDEKTLKNPKYKDRAGKRREQVGSEGTFQRDDAPASVHSEITDSNKGRKMLEKMGWKKGEGLGKDGGGMKTPIQLQLRRTHAGLGTGKPSSFEDVHLLQNKNKKNWDKARERFTENFPETKPQKDDPGTMPWVKGTLE

SEQ ID NO: 37373 - protein, 176 aa, Homo sapiens
MASEAPSPPRSPPPPTSPEPELAQLRRKVEKLERELRSCKRQVREIEKLLHHTERLYQNAESNNQELRTQVEELSKILQRGRNEDNKKSDVEVQTENHAPWSISDYFYQTYYNDVSLPNKVTELSDQQDQAIETSILNSKDHLQVENDAYPGTDRTENVKYRQVDHFASNSQVIKC

SEQ ID NO: 37374 - protein, 675 aa, Homo sapiens
MPRAQPSSASYQPVPADPFAIVSRAQQMVEILSDENRNLRQELEGCYEKVARLQKVETEIQRVSEAYENLVKSSSKREALEKAMRNKLEGEIRRMHDFNRDLRERLETANKQLAEKEYEGSEDTRKTISQLFAKNKESQREKEKLEAELATARSTNEDQRRHIEIRDQALSNAQAKVVKLEEELKKKQVYVDKVEKMQQALVQLQAACEKREQLEHRLRTRLERELESLRIQQRQGNCQPTNVSEYNAAALMELLREKEERILALEADMTKWEQKYLEENVMRHFALDAAATVAAQRDTTVISHSPNTSYDTALEARIQKEEEEILMANKRCLDMEGRIKTLHAQIIEKDAMIKVLQQRSRKEPSKTEQLSCMRPAKSLMSISNAGSGLLSHSSTLTGSPIMEEKRDDKSWKGSLGILLGGDYRAEYVPSTPSPVPPSTPLLSAHSKTGSRDCSTQTERGTESNKTAAVAPISVPAPVAAAATAAAITATAATITTTMVAAAPVAVAAAAAPAAAAAPSPATAAATAAAVSPAAAGQIPAAASVASAAAVAPSAAAAAAVQVAPAAPAPVPAPALVPVPAPAAAQASAPAQTQAPTSAPAVAPTPAPTPTPAVAQAEVPASPATGPGPHRLSIPSLTCNPDKTDGPVFHSNTLERKTPIQILGQEPDAEMVEYLI

SEQ ID NO: 37375 - protein, 597 aa, Homo sapiens
MEHRGPPPEYPFKGMPPQSVVCKPQEPGHFYSEHRLNQPGRTEGQLMRYQHPPEYGAARPAQDISLPLSARNSQPHSPTSSLTSGGSLPLLQSPPSTRLSPARHPLVPNQGDHSAHLPRPQQHFLPNQAHQGDHYRLSQPGLSQQQQQQQQQHHHHHHHQQQQQQQPQQQPGEAYSAMPRAQPSSASYQPVPADPFAIVSRAQQMVEILSDENRNLRQELEGCYEKVARLQKVETEIQRVSEAYENLVKSSSKREALEKAMRNKLEGEIRRMHDFNRDLRERLETANKQLAEKEYEGSEDTRKTISQLFAKNKESQREKEKLEAELATARSTNEDQRRHIEIRDQALSNAQAKVVKLEEELKKKQVYVDKVEKMQQALVQLQAACEKREQLEHRLRTRLERELESLRIQQRQGNCQPTNVSEYNAAALMELLREKEERILALEADMTKWEQKYLEENVMRHFALDAAATVAAQRDTTVISHSPNTSYDTALEARIQKEEEEILMANKRCLDMEGRIKTLHAQIIEKDAMIKVLQQRSRKEPSKTEQLSCMRPAKSLMSISNAGSGLLSHSSTLTGSPIMEEKRDDKSWKGSLGNDSK

SEQ ID NO: 37376 - protein, 1084 aa, Homo sapiens
MRNSEEQPSGGTTVLQRLLQEQLRYGNPSENRSLLAIHQQATGNGPPFPSGSGNPGPQSDVLSPQDHHQQLVAHAARQEPQGQEIQSENLIMEKQLSPRMQNNEELPTYEEAKVQSQYFRGQQHASVGAAFYVTGVTNQKMRTEGRPSVQRLNPGKMHQDEGLRDLKQGHVRSLSERLMQMSLATSGVKAHPPVTSAPLSPPQPNDLYKNPTSSSEFYKAQGPLPNQHSLKGMEHRGPPPEYPFKGMPPQSVVCKPQEPGHFYSEHRLNQPGRTEGQLMRYQHPPEYGAARPAQDISLPLSARNSQPHSPTSSLTSGGSLPLLQSPPSTRLSPARHPLVPNQGDHSAHLPRPQQHFLPNQAHQGDHYRLSQPGLSQQQQQQQQQHHHHHHHQQQQQQQPQQQPGEAYSAMPRAQPSSASYQPVPADPFAIVSRAQQMVEILSDENRNLRQELEGCYEKVARLQKVETEIQRVSEAYENLVKSSSKREALEKAMRNKLEGEIRRMHDFNRDLRERLETANKQLAEKEYEGSEDTRKTISQLFAKNKESQREKEKLEAELATARSTNEDQRRHIEIRDQALSNAQAKVVKLEEELKKKQVYVDKVEKMQQALVQLQAACEKREQLEHRLRTRLERELESLRIQQRQGNCQPTNVSEYNAAALMELLREKEERILALEADMTKWEQKYLEENVMRHFALDAAATVAAQRDTTVISHSPNTSYDTALEARIQKEEEEILMANKRCLDMEGRIKTLHAQIIEKDAMIKVLQQRSRKEPSKTEQLSCMRPAKSLMSISNAGSGLLSHSSTLTGSPIMEEKRDDKSWKGSLGILLGGDYRAEYVPSTPSPVPPSTPLLSAHSKTGSRDCSTQTERGTESNKTAAVAPISVPAPVAAAATAAAITATAATITTTMVAAAPVAVAAAAAPAAAAAPSPATAAATAAAVSPAAAGQIPAAASVASAAAVAPSAAAAAAVQVAPAAPAPVPAPALVPVPAPAAAQASAPAQTQAPTSAPAVAPTPAPTPTPAVAQAEVPASPATGPGPHRLSIPSLTCNPDKTDGPVFHSNTLERKTPIQILGQEPDAEMVEYLI

SEQ ID NO: 37377 - protein, 852 aa, Homo sapiens
MEHRGPPPEYPFKGMPPQSVVCKPQEPGHFYSEHRLNQPGRTEGQLMRYQHPPEYGAARPAQDISLPLSARNSQPHSPTSSLTSGGSLPLLQSPPSTRLSPARHPLVPNQGDHSAHLPRPQQHFLPNQAHQGDHYRLSQPGLSQQQQQQQQQHHHHHHHQQQQQQQPQQQPGEAYSAMPRAQPSSASYQPVPADPFAIVSRAQQMVEILSDENRNLRQELEGCYEKVARLQKVETEIQRVSEAYENLVKSSSKREALEKAMRNKLEGEIRRMHDFNRDLRERLETANKQLAEKEYEGSEDTRKTISQLFAKNKESQREKEKLEAELATARSTNEDQRRHIEIRDQALSNAQAKVVKLEEELKKKQVYVDKVEKMQQALVQLQAACEKREQLEHRLRTRLERELESLRIQQRQGNCQPTNVSEYNAAALMELLREKEERILALEADMTKWEQKYLEENVMRHFALDAAATVAAQRDTTVISHSPNTSYDTALEARIQKEEEEILMANKRCLDMEGRIKTLHAQIIEKDAMIKVLQQRSRKEPSKTEQLSCMRPAKSLMSISNAGSGLLSHSSTLTGSPIMEEKRDDKSWKGSLGILLGGDYRAEYVPSTPSPVPPSTPLLSAHSKTGSRDCSTQTERGTESNKTAAVAPISVPAPVAAAATAAAITATAATITTTMVAAAPVAVAAAAAPAAAAAPSPATAAATAAAVSPAAAGQIPAAASVASAAAVAPSAAAAAAVQVAPAAPAPVPAPALVPVPAPAAAQASAPAQTQAPTSAPAVAPTPAPTPTPAVAQAEVPASPATGPGPHRLSIPSLTCNPDKTDGPVFHSNTLERKTPIQILGQEPDAEMVEYLI

SEQ ID NO: 37378 - protein, 182 aa, Homo sapiens
MIKVLQQRSRKEPSKTEQLSCMRPAKSLMSISNAGSGLLSHSSTLTGSPIMEEKRDDKSWKGSLGILLGGDYRAEYVPSTPSPVPPSTPLLSAHSKTGSRDCSTQTERGTESNKTAAVAPISVPAPVAAAATAAAITATAATITTTMAAAAAPSPATAAATAAAVSPAAAGQIPAAASVASA

SEQ ID NO: 37379 - protein, 1084 aa, Homo sapiens; identical to SEQ ID NO: 37376

SEQ ID NO: 37380 - protein, 503 aa, Homo sapiens
MLSQLAMLQGSLLLVVATMSVAQQTRQEADRGCETLVVQHGHCSYTFLLPKSEPCPPGPEVSRDSNTLQRESLANPLHLGKLPTQQVKQLEQALQNNTQWLKKLERAIKTILRSKLEQVQQQMAQNQTAPMLELGTSLLNQTTAQIRKLTDMEAQLLNQTSRMDAQMPETFLSTNKLENQLLLQRQKLQQLQGQNSALEKRLQALETKQQEELASILSKKAKLLNTLSRQSAALTNIERGLRGVRHNSSLLQDQQHSLRQLLVLLRHLVQERANASAPAFIMAGEQVFQDCAEIQRSGASASGVYTIQVSNATKPRKVFCDLQSSGGRWTLIQRRENGTVNFQRNWKDYKQGFGDPAGEHWLGNEVVHQLTRRAAYSLRVELQDWEGHEAYAQYEHFHLGSENQLYRLSVVGYSGSAGRQSSLVLQNTSFSTLDSDNDHCLCKCAQVMSGGWWFDACGLSNLNGVYYHAPDNKYKMDGIRWHYFKGPSYSLRASRMMIRPLDI

SEQ ID NO: 37381 - protein, 410 aa, Homo sapiens
MLSQLAMLQGSLLLVVATMSVAQQTRQEADRGCETLVVQHGHCSYTFLLPKSEPCPPGPEVSRDSNTLQRESLANPLHLGKLPTQQVKQLEQALQNNTQWLKKLERAIKTILRSKLEQVQQQMAQNQTAPMLELGTSLLNQTTAQIRKLTDMEAQLLNQTSRMDAQMPETFLSTNKLENQLLLQRQKLQQLQGQNSALEKRLQALETKQQEELASILSKKAKLLNTLSRQSAALTNIERGLRGVRHNSSLLQDQQHSLRQLLVLLRHLVQERANASAPAFIMAGEQVFQDCAEIQRSGASASGVYTIQVSNATKPRKVFCDLQSSGGRWTLIQRRENGTVNFQRNWKDYKQGFGDPAGEHWLGNEVVHQLTRRAAYSLRVELQDWEGHEAYAQYEHFHLGSENQLYRVVV

SEQ ID NO: 37382 - protein, 460 aa, Homo sapiens
MFTIKLLLFIVPLVISSRIDQDNSSFDSLSPEPKSRFAMLDDVKILANGLLQLGHGLKDFVHKTKGQINDIFQKLNIFDQSFYDLSLQTSEIKEEEKELRRTTYKLQVKNEEVKNMSLELNSKLESLLEEKILLQQKVKYLEEQLTNLIQNQPETPEHPEVTSLKTFVEKQDNSIKDLLQTVEDQYKQLNQQHSQIKEIENQLRRTSIQEPTEISLSSKPRAPRTTPFLQLNEIRNVKHDGIPAECTTIYNRGEHTSGMYAIRPSNSQVFHVYCDVISGSPWTLIQHRIDGSQNFNETWENYKYGFGRLDGEFWLGLEKIYSIVKQSNYVLRIELEDWKDNKHYIEYSFYLGNHETNYTLHLVAITGNVPNAIPENKDLVFSTWDHKAKGHFNCPEGYSGGWWWHDECGENNLNGKYNKPRAKSKPERRRGLSWKSQNGRLYSIKSTKMLIHPTDSESFE

SEQ ID NO: 37383 - protein, 388 aa, Homo sapiens
MMSPSQASLLFLNVCIFICGEAVQGNCVHHSTDSSVVNIVEDGSNAKDESKSNDTVCKEDCEESCDVKTKITREEKHFMCRNLQNSIVSYTRSTKKLLRNMMDEQQASLDYLSNQVNELMNRVLLLTTEVFRKQLDPFPHRPVQSHGLDCTDIKDTIGSVTKTPSGLYIIHPEGSSYPFEVMCDMDYRGGGRTVIQKRIDGIIDFQRLWCDYLDGFGDLLGEFWLGLKKIFYIVNQKNTSFMLYVALESEDDTLAYASYDNFWLEDETRFFKMHLGRYSGNAGDAFRGLKKEDNQNAMPFSTSDVDNDGCRPACLVNGQSVKSCSHLHNKTGWWFNECGLANLNGIHHFSGKLLATGIQWGTWTKNNSPVKIKSVSMKIRRMYNPYFK

SEQ ID NO: 37384 - protein, 470 aa, Homo sapiens
MGKPWLRALQLLLLLGASWARAGAPRCTYTFVLPPQKFTGAVCWSGPASTRATPEAANASELAALRMRVGRHEELLRELQRLAAADGAVAGEVRALRKESRGLSARLGQLRAQLQHEAGPGAGPGADLGAEPAAALALLGERVLNASAEAQRAAARFHQLDVKFRELAQLVTQQSSLIARLERLCPGGAGGQQQVLPPPPLVPVVPVRLVGSTSDTSRMLDPAPEPQRDQTQRQQEPMASPMPAGHPAVPTKPVGPWQDCAEARQAGHEQSGVYELRVGRHVVSVWCEQQLEGGGWTVIQRRQDGSVNFFTTWQHYKAGFGRPDGEYWLGLEPVYQLTSRGDHELLVLLEDWGGRGARAHYDGFSLEPESDHYRLRLGQYHGDAGDSLSWHNDKPFSTVDRDRDSYSGNCALYQRGGWWYHACAHSNLNGVWHHGGHYRSRYQDGVYWAEFRGGAYSLRKAAMLIRPLKL

SEQ ID NO: 37385 - protein, 732 aa, Homo sapiens
MGQGWATAGLPSLLFLLLCYGHPLLVPSQEASQQVTVTHGTSSQATTSSQTTTHQATAHQTSAQSPNLVTDEAEASKFVEEYDRTSQVVWNEYAEANWNYNTNITTETSKILLQKNMQIANHTLKYGTQARKFDVNQLQNTTIKRIIKKVQDLERAALPAQELEEYNKILLDMETTYSVATVCHPNGSCLQLEPDLTNVMATSRKYEDLLWAWEGWRDKAGRAILQFYPKYVELINQAARLNGYVDAGDSWRSMYETPSLEQDLERLFQELQPLYLNLHAYVRRALHRHYGAQHINLEGPIPAHLLGNMWAQTWSNIYDLVVPFPSAPSMDTTEAMLKQGWTPRRMFKEADDFFTSLGLLPVPPEFWNKSMLEKPTDGREVVCHASAWDFYNGKDFRIKQCTTVNLEDLVVAHHEMGHIQYFMQYKDLPVALREGANPGFHEAIGDVLALSVSTPKHLHSLNLLSSEGGSDEHDINFLMKMALDKIAFIPFSYLVDQWRWRVFDGSITKENYNQEWWSLRLKYQGLCPPVPRTQGDFDPGAKFHIPSSVPYIRYFVSFIIQFQFHEALCQAAGHTGPLHKCDIYQSKEAGQRLATAMKLGFSRPWPEAMQLITGQPNMSASAMLSYFKPLLDWLRTENELHGEKLGWPQYNWTPNSARSEGPLPDSGRVSFLGLDLDAQQARVGQWLLLFLGIALLVATLGLSQRLFSIRHRSLHRHSHGPQFGSEVELRHS

SEQ ID NO: 37386 - protein, 1306 aa, Homo sapiens
MGAASGRRGPGLLLPLPLLLLLPPQPALALDPGLQPGNFSADEAGAQLFAQSYNSSAEQVLFQSVAASWAHDTNITAENARRQEEAALLSQEFAEAWGQKAKELYEPIWQNFTDPQLRRIIGAVRTLGSANLPLAKRQQYNALLSNMSRIYSTAKVCLPNKTATCWSLDPDLTNILASSRSYAMLLFAWEGWHNAAGIPLKPLYEDFTALSNEAYKQDGFTDTGAYWRSWYNSPTFEDDLEHLYQQLEPLYLNLHAFVRRALHRRYGDRYINLRGPIPAHLLGDMWAQSWENIYDMVVPFPDKPNLDVTSTMLQQGWNATHMFRVAEEFFTSLELSPMPPEFWEGSMLEKPADGREVVCHASAWDFYNRKDFRIKQCTRVTMDQLSTVHHEMGHIQYYLQYKDLPVSLRRGANPGFHEAIGDVLALSVSTPEHLHKIGLLDRVTNDTESDINYLLKMALEKIAFLPFGYLVDQWRWGVFSGRTPPSRYNFDWWYLRTKYQGICPPVTRNETHFDAGAKFHVPNVTPYIRYFVSFVLQFQFHEALCKEAGYEGPLHQCDIYRSTKAGAKLRKVLQAGSSRPWQEVLKDMVGLDALDAQPLLKYFQPVTQWLQEQNQQNGEVLGWPEYQWHPPLPDNYPEGIDLVTDEAEASKFVEEYDRTSQVVWNEYAEANWNYNTNITTETSKILLQKNMQIANHTLKYGTQARKFDVNQLQNTTIKRIIKKVQDLERAALPAQELEEYNKILLDMETTYSVATVCHPNGSCLQLEPDLTNVMATSRKYEDLLWAWEGWRDKAGRAILQFYPKYVELINQAARLNGYVDAGDSWRSMYETPSLEQDLERLFQELQPLYLNLHAYVRRALHRHYGAQHINLEGPIPAHLLGNMWAQTWSNIYDLVVPFPSAPSMDTTEAMLKQGWTPRRMFKEADDFFTSLGLLPVPPEFWNKSMLEKPTDGREVVCHASAWDFYNGKDFRIKQCTTVNLEDLVVAHHEMGHIQYFMQYKDLPVALREGANPGFHEAIGDVLALSVSTPKHLHSLNLLSSEGGSDEHDINFLMKMALDKIAFIPFSYLVDQWRWRVFDGSITKENYNQEWWSLRLKYQGLCPPVPRTQGDFDPGAKFHIPSSVPYIRYFVSFIIQFQFHEALCQAAGHTGPLHKCDIYQSKEAGQRLATAMKLGFSRPWPEAMQLITGQPNMSASAMLSYFKPLLDWLRTENELHGEKLGWPQYNWTPNSARSEGPLPDSGRVSFLGLDLDAQQARVGQWLLLFLGIALLVATLGLSQRLFSIRHRSLHRHSHGPQFGSEVELRHS

SEQ ID NO: 37387 - protein, 691 aa, Homo sapiens
MGQGWATAGLPSLLFLLLCYGHPLLVPSQEASQQVTVTHGTSSQATTSSQTTTHQATAHQTSAQSPNLVTDEAEASKFVEEYDRTSQVVWNEYAEANWNYNTNITTETSKILLQKNMQIANHTLKYGTQARKFDVNQLQNTTIKRIIKKVQDLERAALPAQELEEYNKILLDMETTYSVATVCHPNGSCLQLEPDLTNVMATSRKYEDLLWAWEGWRDKAGRAILQFYPKYVELINQAARLNGYVDAGDSWRSMYETPSLEQDLERLFQELQPLYLNLHAYVRRALHRHYGAQHINLEGPIPAHLLGNMWAQTWSNIYDLVVPFPSAPSMDTTEAMLKQGWTPRRMFKEADDFFTSLGLLPVPPEFWNKSMLEKPTDGREVVCHASAWDFYNGKDFRIKQCTTVNLEDLVVAHHEMGHIQYFMQYKDLPVALREGANPGFHEAIGDVLALSVSTPKHLHSLNLLSSEGGSDEHDINFLMKMALDKIAFIPFSYLVDQWRWRVFDGSITKENYNQEWWSLRLKYQGLCPPVPRTQGDFDPGAKFHIPSSVPYIRTAMKLGFSRPWPEAMQLITGQPNMSASAMLSYFKPLLDWLRTENELHGEKLGWPQYNWTPNSARSEGPLPDSGRVSFLGLDLDAQQARVGQWLLLFLGIALLVATLGLSQRLFSIRHRSLHRHSHGPQFGSEVELRHS

SEQ ID NO: 37388 - protein, 511 aa, Homo sapiens
MQIANHTLKYGTQARKFDVNQLQNTTIKRIIKKVQDLERAALPAQELEEYNKILLDMETTYSVATVCHPNGSCLQLEPDLTNVMATSRKYEDLLWAWEGWRDKAGRAILQFYPKYVELINQAARLNGNMWAQTWSNIYDLVVPFPSAPSMDTTEAMLKQGWTPRRMFKEADDFFTSLGLLPVPPEFWNKSMLEKPTDGREVVCHASAWDFYNGKDFRIKQCTTVNLEDLVVAHHEMGHIQYFMQYKDLPVALREGANPGFHEAIGDVLALSVSTPKHLHSLNLLSSEGGSDEHDINFLMKMALDKIAFIPFSYLVDQWRWRVFDGSITKENYNQEWWSLRLKYQGLCPPVPRTQGDFDPGAKFHIPSSVPYIRTAMKLGFSRPWPEAMQLITGQPNMSASAMLSYFKPLLDWLRTENELHGEKLGWPQYNWTPNSARSEGPLPDSGRVSFLGLDLDAQQARVGQWLLLFLGIALLVATLGLSQRLFSIRHRSLHRHSHGPQFGSEVELRHS

SEQ ID NO: 37389 - protein, 1145 aa, Homo sapiens
MGAASGRRGPGLLLPLPLLLLLPPQPALALDPGLQPGNFSADEAGAQLFAQSYNSSAEQVLFQSVAASWAHDTNITAENARRQEEAALLSQEFAEAWGQKAKELYEPIWQNFTDPQLRRIIGAVRTLGSANLPLAKRQQYNALLSNMSRIYSTAKVCLPNKTATCWSLDPDLTNILASSRSYAMLLFAWEGWHNAAGIPLKPLYEDFTALSNEAYKQDGFTDTGAYWRSWYNSPTFEDDLEHLYQQLEPLYLNLHAFVRRALHRRYGDRYINLRGPIPAHLLGDMWAQSWENIYDMVVPFPDKPNLDVTSTMLQQGWNATHMFRVAEEFFTSLELSPMPPEFWEGSMLEKPADGREVVCHASAWDFYNRKDFRIKQCTRVTMDQLSTVHHEMGHIQYYLQYKDLPVSLRRGANPGFHEAIGDVLALSVSTPEHLHKIGLLDRVTNDTESDINYLLKMALEKIAFLPFGYLVDQWRWGVFSGRTPPSRYNFDWWYLRTKYQGICPPVTRNETHFDAGAKFHVPNVTPYIRYFVSFVLQFQFHEALCKEAGYEGPLHQCDIYRSTKAGAKLRKVLQAGSSRPWQEVLKDMVGLDALDAQPLLKYFQPVTQWLQEQNQQNGEVLGWPEYQWHPPLPDNYPEGIDLVTDEAEASKFVEEYDRTSQVVWNEYAEANWNYNTNITTETSKILLQKNMQIANHTLKYGTQARKFDVNQLQNTTIKRIIKKVQDLERAALPAQELEEYNKILLDMETTYSVATVCHPNGSCLQLEPDLTNVMATSRKYEDLLWAWEGWRDKAGRAILQFYPKYVELINQAARLNGYVDAGDSWRSMYETPSLEQDLERLFQELQPLYLNLHAYVRRALHRHYGAQHINLEGPIPAHLLGNMWAQTWSNIYDLVVPFPSAPSMDTTEAMLKQGWTPRRMFKEADDFFTSLGLLPVPPEFWNKSMLEKPTDGREVVCHASAWDFYNGKDFRIKQCTTVNLEDLVVAHHEMGHIQYFMQYKDLPVALREGANPGFHEAIGDVLALSVSTPKHLHSLNLLSSEGGSDEHDINFLMKMALDKIAFIPFSYLVDQWRWRVFDGSITKENYNQEWWSLRLKYQGLCPPVPRTQGDFDPGAKFHIPSSVPYIRYFVSFIIQFHPFSQHTAA

SEQ ID NO: 37390 - protein, 475 aa, Homo sapiens
MGAASGRRGPGLLLPLPLLLLLPPQPALALDPGLQPGNFSADEAGAQLFAQSYNSSAEQVLFQSVAASWAHDTNITAENARRQEEAALLSQEFAEAWGQKAKELYEPIWQNFTDPQLRRIIGAVRTLGSANLPLAKRQQYNALLSNMSRIYSTAKVCLPNKTATCWSLDPDLTNILASSRSYAMLLFAWEGWHNAAGIPLKPLYEDFTALSNEAYKQDGFTDTGAYWRSWYNSPTFEDDLEHLYQQLEPLYLNLHAFVRRALHRRYGDRYINLRGPIPAHLLGDMWAQSWENIYDMVVPFPDKPNLDVTSTMLQQGWNATHMFRVAEEFFTSLELSPMPPEFWEGSMLEKPADGREVVCHASAWDFYNRKDFRIKQCTRVTMDQLSTVHHEMGHIQYYLQYKDLPVSLRRGANPGFHEAIGDVLALSVSTPEHLHKIGLLDRVTNDTEPSIRGSVLLLPETKPTLMLELSFMFQM

SEQ ID NO: 37391 - protein, 359 aa, Homo sapiens [sequence omitted]

SEQ ID NO: 37392 - protein, 359 aa, Homo sapiens [sequence omitted]

SEQ ID NO: 37393 - protein, 359 aa, Homo sapiens [sequence omitted]

SEQ ID NO: 37394 - protein, 359 aa, Homo sapiens [sequence omitted]

SEQ ID NO: 37395 - protein, 359 aa, Homo sapiens [sequence omitted]

SEQ ID NO: 37396 - protein, 359 aa, Homo sapiens [sequence omitted]

SEQ ID NO: 37397 - protein, 359 aa, Homo sapiens [sequence omitted]

SEQ ID NO: 37398 - protein, 359 aa, Homo sapiens [sequence omitted]

SEQ ID NO: 37399 - protein, 359 aa, Homo sapiens [sequence omitted]

SEQ ID NO: 37400 - protein, 363 aa, Homo sapiens
MKGNSTLATTSKNITSGLHFGLVNISGNNESTLNCSQKPSDKHLDAIPILYYIIFVIGFLVNIVVVTLFCCQKGPKKVSSIYIFNLAVADLLLLATLPLWATYYSYRYDWLFGPVMCKVFGSFLTLNMFASIFFITCMSVDRYQSVIYPFLSQRRNPWQASYIVPLVWCMACLSSLPTFYFRDVRTIEYLGVNACIMAFPPEKYAQWSAGIALMKNILGFIIPLIFIATCYFGIRKHLLKTNSYGKNRITRDQVLKMAAAVVLAFIICWLPFHVLTFLDALAWMGVINSCEVIAVIDLALPFAILLGFTNSCVNPFLYCFVGNRFQQKLRSVFRVPITWLQGKRESMSCRKSSSLREMETFVS

SEQ ID NO: 37401 - protein, 485 aa, Homo sapiens
MRKRAPQSEMAPAGVSLRATILCLLAWAGLAAGDRVYIHPFHLVIHNESTCEQLAKANAGKPKDPTFIPAPIQAKTSPVDEKALQDQLVLVAAKLDTEDKLRAAMVGMLANFLGFRIYGMHSELWGVVHGATVLSPTAVFGTLASLYLGALDHTADRLQAILGVPWKDKNCTSRLDAHKVLSALQAVQGLLVAQGRADSQAQLLLSTVVGVFTAPGLHLKQPFVQGLALYTPVVLPRSLDFTELDVAAEKIDRFMQAVTGWKTGCSLMGASVDSTLAFNTYVHFQGKMKGFSLLAEPQEFWVDNSTSVSVPMLSGMGTFQHWSDIQDNFSVTQVPFTESACLLLIQPHYASDLDKVEGLTFQQNSLNWMKKLSPRTIHLTMPQLVLQGSYDLQDLLAQAELPAILHTELNLQKLSNDRIRVGEVLNSIFFELEADEREPTESTQQLNKPEVLEVTLNRPFLFAVYDQSATALHFLGRVANPLSTA

SEQ ID NO: 37402 - protein, 403 aa, Homo sapiens
MRKRAPQSEMAPAGVSLRATILCLLAWAGLAAGDRVYIHPFHLVIHNESTCEQLAKANAGKPKDPTFIPAPIQAKTSPVDEKALQDQLVLVAAKLDTEDKLRAAMVGMLANFLGFRIYGMHSELWGVVHGATVLSPTAVFGTLASLYLGALDHTADRLQAILDVAAEKIDRFMQAVTGWKTGCSLMGASVDSTLAFNTYVHFQGKMKGFSLLAEPQEFWVDNSTSVSVPMLSGMGTFQHWSDIQDNFSVTQVPFTESACLLLIQPHYASDLDKVEGLTFQQNSLNWMKKLSPRTIHLTMPQLVLQGSYDLQDLLAQAELPAILHTELNLQKLSNDRIRVGEVLNSIFFELEADEREPTESTQQLNKPEVLEVTLNRPFLFAVYDQSATALHFLGRVANPLSTA

SEQ ID NO: 37403 - protein, 492 aa, Homo sapiens
MVKFPALTHYWPLIRFLVPLGITNIAIDFGEQALNRGIAAVKEDAVEMLASYGLAYSLMKFFTGPMSDFKNVGLVFVNSKRDRTKAVLCMVVAGAIAAVFHTLIAYSDLGYYIINKLHHVDESVGSKTRRAFLYLAAFPFMDAMAWTHAGILLKHKYSFLVGCASISDVIAQVVFVAILLHSHLECREPLLIPILSLYMGALVRCTTLCLGYYKNIHDIIPDRSGPELGGDATIRKMLSFWWPLALILATQRISRPIVNLFVSRDLGGSSAATEAVAILTATYPVGHMPYGWLTEIRAVYPAFDKNNPSNKLVSTSNTVTAAHIKKFTFVCMALSLTLCFVMFWTPNVSEKILIDIIGVDFAFAELCVVPLRIFSFFPVPVTVRAHLTGWLMTLKKTFVLAPSSVLRIIVLIASLVVLPYLGVHGATLGVGSLLAGFVGESTMVAIAACYVYRKQKKKMENESATEGEDSAMTDMPPTEEVTDIVEMREENE

SEQ ID NO: 37404 - protein, 294 aa, Homo sapiens
MGALVRCTTLCLGYYKNIHDIIPDRSGPELGGDATIRKMLSFWWPLALILATQRISRPIVNLFVSRDLGGSSAATEAVAILTATYPVGHMPYGWLTEIRAVYPAFDKNNPSNKLVSTSNTVTAAHIKKFTFVCMALSLTLCFVMFWTPNVSEKILIDIIGVDFAFAELCVVPLRIFSFFPVPVTVRAHLTGWLMTLKKTFVLAPSSVLRIIVLIASLVVLPYLGVHGATLGVGSLLAGFVGESTMVAIAACYVYRKQKKKMENESATEGEDSAMTDMPPTEEVTDIVEMREENE

SEQ ID NO: 37405 - protein, 156 aa, Homo sapiens
MWTFVTQLLVTLVLLSFFLVSCQNVMHIVRGSLCFVLKHIHQELDKELGESEGLSDDEETISTRVVRRRVFLKGNEFQNIPGEQVTEEQFTDEQGNIVTKKIIRKVVRQIDLSSADAAQEHEEVTVEGPLEDPSELEVDIDYFMKHSKDHTSTPNP

SEQ ID NO: 37406 - protein, 1897 aa, Homo sapiens
MAQAAKQLKKIKDIEAQALQEQKEKEESNRKRRNRSRDRKKKADAATSFLRAARSGNLDKALDHLRNGVDINTCNQNGLNGLHLASKEGHVKMVVELLHKEIILETTTKKGNTALHIAALAGQDEVVRELVNYGANVNAQSQKGFTPLYMAAQENHLEVVKFLLENGANQNVATEDGFTPLAVALQQGHENVVAHLINYGTKGKVRLPALHIAARNDDTRTAAVLLQNDPNPDVLSKTGFTPLHIAAHYENLNVAQLLLNRGASVNFTPQNGITPLHIASRRGNVIMVRLLLDRGAQIETKTKDELTPLHCAARNGHVRISEILLDHGAPIQAKTKNGLSPIHMAAQGDHLDCVRLLLQYDAEIDDITLDHLTPLHVAAHCGHHRVAKVLLDKGAKPNSRALNGFTPLHIACKKNHVRVMELLLKTGASIDAVTESGLTPLHVASFMGHLPIVKNLLQRGASPNVSNVKVETPLHMAARAGHTEVAKYLLQNKAKVNAKAKDDQTPLHCAARIGHTNMVKLLLENNANPNLATTAGHTPLHIAAREGHVETVLALLEKEASQACMTKKGFTPLHVAAKYGKVRVAELLLERDAHPNAAGKNGLTPLHVAVHHNNLDIVKLLLPRGGSPHSPAWNGYTPLHIAAKQNQVEVARSLLQYGGSANAESVQGVTPLHLAAQEGHAEMVALLLSKQANGNLGNKSGLTPLHLVAQEGHVPVADVLIKHGVMVDATTRMGYTPLHVASHYGNIKLVKFLLQHQADVNAKTKLGYSPLHQAAQQGHTDIVTLLLKNGASPNEVSSDGTTPLAIAKRLGYISVTDVLKVVTDETSFVLVSDKHRMSFPETVDEILDVSEDEGTAHITIMGEELISFKAERRDSRDVDEEKELLDFVPKLDQVVESPAIPRIPCAMPETVVIRSEEQEQASKEYDEDSLIPSSPATETSDNISPVASPVHTGFLVSFMVDARGGSMRGSRHNGLRVVIPPRTCAAPTRITCRLVKPQKLSTPPPLAEEEGLASRIIALGPTGAQFLSPVIVEIPHFASHGRGDRELVVLRSENGSVWKEHRSRYGESYLDQILNGMDEELGSLEELEKKRVCRIITTDFPLYFVIMSRLCQDYDTIGPEGGSLKSKLVPLVQATFPENAVTKRVKLALQAQPVPDELVTKLLGNQATFSPIVTVEPRRRKFHRPIGLRIPLPPSWTDNPRDSGEGDTTSLRLLCSVIGGTDQAQWEDITGTTKLVYANECANFTTNVSARFWLSDCPRTAEAVNFATLLYKELTAVPYMAKFVIFAKMNDPREGRLRCYCMTDDKVDKTLEQHENFVEVARSRDIEVLEGMSLFAELSGNLVPVKKAAQQRSFHFQSFRENRLAMPVKVRDSSREPGGSLSFLRKAMKYEDTQHILCHLNITMPPCAKGSGAEDRRRTPTPLALRYSILSESTPGSLSGTEQAEMKMAVISEHLGLSWAELARELQFSVEDINRIRVENPNSLLEQSVALLNLWVIREGQNANMENLYTALQSIDRGEIVNMLEGSGRQSRNLKPDRRHTDRDYSLSPSQMNGYSSLQDELLSPASLGCALSSPLRADQYWNEVAVLDAIPLAATEHDTMLEMSDMQVWSAGLTPSLVTAEDSSLECSKAEDSDATGHEWKLEGALSEEPRGPELGSLELVEDDTVDSDATNGLIDLLEQEEGQRSEEKLPGSKRQDDATGAGQDSENEVSLVSGHQRGQARITHSPTVSQVTERSQDRLQDWDADGSIVSYLQDAAQGSWQEEVTQGPHSFQGTSTMTEGLEPGGSQEYEKVLVSVSEHTWTEQPEAESSQADRDRRQQGQEEQVQEAKNTFTQVVQGNEFQNIPGEQVTEEQFTDEQGNIVTKKIIRKVVRQIDLSSADAAQEHEEDHTSTPNP

SEQ ID NO: 37407 - protein, 1880 aa, Homo sapiens
MPYSVGFREADAATSFLRAARSGNLDKALDHLRNGVDINTCNQNGLNGLHLASKEGHVKMVVELLHKEIILETTTKKGNTALHIAALAGQDEVVRELVNYGANVNAQSQKGFTPLYMAAQENHLEVVKFLLENGANQNVATEDGFTPLAVALQQGHENVVAHLINYGTKGKVRLPALHIAARNDDTRTAAVLLQNDPNPDVLSKTGFTPLHIAAHYENLNVAQLLLNRGASVNFTPQNGITPLHIASRRGNVIMVRLLLDRGAQIETKTKDELTPLHCAARNGHVRISEILLDHGAPIQAKTKNGLSPIHMAAQGDHLDCVRLLLQYDAEIDDITLDHLTPLHVAAHCGHHRVAKVLLDKGAKPNSRALNGFTPLHIACKKNHVRVMELLLKTGASIDAVTESGLTPLHVASFMGHLPIVKNLLQRGASPNVSNVKVETPLHMAARAGHTEVAKYLLQNKAKVNAKAKDDQTPLHCAARIGHTNMVKLLLENNANPNLATTAGHTPLHIAAREGHVETVLALLEKEASQACMTKKGFTPLHVAAKYGKVRVAELLLERDAHPNAAGKNGLTPLHVAVHHNNLDIVKLLLPRGGSPHSPAWNGYTPLHIAAKQNQVEVARSLLQYGGSANAESVQGVTPLHLAAQEGHAEMVALLLSKQANGNLGNKSGLTPLHLVAQEGHVPVADVLIKHGVMVDATTRMGYTPLHVASHYGNIKLVKFLLQHQADVNAKTKLGYSPLHQAAQQGHTDIVTLLLKNGASPNEVSSDGTTPLAIAKRLGYISVTDVLKVVTDETSFVLVSDKHRMSFPETVDEILDVSEDEGEELISFKAERRDSRDVDEEKELLDFVPKLDQVVESPAIPRIPCAMPETVVIRSEEQEQASKEYDEDSLIPSSPATETSDNISPVASPVHTGFLVSFMVDARGGSMRGSRHNGLRVVIPPRTCAAPTRITCRLVKPQKLSTPPPLAEEEGLASRIIALGPTGAQFLSPVIVEIPHFASHGRGDRELVVLRSENGSVWKEHRSRYGESYLDQILNGMDEELGSLEELEKKRVCRIITTDFPLYFVIMSRLCQDYDTIGPEGGSLKSKLVPLVQATFPENAVTKRVKLALQAQPVPDELVTKLLGNQATFSPIVTVEPRRRKFHRPIGLRIPLPPSWTDNPRDSGEGDTTSLRLLCSVIGGTDQAQWEDITGTTKLVYANECANFTTNVSARFWLSDCPRTAEAVNFATLLYKELTAVPYMAKFVIFAKMNDPREGRLRCYCMTDDKVDKTLEQHENFVEVARSRDIEVLEGMSLFAELSGNLVPVKKAAQQRSFHFQSFRENRLAMPVKVRDSSREPGGSLSFLRKAMKYEDTQHILCHLNITMPPCAKGSGAEDRRRTPTPLALRYSILSESTPGSLSGTEQAEMKMAVISEHLGLSWAELARELQFSVEDINRIRVENPNSLLEQSVALLNLWVIREGQNANMENLYTALQSIDRGEIVNMLEGSGRQSRNLKPDRRHTDRDYSLSPSQMNGYSSLQDELLSPASLGCALSSPLRADQYWNEVAVLDAIPLAATEHDTMLEMSDMQVWSAGLTPSLVTAEDSSLECSKAEDSDATGHEWKLEGALSEEPRGPELGSLELVEDDTVDSDATNGLIDLLEQEEGQRSEEKLPGSKRQDDATGAGQDSENEVSLVSGHQRGQARITHSPTVSQVTERSQDRLQDWDADGSIVSYLQDAAQGSWQEEVTQGPHSFQGTSTMTEGLEPGGSQEYEKVLVSVSEHTWTEQPEAESSQADRDRRQQGQEEQVQEAKNTFTQVVQGNEFQNIPGEQVTEEQFTDEQGNIVTKKIIRKVVRQIDLSSADAAQEHEEVELRGSGLQPDLIEGRKGAQIVKRASLKRGKQ

SEQ ID NO: 37408 - protein, 155 aa, Homo sapiens
MWTFVTQLLVTLVLLSFFLVSCQNVMHIVRGSLCFVLKHIHQELDKELGESEGLSDDEETISTRVVRRRVFLKGNEFQNIPGEQVTEEQFTDEQGNIVTKKIIRKVVRQIDLSSADAAQEHEEVELRGSGLQPDLIEGRKGAQIVKRASLKRGKQ

SEQ ID NO: 37409 - protein, 1881 aa, Homo sapiens
MPYSVGFREADAATSFLRAARSGNLDKALDHLRNGVDINTCNQNGLNGLHLASKEGHVKMVVELLHKEIILETTTKKGNTALHIAALAGQDEVVRELVNYGANVNAQSQKGFTPLYMAAQENHLEVVKFLLENGANQNVATEDGFTPLAVALQQGHENVVAHLINYGTKGKVRLPALHIAARNDDTRTAAVLLQNDPNPDVLSKTGFTPLHIAAHYENLNVAQLLLNRGASVNFTPQNGITPLHIASRRGNVIMVRLLLDRGAQIETKTKDELTPLHCAARNGHVRISEILLDHGAPIQAKTKNGLSPIHMAAQGDHLDCVRLLLQYDAEIDDITLDHLTPLHVAAHCGHHRVAKVLLDKGAKPNSRALNGFTPLHIACKKNHVRVMELLLKTGASIDAVTESGLTPLHVASFMGHLPIVKNLLQRGASPNVSNVKVETPLHMAARAGHTEVAKYLLQNKAKVNAKAKDDQTPLHCAARIGHTNMVKLLLENNANPNLATTAGHTPLHIAAREGHVETVLALLEKEASQACMTKKGFTPLHVAAKYGKVRVAELLLERDAHPNAAGKNGLTPLHVAVHHNNLDIVKLLLPRGGSPHSPAWNGYTPLHIAAKQNQVEVARSLLQYGGSANAESVQGVTPLHLAAQEGHAEMVALLLSKQANGNLGNKSGLTPLHLVAQEGHVPVADVLIKHGVMVDATTRMGYTPLHVASHYGNIKLVKFLLQHQADVNAKTKLGYSPLHQAAQQGHTDIVTLLLKNGASPNEVSSDGTTPLAIAKRLGYISVTDVLKVVTDETSFVLVSDKHRMSFPETVDEILDVSEDEGEELISFKAERRDSRDVDEEKELLDFVPKLDQVVESPAIPRIPCAMPETVVIRSEEQEQASKEYDEDSLIPSSPATETSDNISPVASPVHTGFLVSFMVDARGGSMRGSRHNGLRVVIPPRTCAAPTRITCRLVKPQKLSTPPPLAEEEGLASRIIALGPTGAQFLSPVIVEIPHFASHGRGDRELVVLRSENGSVWKEHRSRYGESYLDQILNGMDEELGSLEELEKKRVCRIITTDFPLYFVIMSRLCQDYDTIGPEGGSLKSKLVPLVQATFPENAVTKRVKLALQAQPVPDELVTKLLGNQATFSPIVTVEPRRRKFHRPIGLRIPLPPSWTDNPRDSGEGDTTSLRLLCSVIGGTDQAQWEDITGTTKLVYANECANFTTNVSARFWLSDCPRTAEAVNFATLLYKELTAVPYMAKFVIFAKMNDPREGRLRCYCMTDDKVDKTLEQHENFVEVARSRDIEVLEGMSLFAELSGNLVPVKKAAQQRSFHFQSFRENRLAMPVKVRDSSREPGGSLSFLRKAMKYEDTQHILCHLNITMPPCAKGSGAEDRRRTPTPLALRYSILSESTPGSLSGTEQAEMKMAVISEHLGLSWAELARELQFSVEDINRIRVENPNSLLEQSVALLNLWVIREGQNANMENLYTALQSIDRGEIVNMLEGSGRQSRNLKPDRRHTDRDYSLSPSQMNGYSSLQDELLSPASLGCALSSPLRADQYWNEVAVLDAIPLAATEHDTMLEMSDMQVWSAGLTPSLVTAEDSSLECSKAEDSDATGHEWKLEGALSEEPRGPELGSLELVEDDTVDSDATNGLIDLLEQEEGQRSEEKLPGSKRQDDATGAGQDSENEVSLVSGHQRGQARITHSPTVSQVTERSQDRLQDWDADGSIVSYLQDAAQGSWQEEVTQGPHSFQGTSTMTEGLEPGGSQEYEKVLVSVSEHTWTEQPEAESSQADRDRRQQGQEEQVQEAKNTFTQVVQGNEFQNIPGEQVTEEQFTDEQGNIVTKKIIRKVVRQIDLSSADAAQEHEEVTVEGPLEDPSELEVDIDYFMKHSKDHTSTPNP

SEQ ID NO: 37410 - protein, 109 aa, Homo sapiens
MWTFVTQLLVTLVLLSFFLVSCQNVMHIVRGSLCFVLKHIHQELDKELGESEGLSDDEETISTRVVRRRVFLKGNEFQNIPGEQVTEEQFTDEQGNIVTKKDHTSTPNP

SEQ ID NO: 37411 - protein, 1858 aa, Homo sapiens
MPYSVGFREADAATSFLRAARSGNLDKALDHLRNGVDINTCNQNGLNGLHLASKEGHVKMVVELLHKEIILETTTKKGNTALHIAALAGQDEVVRELVNYGANVNAQSQKGFTPLYMAAQENHLEVVKFLLENGANQNVATEDGFTPLAVALQQGHENVVAHLINYGTKGKVRLPALHIAARNDDTRTAAVLLQNDPNPDVLSKTGFTPLHIAAHYENLNVAQLLLNRGASVNFTPQNGITPLHIASRRGNVIMVRLLLDRGAQIETKTKDELTPLHCAARNGHVRISEILLDHGAPIQAKTKNGLSPIHMAAQGDHLDCVRLLLQYDAEIDDITLDHLTPLHVAAHCGHHRVAKVLLDKGAKPNSRALNGFTPLHIACKKNHVRVMELLLKTGASIDAVTESGLTPLHVASFMGHLPIVKNLLQRGASPNVSNVKVETPLHMAARAGHTEVAKYLLQNKAKVNAKAKDDQTPLHCAARIGHTNMVKLLLENNANPNLATTAGHTPLHIAAREGHVETVLALLEKEASQACMTKKGFTPLHVAAKYGKVRVAELLLERDAHPNAAGKNGLTPLHVAVHHNNLDIVKLLLPRGGSPHSPAWNGYTPLHIAAKQNQVEVARSLLQYGGSANAESVQGVTPLHLAAQEGHAEMVALLLSKQANGNLGNKSGLTPLHLVAQEGHVPVADVLIKHGVMVDATTRMGYTPLHVASHYGNIKLVKFLLQHQADVNAKTKLGYSPLHQAAQQGHTDIVTLLLKNGASPNEVSSDGTTPLAIAKRLGYISVTDVLKVVTDETSFVLVSDKHRMSFPETVDEILDVSEDEGEELISFKAERRDSRDVDEEKELLDFVPKLDQVVESPAIPRIPCAMPETVVIRSEEQEQASKEYDEDSLIPSSPATETSDNISPVASPVHTGFLVSFMVDARGGSMRGSRHNGLRVVIPPRTCAAPTRITCRLVKPQKLSTPPPLAEEEGLASRIIALGPTGAQFLSPVIVEIPHFASHGRGDRELVVLRSENGSVWKEHRSRYGESYLDQILNGMDEELGSLEELEKKRVCRIITTDFPLYFVIMSRLCQDYDTIGPEGGSLKSKLVPLVQATFPENAVTKRVKLALQAQPVPDELVTKLLGNQATFSPIVTVEPRRRKFHRPIGLRIPLPPSWTDNPRDSGEGDTTSLRLLCSVIGGTDQAQWEDITGTTKLVYANECANFTTNVSARFWLSDCPRTAEAVNFATLLYKELTAVPYMAKFVIFAKMNDPREGRLRCYCMTDDKVDKTLEQHENFVEVARSRDIEVLEGMSLFAELSGNLVPVKKAAQQRSFHFQSFRENRLAMPVKVRDSSREPGGSLSFLRKAMKYEDTQHILCHLNITMPPCAKGSGAEDRRRTPTPLALRYSILSESTPGSLSGTEQAEMKMAVISEHLGLSWAELARELQFSVEDINRIRVENPNSLLEQSVALLNLWVIREGQNANMENLYTALQSIDRGEIVNMLEGSGRQSRNLKPDRRHTDRDYSLSPSQMNGYSSLQDELLSPASLGCALSSPLRADQYWNEVAVLDAIPLAATEHDTMLEMSDMQVWSAGLTPSLVTAEDSSLECSKAEDSDATGHEWKLEGALSEEPRGPELGSLELVEDDTVDSDATNGLIDLLEQEEGQRSEEKLPGSKRQDDATGAGQDSENEVSLVSGHQRGQARITHSPTVSQVTERSQDRLQDWDADGSIVSYLQDAAQGSWQEEVTQGPHSFQGTSTMTEGLEPGGSQEYEKVLVSVSEHTWTEQPEAESSQADRDRRQQGQEEQVQEAKNTFTQVVQGNEFQNIPGEQVTEEQFTDEQGNIVTKKVELRGSGLQPDLIEGRKGAQIVKRASLKRGKQ

SEQ ID NO: 37412 - protein, 1519 aa, Homo sapiens
MPYSVGFREADAATSFLRAARSGNLDKALDHLRNGVDINTCNQNGLNGLHLASKEGHVKMVVELLHKEIILETTTKKGNTALHIAALAGQDEVVRELVNYGANVNAQSQKGFTPLYMAAQENHLEVVKFLLENGANQNVATEDGFTPLAVALQQGHENVVAHLINYGTKGKVRLPALHIAARNDDTRTAAVLLQNDPNPDVLSKTGFTPLHIAAHYENLNVAQLLLNRGASVNFTPQNGITPLHIASRRGNVIMVRLLLDRGAQIETKTKDELTPLHCAARNGHVRISEILLDHGAPIQAKTKNGLSPIHMAAQGDHLDCVRLLLQYDAEIDDITLDHLTPLHVAAHCGHHRVAKVLLDKGAKPNSRALNGFTPLHIACKKNHVRVMELLLKTGASIDAVTESGLTPLHVASFMGHLPIVKNLLQRGASPNVSNVKVETPLHMAARAGHTEVAKYLLQNKAKVNAKAKDDQTPLHCAARIGHTNMVKLLLENNANPNLATTAGHTPLHIAAREGHVETVLALLEKEASQACMTKKGFTPLHVAAKYGKVRVAELLLERDAHPNAAGKNGLTPLHVAVHHNNLDIVKLLLPRGGSPHSPAWNGYTPLHIAAKQNQVEVARSLLQYGGSANAESVQGVTPLHLAAQEGHAEMVALLLSKQANGNLGNKSGLTPLHLVAQEGHVPVADVLIKHGVMVDATTRMGYTPLHVASHYGNIKLVKFLLQHQADVNAKTKLGYSPLHQAAQQGHTDIVTLLLKNGASPNEVSSDGTTPLAIAKRLGYISVTDVLKVVTDETSFVLVSDKHRMSFPETVDEILDVSEDEGEELISFKAERRDSRDVDEEKELLDFVPKLDQVVESPAIPRIPCAMPETVVIRSEEQEQASKEYDEDSLIPSSPATETSDNISPVASPVHTGFLVSFMVDARGGSMRGSRHNGLRVVIPPRTCAAPTRITCRLVKPQKLSTPPPLAEEEGLASRIIALGPTGAQFLSPVIVEIPHFASHGRGDRELVVLRSENGSVWKEHRSRYGESYLDQILNGMDEELGSLEELEKKRVCRIITTDFPLYFVIMSRLCQDYDTIGPEGGSLKSKLVPLVQATFPENAVTKRVKLALQAQPVPDELVTKLLGNQATFSPIVTVEPRRRKFHRPIGLRIPLPPSWTDNPRDSGEGDTTSLRLLCSVIGGTDQAQWEDITGTTKLVYANECANFTTNVSARFWLSDCPRTAEAVNFATLLYKELTAVPYMAKFVIFAKMNDPREGRLRCYCMTDDKVDKTLEQHENFVEVARSRDIEVLEGMSLFAELSGNLVPVKKAAQQRSFHFQSFRENRLAMPVKVRDSSREPGGSLSFLRKAMKYEDTQHILCHLNITMPPCAKGSGAEDRRRTPTPLALRYSILSESTPGSLSGTEQAEMKMAVISEHLGLSWAELARELQFSVEDINRIRVENPNSLLEQSVALLNLWVIREGQNANMENLYTALQSIDRGEIVNMLEGSGRQSRNLKPDRRHTDRDYSLSPSQMNGISTNNP

SEQ ID NO: 37413 - protein, 1834 aa, Homo sapiens
MPYSVGFREADAATSFLRAARSGNLDKALDHLRNGVDINTCNQNGLNGLHLASKEGHVKMVVELLHKEIILETTTKKGNTALHIAALAGQDEVVRELVNYGANVNAQSQKGFTPLYMAAQENHLEVVKFLLENGANQNVATEDGFTPLAVALQQGHENVVAHLINYGTKGKVRLPALHIAARNDDTRTAAVLLQNDPNPDVLSKTGFTPLHIAAHYENLNVAQLLLNRGASVNFTPQNGITPLHIASRRGNVIMVRLLLDRGAQIETKTKDELTPLHCAARNGHVRISEILLDHGAPIQAKTKNGLSPIHMAAQGDHLDCVRLLLQYDAEIDDITLDHLTPLHVAAHCGHHRVAKVLLDKGAKPNSRALNGFTPLHIACKKNHVRVMELLLKTGASIDAVTESGLTPLHVASFMGHLPIVKNLLQRGASPNVSNVKVETPLHMAARAGHTEVAKYLLQNKAKVNAKAKDDQTPLHCAARIGHTNMVKLLLENNANPNLATTAGHTPLHIAAREGHVETVLALLEKEASQACMTKKGFTPLHVAAKYGKVRVAELLLERDAHPNAAGKNGLTPLHVAVHHNNLDIVKLLLPRGGSPHSPAWNGYTPLHIAAKQNQVEVARSLLQYGGSANAESVQGVTPLHLAAQEGHAEMVALLLSKQANGNLGNKSGLTPLHLVAQEGHVPVADVLIKHGVMVDATTRMGYTPLHVASHYGNIKLVKFLLQHQADVNAKTKLGYSPLHQAAQQGHTDIVTLLLKNGASPNEVSSDGTTPLAIAKRLGYISVTDVLKVVTDETSFVLVSDKHRMSFPETVDEILDVSEDEGEELISFKAERRDSRDVDEEKELLDFVPKLDQVVESPAIPRIPCAMPETVVIRSEEQEQASKEYDEDSLIPSSPATETSDNISPVASPVHTGFLVSFMVDARGGSMRGSRHNGLRVVIPPRTCAAPTRITCRLVKPQKLSTPPPLAEEEGLASRIIALGPTGAQFLSPVIVEIPHFASHGRGDRELVVLRSENGSVWKEHRSRYGESYLDQILNGMDEELGSLEELEKKRVCRIITTDFPLYFVIMSRLCQDYDTIGPEGGSLKSKLVPLVQATFPENAVTKRVKLALQAQPVPDELVTKLLGNQATFSPIVTVEPRRRKFHRPIGLRIPLPPSWTDNPRDSGEGDTTSLRLLCSVIGGTDQAQWEDITGTTKLVYANECANFTTNVSARFWLSDCPRTAEAVNFATLLYKELTAVPYMAKFVIFAKMNDPREGRLRCYCMTDDKVDKTLEQHENFVEVARSRDIEVLEGMSLFAELSGNLVPVKKAAQQRSFHFQSFRENRLAMPVKVRDSSREPGGSLSFLRKAMKYEDTQHILCHLNITMPPCAKGSGAEDRRRTPTPLALRYSILSESTPGSLSGTEQAEMKMAVISEHLGLSWAELARELQFSVEDINRIRVENPNSLLEQSVALLNLWVIREGQNANMENLYTALQSIDRGEIVNMLEGSGRQSRNLKPDRRHTDRDYSLSPSQMNGYSSLQDELLSPASLGCALSSPLRADQYWNEVAVLDAIPLAATEHDTMLEMSDMQVWSAGLTPSLVTAEDSSLECSKAEDSDATGHEWKLEGALSEEPRGPELGSLELVEDDTVDSDATNGLIDLLEQEEGQRSEEKLPGSKRQDDATGAGQDSENEVSLVSGHQRGQARITHSPTVSQVTERSQDRLQDWDADGSIVSYLQDAAQGSWQEEVTQGPHSFQGTSTMTEGLEPGGSQEYEKVLVSVSEHTWTEQPEAESSQADRDRRQQGQEEQVQEAKNTFTQVVQGNEFQNIPGEQVTEEQFTDEQGNIVTKKDHTSTPNP

SEQ ID NO: 37414 - protein, 1905 aa, Homo sapiens
MPYSVGFREADAATSFLRAARSGNLDKALDHLRNGVDINTCNQNGLNGLHLASKEGHVKMVVELLHKEIILETTTKKGNTALHIAALAGQDEVVRELVNYGANVNAQSQKGFTPLYMAAQENHLEVVKFLLENGANQNVATEDGFTPLAVALQQGHENVVAHLINYGTKGKVRLPALHIAARNDDTRTAAVLLQNDPNPDVLSKTGFTPLHIAAHYENLNVAQLLLNRGASVNFTPQNGITPLHIASRRGNVIMVRLLLDRGAQIETKTKDELTPLHCAARNGHVRISEILLDHGAPIQAKTKNGLSPIHMAAQGDHLDCVRLLLQYDAEIDDITLDHLTPLHVAAHCGHHRVAKVLLDKGAKPNSRALNGFTPLHIACKKNHVRVMELLLKTGASIDAVTESGLTPLHVASFMGHLPIVKNLLQRGASPNVSNVKVETPLHMAARAGHTEVAKYLLQNKAKVNAKAKDDQTPLHCAARIGHTNMVKLLLENNANPNLATTAGHTPLHIAAREGHVETVLALLEKEASQACMTKKGFTPLHVAAKYGKVRVAELLLERDAHPNAAGKNGLTPLHVAVHHNNLDIVKLLLPRGGSPHSPAWNGYTPLHIAAKQNQVEVARSLLQYGGSANAESVQGVTPLHLAAQEGHAEMVALLLSKQANGNLGNKSGLTPLHLVAQEGHVPVADVLIKHGVMVDATTRMGYTPLHVASHYGNIKLVKFLLQHQADVNAKTKLGYSPLHQAAQQGHTDIVTLLLKNGASPNEVSSDGTTPLAIAKRLGYISVTDVLKVVTDETSFVLVSDKHRMSFPETVDEILDVSEDEGEELISFKAERRDSRDVDEEKELLDFVPKLDQVVESPAIPRIPCAMPETVVIRSEEQEQASKEYDEDSLIPSSPATETSDNISPVASPVHTGFLVSFMVDARGGSMRGSRHNGLRVVIPPRTCAAPTRITCRLVKPQKLSTPPPLAEEEGLASRIIALGPTGAQFLSPVIVEIPHFASHGRGDRELVVLRSENGSVWKEHRSRYGESYLDQILNGMDEELGSLEELEKKRVCRIITTDFPLYFVIMSRLCQDYDTIGPEGGSLKSKLVPLVQATFPENAVTKRVKLALQAQPVPDELVTKLLGNQATFSPIVTVEPRRRKFHRPIGLRIPLPPSWTDNPRDSGEGDTTSLRLLCSVIGGTDQAQWEDITGTTKLVYANECANFTTNVSARFWLSDCPRTAEAVNFATLLYKELTAVPYMAKFVIFAKMNDPREGRLRCYCMTDDKVDKTLEQHENFVEVARSRDIEVLEGMSLFAELSGNLVPVKKAAQQRSFHFQSFRENRLAMPVKVRDSSREPGGSLSFLRKAMKYEDTQHILCHLNITMPPCAKGSGAEDRRRTPTPLALRYSILSESTPGSLSGTEQAEMKMAVISEHLGLSWAELARELQFSVEDINRIRVENPNSLLEQSVALLNLWVIREGQNANMENLYTALQSIDRGEIVNMLEGSGRQSRNLKPDRRHTDRDYSLSPSQMNGYSSLQDELLSPASLGCALSSPLRADQYWNEVAVLDAIPLAATEHDTMLEMSDMQVWSAGLTPSLVTAEDSSLECSKAEDSDATGHEWKLEGALSEEPRGPELGSLELVEDDTVDSDATNGLIDLLEQEEGQRSEEKLPGSKRQDDATGAGQDSENEVSLVSGHQRGQARITHSPTVSQVTERSQDRLQDWDADGSIVSYLQDAAQGSWQEEVTQGPHSFQGTSTMTEGLEPGGSQEYEKVLVSVSEHTWTEQPEAESSQADRDRRQQGQEEQVQEAKNTFTQVVQGNEFQNIPGEQVTEEQFTDEQGNIVTKKIIRKVVRQIDLSSADAAQEHEEVTVEGPLEDPSELEVDIDYFMKHSKVELRGSGLQPDLIEGRKGAQIVKRASLKRGKQ

SEQ ID NO: 37415 - protein, 1806 aa, Homo sapiens
MPYSVGFREADAATSFLRAARSGNLDKALDHLRNGVDINTCNQNGLNGLHLASKEGHVKMVVELLHKEIILETTTKKGNTALHIAALAGQDEVVRELVNYGANVNAQSQKGFTPLYMAAQENHLEVVKFLLENGANQNVATEDGFTPLAVALQQGHENVVAHLINYGTKGKVRLPALHIAARNDDTRTAAVLLQNDPNPDVLSKTGFTPLHIAAHYENLNVAQLLLNRGASVNFTPQNGITPLHIASRRGNVIMVRLLLDRGAQIETKTKDELTPLHCAARNGHVRISEILLDHGAPIQAKTKNGLSPIHMAAQGDHLDCVRLLLQYDAEIDDITLDHLTPLHVAAHCGHHRVAKVLLDKGAKPNSRALNGFTPLHIACKKNHVRVMELLLKTGASIDAVTESGLTPLHVASFMGHLPIVKNLLQRGASPNVSNVKVETPLHMAARAGHTEVAKYLLQNKAKVNAKAKDDQTPLHCAARIGHTNMVKLLLENNANPNLATTAGHTPLHIAAREGHVETVLALLEKEASQACMTKKGFTPLHVAAKYGKVRVAELLLERDAHPNAAGKNGLTPLHVAVHHNNLDIVKLLLPRGGSPHSPAWNGYTPLHIAAKQNQVEVARSLLQYGGSANAESVQGVTPLHLAAQEGHAEMVALLLSKQANGNLGNKSGLTPLHLVAQEGHVPVADVLIKHGVMVDATTRMGYTPLHVASHYGNIKLVKFLLQHQADVNAKTKLGYSPLHQAAQQGHTDIVTLLLKNGASPNEVSSDGTTPLAIAKRLGYISVTDVLKVVTDETSFVLVSDKHRMSFPETVDEILDVSEDEGEELISFKAERRDSRDVDEEKELLDFVPKLDQVVESPAIPRIPCAMPETVVIRSEEQEQASKEYDEDSLIPSSPATETSDNISPVASPVHTGFLVSFMVDARGGSMRGSRHNGLRVVIPPRTCAAPTRITCRLVKPQKLSTPPPLAEEEGLASRIIALGPTGAQFLSPVIVEIPHFASHGRGDRELVVLRSENGSVWKEHRSRYGESYLDQILNGMDEELGSLEELEKKRVCRIITTDFPLYFVIMSRLCQDYDTIGPEGGSLKSKLVPLVQATFPENAVTKRVKLALQAQPVPDELVTKLLGNQATFSPIVTVEPRRRKFHRPIGLRIPLPPSWTDNPRDSGEGDTTSLRLLCSVIGGTDQAQWEDITGTTKLVYANECANFTTNVSARFWLSDCPRTAEAVNFATLLYKELTAVPYMAKFVIFAKMNDPREGRLRCYCMTDDKVDKTLEQHENFVEVARSRDIEVLEGMSLFAELSGNLVPVKKAAQQRSFHFQSFRENRLAMPVKVRDSSREPGGSLSFLRKAMKYEDTQHILCHLNITMPPCAKGSGAEDRRRTPTPLALRYSILSESTPGSLSGTEQAEMKMAVISEHLGLSWAELARELQFSVEDINRIRVENPNSLLEQSVALLNLWVIREGQNANMENLYTALQSIDRGEIVNMLEGSGRQSRNLKPDRRHTDRDYSLSPSQMNGYSSLQDELLSPASLGCALSSPLRADQYWNEVAVLDAIPLAATEHDTMLEMSDMQVWSAGLTPSLVTAEDSSLECSKAEDSDATGHEWKLEGALSEEPRGPELGSLELVEDDTVDSDATNGLIDLLEQEEGQRSEEKLPGSKRQDDATGAGQDSENEVSLVSGHQRGQARITHSPTVSQVTERSQDRLQDWDADGSIVSYLQDAAQGSWQEEVTQGPHSFQGTSTMTEGLEPGGSQEYEKVLVSVSEHTWTEQPEAESSQADRDRRQQGQEEQVQEAKNTFTQVVQDHTSTPNP

SEQ ID NO: 37416 - protein, 109 aa, Homo sapiens; identical to SEQ ID NO: 37410

SEQ ID NO: 37417 - protein, 3924 aa, Homo sapiens
MMNEDAAQKSDSGEKFNGSSQRRKRPKKSDSNASFLRAARAGNLDKVVEYLKGGIDINTCNQNGLNALHLAAKEGHVGLVQELLGRGSSVDSATKKGNTALHIASLAGQAEVVKVLVKEGANINAQSQNGFTPLYMAAQENHIDVVKYLLENGANQSTATEDGFTPLAVALQQGHNQAVAILLENDTKGKVRLPALHIAARKDDTKSAALLLQNDHNADVQSKMMVNRTTESGFTPLHIAAHYGNVNVATLLLNRGAAVDFTARNGITPLHVASKRGNTNMVKLLLDRGGQIDAKTRDGLTPLHCAARSGHDQVVELLLERGAPLLARTKNGLSPLHMAAQGDHVECVKHLLQHKAPVDDVTLDYLTALHVAAHCGHYRVTKLLLDKRANPNARALNGFTPLHIACKKNRIKVMELLVKYGASIQAITESGLTPIHVAAFMGHLNIVLLLLQNGASPDVTNIRGETALHMAARAGQVEVVRCLLRNGALVDARAREEQTPLHIASRLGKTEIVQLLLQHMAHPDAATTNGYTPLHISAREGQVDVASVLLEAGAAHSLATKKGFTPLHVAAKYGSLDVAKLLLQRRAAADSAGKNGLTPLHVAAHYDNQKVALLLLEKGASPHATAKNGYTPLHIAAKKNQMQIASTLLNYGAETNIVTKQGVTPLHLASQEGHTDMVTLLLDKGANIHMSTKSGLTSLHLAAQEDKVNVADILTKHGADQDAHTKLGYTPLIVACHYGNVKMVNFLLKQGANVNAKTKNGYTPLHQAAQQGHTHIINVLLQHGAKPNATTANGNTALAIAKRLGYISVVDTLKVVTEEVTTTTTTITEKHKLNVPETMTEVLDVSDEEGDDTMTGDGGEYLRPEDLKELGDDSLPSSQFLDGMNYLRYSLEGGRSDSLRSFSSDRSHTLSHASYLRDSAVMDDSVVIPSHQVSTLAKEAERNSYRLSWGTENLDNVALSSSPIHSGFLVSFMVDARGGAMRGCRHNGLRIIIPPRKCTAPTRVTCRLVKRHRLATMPPMVEGEGLASRLIEVGPSGAQFLGPVIVEIPHFAALRGKERELVVLRSENGDSWKEHFCDYTEDELNEILNGMDEVLDSPEDLEKKRICRIITRDFPQYFAVVSRIKQDSNLIGPEGGVLSSTVVPQVQAVFPEGALTKRIRVGLQAQPMHSELVKKILGNKATFSPIVTLEPRRRKFHKPITMTIPVPKASSDVMLNGFGGDAPTLRLLCSITGGTTPAQWEDITGTTPLTFVNECVSFTTNVSARFWLIDCRQIQESVTFASQVYREIICVPYMAKFVVFAKSHDPIEARLRCFCMTDDKVDKTLEQQENFAEVARSRDVEVLEGKPIYVDCFGNLVPLTKSGQHHIFSFFAFKENRLPLFVKVRDTTQEPCGRLSFMKEPKSTRGLVHQAICNLNITLPIYTKESESDQEQEEEIDMTSEKNDETESTETSVLKSHLVNEVPVLASPDLLSEVSEMKQDLIKMTAILTTDVSDKAGSIKVKELVKAAEEEPGEPFEIVERVKEDLEKVNEILRSGTCTRDESSVQSSRSERGLVEEEWVIVSDEEIEEARQKAPLEITEYPCVEVRIDKEIKGKVEKDSTGLVNYLTDDLNTCVPLPKEQLQTVQDKAGKKCEALAVGRSSEKEGKDIPPDETQSTQKQHKPSLGIKKPVRRKLKEKQKQKEEGLQASAEKAELKKGSSEESLGEDPGLAPEPLPTVKATSPLIEETPIGSIKDKVKALQKRVEDEQKGRSKLPIRVKGKEDVPKKTTHRPHPAASPSLKSERHAPGSPSPKTERHSTLSSSAKTERHPPVSPSSKTEKHSPVSPSAKTERHSPASSSSKTEKHSPVSPSTKTERHSPVSSTKTERHPPVSPSGKTDKRPPVSPSGRTEKHPPVSPGRTEKRLPVSPSGRTDKHQPVSTAGKTEKHLPVSPSGKTEKQPPVSPTSKTERIEETMSVRELMKAFQSGQDPSKHKTGLFEHKSAKQKQPQEKGKVRVEKEKGPILTQREAQKTENQTIKRGQRLPVTGTAESKRGVRVSSIGVKKEDAAGGKEKVLSHKIPEPVQSVPEEESHRESEVPKEKMADEQGDMDLQISPDRKTSTDFSEVIKQELEDNDKYQQFRLSEETEKAQLHLDQVLTSPFNTTFPLDYMKDEFLPALSLQSGALDGSSESLKNEGVAGSPCGSLMEGTPQISSEESYKHEGLAETPETSPESLSFSPKKSEEQTGETKESTKTETTTEIRSEKEHPTTKDITGGSEERGATVTEDSETSTESFQKEATLGSPKDTSPKRQDDCTGSCSVALAKETPTGLTEEAACDEGQRTFGSSAHKTQTDSEVQESTATSDETKALPLPEASVKTDTGTESKPQGVIRSPQGLELALPSRDSEVLSAVADDSLAVSHKDSLEASPVLEDNSSHKTPDSLEPSPLKESPCRDSLESSPVEPKMKAGIFPSHFPLPAAVAKTELLTEVASVRSRLLRDPDGSAEDDSLEQTSLMESSGKSPLSPDTPSSEEVSYEVTPKTTDVSTPKPAVIHECAEEDDSENGEKKRFTPEEEMFKMVTKIKMFDELEQEAKQKRDYKKEPKQEESSSSSDPDADCSVDVDEPKHTGSGEDESGVPVLVTSESRKVSSSSESEPELAQLKKGADSGLLPEPVIRVQPPSPLPSSMDSNSSPEEVQFQPVVSKQYTFKMNEDTQEEPGKSEEEKDSESHLAEDRHAVSTEAEDRSYDKLNRDTDQPKICDGHGCEAMSPSSSAAPVSSGLQSPTGDDVDEQPVIYKESLALQGTHEKDTEGEELDVSRAESPQADCPSESFSSSSSLPHCLVSEGKELDEDISATSSIQKTEVTKTDETFENLPKDCPSQDSSITTQTDRFSMDVPVSDLAENDEIYDPQITSPYENVPSQSFFSSEESKTQTDANHTTSFHSSEVYSVTITSPVEDVVVASSSSGTVLSKESNFEGQDIKMESQQESTLWEMQSDSVSSSFEPTMSATTTVVGEQISKVIITKTDVDSDSWSEIREDDEAFEARVKEEEQKIFGLMVDRQSQGTTPDTTPARTPTEEGTPTSEQNPFLFQEGKLFEMTRSGAIDMTKRSYADESFHFFQIGQESREETLSEDVKEGATGADPLPLETSAESLALSESKETVDDEADLLPDDVSEEVEEIPASDAQLNSQMGISASTETPTKEAVSVGTKDLPTVQTGDIPPLSGVKQISCPDSSEPAVQVQLDFSTLTRSVYSDRGDDSPDSSPEEQKSVIEIPTAPMENVPFTESKSKIPVRTMPTSTPAPPSAEYESSVSEDFLSSVDEENKADEAKPKSKLPVKVPLQRVEQQLSDLDTSVQKTVAPQGQDMASIAPDNRSKSESDASSLDSKTKCPVKTRSYTETETESRERAEELELESEEGATRPKILTSRLPVKSRSTTSSCRGGTSPTKESKEHFFDLYRNSIEFFEEISDEASKLVDRLTQSEREQEIVSDDESSSALEVSVIENLPPVETEHSVPEDIFDTRPIWDESIETLIERIPDENGHDHAEDPQDEQERIEERLAYIADHLGFSWTELARELDFTEEQIHQIRIENPNSLQDQSHALLKYWLERDGKHATDTNLVECLTKINRMDIVHLMETNTEPLQERISHSYAEIEQTITLDHSEGFSVLQEELCTAQHKQKEEQAVSKESETCDHPPIVSEEDISVGYSTFQDGVPKTEGDSSATALFPQTHKEQVQQDFSGKMQDLPEESSLEYQQEYFVTTPGTETSETQKAMIVPSSPSKTPEEVSTPAEEEKLYLQTPTSSERGGSPIIQEPEEPSEHREESSPRKTSLVIVESADNQPETCERLDEDAAFEKGDDMPEIPPETVTEEEYIDEHGHTVVKKVTRKIIRRYVSSEGTEKEEIMVQGMPQEPVNIEEGDGYSKVIKRVVLKSDTEQSEDNNE

SEQ ID NO: 37418 - protein, 1863 aa, Homo sapiens
MSHHIQRSDSNASFLRAARAGNLDKVVEYLKGGIDINTCNQNGLNALHLAAKEGHVGLVQELLGRGSSVDSATKKGNTALHIASLAGQAEVVKVLVKEGANINAQSQNGFTPLYMAAQENHIDVVKYLLENGANQSTATEDGFTPLAVALQQGHNQAVAILLENDTKGKVRLPALHIAARKDDTKSAALLLQNDHNADVQSKMMVNRTTESGFTPLHIAAHYGNVNVATLLLNRGAAVDFTARNGITPLHVASKRGNTNMVKLLLDRGGQIDAKTRDGLTPLHCAARSGHDQVVELLLERGAPLLARTKNGLSPLHMAAQGDHVECVKHLLQHKAPVDDVTLDYLTALHVAAHCGHYRVTKLLLDKRANPNARALNGFTPLHIACKKNRIKVMELLVKYGASIQAITESGLTPIHVAAFMGHLNIVLLLLQNGASPDVTNIRGETALHMAARAGQVEVVRCLLRNGALVDARAREEQTPLHIASRLGKTEIVQLLLQHMAHPDAATTNGYTPLHISAREGQVDVASVLLEAGAAHSLATKKGFTPLHVAAKYGSLDVAKLLLQRRAAADSAGKNGLTPLHVAAHYDNQKVALLLLEKGASPHATAKNGYTPLHIAAKKNQMQIASTLLNYGAETNIVTKQGVTPLHLASQEGHTDMVTLLLDKGANIHMSTKSGLTSLHLAAQEDKVNVADILTKHGADQDAHTKLGYTPLIVACHYGNVKMVNFLLKQGANVNAKTKNGYTPLHQAAQQGHTHIINVLLQHGAKPNATTANGNTALAIAKRLGYISVVDTLKVVTEEVTTTTTTITEKHKLNVPETMTEVLDVSDEEGDDTMTGDGGEYLRPEDLKELGDDSLPSSQFLDGMNYLRYSLEGGRSDSLRSFSSDRSHTLSHASYLRDSAVMDDSVVIPSHQVSTLAKEAERNSYRLSWGTENLDNVALSSSPIHSGRASPCLERDNSSFLVSFMVDARGGAMRGCRHNGLRIIIPPRKCTAPTRVTCRLVKRHRLATMPPMVEGEGLASRLIEVGPSGAQFLGKLHLPTAPPPLNEGESLVSRILQLGPPGTKFLGPVIVEIPHFAALRGKERELVVLRSENGDSWKEHFCDYTEDELNEILNGMDEVLDSPEDLEKKRICRIITRDFPQYFAVVSRIKQDSNLIGPEGGVLSSTVVPQVQAVFPEGALTKRIRVGLQAQPMHSELVKKILGNKATFSPIVTLEPRRRKFHKPITMTIPVPKASSDVMLNGFGGDAPTLRLLCSITGGTTPAQWEDITGTTPLTFVNECVSFTTNVSARFWLIDCRQIQESVTFASQVYREIICVPYMAKFVVFAKSHDPIEARLRCFCMTDDKVDKTLEQQENFAEVARSRDVEVLEGKPIYVDCFGNLVPLTKSGQHHIFSFFAFKENRLPLFVKVRDTTQEPCGRLSFMKEPKSTRGLVHQAICNLNITLPIYTKESESDQEQEEEIGQESRRYPQDEQERIEERLAYIADHLGFSWTELARELDFTEEQIHQIRIENPNSLQDQSHALLKYWLERDGKHATDTNLVECLTKINRMDIVHLMETNTEPLQERISHSYAEIEQTITLDHSEGFSVLQEELCTAQHKQKEEQAVSKESETCDHPPIVSEEDISVGYSTFQDGVPKTEGDSSATALFPQTHKEQVQQDFSGKMQDLPEESSLEYQQEYFVTTPGTETSETQKAMIVPSSPSKTPEEVSTPAEEEKLYLQTPTSSERGGSPIIQEPEEPSEHREESSPRKTSLVIVESADNQPETCERLDEDAAFEKGDDMPEIPPETVTEEEYIDEHGHTVVKKVTRKIIRRYVSSEGTEKEEIMVQGMPQEPVNIEEGDGYSKVIKRVVLKSDTEQSEDSME

SEQ ID NO: 37419 - protein, 3957 aa, Homo sapiens
MMNEDAAQKSDSGEKFNGSSQRRKRPKKSDSNASFLRAARAGNLDKVVEYLKGGIDINTCNQNGLNALHLAAKEGHVGLVQELLGRGSSVDSATKKGNTALHIASLAGQAEVVKVLVKEGANINAQSQNGFTPLYMAAQENHIDVVKYLLENGANQSTATEDGFTPLAVALQQGHNQAVAILLENDTKGKVRLPALHIAARKDDTKSAALLLQNDHNADVQSKMMVNRTTESGFTPLHIAAHYGNVNVATLLLNRGAAVDFTARNGITPLHVASKRGNTNMVKLLLDRGGQIDAKTRDGLTPLHCAARSGHDQVVELLLERGAPLLARTKNGLSPLHMAAQGDHVECVKHLLQHKAPVDDVTLDYLTALHVAAHCGHYRVTKLLLDKRANPNARALNGFTPLHIACKKNRIKVMELLVKYGASIQAITESGLTPIHVAAFMGHLNIVLLLLQNGASPDVTNIRGETALHMAARAGQVEVVRCLLRNGALVDARAREEQTPLHIASRLGKTEIVQLLLQHMAHPDAATTNGYTPLHISAREGQVDVASVLLEAGAAHSLATKKGFTPLHVAAKYGSLDVAKLLLQRRAAADSAGKNGLTPLHVAAHYDNQKVALLLLEKGASPHATAKNGYTPLHIAAKKNQMQIASTLLNYGAETNIVTKQGVTPLHLASQEGHTDMVTLLLDKGANIHMSTKSGLTSLHLAAQEDKVNVADILTKHGADQDAHTKLGYTPLIVACHYGNVKMVNFLLKQGANVNAKTKNGYTPLHQAAQQGHTHIINVLLQHGAKPNATTANGNTALAIAKRLGYISVVDTLKVVTEEVTTTTTTITEKHKLNVPETMTEVLDVSDEEGDDTMTGDGGEYLRPEDLKELGDDSLPSSQFLDGMNYLRYSLEGGRSDSLRSFSSDRSHTLSHASYLRDSAVMDDSVVIPSHQVSTLAKEAERNSYRLSWGTENLDNVALSSSPIHSGFLVSFMVDARGGAMRGCRHNGLRIIIPPRKCTAPTRVTCRLVKRHRLATMPPMVEGEGLASRLIEVGPSGAQFLGKLHLPTAPPPLNEGESLVSRILQLGPPGTKFLGPVIVEIPHFAALRGKERELVVLRSENGDSWKEHFCDYTEDELNEILNGMDEVLDSPEDLEKKRICRIITRDFPQYFAVVSRIKQDSNLIGPEGGVLSSTVVPQVQAVFPEGALTKRIRVGLQAQPMHSELVKKILGNKATFSPIVTLEPRRRKFHKPITMTIPVPKASSDVMLNGFGGDAPTLRLLCSITGGTTPAQWEDITGTTPLTFVNECVSFTTNVSARFWLIDCRQIQESVTFASQVYREIICVPYMAKFVVFAKSHDPIEARLRCFCMTDDKVDKTLEQQENFAEVARSRDVEVLEGKPIYVDCFGNLVPLTKSGQHHIFSFFAFKENRLPLFVKVRDTTQEPCGRLSFMKEPKSTRGLVHQAICNLNITLPIYTKESESDQEQEEEIDMTSEKNDETESTETSVLKSHLVNEVPVLASPDLLSEVSEMKQDLIKMTAILTTDVSDKAGSIKVKELVKAAEEEPGEPFEIVERVKEDLEKVNEILRSGTCTRDESSVQSSRSERGLVEEEWVIVSDEEIEEARQKAPLEITEYPCVEVRIDKEIKGKVEKDSTGLVNYLTDDLNTCVPLPKEQLQTVQDKAGKKCEALAVGRSSEKEGKDIPPDETQSTQKQHKPSLGIKKPVRRKLKEKQKQKEEGLQASAEKAELKKGSSEESLGEDPGLAPEPLPTVKATSPLIEETPIGSIKDKVKALQKRVEDEQKGRSKLPIRVKGKEDVPKKTTHRPHPAASPSLKSERHAPGSPSPKTERHSTLSSSAKTERHPPVSPSSKTEKHSPVSPSAKTERHSPASSSSKTEKHSPVSPSTKTERHSPVSSTKTERHPPVSPSGKTDKRPPVSPSGRTEKHPPVSPGRTEKRLPVSPSGRTDKHQPVSTAGKTEKHLPVSPSGKTEKQPPVSPTSKTERIEETMSVRELMKAFQSGQDPSKHKTGLFEHKSAKQKQPQEKGKVRVEKEKGPILTQREAQKTENQTIKRGQRLPVTGTAESKRGVRVSSIGVKKEDAAGGKEKVLSHKIPEPVQSVPEEESHRESEVPKEKMADEQGDMDLQISPDRKTSTDFSEVIKQELEDNDKYQQFRLSEETEKAQLHLDQVLTSPFNTTFPLDYMKDEFLPALSLQSGALDGSSESLKNEGVAGSPCGSLMEGTPQISSEESYKHEGLAETPETSPESLSFSPKKSEEQTGETKESTKTETTTEIRSEKEHPTTKDITGGSEERGATVTEDSETSTESFQKEATLGSPKDTSPKRQDDCTGSCSVALAKETPTGLTEEAACDEGQRTFGSSAHKTQTDSEVQESTATSDETKALPLPEASVKTDTGTESKPQGVIRSPQGLELALPSRDSEVLSAVADDSLAVSHKDSLEASPVLEDNSSHKTPDSLEPSPLKESPCRDSLESSPVEPKMKAGIFPSHFPLPAAVAKTELLTEVASVRSRLLRDPDGSAEDDSLEQTSLMESSGKSPLSPDTPSSEEVSYEVTPKTTDVSTPKPAVIHECAEEDDSENGEKKRFTPEEEMFKMVTKIKMFDELEQEAKQKRDYKKEPKQEESSSSSDPDADCSVDVDEPKHTGSGEDESGVPVLVTSESRKVSSSSESEPELAQLKKGADSGLLPEPVIRVQPPSPLPSSMDSNSSPEEVQFQPVVSKQYTFKMNEDTQEEPGKSEEEKDSESHLAEDRHAVSTEAEDRSYDKLNRDTDQPKICDGHGCEAMSPSSSAAPVSSGLQSPTGDDVDEQPVIYKESLALQGTHEKDTEGEELDVSRAESPQADCPSESFSSSSSLPHCLVSEGKELDEDISATSSIQKTEVTKTDETFENLPKDCPSQDSSITTQTDRFSMDVPVSDLAENDEIYDPQITSPYENVPSQSFFSSEESKTQTDANHTTSFHSSEVYSVTITSPVEDVVVASSSSGTVLSKESNFEGQDIKMESQQESTLWEMQSDSVSSSFEPTMSATTTVVGEQISKVIITKTDVDSDSWSEIREDDEAFEARVKEEEQKIFGLMVDRQSQGTTPDTTPARTPTEEGTPTSEQNPFLFQEGKLFEMTRSGAIDMTKRSYADESFHFFQIGQESREETLSEDVKEGATGADPLPLETSAESLALSESKETVDDEADLLPDDVSEEVEEIPASDAQLNSQMGISASTETPTKEAVSVGTKDLPTVQTGDIPPLSGVKQISCPDSSEPAVQVQLDFSTLTRSVYSDRGDDSPDSSPEEQKSVIEIPTAPMENVPFTESKSKIPVRTMPTSTPAPPSAEYESSVSEDFLSSVDEENKADEAKPKSKLPVKVPLQRVEQQLSDLDTSVQKTVAPQGQDMASIAPDNRSKSESDASSLDSKTKCPVKTRSYTETETESRERAEELELESEEGATRPKILTSRLPVKSRSTTSSCRGGTSPTKESKEHFFDLYRNSIEFFEEISDEASKLVDRLTQSEREQEIVSDDESSSALEVSVIENLPPVETEHSVPEDIFDTRPIWDESIETLIERIPDENGHDHAEDPQDEQERIEERLAYIADHLGFSWTELARELDFTEEQIHQIRIENPNSLQDQSHALLKYWLERDGKHATDTNLVECLTKINRMDIVHLMETNTEPLQERISHSYAEIEQTITLDHSEGFSVLQEELCTAQHKQKEEQAVSKESETCDHPPIVSEEDISVGYSTFQDGVPKTEGDSSATALFPQTHKEQVQQDFSGKMQDLPEESSLEYQQEYFVTTPGTETSETQKAMIVPSSPSKTPEEVSTPAEEEKLYLQTPTSSERGGSPIIQEPEEPSEHREESSPRKTSLVIVESADNQPETCERLDEDAAFEKGDDMPEIPPETVTEEEYIDEHGHTVVKKVTRKIIRRYVSSEGTEKEEIMVQGMPQEPVNIEEGDGYSKVIKRVVLKSDTEQSEDNNE

SEQ ID NO: 37420 - protein, 1872 aa, Homo sapiens
MMNEDAAQKSDSGEKFNGSSQRRKRPKKSDSNASFLRAARAGNLDKVVEYLKGGIDINTCNQNGLNALHLAAKEGHVGLVQELLGRGSSVDSATKKGNTALHIASLAGQAEVVKVLVKEGANINAQSQNGFTPLYMAAQENHIDVVKYLLENGANQSTATEDGFTPLAVALQQGHNQAVAILLENDTKGKVRLPALHIAARKDDTKSAALLLQNDHNADVQSKMMVNRTTESGFTPLHIAAHYGNVNVATLLLNRGAAVDFTARNGITPLHVASKRGNTNMVKLLLDRGGQIDAKTRDGLTPLHCAARSGHDQVVELLLERGAPLLARTKNGLSPLHMAAQGDHVECVKHLLQHKAPVDDVTLDYLTALHVAAHCGHYRVTKLLLDKRANPNARALNGFTPLHIACKKNRIKVMELLVKYGASIQAITESGLTPIHVAAFMGHLNIVLLLLQNGASPDVTNIRGETALHMAARAGQVEVVRCLLRNGALVDARAREEQTPLHIASRLGKTEIVQLLLQHMAHPDAATTNGYTPLHISAREGQVDVASVLLEAGAAHSLATKKGFTPLHVAAKYGSLDVAKLLLQRRAAADSAGKNGLTPLHVAAHYDNQKVALLLLEKGASPHATAKNGYTPLHIAAKKNQMQIASTLLNYGAETNIVTKQGVTPLHLASQEGHTDMVTLLLDKGANIHMSTKSGLTSLHLAAQEDKVNVADILTKHGADQDAHTKLGYTPLIVACHYGNVKMVNFLLKQGANVNAKTKNGYTPLHQAAQQGHTHIINVLLQHGAKPNATTANGNTALAIAKRLGYISVVDTLKVVTEEVTTTTTTITEKHKLNVPETMTEVLDVSDEEGDDTMTGDGGEYLRPEDLKELGDDSLPSSQFLDGMNYLRYSLEGGRSDSLRSFSSDRSHTLSHASYLRDSAVMDDSVVIPSHQVSTLAKEAERNSYRLSWGTENLDNVALSSSPIHSGFLVSFMVDARGGAMRGCRHNGLRIIIPPRKCTAPTRVTCRLVKRHRLATMPPMVEGEGLASRLIEVGPSGAQFLGKLHLPTAPPPLNEGESLVSRILQLGPPGTKFLGPVIVEIPHFAALRGKERELVVLRSENGDSWKEHFCDYTEDELNEILNGMDEVLDSPEDLEKKRICRIITRDFPQYFAVVSRIKQDSNLIGPEGGVLSSTVVPQVQAVFPEGALTKRIRVGLQAQPMHSELVKKILGNKATFSPIVTLEPRRRKFHKPITMTIPVPKASSDVMLNGFGGDAPTLRLLCSITGGTTPAQWEDITGTTPLTFVNECVSFTTNVSARFWLIDCRQIQESVTFASQVYREIICVPYMAKFVVFAKSHDPIEARLRCFCMTDDKVDKTLEQQENFAEVARSRDVEVLEGKPIYVDCFGNLVPLTKSGQHHIFSFFAFKENRLPLFVKVRDTTQEPCGRLSFMKEPKSTRGLVHQAICNLNITLPIYTKESESDQEQEEEIDMTSEKNPQDEQERIEERLAYIADHLGFSWTELARELDFTEEQIHQIRIENPNSLQDQSHALLKYWLERDGKHATDTNLVECLTKINRMDIVHLMETNTEPLQERISHSYAEIEQTITLDHSEGFSVLQEELCTAQHKQKEEQAVSKESETCDHPPIVSEEDISVGYSTFQDGVPKTEGDSSATALFPQTHKEQVQQDFSGKMQDLPEESSLEYQQEYFVTTPGTETSETQKAMIVPSSPSKTPEEVSTPAEEEKLYLQTPTSSERGGSPIIQEPEEPSEHREESSPRKTSLVIVESADNQPETCERLDEDAAFEKGDDMPEIPPETVTEEEYIDEHGHTVVKKVTRKIIRRYVSSEGTEKEEIMVQGMPQEPVNIEEGDGYSKVIKRVVLKSDTEQSEDNNE

SEQ ID NO: 37421 - protein, 995 aa, Homo sapiens
MDDSVVIPSHQVSTLAKEAERNSYRLSWGTENLDNVALSSSPIHSGFLVSFMVDARGGAMRGCRHNGLRIIIPPRKCTAPTRVTCRLVKRHRLATMPPMVEGEGLASRLIEVGPSGAQFLGPVIVEIPHFAALRGKERELVVLRSENGDSWKEHFCDYTEDELNEILNGMDEVLDSPEDLEKKRICRIITRDFPQYFAVVSRIKQDSNLIGPEGGVLSSTVVPQVQAVFPEGALTKRIRVGLQAQPMHSELVKKILGNKATFSPIVTLEPRRRKFHKPITMTIPVPKASSDVMLNGFGGDAPTLRLLCSITGGTTPAQWEDITGTTPLTFVNECVSFTTNVSARFWLIDCRQIQESVTFASQVYREIICVPYMAKFVVFAKSHDPIEARLRCFCMTDDKVDKTLEQQENFAEVARSRDVEVLEGKPIYVDCFGNLVPLTKSGQHHIFSFFAFKENRLPLFVKVRDTTQEPCGRLSFMKEPKSTRGLVHQAICNLNITLPIYTKTETTTEIHPQDEQERIEERLAYIADHLGFSWTELARELDFTEEQIHQIRIENPNSLQDQSHALLKYWLERDGKHATDTNLVECLTKINRMDIVHLMETNTEPLQERISHSYAEIEQTITLDHSEGFSVLQEELCTAQHKQKEEQAVSKESETCDHPPIVSEEDISVGYSTFQDGVPKTEGDSSATALFPQTHKEQVQQDFSGKMQDLPEESSLEYQQEYFVTTPGTETSETQKAMIVPSSPSKTPEEVSTPAEEEKLYLQTPTSSERGGSPIIQEPEEPSEHREESSPRKTSLVIVESADNQPETCERLDEDAAFEKELTEELGELEASSDEEAMVTTRVVRRRVIIQGDDMPEIPPETVTEEEYIDEHGHTVVKKVTRKIIRRYVSSEGTEKEEIMVQGMPQEPVNIEEGDGYSKVIKRVVLKSDTEQSEVTLCEPSILSSTSQFQAEPVEGRRVSKVVKTTVVLGERMEKHLGDSSLATDLPSAKDDFEE

SEQ ID NO: 37422 - protein, 1114 aa, Homo sapiens
MTTMLQKSDSNASFLRAARAGNLDKVVEYLKGGIDINTCNQNGLNALHLAAKEGHVGLVQELLGRGSSVDSATKKGNTALHIASLAGQAEVVKVLVKEGANINAQSQNGFTPLYMAAQENHIDVVKYLLENGANQSTATEDGFTPLAVALQQGHNQAVAILLENDTKGKVRLPALHIAARKDDTKSAALLLQNDHNADVQSKMMVNRTTESGFTPLHIAAHYGNVNVATLLLNRGAAVDFTARNGITPLHVASKRGNTNMVKLLLDRGGQIDAKTRDGLTPLHCAARSGHDQVVELLLERGAPLLARTKNGLSPLHMAAQGDHVECVKHLLQHKAPVDDVTLDYLTALHVAAHCGHYRVTKLLLDKRANPNARALNGFTPLHIACKKNRIKVMELLVKYGASIQAITESGLTPIHVAAFMGHLNIVLLLLQNGASPDVTNIRGETALHMAARAGQVEVVRCLLRNGALVDARAREEQTPLHIASRLGKTEIVQLLLQHMAHPDAATTNGYTPLHISAREGQVDVASVLLEAGAAHSLATKKGFTPLHVAAKYGSLDVAKLLLQRRAAADSAGKNGLTPLHVAAHYDNQKVALLLLEKGASPHATAKNGYTPLHIAAKKNQMQIASTLLNYGAETNIVTKQGVTPLHLASQEGHTDMVTLLLDKGANIHMSTKSGLTSLHLAAQEDKVNVADILTKHGADQDAHTKLGYTPLIVACHYGNVKMVNFLLKQGANVNAKTKNGYTPLHQAAQQGHTHIINVLLQHGAKPNATTANGNTALAIAKRLGYISVVDTLKVVTEEVTTTTTTITEKHKLNVPETMTEVLDVSDEEGDDTMTGDGGEYLRPEDLKELGDDSLPSSQFLDGMNYLRYSLEGGRSDSLRSFSSDRSHTLSHASYLRDSAVMDDSVVIPSHQVSTLAKEAERNSYRLSWGTENLDNVALSSSPIHSGFLVSFMVDARGGAMRGCRHNGLRIIIPPRKCTAPTRVTCRLVKRHRLATMPPMVEGEGLASRLIEVGPSGAQFLGKLHLPTAPPPLNEGESLVSRILQLGPPGTKFLGPVIVEIPHFAALRGKERELVVLRSENGDSWKEHFCDYTEDELNEILNGMDEVLDSPEDLE

SEQ ID NO: 37423 - protein, 1730 aa, Homo sapiens
MMNEDAAQKSDSGEKFNGSSQRRKRPKKVTCPQMKPEAANIEKSDSNASFLRAARAGNLDKVVEYLKGGIDINTCNQNGLNALHLAAKEGHVGLVQELLGRGSSVDSATKKGNTALHIASLAGQAEVVKVLVKEGANINAQSQNGFTPLYMAAQENHIDVVKYLLENGANQSTATEDGFTPLAVALQQGHNQAVAILLENDTKGKVRLPALHIAARKDDTKSAALLLQNDHNADVQSKMMVNRTTESGFTPLHIAAHYGNVNVATLLLNRGAAVDFTARNGITPLHVASKRGNTNMVKLLLDRGGQIDAKTRDGLTPLHCAARSGHDQVVELLLERGAPLLARTKNGLSPLHMAAQGDHVECVKHLLQHKAPVDDVTLDYLTALHVAAHCGHYRVTKLLLDKRANPNARALNGFTPLHIACKKNRIKVMELLVKYGASIQAITESGLTPIHVAAFMGHLNIVLLLLQNGASPDVTNIRGETALHMAARAGQVEVVRCLLRNGALVDARAREEQTPLHIASRLGKTEIVQLLLQHMAHPDAATTNGYTPLHISAREGQVDVASVLLEAGAAHSLATKKGFTPLHVAAKYGSLDVAKLLLQRRAAADSAGKNGLTPLHVAAHYDNQKVALLLLEKGASPHATAKNGYTPLHIAAKKNQMQIASTLLNYGAETNIVTKQGVTPLHLASQEGHTDMVTLLLDKGANIHMSTKSGLTSLHLAAQEDKVNVADILTKHGADQDAHTKLGYTPLIVACHYGNVKMVNFLLKQGANVNAKTKNGYTPLHQAAQQGHTHIINVLLQHGAKPNATTANGNTALAIAKRLGYISVVDTLKVVTEEVTTTTTTITEKHKLNVPETMTEVLDVSDEEGDDTMTGDGGEYLRPEDLKELGDDSLPSSQFLDGMNYLRYSLEGGRSDSLRSFSSDRSHTLSHASYLRDSAVMDDSVVIPSHQVSTLAKEAERNSYRLSWGTENLDNVALSSSPIHSGFLVSFMVDARGGAMRGCRHNGLRIIIPPRKCTAPTRVTCRLVKRHRLATMPPMVEGEGLASRLIEVGPSGAQFLGKLHLPTAPPPLNEGESLVSRILQLGPPGTKFLGPVIVEIPHFAALRGKERELVVLRSENGDSWKEHFCDYTEDELNEILNGMDEVLDSPEDLEKKRICRIITRDFPQYFAVVSRIKQDSNLIGPEGGVLSSTVVPQVQAVFPEGALTKRIRVGLQAQPMHSELVKKILGNKATFSPIVTLEPRRRKFHKPITMTIPVPKASSDVMLNGFGGDAPTLRLLCSITGGTTPAQWEDITGTTPLTFVNECVSFTTNVSARFWLIDCRQIQESVTFASQVYREIICVPYMAKFVVFAKSHDPIEARLRCFCMTDDKVDKTLEQQENFAEVARSRDVEVLEGKPIYVDCFGNLVPLTKSGQHHIFSFFAFKENRLPLFVKVRDTTQEPCGRLSFMKEPKSTRGLVHQAICNLNITLPIYTKESESDQEQEEEIDMTSEKNDETESTETSVLKSHLVNEVPVLASPDLLSEVSEMKQDLIKMTAILTTDVSDKAGSIKVKELVKAAEEEPGEPFEIVERVKEDLEKVNEILRSGTCTRDESSVQSSRSERGLVEEEWVIVSDEEIEEARQKAPLEITEYPCVEVRIDKEIKGKVEKDSTGLVNYLTDDLNTCVPLPKEQLQTVQDKAGKKCEALAVGRSSEKEGKDIPPDETQSTQKQHKPSLGIKKPVRRKLKEKQKQK

SEQ ID NO: 37424 - protein, 1863 aa, Homo sapiens
MTTMLQKSDSNASFLRAARAGNLDKVVEYLKGGIDINTCNQNGLNALHLAAKEGHVGLVQELLGRGSSVDSATKKGNTALHIASLAGQAEVVKVLVKEGANINAQSQNGFTPLYMAAQENHIDVVKYLLENGANQSTATEDGFTPLAVALQQGHNQAVAILLENDTKGKVRLPALHIAARKDDTKSAALLLQNDHNADVQSKMMVNRTTESGFTPLHIAAHYGNVNVATLLLNRGAAVDFTARNGITPLHVASKRGNTNMVKLLLDRGGQIDAKTRDGLTPLHCAARSGHDQVVELLLERGAPLLARTKNGLSPLHMAAQGDHVECVKHLLQHKAPVDDVTLDYLTALHVAAHCGHYRVTKLLLDKRANPNARALNGFTPLHIACKKNRIKVMELLVKYGASIQAITESGLTPIHVAAFMGHLNIVLLLLQNGASPDVTNIRGETALHMAARAGQVEVVRCLLRNGALVDARAREEQTPLHIASRLGKTEIVQLLLQHMAHPDAATTNGYTPLHISAREGQVDVASVLLEAGAAHSLATKKGFTPLHVAAKYGSLDVAKLLLQRRAAADSAGKNGLTPLHVAAHYDNQKVALLLLEKGASPHATAKNGYTPLHIAAKKNQMQIASTLLNYGAETNIVTKQGVTPLHLASQEGHTDMVTLLLDKGANIHMSTKSGLTSLHLAAQEDKVNVADILTKHGADQDAHTKLGYTPLIVACHYGNVKMVNFLLKQGANVNAKTKNGYTPLHQAAQQGHTHIINVLLQHGAKPNATTANGNTALAIAKRLGYISVVDTLKVVTEEVTTTTTTITEKHKLNVPETMTEVLDVSDEEGDDTMTGDGGEYLRPEDLKELGDDSLPSSQFLDGMNYLRYSLEGGRSDSLRSFSSDRSHTLSHASYLRDSAVMDDSVVIPSHQVSTLAKEAERNSYRLSWGTENLDNVALSSSPIHSGRASPCLERDNSSFLVSFMVDARGGAMRGCRHNGLRIIIPPRKCTAPTRVTCRLVKRHRLATMPPMVEGEGLASRLIEVGPSGAQFLGKLHLPTAPPPLNEGESLVSRILQLGPPGTKFLGPVIVEIPHFAALRGKERELVVLRSENGDSWKEHFCDYTEDELNEILNGMDEVLDSPEDLEKKRICRIITRDFPQYFAVVSRIKQDSNLIGPEGGVLSSTVVPQVQAVFPEGALTKRIRVGLQAQPMHSELVKKILGNKATFSPIVTLEPRRRKFHKPITMTIPVPKASSDVMLNGFGGDAPTLRLLCSITGGTTPAQWEDITGTTPLTFVNECVSFTTNVSARFWLIDCRQIQESVTFASQVYREIICVPYMAKFVVFAKSHDPIEARLRCFCMTDDKVDKTLEQQENFAEVARSRDVEVLEGKPIYVDCFGNLVPLTKSGQHHIFSFFAFKENRLPLFVKVRDTTQEPCGRLSFMKEPKSTRGLVHQAICNLNITLPIYTKESESDQEQEEEIDMTSEKNPQDEQERIEERLAYIADHLGFSWTELARELDFTEEQIHQIRIENPNSLQDQSHALLKYWLERDGKHATDTNLVECLTKINRMDIVHLMETNTEPLQERISHSYAEIEQTITLDHSEGFSVLQEELCTAQHKQKEEQAVSKESETCDHPPIVSEEDISVGYSTFQDGVPKTEGDSSATALFPQTHKEQVQQDFSGKMQDLPEESSLEYQQEYFVTTPGTETSETQKAMIVPSSPSKTPEEVSTPAEEEKLYLQTPTSSERGGSPIIQEPEEPSEHREESSPRKTSLVIVESADNQPETCERLDEDAAFEKGDDMPEIPPETVTEEEYIDEHGHTVVKKVTRKIIRRYVSSEGTEKEEIMVQGMPQEPVNIEEGDGYSKVIKRVVLKSDTEQSEDNNE

SEQ ID NO: 37425 - protein, 1861 aa, Homo sapiens
MASSASSSPAGTEDSAPAQGGFGSDYSRSSRKSDANASYLRAARAGHLEKALDYIKNGVDINICNQNGLNALHLASKEGHVEVVSELLQREANVDAATKKGNTALHIASLAGQAEVVKVLVTNGANVNAQSQNGFTPLYMAAQENHLEVVKFLLDNGASQSLATEDGFTPLAVALQQGHDQVVSLLLENDTKGKVRLPALHIAARKDDTKAAALLLQNDNNADVESKSGFTPLHIAAHYGNINVATLLLNRAAAVDFTARNDITPLHVASKRGNANMVKLLLDRGAKIDAKTRDGLTPLHCGARSGHEQVVEMLLDRAAPILSKTKNGLSPLHMATQGDHLNCVQLLLQHNVPVDDVTNDYLTALHVAAHCGHYKVAKVLLDKKANPNAKALNGFTPLHIACKKNRIKVMELLLKHGASIQAVTESGLTPIHVAAFMGHVNIVSQLMHHGASPNTTNVRGETALHMAARSGQAEVVRYLVQDGAQVEAKAKDDQTPLHISARLGKADIVQQLLQQGASPNAATTSGYTPLHLSAREGHEDVAAFLLDHGASLSITTKKGFTPLHVAAKYGKLEVANLLLQKSASPDAAGKSGLTPLHVAAHYDNQKVALLLLDQGASPHAAAKNGYTPLHIAAKKNQMDIATTLLEYGADANAVTRQGIASVHLAAQEGHVDMVSLLLGRNANVNLSNKSGLTPLHLAAQEDRVNVAEVLVNQGAHVDAQTKMGYTPLHVGCHYGNIKIVNFLLQHSAKVNAKTKNGYTPLHQAAQQGHTHIINVLLQNNASPNELTVNGNTALGIARRLGYISVVDTLKIVTEETMTTTTVTEKHKMNVPETMNEVLDMSDDEVRKANAPEMLSDGEYISDVEEGEDAMTGDTDKYLGPQDLKELGDDSLPAEGYMGFSLGARSASLRSFSSDRSYTLNRSSYARDSMMIEELLVPSKEQHLTFTREFDSDSLRHYSWAADTLDNVNLVSSPIHSGFLVSFMVDARGGSMRGSRHHGMRIIIPPRKCTAPTRITCRLVKRHKLANPPPMVEGEGLASRLVEMGPAGAQFLGPVIVEIPHFGSMRGKERELIVLRSENGETWKEHQFDSKNEDLTELLNGMDEELDSPEELGKKRICRIITKDFPQYFAVVSRIKQESNQIGPEGGILSSTTVPLVQASFPEGALTKRIRVGLQAQPVPDEIVKKILGNKATFSPIVTVEPRRRKFHKPITMTIPVPPPSGEGVSNGYKGDTTPNLRLLCSITGGTSPAQWEDITGTTPLTFIKDCVSFTTNVSARFWLADCHQVLETVGLATQLYRELICVPYMAKFVVFAKMNDPVESSLRCFCMTDDKVDKTLEQQENFEEVARSKDIEVLEGKPIYVDCYGNLAPLTKGGQQLVFNFYSFKENRLPFSIKIRDTSQEPCGRLSFLKEPKTTKGLPQTAVCNLNITLPAHKKIEKTDRRQSFASLALRKRYSYLTEPGMSPQSPCERTDIRMAIVADHLGLSWTELARELNFSVDEINQIRVENPNSLISQSFMLLKKWVTRDGKNATTDALTSVLTKINRIDIVTLLEGPIFDYGNISGTRSFADENNVFHDPVDGYPSLQVELETPTGLHYTPPTPFQQDDYFSDISSIESPLRTPSRLSDGLVPSQGNIEHSADGPPVVTAEDASLEDSKLEDSVPLTEMPEAVDVDESQLENVCLSWQNETSSGNLESCAQARRVTGGLLDRLDDSPDQCRDSITSYLKGEAGKFEANGSHTEITPEAKTKSYFPESQNDVGKQSTKETLKPKIHGSGHVEEPASPLAAYQKSLEETSKLIIEETKPCVPVSMKKMSRTSPADGKPRLSLHEEEGSSGSEQKQGEGFKVKTKKEIRHVEKKSHS

SEQ ID NO: 37426 - protein, 1868 aa, Homo sapiens
MSEEPKEKNAKPAHRKRKGKKSDANASYLRAARAGHLEKALDYIKNGVDINICNQNGLNALHLASKEGHVEVVSELLQREANVDAATKKGNTALHIASLAGQAEVVKVLVTNGANVNAQSQNGFTPLYMAAQENHLEVVKFLLDNGASQSLATEDGFTPLAVALQQGHDQVVSLLLENDTKGKVRLPALHIAARKDDTKAAALLLQNDNNADVESKSGFTPLHIAAHYGNINVATLLLNRAAAVDFTARNDITPLHVASKRGNANMVKLLLDRGAKIDAKTRDGLTPLHCGARSGHEQVVEMLLDRAAPILSKTKNGLSPLHMATQGDHLNCVQLLLQHNVPVDDVTNDYLTALHVAAHCGHYKVAKVLLDKKANPNAKALNGFTPLHIACKKNRIKVMELLLKHGASIQAVTESGLTPIHVAAFMGHVNIVSQLMHHGASPNTTNVRGETALHMAARSGQAEVVRYLVQDGAQVEAKAKDDQTPLHISARLGKADIVQQLLQQGASPNAATTSGYTPLHLSAREGHEDVAAFLLDHGASLSITTKKGFTPLHVAAKYGKLEVANLLLQKSASPDAAGKSGLTPLHVAAHYDNQKVALLLLDQGASPHAAAKNGYTPLHIAAKKNQMDIATTLLEYGADANAVTRQGIASVHLAAQEGHVDMVSLLLGRNANVNLSNKSGLTPLHLAAQEDRVNVAEVLVNQGAHVDAQTKMGYTPLHVGCHYGNIKIVNFLLQHSAKVNAKTKNGYTPLHQAAQQGHTHIINVLLQNNASPNELTVNGNTALGIARRLGYISVVDTLKIVTEETMTTTTVTEKHKMNVPETMNEVLDMSDDEVRKANAPEMLSDGEYISDVEEGNRCTWYKIPKVQEFTVKSEDAMTGDTDKYLGPQDLKELGDDSLPAEGYMGFSLGARSASLRSFSSDRSYTLNRSSYARDSMMIEELLVPSKEQHLTFTREFDSDSLRHYSWAADTLDNVNLVSSPIHSGFLVSFMVDARGGSMRGSRHHGMRIIIPPRKCTAPTRITCRLVKRHKLANPPPMVEGEGLASRLVEMGPAGAQFLGPVIVEIPHFGSMRGKERELIVLRSENGETWKEHQFDSKNEDLTELLNGMDEELDSPEELGKKRICRIITKDFPQYFAVVSRIKQESNQIGPEGGILSSTTVPLVQASFPEGALTKRIRVGLQAQPVPDEIVKKILGNKATFSPIVTVEPRRRKFHKPITMTIPVPPPSGEGVSNGYKGDTTPNLRLLCSITGGTSPAQWEDITGTTPLTFIKDCVSFTTNVSARFWLADCHQVLETVGLATQLYRELICVPYMAKFVVFAKMNDPVESSLRCFCMTDDKVDKTLEQQENFEEVARSKDIEVLEGKPIYVDCYGNLAPLTKGGQQLVFNFYSFKENRLPFSIKIRDTSQEPCGRLSFLKEPKTTKGLPQTAVCNLNITLPAHKKIEKTDRRQSFASLALRKRYSYLTEPGMSPQSPCERTDIRMAIVADHLGLSWTELARELNFSVDEINQIRVENPNSLISQSFMLLKKWVTRDGKNATTDALTSVLTKINRIDIVTLLEGPIFDYGNISGTRSFADENNVFHDPVDGYPSLQVELETPTGLHYTPPTPFQQDDYFSDISSIESPLRTPSRLSDGLVPSQGNIEHSADGPPVVTAEDASLEDSKLEDSVPLTEMPEAVDVDESQLENVCLSWQNETSSGNLESCAQARRVTGGLLDRLDDSPDQCRDSITSYLKGEAGKFEANGSHTEITPEAKTKSYFPESQNDVGKQSTKETLKPKIHGSGHVEEPASPLAAYQKSLEETSKLIIEETKPCVPVSMKKMSRTSPADGKPRLSLHEEEGSSGSEQKQGEGFKVKTKKEIRHVEKKSHS

SEQ ID NO: 37427 - protein, 4377 aa, Homo sapiens
MAHAASQLKKNRDLEINAEEEPEKKRKHRKRSRDRKKKSDANASYLRAARAGHLEKALDYIKNGVDINICNQNGLNALHLASKEGHVEVVSELLQREANVDAATKKGNTALHIASLAGQAEVVKVLVTNGANVNAQSQNGFTPLYMAAQENHLEVVKFLLDNGASQSLATEDGFTPLAVALQQGHDQVVSLLLENDTKGKVRLPALHIAARKDDTKAAALLLQNDNNADVESKSGFTPLHIAAHYGNINVATLLLNRAAAVDFTARNDITPLHVASKRGNANMVKLLLDRGAKIDAKTRDGLTPLHCGARSGHEQVVEMLLDRAAPILSKTKNGLSPLHMATQGDHLNCVQLLLQHNVPVDDVTNDYLTALHVAAHCGHYKVAKVLLDKKANPNAKALNGFTPLHIACKKNRIKVMELLLKHGASIQAVTESGLTPIHVAAFMGHVNIVSQLMHHGASPNTTNVRGETALHMAARSGQAEVVRYLVQDGAQVEAKAKDDQTPLHISARLGKADIVQQLLQQGASPNAATTSGYTPLHLSAREGHEDVAAFLLDHGASLSITTKKGFTPLHVAAKYGKLEVANLLLQKSASPDAAGKSGLTPLHVAAHYDNQKVALLLLDQGASPHAAAKNGYTPLHIAAKKNQMDIATTLLEYGADANAVTRQGIASVHLAAQEGHVDMVSLLLGRNANVNLSNKSGLTPLHLAAQEDRVNVAEVLVNQGAHVDAQTKMGYTPLHVGCHYGNIKIVNFLLQHSAKVNAKTKNGYTPLHQAAQQGHTHIINVLLQNNASPNELTVNGNTALGIARRLGYISVVDTLKIVTEETMTTTTVTEKHKMNVPETMNEVLDMSDDEVRKANAPEMLSDGEYISDVEEGEDAMTGDTDKYLGPQDLKELGDDSLPAEGYMGFSLGARSASLRSFSSDRSYTLNRSSYARDSMMIEELLVPSKEQHLTFTREFDSDSLRHYSWAADTLDNVNLVSSPIHSGFLVSFMVDARGGSMRGSRHHGMRIIIPPRKCTAPTRITCRLVKRHKLANPPPMVEGEGLASRLVEMGPAGAQFLGPVIVEIPHFGSMRGKERELIVLRSENGETWKEHQFDSKNEDLTELLNGMDEELDSPEELGKKRICRIITKDFPQYFAVVSRIKQESNQIGPEGGILSSTTVPLVQASFPEGALTKRIRVGLQAQPVPDEIVKKILGNKATFSPIVTVEPRRRKFHKPITMTIPVPPPSGEGVSNGYKGDTTPNLRLLCSITGGTSPAQWEDITGTTPLTFIKDCVSFTTNVSARFWLADCHQVLETVGLATQLYRELICVPYMAKFVVFAKMNDPVESSLRCFCMTDDKVDKTLEQQENFEEVARSKDIEVLEGKPIYVDCYGNLAPLTKGGQQLVFNFYSFKENRLPFSIKIRDTSQEPCGRLSFLKEPKTTKGLPQTAVCNLNITLPAHKKETESDQDDEIEKTDRRQSFASLALRKRYSYLTEPGMIERSTGATRSLPTTYSYKPFFSTRPYQSWTTAPITVPGPAKSGFTSLSSSSSNTPSASPLKSIWSVSTPSPIKSTLGASTTSSVKSISDVASPIRSFRTMSSPIKTVVSQSPYNIQVSSGTLARAPAVTEATPLKGLASNSTFSSRTSPVTTAGSLLERSSITMTPPASPKSNINMYSSSLPFKSIITSAAPLISSPLKSVVSPVKSAVDVISSAKITMASSLSSPVKQMPGHAEVALVNGSISPLKYPSSSTLINGCKATATLQEKISSATNSVSSVVSAATDTVEKVFSTTTAMPFSPLRSYVSAAPSAFQSLRTPSASALYTSLGSSISATTSSVTSSIITVPVYSVVNVLPEPALKKLPDSNSFTKSAAALLSPIKTLTTETHPQPHFSRTSSPVKSSLFLAPSALKLSTPSSLSSSQEILKDVAEMKEDLMRMTAILQTDVPEEKPFQPELPKEGRIDDEEPFKIVEKVKEDLVKVSEILKKDVCVDNKGSPKSPKSDKGHSPEDDWIEFSSEEIREARQQAAASQSPSLPERVQVKAKAASEKDYNLTKVIDYLTNDIGSSSLTNLKYKFEDAKKDGEERQKRVLKPAIALQEHKLKMPPASMRTSTSEKELCKMADSFFGTDTILESPDDFSQHDQDKSPLSDSGFETRSEKTPSAPQSAESTGPKPLFHEVPIPPVITETRTEVVHVIRSYDPSAGDVPQTQPEEPVSPKPSPTFMELEPKPTTSSIKEKVKAFQMKASSEEDDHNRVLSKGMRVKEETHITTTTRMVYHSPPGGEGASERIEETMSVHDIMKAFQSGRDPSKELAGLFEHKSAVSPDVHKSAAETSAQHAEKDNQMKPKLERIIEVHIEKGNQAEPTEVIIRETKKHPEKEMYVYQKDLSRGDINLKDFLPEKHDAFPCSEEQGQQEEEELTAEESLPSYLESSRVNTPVSQEEDSRPSSAQLISDDSYKTLKLLSQHSIEYHDDELSELRGESYRFAEKMLLSEKLDVSHSDTEESVTDHAGPPSSELQGSDKRSREKIATAPKKEILSKIYKDVSENGVGKVSKDEHFDKVTVLHYSGNVSSPKHAMWMRFTEDRLDRGREKLIYEDRVDRTVKEAEEKLTEVSQFFRDKTEKLNDELQSPEKKARPKNGKEYSSQSPTSSSPEKVLLTELLASNDEWVKARQHGPDGQGFPKAEEKAPSLPSSPEKMVLSQQTEDSKSTVEAKGSISQSKAPDGPQSGFQLKQSKLSSIRLKFEQGTHAKSKDMSQEDRKSDGQSRIPVKKIQESKLPVYQVFAREKQQKAIDLPDESVSVQKDFMVLKTKDEHAQSNEIVVNDSGSDNVKKQRTEMSSKAMPDSFSEQQAKDLACHITSDLATRGPWDKKVFRTWESSGATNNKSQKEKLSHVLVHDVRENHIGHPESKSVDQKNEFMSVTERERKLLTNGSLSEIKEMTVKSPSKKVLYREYVVKEGDHPGGLLDQPSRRSESSAVSHIPVRVADERRMLSSNIPDGFCEQSAFPKHELSQKLSQSSMSKETVETQHFNSIEDEKVTYSEISKVSKHQSYVGLCPPLEETETSPTKSPDSLEFSPGKESPSSDVFDHSPIDGLEKLAPLAQTEGGKEIKTLPVYVSFVQVGKQYEKEIQQGGVKKIISQECKTVQETRGTFYTTRQQKQPPSPQGSPEDDTLEQVSFLDSSGKSPLTPETPSSEEVSYEFTSKTPDSLIAYIPGKPSPIPEVSEESEEEEQAKSTSLKQTTVEETAVEREMPNDVSKDSNQRPKNNRVAYIEFPPPPPLDADQIESDKKHHYLPEKEVDMIEVNLQDEHDKYQLAEPVIRVQPPSPVPPGADVSDSSDDESIYQPVPVKKYTFKLKEVDDEQKEKPKASAEKASNQKELESNGSGKDNEFGLGLDSPQNEIAQNGNNDQSITECSIATTAEFSHDTDATEIDSLDGYDLQDEDDGLTESDSKLPIQAMEIKKDIWNTEGILKPADRSFSQSKLEVIEEEGKVGPDEDKPPSKSSSSEKTPDKTDQKSGAQFFTLEGRHPDRSVFPDTYFSYKVDEEFATPFKTVATKGLDFDPWSNNRGDDEVFDSKSREDETKPFGLAVEDRSPATTPDTTPARTPTDESTPTSEPNPFPFHEGKMFEMTRSGAIDMSKRDFVEERLQFFQIGEHTSEGKSGDQGEGDKSMVTATPQPQSGDTTVETNLERNVETPTVEPNPSIPTSGECQEGTSSSGSLEKSAAATNTSKVDPKLRTPIKMGISASTMTMKKEGPGEITDKIEAVMTSCQGLENETITMISNTANSQMGVRPHEKHDFQKDNFNNNNNLDSSTIQTDNIMSNIVLTEHSAPTCTTEKDNPVKVSSGKKTGVLQGHCVRDKQKVLGEQQKTKELIGIRQKSKLPIKATSPKDTFPPNHMSNTKASKMKQVSQSEKTKALTTSSCVDVKSRIPVKNTHRDNIIAVRKACATQKQGQPEKGKAKQLPSKLPVKVRSTCVTTTTTTATTTTTTTTTTTTSCTVKVRKSQLKEVCKHSIEYFKGISGETLKLVDRLSEEEKKMQSELSDEEESTSRNTSLSETSRGGQPSVTTKSARDKKTEAAPLKSKSEKAGSEKRSSRRTGPQSPCERTDIRMAIVADHLGLSWTELARELNFSVDEINQIRVENPNSLISQSFMLLKKWVTRDGKNATTDALTSVLTKINRIDIVTLLEGPIFDYGNISGTRSFADENNVFHDPVDGWQNETSSGNLESCAQARRVTGGLLDRLDDSPDQCRDSITSYLKGEAGKFEANGSHTEITPEAKTKSYFPESQNDVGKQSTKETLKPKIHGSGHVEEPASPLAAYQKSLEETSKLIIEETKPCVPVSMKKMSRTSPADGKPRLSLHEEEGSSGSEQKQGEGFKVKTKKEIRHVEKKSHS

SEQ ID NO: 37428 - protein, 1001 aa, Homo sapiens
MALPQSEDAMTGDTDKYLGPQDLKELGDDSLPAEGYMGFSLGARSASLRSFSSDRSYTLNRSSYARDSMMIEELLVPSKEQHLTFTREFDSDSLRHYSWAADTLDNVNLVSSPIHSGFLVSFMVDARGGSMRGSRHHGMRIIIPPRKCTAPTRITCRLVKRHKLANPPPMVEGEGLASRLVEMGPAGAQFLGPVIVEIPHFGSMRGKERELIVLRSENGETWKEHQFDSKNEDLTELLNGMDEELDSPEELGKKRICRIITKDFPQYFAVVSRIKQESNQIGPEGGILSSTTVPLVQASFPEGALTKRIRVGLQAQPVPDEIVKKILGNKATFSPIVTVEPRRRKFHKPITMTIPVPPPSGEGVSNGYKGDTTPNLRLLCSITGGTSPAQWEDITGTTPLTFIKDCVSFTTNVSARFWLADCHQVLETVGLATQLYRELICVPYMAKFVVFAKMNDPVESSLRCFCMTDDKVDKTLEQQENFEEVARSKDIEVLEGKPIYVDCYGNLAPLTKGGQQLVFNFYSFKENRLPFSIKIRDTSQEPCGRLSFLKEPKTTKGLPQTAVCNLNITLPAHKKIEKTDRRQSFASLALRKRYSYLTEPGMSPQSPCERTDIRMAIVADHLGLSWTELARELNFSVDEINQIRVENPNSLISQSFMLLKKWVTRDGKNATTDALTSVLTKINRIDIVTLLEGPIFDYGNISGTRSFADENNVFHDPVDGYPSLQVELETPTGLHYTPPTPFQQDDYFSDISSIESPLRTPSRLSDGLVPSQGNIEHSADGPPVVTAEDASLEDSKLEDSVPLTEMPEAVDVDESQLENVCLSWQNETSSGNLESCAQARRVTGGLLDRLDDSPDQCRDSITSYLKGEAGKFEANGSHTEITPEAKTKSYFPESQNDVGKQSTKETLKPKIHGSGHVEEPASPLAAYQKSLEETSKLIIEETKPCVPVSMKKMSRTSPADGKPRLSLHEEEGSSGSEQKQGEGFKVKTKKEIRHVEKKSHS

SEQ ID NO: 37429 - protein, 1101 aa, Homo sapiens
MSEEPKEKNAKPAHRKRKGKKSDANASYLRAARAGHLEKALDYISVVDTLKIVTEETMTTTTVTEKHKMNVPETMNEVLDMSDDEVRKANAPEMLSDGEYISDVEEGEDAMTGDTDKYLGPQDLKELGDDSLPAEGYMGFSLGARSASLRSFSSDRSYTLNRSSYARDSMMIEELLVPSKEQHLTFTREFDSDSLRHYSWAADTLDNVNLVSSPIHSGFLVSFMVDARGGSMRGSRHHGMRIIIPPRKCTAPTRITCRLVKRHKLANPPPMVEGEGLASRLVEMGPAGAQFLGPVIVEIPHFGSMRGKERELIVLRSENGETWKEHQFDSKNEDLTELLNGMDEELDSPEELGKKRICRIITKDFPQYFAVVSRIKQESNQIGPEGGILSSTTVPLVQASFPEGALTKRIRVGLQAQPVPDEIVKKILGNKATFSPIVTVEPRRRKFHKPITMTIPVPPPSGEGVSNGYKGDTTPNLRLLCSITGGTSPAQWEDITGTTPLTFIKDCVSFTTNVSARFWLADCHQVLETVGLATQLYRELICVPYMAKFVVFAKMNDPVESSLRCFCMTDDKVDKTLEQQENFEEVARSKDIEVLEGKPIYVDCYGNLAPLTKGGQQLVFNFYSFKENRLPFSIKIRDTSQEPCGRLSFLKEPKTTKGLPQTAVCNLNITLPAHKKIEKTDRRQSFASLALRKRYSYLTEPGMSPQSPCERTDIRMAIVADHLGLSWTELARELNFSVDEINQIRVENPNSLISQSFMLLKKWVTRDGKNATTDALTSVLTKINRIDIVTLLEGPIFDYGNISGTRSFADENNVFHDPVDGYPSLQVELETPTGLHYTPPTPFQQDDYFSDISSIESPLRTPSRLSDGLVPSQGNIEHSADGPPVVTAEDASLEDSKLEDSVPLTEMPEAVDVDESQLENVCLSWQNETSSGNLESCAQARRVTGGLLDRLDDSPDQCRDSITSYLKGEAGKFEANGSHTEITPEAKTKSYFPESQNDVGKQSTKETLKPKIHGSGHVEEPASPLAAYQKSLEETSKLIIEETKPCVPVSMKKMSRTSPADGKPRLSLHEEEGSSGSEQKGEGFKVKTKKEIRHVEKKSHS

SEQ ID NO: 37430 - protein, 1128 aa, Homo sapiens
MATQGDHLNCVQLLLQHNVPVDDVTNDYLTALHVAAHCGHYKVAKVLLDKKANPNAKALNGFTPLHIACKKNRIKVMELLLKHGASIQAVTESGLTPIHVAAFMGHVNIVSQLMHHGASPNTTNVRGETALHMAARSGQAEVVRYLVQDGAQVEAKAKDDQTPLHISARLGKADIVQQLLQQGASPNAATTSGYTPLHLSAREGHEDVAAFLLDHGASLSITTKKGFTPLHVAAKYGKLEVANLLLQKSASPDAAGKSGLTPLHVAAHYDNQKVALLLLDQGASPHAAAKNGYTPLHIAAKKNQMDIATTLLEYGADANAVTRQGIASVHLAAQEGHVDMVSLLLGRNANVNLSNKSGLTPLHLAAQEDRVNVAEVLVNQGAHVDAQTKMGYTPLHVGCHYGNIKIVNFLLQHSAKVNAKTKNGYTPLHQAAQQGHTHIINVLLQNNASPNELTVNGNTALGIARRLGYISVVDTLKIVTEETMTTTTVTEKHKMNVPETMNEVLDMSDDEGEDAMTGDTDKYLGPQDLKELGDDSLPAEGYMGFSLGARSASSDRSYTLNRSSYARDSMMIEELLVPSKEQHLTFTREFDSDSLRHYSWAADTLDNVNLVSSPIHSGFLVSFMVDARGGSMRGSRHHGMRIIIPPRKCTAPTRITCRLVKRHKLANPPPMVEGEGLASRLVEMGPAGAQFLGPVIVEIPHFGSMRGKERELIVLRSENGETWKEHQFDSKNEDLTELLNGMDEELDSPEELGKKRICRIITKDFPQYFAVVSRIKQESNQIGPEGGILSSTTVPLVQASFPEGALTKRIRVGLQAQPVPDEIVKKILGNKATFSPIVTVEPRRRKFHKPITMTIPVPPPSGEGVSNGYKGDTTPNLRLLCSITGGTSPAQWEDITGTTPLTFIKDCVSFTTNVSARFWLADCHQVLETVGLATQLYRELICVPYMAKFVVFAKMNDPVESSLRCFCMTDDKVDKTLEQQENFEEVARSKDIEVLEGKPIYVDCYGNLAPLTKGGQQLVFNFYSFKENRLPFSIKIRDTSQEPCGRLSFLKEPKTTKGLPQTAVCNLNITLPAHKKIEKTDRRQSFASLALRKRYSYLTEPGMSEFPNTFTNTWIFIRRDIFSIQTKF

SEQ ID NO: 37431 - protein, 1847 aa, Homo sapiens
SDANASYLRAARAGHLEKALDYIKNGVDINICNQNGLNALHLASKEGHVEVVSELLQREANVDAATKKGNTALHIASLAGQAEVVKVLVTNGANVNAQSQNGFTPLYMAAQENHLEVVKFLLDNGASQSLATEDGFTPLAVALQQGHDQVVSLLLENDTKGKVRLPALHIAARKDDTKAAALLLQNDNNADVESKSGFTPLHIAAHYGNINVATLLLNRAAAVDFTARNDITPLHVASKRGNANMVKLLLDRGAKIDAKTRDGLTPLHCGARSGHEQVVEMLLDRAAPILSKTKNGLSPLHMATQGDHLNCVQLLLQHNVPVDDVTNDYLTALHVAAHCGHYKVAKVLLDKKANPNAKALNGFTPLHIACKKNRIKVMELLLKHGASIQAVTESGLTPIHVAAFMGHVNIVSQLMHHGASPNTTNVRGETALHMAARSGQAEVVRYLVQDGAQVEAKAKDDQTPLHISARLGKADIVQQLLQQGASPNAATTSGYTPLHLSAREGHEDVAAFLLDHGASLSITTKKGFTPLHVAAKYGKLEVANLLLQKSASPDAAGKSGLTPLHVAAHYDNQKVALLLLDQGASPHAAAKNGYTPLHIAAKKNQMDIATTLLEYGADANAVTRQGIASVHLAAQEGHVDMVSLLLGRNANVNLSNKSGLTPLHLAAQEDRVNVAEVLVNQGAHVDAQTKMGYTPLHVGCHYGNIKIVNFLLQHSAKVNAKTKNGYTPLHQAAQQGHTHIINVLLQNNASPNELTVNGNTALGIARRLGYISVVDTLKIVTEETMTTTTVTEKHKMNVPETMNEVLDMSDDEVRKANAPEMLSDGEYISDVEEGNRCTWYKIPKVQEFTVKSEDAMTGDTDKYLGPQDLKELGDDSLPAEGYMGFSLGARSASLRSFSSDRSYTLNRSSYARDSMMIEELLVPSKEQHLTFTREFDSDSLRHYSWAADTLDNVNLVSSPIHSGFLVSFMVDARGGSMRGSRHHGMRIIIPPRKCTAPTRITCRLVKRHKLANPPPMVEGEGLASRLVEMGPAGAQFLGPVIVEIPHFGSMRGKERELIVLRSENGETWKEHQFDSKNEDLTELLNGMDEELDSPEELGKKRICRIITKDFPQYFAVVSRIKQESNQIGPEGGILSSTTVPLVQASFPEGALTKRIRVGLQAQPVPDEIVKKILGNKATFSPIVTVEPRRRKFHKPITMTIPVPPPSGEGVSNGYKGDTTPNLRLLCSITGGTSPAQWEDITGTTPLTFIKDCVSFTTNVSARFWLADCHQVLETVGLATQLYRELICVPYMAKFVVFAKMNDPVESSLRCFCMTDDKVDKTLEQQENFEEVARSKDIEVLEGKPIYVDCYGNLAPLTKGGQQLVFNFYSFKENRLPFSIKIRDTSQEPCGRLSFLKEPKTTKGLPQTAVCNLNITLPAHKKIEKTDRRQSFASLALRKRYSYLTEPGMSPQSPCERTDIRMAIVADHLGLSWTELARELNFSVDEINQIRVENPNSLISQSFMLLKKWVTRDGKNATTDALTSVLTKINRIDIVTLLEGPIFDYGNISGTRSFADENNVFHDPVDGYPSLQVELETPTGLHYTPPTPFQQDDYFSDISSIESPLRTPSRLSDGLVPSQGNIEHSADGPPVVTAEDASLEDSKLEDSVPLTEMPEAVDVDESQLENVCLSWQNETSSGNLESCAQARRVTGGLLDRLDDSPDQCRDSITSYLKGEAGKFEANGSHTEITPEAKTKSYFPESQNDVGKQSTKETLKPKIHGSGHVEEPASPLAAYQKSLEETSKLIIEETKPCVPVSMKKMSRTSPADGKPRLSLHEEEGSSGSEQKQGEGFKVKTKKEIRHVEKKSHS

SEQ ID NO: 37432 - protein, 1117 aa, Homo sapiens
MATQGDHLNCVQLLLQHNVPVDDVTNDYLTALHVAAHCGHYKVAKVLLDKKANPNAKALNGFTPLHIACKKNRIKVMELLLKHGASIQAVTESGLTPIHVAAFMGHVNIVSQLMHHGASPNTTNVRGETALHMAARSGQAEVVRYLVQDGAQVEAKAKDDQTPLHISARLGKADIVQQLLQQGASPNAATTSGYTPLHLSAREGHEDVAAFLLDHGASLSITTKKGFTPLHVAAKYGKLEVANLLLQKSASPDAAGKSGLTPLHVAAHYDNQKVALLLLDQGASPHAAAKNGYTPLHIAAKKNQMDIATTLLEYGADANAVTRQGIASVHLAAQEGHVDMVSLLLGRNANDSGLTPLHLAAQEDRVNVAEVLVNQGAHVDAQTKMGYTPLHVGCHYGNIKIVNFLLQHSAKVNAKTKNGYTPLHQAAQQGHTHIINVLLQNNASPNELTVNGNTALGIARRLGYISVVDTLKIVTEETMTTTTVTEKHKMNVPETMNEVLDMSDDEGEDAMTGDTDKYLGPQDLKELGDDSLPAEGYMGFSLGARSASLRSFSSDRSYTLNRSSYARDSMMIEELLVPSKEQHLTFTREFDSDSLRHYSWAADTLDNVNLVSSPIHSGFLVSFMVDARGGSMRGSRHHGMRIIIPPRKCTAPTRITCRLVKRHKLANPPPMVEGEGLASRLVEMGPAGAQFLGPVIVEIPHFGSMRGKERELIVLRSENGETWKEHQFDSKNEDLTELLNGMDEELDSPEELGKKRICRIITKDFPQYFAVVSRIKQESNQIGPEGGILSSTTVPLVQASFPEGALTKRIRVGLQAQPVPDEIVKKILGNKATFSPIVTVEPRRRKFHKPITMTIPVPPPSGEGVSNGYKGDTTPNLRLLCSITGGTSPAQWEDITGTTPLTFIKDCVSFTTNVSARFWLADCHQVLETVGLATQLYRELICVPYMAKFVVFAKMNDPVESSLRCFCMTDDKVDKTLEQQENFEEVARSKDIEVLEGKPIYVDCYGNLAPLTKGGQQLVFNFYSFKENRLPFSIKIRDTSQEPCGRLSFLKEPKTTKGLPQTAVCNLNITLPAHKKIEKTDRRQSFASLALRKRYSYLTEPGMSEFPNTFTNLRGFS

SEQ ID NO: 37433 - protein, 811 aa, Homo sapiens
MALPQSEDAMTGDTDKYLGPQDLKELGDDSLPAEGYMGFSLGARSASLRSFSSDRSYTLNRSSYARDSMMIEELLVPSKEQHLTFTREFDSDSLRHYSWAADTLDNVNLVSSPIHSGFLVSFMVDARGGSMRGSRHHGMRIIIPPRKCTAPTRITCRLVKRHKLANPPPMVEGEGLASRLVEMGPAGAQFLGPVIVEIPHFGSMRGKERELIVLRSENGETWKEHQFDSKNEDLTELLNGMDEELDSPEELGKKRICRIITKDFPQYFAVVSRIKQESNQIGPEGGILSSTTVPLVQASFPEGALTKRIRVGLQAQPVPDEIVKKILGNKATFSPIVTVEPRRRKFHKPITMTIPVPPPSGEGVSNGYKGDTTPNLRLLCSITGGTSPAQWEDITGTTPLTFIKDCVSFTTNVSARFWLADCHQVLETVGLATQLYRELICVPYMAKFVVFAKMNDPVESSLRCFCMTDDKVDKTLEQQENFEEVARSKDIEVLEGKPIYVDCYGNLAPLTKGGQQLVFNFYSFKENRLPFSIKIRDTSQEPCGRLSFLKEPKTTKGLPQTAVCNLNITLPAHKKIEKTDRRQSFASLALRKRYSYLTEPGMSPQSPCERTDIRMAIVADHLGLSWTELARELNFSVDEINQIRVENPNSLISQSFMLLKKWVTRDGKNATTDALTSVLTKINRIDIVTLLEGPIFDYGNISGTRSFADENNVFHDPVDGYPSLQVELETPTGLHYTPPTPFQQDDYFSDISSIESPLRTPSRLSDGLVPSQGNIEHSADGPPVVTAEDASLEDSKLEDSVPLTEMPEAVM

SEQ ID NO: 37434 - protein, 931 aa, Homo sapiens
FTLAHVPQRGETALHMAARSGQAEVVRYLVQDGAQVEAKAKDDQTPLHISARLGKADIVQQLLQQGASPNAATTSGYTPLHLSAREGHEDVAAFLLDHGASLSITTKKGFTPLHVAAKYGKLEVANLLLQKSASPDAAGKSGLTPLHVAAHYDNQKVALLLLDQGASPHAAAKNGYTPLHIAAKKNQMDIATTLLEYGADANAVTRQGIASVHLAAQEGHVDMVSLLLGRNANVNLSNKSGLTPLHLAAQEDRVNVAEVLVNQGAHVDAQTKMGYTPLHVGCHYGNIKIVNFLLQHSAKVNAKTKNGYTPLHQAAQQGHTHIINVLLQNNASPNELTVNGNTALGIARRLGYISVVDTLKIVTEETMTTTTVTEKHKMNVPETMNEVLDMSDDEGEDAMTGDTDKYLGPQDLKELGDDSLPAEGYMGFSLGARSASRSFSSDRSYTLNRSSYARDSMMIEELLVPSKEQHLTFTREFDSDSLRHYSWAADTLDNVNLVSSPIHSGYSSPLPQYDSRFLVSFMVDARGGSMRGSRHHGMRIIIPPRKCTAPTRITCRLVKRHKLANPPPMVEGEGLASRLVEMGPAGAQFLGPVIVEIPHFGSMRGKERELIVLRSENGETWKEHQFDSKNEDLTELLNGMDEELDSPEELGKKRICRIITKDFPQYFAVVSRIKQESNQIGPEGGILSSTTVPLVQASFPEGALTKRIRVGLQAQPVPDEIVKKILGNKATFSPIVTVEPRRRKFHKPITMTIPVPPPSGEGVSNGYKGDTTPNLRLLCSITGGTSPAQWEDITGTTPLTFIKDCVSFTTNVSARFWLADCHQVLETVGLATQLYRELICVPYMAKFVVFAKMNDPVESSLRCFCMTDDKVDKTLEQQENFEEVARSKDIEVPCSQKQVHFITYSRYEVLFCGLNSTHYKIPSALLILLLL

SEQ ID NO: 37435 - protein, 548 aa, Homo sapiens
SLPESEDAMTGDTDKYLGPQDLKELGDDSLPAEGYMGFSLGARSASLRSFSSDRSYTLNRSSYARDSMMIEELLVPSKEQHLTFTREFDSDSLRHYSWAADTLDNVNLVSSPIHSGFLVSFMVDARGGSMRGSRHHGMRIIIPPRKCTAPTRITCRLVKRHKLANPPPMVEGEGLASRLVEMGPAGAQFLGPVIVEIPHFGSMRGKERELIVLRSENGETWKEHQFDSKNEDLTELLNGMDEELDSPEELGKKRICRIITKDFPQYFAVVSRIKQESNQIGPEGGILSSTTVPLVQASFPEGALTKRIRVGLQAQPVPDEIVKKILGNKATFSPIVTVEPRRRKFHKPITMTIPVPPPSGEGVSNGYKGDTTPNLRLLCSITGGTSPAQWEDITGTTPLTFIKDCVSFTTNVSARFWLADCHQVLETVGLATQLYRELICVPYMAKFVVFAKMNDPVESSLRCFCMTDDKVDKTLEQQENFEEVARSKDIEVLEGKPIYVDCYGNLAPLTKGGQQLVFNFYSFKENRLPFSIKIRDTSQNIVQLSCLL

SEQ ID NO: 37436 - protein, 478 aa, Homo sapiens
MDTSDLFASCRKGDVGRVRYLLEQRDVEVNVRDKWDSTPLYYACLCGHEELVLYLLANGARCEANTFDGERCLYGALSDPIRRALRDYKQVTASCRRRDYYDDFLQRLLEQGIHSDVVFVVHGKPFRVHRCVLGARSAYFANMLDTKWKGKSVVVLRHPLINPVAFGALLQYLYTGRLDIGVEHVSDCERLAKQCQLWDLLSDLEAKCEKVSEFVASKPGTCVKVLTIEPPPADPRLREDMALLADCALPPELRGDLWELPFPCPDGFNSCPDICFRVAGCSFLCHKAFFCGRSDYFRALLDDHFRESEEPATSGGPPAVTLHGISPDVFTHVLYYMYSDHTELSPEAAYDVLSVADMYLLPGLKRLCGRSLAQMLDEDTVVGVWRVAKLFRLARLEDQCTEYMAKVIEKLVEREDFVEAVKEEAAAVAARQETDSIPLVDDIRFHVASTVQTYSAIEEAQQRLRALEDLLVSIGLDC

SEQ ID NO: 37437 - protein, 405 aa, Homo sapiens
MDTSDLFASCRKGDVGRVRYLLEQVLYLLANGARCEANTFDGERCLYGALSDPIRRALRDYKHPLLWDLLSDLEAKCEKVSEFVASKPGTCVKVLTIEPPPADPRLREDMALLADCALPPELRAFFCGRSDYFRALLDDHFRESEEPATSGGPPAVTLHGISPDVFTHVLYYMYSDHTELSPEAAYDVLSVADMYLLPGLKRLCGRSLAQMLDEDTVVGVWRVAKLFRLARLEDQCTEYMAKVIEKLVEREDFVEAVKEEAAAVAARQETDSIPLVDDIRFHVASTVQTYSAIEEAQQRLRALEDTSMCMRLCAALLPAPCTLRASWGVRGAQWGFSSLHEPGDPRGGSIWDEPPPPNAQASPQDPGGGHHSGKPGVGVGFGLSTFLLQIPPTHPSPKSSPLALA

SEQ ID NO: 37438 - protein, 336 aa, Homo sapiens
MLDTKWKGKSVVVLRHPLINPVAFGALLQYLYTGRLDIGVEHVSDCERLAKQCQLWDLLSDLEAKCEKVSEFVASKPGTCVKVLTIEPPPADPRLREDMALLADCALPPELRGDLWELPFPCPDGFNSCPDICFRVAGCSFLCHKAFFCGRSDYFRALLDDHFRESEEPATSGGPPAVTLHGISPDVFTHVLYYMYSDHTELSPEAAYDVLSVADMYLLPGLKRLCGRSLAQMLDEDTVVGVWRVAKLFRLARLEDQCTEYMAKVIEKLVEREDFVEAVKEEAAAVAARQETDSIPLVDDIRFHVASTVQTYSAIEEAQQRLRALEDLLVSIGLDC

SEQ ID NO: 37439 - protein, 336 aa, Homo sapiens; identical to SEQ ID NO: 37438

SEQ ID NO: 37440 - protein, 336 aa, Homo sapiens; identical to SEQ ID NO: 37438

SEQ ID NO: 37441 - protein, 686 aa, Homo sapiens
MEASQEGHLELVKYLLASGANVHATTATGDTALTYACENGHTDVADVLLQAGADLDKQEDMKTILEGIDPAKHQEHESEGGRTPLMKAARAGHLCTVQFLISKGANVNRATANNDHTVVSLACAGGHLAVVELLLAHGADPTHRLKDGSTMLIEAAKGGHTNVVSYLLDYPNNVLSVPTTDVSQLPPPSQDQSQEPDRTSQENSPALLGVQKAVSTRVPTGSNSSSQTTECLTPESCSQTTSNVASQSMPPVYPSVDIDAHTESNHDTALTLACAGGHEELVSVLIARDAKIEHRDKKGFTPLILAATAGHVGVVEILLDKGGDIEAQSERTKDTPLSLACSGGRQEVVDLLLARGANKEHRNVSDYTPLSLAASGGYVNIIKILLNAGAEINSRTGSKLGISPLMLAAMNGHVPAVKLLLDMGSDINAQIETNRNTALTLACFQGRAEVVSLLLDRKANVEHRAKTGLTPLMEAASGGYAEVGRVLLDKGADVNAPPVPSSRDTALTIAADKGHYKFCELLIHRGAHIDVRNKKGNTPLWLASNGGHFDVVQLLVQAGADVDAADNRKITPLMSAFRKGHVKVVQYLVKEVNQFPSDIECMRYIATITDKELLKKCHQCVETIVKAKDQQAAEANKNASILLKELDLEKSREESRKQALAAKREKRKEKRKKKKEEQKRKQEEDE

SEQ ID NO: 37442 - protein, 2540 aa, Homo sapiens
MLTDSGGGGTSFEEDLDSVAPRSAPAGASEPPPPGGVGLGIRTVRLFGEAGPASGVGSSGGGGSGSGTGGGDAALDFKLAAAVLRTGGGGGASGSDEDEVSEVESFILDQEDLDNPVLKTTSEIFLSSTAEGADLRTVDPETQARLEALLEAAGIGKLSTADGKAFADPEVLRRLTSSVSCALDEAAAALTRMKAENSHNAGQVDTRSLAEACSDGDVNAVRKLLDEGRSVNEHTEEGESLLCLACSAGYYELAQVLLAMHANVEDRGNKGDITPLMAASSGGYLDIVKLLLLHDADVNSQSATGNTALTYACAGGFVDIVKVLLNEGANIEDHNENGHTPLMEAASAGHVEVARVLLDHGAGINTHSNEFKESALTLACYKGHLDMVRFLLEAGADQEHKTDEMHTALMEACMDGHVEVARLLLDSGAQVNMPADSFESPLTLAACGGHVELAALLIERGANLEEVNDEGYTPLMEAAREGHEEMVALLLAQGANINAQTEETQETALTLACCGGFSEVADFLIKAGADIELGCSTPLMEASQEGHLELVKYLLASGANVHATTATGDTALTYACENGHTDVADVLLQAGADLEHESEGGRTPLMKAARAGHLCTVQFLISKGANVNRATANNDHTVVSLACAGGHLAVVELLLAHGADPTHRLKDGSTMLIEAAKGGHTNVVSYLLDYPNNVLSVPTTDVSQLPPPSQDQSQVPRVPTHTLAMVVPPQEPDRTSQENSPALLGVQKGTSKQKSSSLQVADQDLLPSFHPYQPLECIVEETEGKLNELGQRISAIEKAQLKSLELIQGEPLNKDKIEELKKNREEQVQKKKKILKELQKVERQLQMKTQQQFTKEYLETKGQKDTVSLHQQCSHRGVFPEGEGDGSLPEDHFSELPQVDTILFKDNDVDDEQQSPPSAEQIDFVPVQPLSSPQCNFSSDLGSNGTNSLELQKVSGNQQIVGQPQIAITGHDQGLLVQEPDGLMVATPAQTLTDTLDDLIAAVSTRVPTGSNSSSQTTECLTPESCSQTTSNVASQSMPPVYPSVDIDAHTESNHDTALTLACAGGHEELVSVLIARDAKIEHRDKKGFTPLILAATAGHVGVVEILLDKGGDIEAQSERTKDTPLSLACSGGRQEVVDLLLARGANKEHRNVSDYTPLSLAASGGYVNIIKILLNAGAEINSRTGSKLGISPLMLAAMNGHVPAVKLLLDMGSDINAQIETNRNTALTLACFQGRAEVVSLLLDRKANVEHRAKTGLTPLMEAASGGYAEVGRVLLDKGADVNAPPVPSSRDTALTIAADKGHYKFCELLIHRGAHIDVRNKKGNTPLWLASNGGHFDVVQLLVQAGADVDAADNRKITPLMSAFRKGHVKVVQYLVKEVNQFPSDIECMRYIATITDKELLKKCHQCVETIVKAKDQQAAEANKNASILLKELDLEKSREESRKQALAAKREKRKEKRKKKKEEQKRKQEEDEENKPKENSELPEDEDEEENDEDVEQEVPIEPPSATTTTTIGISATSATFTNVFGKKRANVVTTPSTNRKNKKNKTKETPPTAHLILPEQHMSLAQQKADKNKINGEPRGGGAGGNSDSDNLDSTDCNSESSSGGKSQELNFVMDVNSSKYPSLLLHSQEEKTSTATSKTQTRLEGEVTPNSLSTSYKTVSLPLSSPNIKLNLTSPKRGQKREEGWKEVVRRSKKLSVPASVVSRIMGRGGCNITAIQDVTGAHIDVDKQKDKNGERMITIRGGTESTRYAVQLINALIQDPAKELEDLIPKNHIRTPASTKSIHANFSSGVGTTAASSKNAFPLGAPTLVTSQATTLSTFQPANKLNKNVPTNVRSSFPVSLPLAYPHPHFALLAAQTMQQIRHPRLPMAQFGGTFSPSPNTWGPFPVRPVNPGNTNSSPKHNNTSRLPNQNGTVLPSESAGLATASCPITVSSVVAASQQLCVTNTRTPSSVRKQLFACVPKTSPPATVISSVTSTCSSLPSVSSAPITSGQAPTTFLPASTSQAQLSSQKMESFSAVPPTKEKVSTQDQPMANLCTPSSTANSCSSSASNTPGAPETHPSSSPTPTSSNTQEEAQPSSVSDLSPMSMPFASNSEPAPLTLTSPRMVAADNQDTSNLPQLAVPAPRVSHRMQPRGSFYSMVPNATIHQDPQSIFVTNPVTLTPPQGPPAAVQLSSAVNIMNGSQMHINPANKSLPPTFGPATLFNHFSSLFDSSQVPANQGWGDGPLSSRVATDASFTVQSAFLGNSVLGHLENMHPDNSKAPGFRPPSQRVSTSPVGLPSIDPSGSSPSSSSAPLASFSGIPGTRVFLQGPAPVGTPSFNRQHFSPHPWTSASNSCDSPIPSVSSGSSSPLSATSAPPTLGQPKGVSASQDRKIPPPIGTERLARIRQGGSVAQAPAGTSFVAPVGHSGIWSFGVNAVSEGLSGWSQSVMGNHPMHQQLSDPSTFSQHQPMERDDSGMVAPSNIFHQPMASGFVDFSKGLPISMYGGTIIPSHPQLADVPGGPLFNGLHNPDPAWNPMIKVIQNSTECTDAQQ

SEQ ID NO: 37443 - protein, 2617 aa, Homo sapiens
MLTDSGGGGTSFEEDLDSVAPRSAPAGASEPPPPGGVGLGIRTVRLFGEAGPASGVGSSGGGGSGSGTGGGDAALDFKLAAAVLRTGGGGGASGSDEDEVSEVESFILDQEDLDNPVLKTTSEIFLSSTAEGADLRTVDPETQARLEALLEAAGIGKLSTADGKAFADPEVLRRLTSSVSCALDEAAAALTRMKAENSHNAGQVDTRSLAEACSDGDVNAVRKLLDEGRSVNEHTEEGESLLCLACSAGYYELAQVLLAMHANVEDRGNKGDITPLMAASSGGYLDIVKLLLLHDADVNSQSATGNTALTYACAGGFVDIVKVLLNEGANIEDHNENGHTPLMEAASAGHVEVARVLLDHGAGINTHSNEFKESALTLACYKGHLDMVRFLLEAGADQEHKTDEMHTALMEACMDGHVEVARLLLDSGAQVNMPADSFESPLTLAACGGHVELAALLIERGANLEEVNDEGYTPLMEAAREGHEEMVALLLAQGANINAQTEETQETALTLACCGGFSEVADFLIKAGADIELGCSTPLMEASQEGHLELVKYLLASGANVHATTATGDTALTYACENGHTDVADVLLQAGADLEHESEGGRTPLMKAARAGHLCTVQFLISKGANVNRATANNDHTVVSLACAGGHLAVVELLLAHGADPTHRLKDGSTMLIEAAKGGHTNVVSYLLDYPNNVLSVPTTDVSQLPPPSQDQSQVPRVPTHTLAMVVPPQEPDRTSQENSPALLGVQKGTSKQKSSSLQVADQDLLPSFHPYQPLECIVEETEGKLNELGQRISAIEKAQLKSLELIQGEPLNKDKIEELKKNREEQVQKKKKILKELQKVERQLQMKTQQQFTKEYLETKGQKDTVSLHQQCSHRGVFPEGEGDGSLPEDHFSELPQVDTILFKDNDVDDEQQSPPSAEQIDFVPVQPLSSPQCNFSSDLGSNGTNSLELQKVSGNQQIVGQPQIAITGHDQGLLVQEPDGLMVATPAQTLTDTLDDLIAAVSTRVPTGSNSSSQTTECLTPESCSQTTSNVASQSMPPVYPSVDIDAHTESNHDTALTLACAGGHEELVSVLIARDAKIEHRDKKGFTPLILAATAGHVGVVEILLDKGGDIEAQSERTKDTPLSLACSGGRQEVVDLLLARGANKEHRNVSDYTPLSLAASGGYVNIIKILLNAGAEINSRTGSKLGISPLMLAAMNGHVPAVKLLLDMGSDINAQIETNRNTALTLACFQGRAEVVSLLLDRKANVEHRAKTGLTPLMEAASGGYAEVGRVLLDKGADVNAPPVPSSRDTALTIAADKGHYKFCELLIHRGAHIDVRNKKGNTPLWLASNGGHFDVVQLLVQAGADVDAADNRKITPLMSAFRKGHVKVVQYLVKEVNQFPSDIECMRYIATITDKELLKKCHQCVETIVKAKDQQAAEANKNASILLKELDLEKSREESRKQALAAKREKRKEKRKKKKEEQKRKQEEDEENKPKENSELPEDEDEEENDEDVEQEVPIEPPSATTTTTIGISATSATFTNVFGKKRANVVTTPSTNRKNKKNKTKETPPTAHLILPEQHMSLAQQKADKNKINGEPRGGGAGGNSDSDNLDSTDCNSESSSGGKSQELNFVMDVNSSKYPSLLLHSQEEKTSTATSKTQTRLEGEVTPNSLSTSYKTVSLPLSSPNIKLNLTSPKRGQKREEGWKEVVRRSKKLSVPASVVSRIMGRGGCNITAIQDVTGAHIDVDKQKDKNGERMITIRGGTESTRYAVQLINALIQDPAKELEDLIPKNHIRTPASTKSIHANFSSGVGTTAASSKNAFPLGAPTLVTSQATTLSTFQPANKLNKNVPTNVRSSFPVSLPLAYPHPHFALLAAQTMQQIRHPRLPMAQFGGTFSPSPNTWGPFPVRPVNPGNTNSSPKHNNTSRLPNQNGTVLPSESAGLATASCPITVSSVVAASQQLCVTNTRTPSSVRKQLFACVPKTSPPATVISSVTSTCSSLPSVSSAPITSGQAPTTFLPASTSQAQLSSQKMESFSAVPPTKEKVSTQDQPMANLCTPSSTANSCSSSASNTPGAPETHPSSSPTPTSSNTQEEAQPSSVSDLSPMSMPFASNSEPAPLTLTSPRMVAADNQDTSNLPQLAVPAPRVSHRMQPRGSFYSMVPNATIHQDPQSIFVTNPVTLTPPQGPPAAVQLSSAVNIMNGSQMHINPANKSLPPTFGPATLFNHFSSLFDSSQVPANQGWGDGPLSSRVATDASFTVQSAFLGNSVLGHLENMHPDNSKAPGFRPPSQRVSTSPVGLPSIDPSGSSPSSSSAPLASFSGIPGTRVFLQGPAPVGTPSFNRQHFSPHPWTSASNSSTSAPPTLGQPKGVSASQDRKIPPPIGTERLARIRQGGSVAQAPAGTSFVAPVGHSGIWSFGVNAVSEGLSGWSQSVMGNHPMHQQLSDPSTFSQHQPMERDDSGMVAPSNIFHQPMASGFVDFSKGLPISMYGGTIIPSHPQLADVPGGPLFNGLHNPDPAWNPMIKVIQNSTECTDAQQASLLPSVPALKGEIPSPQLTRPKKRIGRPMVASPNQRHQDHLRPKVPAGVQELTHCPDTPLLPPSDSRGHNSSNSPSLQAGGAEGAGDRGRDTR

SEQ ID NO: 37444 - protein, 1007 aa, Homo sapiens
MVALLLAQGANINAQTEETQETALTLACCGGFSEVADFLIKAGADIELGCSTPLMEASQEGHLELVKYLLASGANVHATTATGDTALTYACENGHTDVADVLLQAGADLDKQEDMKTILEGIDPAKHQEHESEGGRTPLMKAARAGHLCTVQFLISKGANVNRATANNDHTVVSLACAGGHLAVVELLLAHGADPTHRLKDGSTMLIEAAKGGHTNVVSYLLDYPNNVLSVPTTDVSQLPPPSQDQSQVPRVPTHTLAMVVPPQEPDRTSQENSPALLGVQKGTSKQKSSSLQVADQDLLPSFHPYQPLECIVEETEGKLNELGQRISAIEKAQLKSLELIQGEPLNKDKIEELKKNREEQVQKKKKILKELQKVERQLQMKTQQQFTKEYLETKGQKDTVSLHQQCSHRGVFPEGEGDGSLPEDHFSELPQVDTILFKDNDVDDEQQSPPSAEQIDFVPVQPLSSPQCNFSSDLGSNGTNSLELQKVSGNQQIVGQPQIAITGHDQGLLVQEPDGLMVATPAQTLTDTLDDLIAAVSTRVPTGSNSSSQTTECLTPESCSQTTSNVASQSMPPVYPSVDIDAHTESNHDTALTLACAGGHEELVSVLIARDAKIEHRDKKGFTPLILAATAGHVGVVEILLDKGGDIEAQSERTKDTPLSLACSGGRQEVVDLLLARGANKEHRNVSDYTPLSLAASGGYVNIIKILLNAGAEINSRTGSKLGISPLMLAAMNGHVPAVKLLLDMGSDINAQIETNRNTALTLACFQGRAEVVSLLLDRKANVEHRAKTGLTPLMEAASGGYAEVGRVLLDKGADVNAPPVPSSRDTALTIAADKGHYKFCELLIHRGAHIDVRNKKGNTPLWLASNGGHFDVVQLLVQAGADVDAADNRKITPLMSAFRKGHVKVVQYLVKEVNQFPSDIECMRYIATITDKELLKKCHQCVETIVKAKDQQAAEANKNASILLKELDLEKSREESRKQALAAKREKRKEKRKEKRGTEKETGRR

SEQ ID NO: 37445 - protein, 2542 aa, Homo sapiens
MLTDSGGGGTSFEEDLDSVAPRSAPAGASEPPPPGGVGLGIRTVRLFGEAGPASGVGSSGGGGSGSGTGGGDAALDFKLAAAVLRTGGGGGASGSDEDEVSEVESFILDQEDLDNPVLKTTSEIFLSSTAEGADLRTVDPETQARLEALLEAAGIGKLSTADGKAFADPEVLRRLTSSVSCALDEAAAALTRMKAENSHNAGQVDTRSLAEACSDGDVNAVRKLLDEGRSVNEHTEEGESLLCLACSAGYYELAQVLLAMHANVEDRGNKGDITPLMAASSGGYLDIVKLLLLHDADVNSQSATGNTALTYACAGGFVDIVKVLLNEGANIEDHNENGHTPLMEAASAGHVEVARVLLDHGAGINTHSNEFKESALTLACYKGHLDMVRFLLEAGADQEHKTDEMHTALMEACMDGHVEVARLLLDSGAQVNMPADSFESPLTLAACGGHVELAALLIERGANLEEVNDEGYTPLMEAAREGHEEMVALLLAQGANINAQTEETQETALTLACCGGFSEVADFLIKAGADIELGCSTPLMEASQEGHLELVKYLLASGANVHATTATGDTALTYACENGHTDVADVLLQAGADLEHESEGGRTPLMKAARAGHLCTVQFLISKGANVNRATANNDHTVVSLACAGGHLAVVELLLAHGADPTHRLKDGSTMLIEAAKGGHTNVVSYLLDYPNNVLSVPTTDVSQLPPPSQDQSQVPRVPTHTLAMVVPPQEPDRTSQENSPALLGVQKGTSKQKSSSLQVADQDLLPSFHPYQPLECIVEETEGKLNELGQRISAIEKAQLKSLELIQGEPLNKDKIEELKKNREEQVQKKKKILKELQKVERQLQMKTQQQFTKEYLETKGQKDTVSLHQQCSHRGVFPEGEGDGSLPEDHFSELPQVDTILFKDNDVDDEQQSPPSAEQIDFVPVQPLSSPQCNFSSDLGSNGTNSLELQKVSGNQQIVGQPQIAITGHDQGLLVQEPDGLMVATPAQTLTDTLDDLIAAVSTRVPTGSNSSSQTTECLTPESCSQTTSNVASQSMPPVYPSVDIDAHTESNHDTALTLACAGGHEELVSVLIARDAKIEHRDKKGFTPLILAATAGHVGVVEILLDKGGDIEAQSERTKDTPLSLACSGGRQEVVDLLLARGANKEHRNVSDYTPLSLAASGGYVNIIKILLNAGAEINSRTGSKLGISPLMLAAMNGHVPAVKLLLDMGSDINAQIETNRNTALTLACFQGRAEVVSLLLDRKANVEHRAKTGLTPLMEAASGGYAEVGRVLLDKGADVNAPPVPSSRDTALTIAADKGHYKFCELLIHRGAHIDVRNKKGNTPLWLASNGGHFDVVQLLVQAGADVDAADNRKITPLMSAFRKGHVKVVQYLVKEVNQFPSDIECMRYIATITDKELLKKCHQCVETIVKAKDQQAAEANKNASILLKELDLEKSREESRKQALAAKREKRKEKRKKKKEEQKRKQEEDEENKPKENSELPEDEDEEENDEDVEQEVPIEPPSATTTTTIGISATSATFTNVFGKKRANVVTTPSTNRKNKKNKTKETPPTAHLILPEQHMSLAQQKADKNKINGEPRGGGAGGNSDSDNLDSTDCNSESSSGGKSQELNFVMDVNSSKYPSLLLHSQEEKTSTATSKTQTRLEGEVTPNSLSTSYKTVSLPLSSPNIKLNLTSPKRGQKREEGWKEVVRRSKKLSVPASVVSRIMGRGGCNITAIQDVTGAHIDVDKQKDKNGERMITIRGGTESTRYAVQLINALIQDPAKELEDLIPKNHIRTPASTKSIHANFSSGVGTTAASSKNAFPLGAPTLVTSQATTLSTFQPANKLNKNVPTNVRSSFPVSLPLAYPHPHFALLAAQTMQQIRHPRLPMAQFGGTFSPSPNTWGPFPVRPVNPGNTNSSPKHNNTSRLPNQNGTVLPSESAGLATASCPITVSSVVAASQQLCVTNTRTPSSVRKQLFACVPKTSPPATVISSVTSTCSSLPSVSSAPITSGQAPTTFLPASTSQAQLSSQKMESFSAVPPTKEKVSTQDQPMANLCTPSSTANSCSSSASNTPGAPETHPSSSPTPTSSNTQEEAQPSSVSDLSPMSMPFASNSEPAPLTLTSPRMVAADNQDTSNLPQLAVPAPRVSHRMQPRGSFYSMVPNATIHQDPQSIFVTNPVTLTPPQGPPAAVQLSSAVNIMNGSQMHINPANKSLPPTFGPATLFNHFSSLFDSSQVPANQGWGDGPLSSRVATDASFTVQSAFLGNSVLGHLENMHPDNSKAPGFRPPSQRVSTSPVGLPSIDPSGSSPSSSSAPLASFSGIPGTRVFLQGPAPVGTPSFNRQHFSPHPWTSASNSSTSAPPTLGQPKGVSASQDRKIPPPIGTERLARIRQGGSVAQAPAGTSFVAPVGHSGIWSFGVNAVSEGLSGWSQSVMGNHPMHQQLSDPSTFSQHQPMERDDSGMVAPSNIFHQPMASGFVDFSKGLPISMYGGTIIPSHPQLADVPGGPLFNGLHNPDPAWNPMIKVIQNSTECTDAQQIWPGTWAPHIGNMHLKYVN

SEQ ID NO: 37446 - protein, 616 aa, Homo sapiens
MLTDSGGGGTSFEEDLDSVAPRSAPAGASEPPPPGGVGLGIRTVRLFGEAGPASGVGSSGGGGSGSGTGGGDAALDFKLAAAVLRTGGGGGASGSDEDEVSEVESFILDQEDLDNPVLKTTSEIFLSSTAEGADLRTVDPETQARLEALLEAAAFADPEVLRRLTSSVSCALDEAAAALTRMKAENSHNAGQVDTRSLAEACSDGDVNAVRKLLDEGRSVNEHTEEGESLLCLACSAGYYELAQVLLAMHANVEDRGNKGDITPLMAASSGGYLDIVKLLLLHDADVNSQSATGNTALTYACAGGFVDIVKVLLNEGANIEDHNENGHTPLMEAASAGHVEVARVLLDHGAGINTHSNEFKESALTLACYKGHLDMVRFLLEAGADQEHKTDEMHTALMEACMDGHVEVARLLLDSGAQVNMPADSFESPLTLAACGGHVELAALLIERGANLEEVNDEGYTPLMEAAREGHEEMVALLLAQGANINAQTEETQETALTLACCGGFSEVADFLIKAGADIELGCSTPLMEASQEGHLELVKYLLASGANVHATTATGDTALTYACENGHTDVADVLLQAGADLDKQEDMKTILEGIDPAKHQVRVAFDACKLLRKE

SEQ ID NO: 37447 - protein, 627 aa, Homo sapiens
MLTDSGGGGTSFEEDLDSVAPRSAPAGASEPPPPGGVGLGIRTVRLFGEAGPASGVGSSGGGGSGSGTGGGDAALDFKLAAAVLRTGGGGGASGSDEDEVSEVESFILDQEDLDNPVLKTTSEIFLSSTAEGADLRTVDPETQARLEALLEAAGIGKLSTADGKAFADPEVLRRLTSSVSCALDEAAAALTRMKAENSHNAGQVDTRSLAEACSDGDVNAVRKLLDEGRSVNEHTEEGESLLCLACSAGYYELAQVLLAMHANVEDRGNKGDITPLMAASSGGYLDIVKLLLLHDADVNSQSATGNTALTYACAGGFVDIVKVLLNEGANIEDHNENGHTPLMEAASAGHVEVARVLLDHGAGINTHSNEFKESALTLACYKGHLDMVRFLLEAGADQEHKTDEMHTALMEACMDGHVEVARLLLDSGAQVNMPADSFESPLTLAACGGHVELAALLIERGANLEEVNDEGYTPLMEAAREGHEEMVALLLAQGANINAQTEETQETALTLACCGGFSEVADFLIKAGADIELGCSTPLMEASQEGHLELVKYLLASGANVHATTATGDTALTYACENGHTDVADVLLQAGADLDKQEDMKTILEGIDPAKHQVRVAFDACKLLRKE

SEQ ID NO: 37448 - protein, 1486 aa, Homo sapiens
PRVGRHRLRLRVRTMLTDSGGGGTSFEEDLDSVAPRSAPAGASEPPPPGGVGLGIRTVRLFGEAGPASGVGSSGGGGSGSGTGGGDAALDFKLAAAVLRTGGGGGASGSDEDEVSEVESFILDQEDLDNPVLKTTSEIFLSSTAEGADLRTVDPETQARLEALLEAAGIGKLSTADGKAFADPEVLRRLTSSVSCALDEAAAALTRMKAENSHNAGQVDTRSLAEACSDGDVNAVRKLLDEGRSVNEHTEEGESLLCLACSAGYYELAQVLLAMHANVEDRGNKGDITPLMAASSGGYLDIVKLLLLHDADVNSQSATGNTALTYACAGGFVDIVKVLLNEGANIEDHNENGHTPLMEAASAGHVEVARVLLDHGAGINTHSNEFKESALTLACYKGHLDMVRFLLEAGADQEHKTDEMHTALMEACMDGHVEVARLLLDSGAQVNMPADSFESPLTLAACGGHVELAALLIERGANLEEVNDEGYTPLMEAAREGHEEMVALLLAQGANINAQTEETQETALTLACCGGFSEVADFLIKAGADIELGCSTPLMEASQEGHLELVKYLLASGANVHATTATGDTALTYACENGHTDVADVLLQAGADLDKQEDMKTILEGIDPAKHQEHESEGGRTPLMKAARAGHLCTVQFLISKGANVNRATANNDHTVVSLACAGGHLAVVELLLAHGADPTHRLKDGSTMLIEAAKGGHTNVVSYLLDYPNNVLSVPTTDVSQLPPPSQDQSQVPRVPTHTLAMVVPPQEPDRTSQENSPALLGVQKGTSKQKSSSLQVADQDLLPSFHPYQPLECIVEETEGKLNELGQRISAIEKAQLKSLELIQGEPLNKDKIEELKKNREEQVQKKKKILKELQKVERQLQMKTQQQFTKEYLETKGQKDTVSLHQQCSHRGVFPEGEGDGSLPEDHFSELPQVDTILFKDNDVDDEQQSPPSAEQIDFVPVQPLSSPQCNFSSDLGSNGTNSLELQKVSGNQQIVGQPQIAITGHDQGLLVQEPDGLMVATPAQTLTDTLDDLIAAVSTRVPTGSNSSSQTTECLTPESCSQTTSNVASQSMPPVYPSVDIDAHTESNHDTALTLACAGGHEELVSVLIARDAKIEHRDKKGFTPLILAATAGHVGVVEILLDKGGDIEAQSERTKDTPLSLACSGGRQEVVDLLLARGANKEHRNVSDYTPLSLAASGGYVNIIKILLNAGAEINSRTGSKLGISPLMLAAMNGHVPAVKLLLDMGSDINAQIETNRNTALTLACFQGRAEVVSLLLDRKANVEHRAKTGLTPLMEAASGGYAEVGRVLLDKGADVNAPPVPSSRDTALTIAADKGHYKFCELLIHRGAHIDVRNKKGNTPLWLASNGGHFDVVQLLVQAGADVDAADNRKITPLMSAFRKGHVKVVQYLVKEVNQFPSDIECMRYIATITDKELLKKCHQCVETIVKAKDQQAAEANKNASILLKELDLEKSREESRKQALAAKR

SEQ ID NO: 37449 - protein, 620 aa, Homo sapiens
MSLAQQKADKNKINGEPRGGGAGGNSDSDNLDSTDCNSESSSGGKSQELNFVMDVNSSKYPSLLLHSQEEKTSTATSKTQTRLEGEVTPNSLSTSYKTVSLPLSSPNIKLNLTSPKRGQKREEGWKEVVRRSKKLSVPASVVSRIMGRGGCNITAIQDVTGAHIDVDKQKDKNGERMITIRGGTESTRYAVQLINALIQDPAKELEDLIPKNHIRTPASTKSIHANFSSGVGTTAASSKNAFPLGAPTLVTSQATTLSTFQPANKLNKNVPTNVRSSFPVSLPLAYPHPHFALLAAQTMQQIRHPRLPMAQFGGTFSPSPNTWGPFPVRPVNPGNTNSSPKHNNTSRLPNQNGTVLPSESAGLATASCPITVSSVVAASQQLCVTNTRTPSSVRKQLFACVPKTSPPATVISSVTSTCSSLPSVSSAPITSGQAPTTFLPASTSQAQLSSQKMESFSAVPPTKEKVSTQDQPMANLCTPSSTANSCSSSASNTPGAPETHPSSSPTPTSSNTQEEAQPSSVSDLSPMSMPFASNSEPAPLTLTSPRMVAADNQDTSNLPQLAVPAPRVSHRMQPRGSFYSMVPNATIHQDPQSIFVTNPVTLWEAEASGLHEVRSLRQAW

SEQ ID NO: 37450 - protein, 866 aa, Homo sapiens
MDVNSSKYPSLLLHSQEEKTSTATSKTQTRLEGEVTPNSLSTSYKTVSLPLSSPNIKLNLTSPKRGQKREEGWKEVVRRSKKLSVPASVVSRIMGRGGCNITAIQDVTGAHIDVDKQKDKNGERMITIRGGTESTRYAVQLINALIQDPAKELEDLIPKNHIRTPASTKSIHANFSSGVGTTAASSKNAFPLGAPTLVTSQATTLSTFQPANKLNKNVPTNVRSSFPVSLPLAYPHPHFALLAAQTMQQIRHPRLPMAQFGGTFSPSPNTWGPFPVRPVNPGNTNSSPKHNNTSRLPNQNGTVLPSESAGLATASCPITVSSVVAASQQLCVTNTRTPSSVRKQLFACVPKTSPPATVISSVTSTCSSLPSVSSAPITSGQAPTTFLPASTSQAQLSSQKMESFSAVPPTKEKVSTQDQPMANLCTPSSTANSCSSSASNTPGAPETHPSSSPTPTSSNTQEEAQPSSVSDLSPMSMPFASNSEPAPLTLTSPRMVAADNQDTSNLPQLAVPAPRVSHRMQPRGSFYSMVPNATIHQDPQSIFVTNPVTLTPPQGPPAAVQLSSAVNIMNGSQMHINPANKSLPPTFGPATLFNHFSSLFDSSQVPANQGWGDGPLSSRVATDASFTVQSAFLGNSVLGHLENMHPDNSKAPGFRPPSQRVSTSPVATSAPPTLGQPKGVSASQDRKIPPPIGTERLARIRQGGSVAQAPAGTSFVAPVGHSGIWSFGVNAVSEGLSGWSQSVMGNHPMHQQLSDPSTFSQHQPMERDDSGMVAPSNIFHQPMASGFVDFSKGLPISMYGGTIIPSHPQLADVPGGPLFNGLHNPDPAWNPMIKVIQNSTECTDAQQIWPGTWAPHIGNMHLKYVN

SEQ ID NO: 37451 - protein, 765 aa, Homo sapiens
MAADPTELRLGSLPVFTRDDFEGDWRLVASGGFSQVFQARHRRWRTEYAIKCAPCLPPDAASSDVNYLIEEAAKMKKIKFQHIVSIYGVCKQPLGIVMEFMANGSLEKVLSTHSLCWKLRFRIIHETSLAMNFLHSIKPPLLHLDLKPGNILLDSNMHVKISDFGLSKWMEQSTRMQYIERSALRGMLSYIPPEMFLESNKAPGPKYDVYSFAIVIWELLTQKKPYSGFNMMMIIIRVAAGMRPSLQPVSDQWPSEAQQMVDLMKRCWDQDPKKRPCFLDITIETDILLSLLQSRVAVPESKALARKVSCKLSLRQPGEVNEDISQELMDSDSGNYLKRALQLSDRKNLVPRDEELCIYENKVTPLHFLVAQGSVEQVRLLLAHEVDVDCQTASGYTPLLIAAQDQQPDLCALLLAHGADANRVDEDGWAPLHFAAQNGDDGTARLLLDHGACVDAQEREGWTPLHLAAQNNFENVARLLVSRQADPNLHEAEGKTPLHVAAYFGHVSLVKLLTSQGAELDAQQRNLRTPLHLAVERGKVRAIQHLLKSGAVPDALDQSGYGPLHTAAARGKYLICKMLLRYGASLELPTHQGWTPLHLAAYKGHLEIIHLLAESHANMGALGAVNWTPLHLAARHGEEAVVSALLQCGADPNAAEQSGWTPLHLAVQRSTFLSVINLLEHHANVHARNKVGWTPAHLAALKGNTAILKVLVEAGAQLDVQDGVSCTPLQLALRSRKQGIMSFLEGKEPSVATLGGSKPGAEMEI

SEQ ID NO: 37452 - protein, 335 aa, Homo sapiens
MAEGGSPDGRAGPGSAGRNLKEWLREQFCDHPLEHCEDTRLHDAAYVGDLQTLRSLLQEESYRSRINEKSVWCCGWLPCTPLRIAATAGHGSCVDFLIRKGAEVDLVDVKGQTALYVAVVNGHLESTQILLEAGADPNGSRHHRSTPVYHASRVGRADILKALIRYGADVDVNHHLTPDVQPRFSRRLTSLVVCPLYISAAYHNLQCFRLLLLAGANPDFNCNGPVNTQGFYRGSPGCVMDAVLRHGCEAAFVSLLVEFGANLNLVKWESLGPESRGRRKVDPEALQVFKEARSVPRTLLCLCRVAVRRALGKHRLHLIPSLPLPDPIKKFLLHE

SEQ ID NO: 37453 - protein, 302 aa, Homo sapiens
MLQLTGENEKNCEVSERIRRSGPWKEISFGDYICHTFQGDCWADRSPLHEAAAQGRLLALKTLIAQGVNVNLVTINRVSSLHEACLGGHVACAKALLENGAHVNGVTVHGATPLFNACCSGSAACVNVLLEFGAKAQLEVHLASPIHEAVKRGHRECMEILLANNVNIDHEVPQLGTPLYVACTYQRVDCVKKLLELGASVDHGQWLDTPLHAAARQSNVEVIHLLTDYGANLKRRNAQGKSALDLAAPKSSVEQALLLREGPPALSQLCRLCVRKCLGRACHQAIHKLHLPEPLERFLLYQ

SEQ ID NO: 37454 - protein, 323 aa, Homo sapiens
MEDGPVFYGFKNIFITMFATFFFFKLLIKVFLALLTHFYIVKGNRKEAARIAEEIYGGISDCWADRSPLHEAAAQGRLLALKTLIAQGVNVNLVTINRVSSLHEACLGGHVACAKALLENGAHVNGVTVHGATPLFNACCSGSAACVNVLLEFGAKAQLEVHLASPIHEAVKRGHRECMEILLANNVNIDHEVPQLGTPLYVACTYQRVDCVKKLLELGASVDHGQWLDTPLHAAARQSNVEVIHLLTDYGANLKRRNAQGKSALDLAAPKSSVEQALLLREGPPALSQLCRLCVRKCLGRACHQAIHKLHLPEPLERFLLYQ

SEQ ID NO: 37455 - protein, 302 aa, Homo sapiens; identical to SEQ ID NO: 37453

SEQ ID NO: 37456 - protein, 306 aa, Homo sapiens
MEDGPVFYGFKNIFITMFATFFFFKLLIKVFLALLTHFYIVKGNRKEAARIAEEIYGGISDCWADRSPLHEAAAQGRLLALKTLIAQACLGGHVACAKALLENGAHVNGVTVHGATPLFNACCSGSAACVNVLLEFGAKAQLEVHLASPIHEAVKRGHRECMEILLANNVNIDHEVPQLGTPLYVACTYQRVDCVKKLLELGASVDHGQWLDTPLHAAARQSNVEVIHLLTDYGANLKRRNAQGKSALDLAAPKSSVEQALLLREGPPALSQLCRLCVRKCLGRACHQAIHKLHLPEPLERFLLYQ

SEQ ID NO: 37457 - protein, 587 aa, Homo sapiens
MTRFSYAEYFSLFHSCSAPSRSTAPPESSPARAPMGLFQGVMQKYSSSLFKTSQLAPADPLIKAIKDGDEEALKTMIKEGKNLAEPNKEGWLPLHEAAYYGQVGCLKVLQRAYPGTIDQRTLQEETAVYLATCRGHLDCLLSLLQAGAEPDISNKSRETPLYKACERKNAEAVKILVQHNADTNHRCNRGWTALHESVSRNDLEVMQILVSGGAKVESKNAYGITPLFVAAQSGQLEALRFLAKYGADINTQASDNASALYEACKNEHEEVVEFLLSQGADANKTNKDGLLPLHIASKKGNYRIVQMLLPVTSRTRIRRSGVSPLHLAAERNHDEVLEALLSARFDVNTPLAPERARLYEDRRSSALYFAVVNNNVYATELLLQHGADPNRDVISPLLVAIRHGCLRTMQLLLDHGANIDAYIATHPTAFPATIMFAMKCLSLLKFLMDLGCDGEPCFSCLYGNGPHPPAPQPSSRFNDAPAADKEPSVVQFCEFVSAPEVSRWAGPIIDVLLDYVGNVQLCSRLKEHIDSFEDWAVIKEKAEPPRPLAHLCRLRVRKAIGKYRIKLLDTLPLPGRLIRYLKYENTQ
